United States Patent Application Publication US 2011/0183924 A1 - sequence listing, part 240

SEQ ID NO: 658567 - DNA, 7523 bp, Homo sapiens
atggaggaggtggtgattgccggcatgttcgggaagctgccagagtcggagaacttgcaggagttctgggacaacctcatcggcggtgtggacatggtcacggacgatgaccgtcgctggaaggctgggctctacggcctgccccggcggtccggcaagctgaaggacctgtctaggtttgatgcctccttcttcggagtccaccccaagcaggcacacacgatggaccctcagctgcggctgctgctggaagctacctatgaagccatcgtggacggaggcatcaacccagattcactccgaggaacacacactggcgtctgggtgggcgtgagcggctctgagacctcggaggccctgagccgagaccccgagacactcgtgggctacagcatggtgggctgccagcgagcgatgatggccaaccggctctccttcttcttcgacttcagagggcccagcatcgcactggacacagcctgctcctccagcctgatggccctgcagaacgcctaccaggccatccacagcgggcagtgccctgccgccatcgtggggggcatcaacgtcctgctgaagcccaacacctccgtgcagttcttgaggctggggatgctcagccccgagggcacctgcaaggccttcgacacagcggggaatgggtactgccgctcggagggtgtggtggctgtcctgctgaccaagaagtccctggcccggaaggtctacaccaccatcctgaacaaaggcaccaatacagatggcttcaaggagcaaggcgtgaccttccctcaggatatccaggagcagcctatccgctcgttgtaccagtcggccggagtggcccctgagtcatttgaatacatcgaagcccacggaccaggcaccaaggtgggcgacccccaggagcgtaatggcatcacccgagccctgtgcgccacccgccaggagccgctgctcatcggctccaccaagtccaacatggggcacccggagccagcctcggggctcgacgccctggccaaggtgctgctgtccctggagcacgggctctgggcccccaacctgcacttccatagccccaaccctgagatcccagcgctgttggatgggcggctgcaggtggtggaccagcccctgcccgtccgtggcggcaacgtgggcatcaactcctttggcttcgggggctccaacatgcacatcatcctgaggcccaacacgcagtccgcccccgcacccgccccacatgccaccctgccccgtctgctgcgggccagcggacgcacccctgaggccgtgcagaagctgctggagcagggcctccggcacagccagggcctggctttcctgagcatgctgaacgacatcgcggctgtccccgccaccgccatgcccttccgtggctacgctgtgctgggtggtgagacgcggtggcccagagtgcagcaggtgcccgctggcgagcgcccgctctggttcatctgctctgggatgggcacacagtggcgtggaatggggctgagccttatgcgcctggaccgcttccgagattccatcctacgctccgatgaggctgtgaaccgattcggcctgaaggtgtcacagctgctgctgagcacagacgagagcacctttgatgacatcgtccattcgtttgtgagcctgactgccatccagataggcctcatagacctgctgagctgcatgggacctgaggcagatggcatcgtcggccactccctgggggagtggctgtcggtacgcgacggctgcctgtcccaggaggaggccgtcctcgctgcctactggaggggacagtgcatcaaagaagccccacttcccgccggcgccatggcagccgtgggcttgtcctgggaggagtgtaaacagcgctgcccccctgcggtggtgcccgcctgccacaactccaaggacacagtcaccatctcgggacctcaggccccggtgtttgagttcgtggagcagctgaggaaggagggtgtgtttgccaaggaggtgcggaccggcggtatggccttccactcctacttcatggaggccatcgcacccccactgctgcaggagctcaagaaggtgatccgggagccgaagccacgttcagcccgctggctcagcacctctatccccgaggcccagtggcacagcagcctggcacgcacgtcttccgccgagtacaatgtcaacaacctggtgagccctgtgctgttccaggaggccctgtggcacgtgcctgagcacgcggtggtgctggagatcgccccgaccccgtgccctcaggctgtcctgaagcgggtccgtaagccgagctgcaccatcatcccccgtatgaagaaggatcacagggacaacctggagttcttcctggccggcatcggcaggctgcacctctcaggcatcgacgccaaccccaatgccttgttcccacctgtggagtccccagctccccgaggaactcccctcatctccccactcatcaagtgggaccacagcctggcctgggacgcgccggccgccgaggacttccccaacggttcaggttccccctcagccaccatctacacatgcacaccaagctccgagtctcctgaccgctacctggtggaccacaccatcgacggtcgcgtcctcttccccgccactggctacctgagcatagtgtggaagacgctggcccgcgcctgggctgggctcgagcagctgcctgtggtgtttgaggatgtggtgcagcaccaggccaccatcctgcccaagactgggacagtgtccttggaggtacggctcctggaggccaccggtgccttcgaggtgtcagagaacggcaacctggtagtgagtgggaaggtgtaccagtgggatgaccctgaccccaggctcttcgaccacccggaaagtccccaccccaattccccacggagtcccctcttcctggcccaggcagaagtttacaaggagctgcgtctgcgtggctacgactacggccctcatttccagggcatcctggaggccagcctggaaggtgactcggggaggctgctgtggaaggataactgggtgagcttcatggacaccatgctgcagatgtccatcctgggctcggccaagcacggcctgtacctacccacccgtgtcaccgccatccacatcgaccctgccacccacaggcagaagctgtacacactgcaggacaaggcccaagtggctgacgtggtggtgagcaggtggccgagggtcacagtggcgggaggcgtccacatctccgggctccacactgagtcggccccgcggcggcagcaggagcagcaggtgcccatcctggagaagttttgcttcactccccacacggaggaggggtgcctgtctgagcgcgctgccctgcaggaggagctgcaactgtgcaaggggctggtgcaggcactgcagaccaaggtgacccagcaggggctgaagatggtggtgcccggactggatggggcccagatcccccgggacccctcacagcaggaactgccccggctgttgtcggctgcctgcaggcttcagctcaacgggaacctgcagctggagctggcgcaggtgctggcccaggagaggcccaagctgccagaggaccctctgctcagcggcctcctggactccccggcactcaaggcctgcctggacactgccgtggagaacatgcccagcctgaagatgaaggtggtggaggtgctggctggccacggtcacctgtattcccgcatcccaggcctgctcagcccccatcccctgctgcagctgagctacacggccaccgaccgccacccccaggccctggaggctgccaggccgagctgcagcagcacgacgttgcccagggccagtgggatcccgcagaccctgcccccagcgccctgggcagcgccgacctcctggtgtgcaactgtgctgtggctgccctcggggacccggcctcagctctcagcaacatggtggctgccctgagagaagggggctttctgctcctgcacacactgctccgggggcaccccctcggggacatcgtggccttcctcacctccactgagccgcagtatggccagggcatcctgagccaggacgcgtgggagagcctcttctccagggtgtcgctgcgcctggtgggcctgaagaagtccttctacggctccacgctcttcctgtgccgccggcccaccccgcaggacagccccatcttcctgccggtggacgataccagcttccgctgggtggagtctctgaagggcatcctggctgacgaagactcttcccggcctgtgtggctgaaggccatcaactgtgccacctcgggcgtggtgggcttggtgaactgtctccgccgagagcccggcgggaaccgcctccggtgtgtgctgctctccaacctcagcagcacctcccacgtcccggaggtggacccgggctccgcagaactgcagaaggtgttgcagggagacctggtgatgaacgtctaccgcgacggggcctggggggctttccgccacttcctgctggaggaggacaagcctgaggagccgacggcacatgcctttgtgagcaccctcacccggggggacctgtcctccatccgctgggtctgctcctcgctgcgccatgcccagcccacctgccctggcgcccagctctgcacggtctactacgcctccctcaacttccgcgacatcatgctggccactggcaagctgtcccctgatgccatcccagggaagtggacctcccaggacagcctgctaggtatggagttctcgggccgagacgccagcggcaagcgtgtgatgggactggtgcctgccaagggcctggccacctctgtcctgctgtcaccggacttcctctgggatgtgccttccaactggacgctggaggaggcggcctcggtgcctgtcgtctacagcacggcctactacgcgctggtggtgcgtgggcgggtgcgccccggggagacgctgctcatccactcgggctcgggcggcgtgggccaggccgccatcgccatcgccctcagtctgggctgccgcgtcttcaccaccgtggggtcggctgagaagcgggcgtacctccaggccaggttcccccagctcgacagcaccagcttcgccaactcccgggacacatccttcgagcagcatgtgctgtggcacacgggcgggaagggcgttgacctggtcttgaactccttggcggaagagaagctgcaggccagcgtgaggtgcttggctacgcacggtcgcttcctggaaattggcaaattcgacctttctcagaaccacccgctcggcatggctatcttcctgaagaacgtgacattccacggggtcctactggatgcgttcttcaacgagagcagtgctgactggcgggaggtgtgggcgcttgtgcaggccggcatccgggatggggtggtacggcccctcaagtgcacggtgttccatggggcccaggtggaggacgccttccgctacatggcccaagggaagcacattggcaaagtcgtcgtgcaggtgcttgcggaggagccggaggcagtgctgaagggggccaaacccaagctgatgtcggccatctccaagaccttctgcccggcccacaagagctacatcatcgctggtggtctgggtggcttcggcctggagttggcgcagtggctgatacagcgtggggtgcagaagctcgtgttgacttctcgctccgggatccggacaggctaccaggccaagcaggtccgccggtggaggcgccagggcgtacaggtgcaggtgtccaccagcaacatcagctcactggagggggcccggggcctcattgccgaggcggcgcagcttgggcccgtgggcggcgtcttcaacctggccgtggtcttgagagatggcttgctggactcgctcatgagcgtggaggtgcgccagacgctggagcgtgagctcaacctggtgctgtccgtgcgcgaggtgcggcaactcacgctccggaaactgcaggagctgtcctcaaaggcggatgaggccagcgagctggcatgccccacgcccaaggaggatggtctggcccagcagcagactcagctgaacctgcgctccctgctggtgaacccggagggccccaccctgatgcggctcaactccgtgcagagctcggagcggcccctgttcctggtgcacccaatcgagggctccaccaccgtgttccacagcctggcctcccggctcagcatccccacctatggcctgcagtgcacccgagctgcgccccttgacagcatccacagcctggctgcctactacatcgactgcatcaggcaggtgcagcccgagggcccctaccgcgtggccggctactcctacggggcctgcgtggcctttgaaatgtgctcccagctgcaggcccagcagagcccagcccccacccacaacagcctcttcctgttcgacggctcgcccacctacgtactggcctacacccagagctaccgggcaaagctgaccccaggctgtgaggctgaggctgagacggaggccatatgcttcttcgtgcagcagttcacggacatggagcacaacagggtgctggaggcgctgctgccgctgaagggcctagaggagcgtgtggcagccgccgtggacctgatcatcaagagccaccagggcctggaccgccaggagctgagctttgcggcccggtccttctactacaagctgcgtgccgctgagcagtacacacccaaggccaagtaccatggcaacgtgatgctactgcgcgccaagacgggtggcgcctacggcgaggacctgggcgcggactacaacctctcccaggtatgcgacgggaaagtatccgtccacgtcatcgagggtgaccaccgcacgctgctggagggcagcggcctggagtccatcatcagcatcatccacagctccctggctgagccacgcgtgagcgtgcgggagggctaggcccgtgcccccgcctgccaccggaggtcactccaccatccccaccccaccccaccccacccccgccatgcaacgggattgaagggtcctgccggtgggaccctgtccggcccagtgccactgccccccgaggctgctagatgtaggtgttaggcatgtcccacccacccgccgcctcccacggcacctcggggacaccagagctgccgacttggagactcctggtctgtgaagagccggtggtgcccgtgcccgcaggaactgggctgggcctcgtgcgcccgtggggtctgcgcttggtctttctgtgcttggatttgcatatttattgcattgctggtagagacccccaggcctgtccaccctgccaagactcctcaggcagcgtgtgggtcccgcactctgcccccatttccccatttccccgtggggtgctgcccttatgcccggcgccgggcaccaactccatgtttggtgtttgtctgtgtttgtttttcaagaaatgattcaaattgc

SEQ ID NO: 658568 - DNA, 453 bp, Homo sapiens
ctttcgtcatagctgactcttgaggataaacaactgacgggcgagccgcgaagctggagctggctgtttcccgggctgaaaacctcctgccatagataccttttgctgcaagggagccttctgagtcattagctcctgttgatgcagggctgtggccagctgttgctgttgctgttgttgctgctgctgctgctgcagaagaaattctgcattagctgctgttgagagcctacttgggacaccacagggaactgagcaattgctggttgctgggttgctggatgtactgcctgaaactgctgagtctgggcctgctgctgctggtaaaacgtgcctgccggctgctgctgtgctggcggtggctgttgctgctgctgttgctgcttgaggaagagttgctgctggtgctggggtgtggcctgggcctgagcgggcagaccctgggcctgagta

SEQ ID NO: 658569 - DNA, 209 bp, Homo sapiens
tcgagctcggcaccacttaggacgagataccccaagtagcggcgagcgtaacggggcccaagcccaaaccggatgaaggaaactttgccggggttgaggactgccatacgaactagcccattagccgaaattcctgggaaggaatgccgaagaatgtgaaagccatgtaagcgaaaatggaaaagggacaggcagctcgcccctgagtt

SEQ ID NO: 658570 - DNA, 1597 bp, Homo sapiens
cgggtgccattctgagcgttcttaccccgactcccacctgacgtagcaccgtggggacctgcgtgcgtgtctgtgtgtccttgcgtgggtgccagggctctgcacccagaccagcctggcatctgcccctgtcttcacagagctggcatgccccacgcccaaggaggatggtctggcccagcagcagactcagctgaacctgcgctccctgctggtgaacccggagggccccaccctgatgcggctcaactccgtgcagagctcggagcggcccctgttcctggtgcacccaatcgagggctccaccaccgtgttccacagcctggcctcccggctcagcatccccacctatggcctgcagtgcacccgagctgcgccccttgacagcatccacagcctggctgcctactacatcgactgcatcaggcaggtgcagcccgagggcccctaccgcgtggccggctactcctacggggcctgcgtggcctttgaaatgtgctcccagctgcaggcccagcagagcccagcccccacccacaacagcctcttcctgttcgacggctcgcccacctacgtactggcctacacccagagctaccgggcaaagctgaccccaggctgtgaggctgaggctgagacggaggccatatgcttcttcgtgcagcagttcacggacatggagcacaacagggtgctggaggcgctgctgccgctgaagggcctagaggagcgtgtggcagccgccgtggacctgatcatcaagagccaccagggcctggaccgccaggagctgagctttgcggcccggtccttctactacaagctgcgtgccgctgagcagtacacacccaaggccaagtaccatggcaacgtgatgctactgcgcgccaagacgggtggcgcctacggcgaggacctgggcgcggactacaacctctcccaggtatgcgacgggaaagtatccgtccacgtcatcgagggtgaccaccgcacgctgctggagggcagcggcctggagtccatcatcagcatcatccacagctccctggctgagccacgcgtgagcgtgcgggagggctaggcccgtgcccccgcctgccaccggaggtcactccaccatccccaccccaccccaccccacccccgccatgcaacgggattgaagggtcctgccggtgggaccctgtccggcccagtgccactgccccccgaggctgctagatgtaggtgttaggcatgtcccacccacccgccgcctcccacggcacctcggggacaccagagctgccgacttggagactcctggtctgtgaagagccggtggtgcccgtgcccgcaggaactgggctgggcctcgtgcgcccgtggggtctgcgcttggtctttctgtgcttggatttgcatatttattgcattgctggtagagacccccaggcctgtccaccctgccaagactcctcaggcagcgtgtgggtcccgcactctgcccccatttccccatttccccgtggggtgctgcccttatgcccggcgccgggcaccaactccatgtttggtgtttgtctgtgtttgtttttcaagaaatgattcaaattgc

SEQ ID NO: 658571 - DNA, 6477 bp, Homo sapiens
atggaggaggtggtgattgccggcatgttcgggaagctgccagagtcggagaacttgcaggagttctgggacaacctcatcggcggtgtggacatggtcacggacgatgaccgtcgctggaaggctgggctctacggcctgccccggcggtccggcaagctgaaggacctgtctaggtttgatgcctccttcttcggagtccaccccaagcaggcacacacgatggaccctcagctgcggctgctgctggaagctacctatgaagccatcgtggacggaggcatcaacccagattcactccgaggaacacacactggcgtctgggtgggcgtgagcggctctgagacctcggaggccctgagccgagaccccgagacactcgtgggctacagcatggtgggctgccagcgagcgatgatggccaaccggctctccttcttcttcgacttcagagggcccagcatcgcactggacacagcctgctcctccagcctgatggccctgcagaacgcctaccaggccatccacagcgggcagtgccctgccgccatcgtggggggcatcaacgtcctgctgaagcccaacacctccgtgcagttcttgaggctggggatgctcagccccgagggcacctgcaaggccttcgacacagcggggaatgggtactgccgctcggagggtgtggtggctgtcctgctgaccaagaagtccctggcccggaaggtctacaccaccatcctgaacaaaggcaccaatacagatggcttcaaggagcaaggcgtgaccttccctcaggatatccaggagcagcctatccgctcgttgtaccagtcggccggagtggcccctgagtcatttgaatacatcgaagcccacggaccaggcaccaaggtgggcgacccccaggagcgtaatggcatcacccgagccctgtgcgccacccgccaggagccgctgctcatcggctccaccaagtccaacatggggcacccggagccagcctcggggctcgacgccctggccaaggtgctgctgtccctggagcacgggctctgggcccccaacctgcacttccatagccccaaccctgagatcccagcgctgttggatgggcggctgcaggtggtggaccagcccctgcccgtccgtggcggcaacgtgggcatcaactcctttggcttcgggggctccaacatgcacatcatcctgaggcccaacacgcagtccgcccccgcacccgccccacatgccaccctgccccgtctgctgcgggccagcggacgcacccctgaggccgtgcagaagctgctggagcagggcctccggcacagccagggcctggctttcctgagcatgctgaacgacatcgcggctgtccccgccaccgccatgcccttccgtggctacgctgtgctgggtggtgagacgcggtggcccagagtgcagcaggtgcccgctggcgagcgcccgctctggttcatctgctctgggatgggcacacagtggcgtggaatggggctgagccttatgcgcctggaccgcttccgagattccatcctacgctccgatgaggctgtgaaccgattcggcctgaaggtgtcacagctgctgctgagcacagacgagagcacctttgatgacatcgtccattcgtttgtgagcctgactgccatccagataggcctcatagacctgctgagctgcatgggacctgaggcagatggcatcgtcggccactccctgggggagtggctgtcggtacgcgacggctgcctgtcccaggaggaggccgtcctcgctgcctactggaggggacagtgcatcaaagaagccccacttcccgccggcgccatggcagccgtgggcttgtcctgggaggagtgtaaacagcgctgcccccctgcggtggtgcccgcctgccacaactccaaggacacagtcaccatctcgggacctcaggccccggtgtttgagttcgtggagcagctgaggaaggagggtgtgtttgccaaggaggtgcggaccggcggtatggccttccactcctacttcatggaggccatcgcacccccactgctgcaggagctcaagaaggtgatccgggagccgaagccacgttcagcccgctggctcagcacctctatccccgaggcccagtggcacagcagcctggcacgcacgtcttccgccgagtacaatgtcaacaacctggtgagccctgtgctgttccaggaggccctgtggcacgtgcctgagcacgcggtggtgctggagatcgccccgaccccgtgccctcaggctgtcctgaagcgggtccgtaagccgagctgcaccatcatcccccgtatgaagaaggatcacagggacaacctggagttcttcctggccggcatcggcaggctgcacctctcaggcatcgacgccaaccccaatgccttgttcccacctgtggagtccccagctccccgaggaactcccctcatctccccactcatcaagtgggaccacagcctggcctgggacgcgccggccgccgaggacttccccaacggttcaggttccccctcagccaccatctacacatgcacaccaagctccgagtctcctgaccgctacctggtggaccacaccatcgacggtcgcgtcctcttccccgccactggctacctgagcatagtgtggaagacgctggcccgcgcctgggctgggctcgagcagctgcctgtggtgtttgaggatgtggtgcagcaccaggccaccatcctgcccaagactgggacagtgtccttggaggtacggctcctggaggccaccggtgccttcgaggtgtcagagaacggcaacctggtagtgagtgggaaggtgtaccagtgggatgaccctgaccccaggctcttcgaccacccggaaagtccccaccccaattccccacggagtcccctcttcctggcccaggcagaagtttacaaggagctgcgtctgcgtggctacgactacggccctcatttccagggcatcctggaggccagcctggaaggtgactcggggaggctgctgtggaaggataactgggtgagcttcatggacaccatgctgcagatgtccatcctgggctcggccaagcacggcctgtacctacccacccgtgtcaccgccatccacatcgaccctgccacccacaggcagaagctgtacacactgcaggacaaggcccaagtggctgacgtggtggtgagcaggtggccgagggtcacagtggcgggaggcgtccacatctccgggctccacactgagtcggccccgcggcggcagcaggagcagcaggtgcccatcctggagaagttttgcttcactccccacacggaggaggggtgcctgtctgagcgcgctgccctgcaggaggagctgcaactgtgcaaggggctggtgcaggcactgcagaccaaggtgacccagcaggggctgaagatggtggtgcccggactggatggggcccagatcccccgggacccctcacagcaggaactgccccggctgttgtcggctgcctgcaggcttcagctcaacgggaacctgcagctggagctggcgcaggtgctggcccaggagaggcccaagctgccagaggaccctctgctcagcggcctcctggactccccggcactcaaggcctgcctggacactgccgtggagaacatgcccagcctgaagatgaaggtggtggaggtgctggctggccacggtcacctgtattcccgcatcccaggcctgctcagcccccatcccctgctgcagctgagctacacggccaccgaccgccacccccaggccctggaggctgccaggccgagctgcagcagcacgacgttgcccagggccagtgggatcccgcagaccctgcccccagcgccctgggcagcgccgacctcctggtgtgcaactgtgctgtggctgccctcggggacccggcctcagctctcagcaacatggtggctgccctgagagaagggggctttctgctcctgcacacactgctccgggggcaccccctcggggacatcgtggccttcctcacctccactgagccgcagtatggccagggcatcctgagccaggacgcgtgggagagcctcttctccagggtgtcgctgcgcctggtgggcctgaagaagtccttctacggctccacgctcttcctgtgccgccggcccaccccgcaggacagccccatcttcctgccggtggacgataccagcttccgctgggtggagtctctgaagggcatcctggctgacgaagactcttcccggcctgtgtggctgaaggccatcaactgtgccacctcgggcgtggtgggcttggtgaactgtctccgccgagagcccggcgggaaccgcctccggtgtgtgctgctctccaacctcagcagcacctcccacgtcccggaggtggacccgggctccgcagaactgcagaaggtgttgcagggagacctggtgatgaacgtctaccgcgacggggcctggggggctttccgccacttcctgctggaggaggacaagcctgaggagccgacggcacatgcctttgtgagcaccctcacccggggggacctgtcctccatccgctgggtctgctcctcgctgcgccatgcccagcccacctgccctggcgcccagctctgcacggtctactacgcctccctcaacttccgcgacatcatgctggccactggcaagctgtcccctgatgccatcccagggaagtggacctcccaggacagcctgctaggtatggagttctcgggccgagacgccagcggcaagcgtgtgatgggactggtgcctgccaagggcctggccacctctgtcctgctgtcaccggacttcctctgggatgtgccttccaactggacgctggaggaggcggcctcggtgcctgtcgtctacagcacggcctactacgcgctggtggtgcgtgggcgggtgcgccccggggagacgctgctcatccactcgggctcgggcggcgtgggccaggccgccatcgccatcgccctcagtctgggctgccgcgtcttcaccaccgtggggtcggctgagaagcgggcgtacctccaggccaggttcccccagctcgacagcaccagcttcgccaactcccgggacacatccttcgagcagcatgtgctgtggcacacgggcgggaagggcgttgacctggtcttgaactccttggcggaagagaagctgcaggccagcgtgaggtgcttggctacgcacggtcgcttcctggaaattggcaaattcgacctttctcagaaccacccgctcggcatggctatcttcctgaagaacgtgacattccacggggtcctactggatgcgttcttcaacgagagcagtgctgactggcgggaggtgtgggcgcttgtgcaggccggcatccgggatggggtggtacggcccctcaagtgcacggtgttccatggggcccaggtggaggacgccttccgctacatggcccaagggaagcacattggcaaagtcgtcgtgcaggtgcttgcggaggagccggaggcagtgctgaagggggccaaacccaagctgatgtcggccatctccaagaccttctgcccggcccacaagagctacatcatcgctggtggtctgggtggcttcggcctggagttggcgcagtggctgatacagcgtggggtgcagaagctcgtgttgacttctcgctccgggatccggacaggctaccaggccaagcaggtccgccggtggaggcgccagggcgtacaggtgcaggtgtccaccagcaacatcagctcactggagggggcccggggcctcattgccgaggcggcgcagcttgggcccgtgggcggcgtcttcaacctggccgtggtcttgagagatggcttgctggagaaccagaccccagagttcttccaggacgtctgcaagcccaagtacagcggcaccctgaacctggacagggtgacccgagaggcgtgccctgagctggactactttgtggtcttctcctctgtgagctgcgggcgtggcaatgcgggacagagcaactacggctttgccaattccgccatggagcgtatctgtgagaaacgccggcacgaaggcctcccaggcctggccgtgcagtggggcgccatcggcgacgtgggcattttggtggagacgatgagcaccaacgacacgatcgtcagtggcacgctgccccagcgcatggcgtcctgcctggaggtgctggacctcttcctgaaccagccccacatggtcctgagcagctttgtgctggctgagaaggctgcggcctatagggacagggacagccagcgggacctggtggaggccgtggcacacatcctgggtgagcactcccagtaggagccgcgccaggtgtttcccctgctggcatcagggtcttgggacatagcagctcgcagtt

SEQ ID NO: 658572 - DNA, 6802 bp, Homo sapiens
atggaggaggtggtgattgccggcatgttcgggaagctgccagagtcggagaacttgcaggagttctgggacaacctcatcggcggtgtggacatggtcacggacgatgaccgtcgctggaaggctgggctctacggcctgccccggcggtccggcaagctgaaggacctgtctaggtttgatgcctccttcttcggagtccaccccaagcaggcacacacgatggaccctcagctgcggctgctgctggaagctacctatgaagccatcgtggacggaggcatcaacccagattcactccgaggaacacacactggcgtctgggtgggcgtgagcggctctgagacctcggaggccctgagccgagaccccgagacactcgtgggctacagcatggtgggctgccagcgagcgatgatggccaaccggctctccttcttcttcgacttcagagggcccagcatcgcactggacacagcctgctcctccagcctgatggccctgcagaacgcctaccaggccatccacagcgggcagtgccctgccgccatcgtggggggcatcaacgtcctgctgaagcccaacacctccgtgcagttcttgaggctggggatgctcagccccgagggcacctgcaaggccttcgacacagcggggaatgggtactgccgctcggagggtgtggtggctgtcctgctgaccaagaagtccctggcccggaaggtctacaccaccatcctgaacaaaggcaccaatacagatggcttcaaggagcaaggcgtgaccttccctcaggatatccaggagcagcctatccgctcgttgtaccagtcggccggagtggcccctgagtcatttgaatacatcgaagcccacggaccaggcaccaaggtgggcgacccccaggagcgtaatggcatcacccgagccctgtgcgccacccgccaggagccgctgctcatcggctccaccaagtccaacatggggcacccggagccagcctcggggctcgacgccctggccaaggtgctgctgtccctggagcacgggctctgggcccccaacctgcacttccatagccccaaccctgagatcccagcgctgttggatgggcggctgcaggtggtggaccagcccctgcccgtccgtggcggcaacgtgggcatcaactcctttggcttcgggggctccaacatgcacatcatcctgaggcccaacacgcagtccgcccccgcacccgccccacatgccaccctgccccgtctgctgcgggccagcggacgcacccctgaggccgtgcagaagctgctggagcagggcctccggcacagccagggcctggctttcctgagcatgctgaacgacatcgcggctgtccccgccaccgccatgcccttccgtggctacgctgtgctgggtggtgagacgcggtggcccagagtgcagcaggtgcccgctggcgagcgcccgctctggttcatctgctctgggatgggcacacagtggcgtggaatggggctgagccttatgcgcctggaccgcttccgagattccatcctacgctccgatgaggctgtgaaccgattcggcctgaaggtgtcacagctgctgctgagcacagacgagagcacctttgatgacatcgtccattcgtttgtgagcctgactgccatccagataggcctcatagacctgctgagctgcatgggacctgaggcagatggcatcgtcggccactccctgggggagtggctgtcggtacgcgacggctgcctgtcccaggaggaggccgtcctcgctgcctactggaggggacagtgcatcaaagaagccccacttcccgccggcgccatggcagccgtgggcttgtcctgggaggagtgtaaacagcgctgcccccctgcggtggtgcccgcctgccacaactccaaggacacagtcaccatctcgggacctcaggccccggtgtttgagttcgtggagcagctgaggaaggagggtgtgtttgccaaggaggtgcggaccggcggtatggccttccactcctacttcatggaggccatcgcacccccactgctgcaggagctcaagaaggtgatccgggagccgaagccacgttcagcccgctggctcagcacctctatccccgaggcccagtggcacagcagcctggcacgcacgtcttccgccgagtacaatgtcaacaacctggtgagccctgtgctgttccaggaggccctgtggcacgtgcctgagcacgcggtggtgctggagatcgccccgaccccgtgccctcaggctgtcctgaagcgggtccgtaagccgagctgcaccatcatcccccgtatgaagaaggatcacagggacaacctggagttcttcctggccggcatcggcaggctgcacctctcaggcatcgacgccaaccccaatgccttgttcccacctgtggagtccccagctccccgaggaactcccctcatctccccactcatcaagtgggaccacagcctggcctgggacgcgccggccgccgaggacttccccaacggttcaggttccccctcagccaccatctacacatgcacaccaagctccgagtctcctgaccgctacctggtggaccacaccatcgacggtcgcgtcctcttccccgccactggctacctgagcatagtgtggaagacgctggcccgcgcctgggctgggctcgagcagctgcctgtggtgtttgaggatgtggtgcagcaccaggccaccatcctgcccaagactgggacagtgtccttggaggtacggctcctggaggccaccggtgccttcgaggtgtcagagaacggcaacctggtagtgagtgggaaggtgtaccagtgggatgaccctgaccccaggctcttcgaccacccggaaagtccccaccccaattccccacggagtcccctcttcctggcccaggcagaagtttacaaggagctgcgtctgcgtggctacgactacggccctcatttccagggcatcctggaggccagcctggaaggtgactcggggaggctgctgtggaaggataactgggtgagcttcatggacaccatgctgcagatgtccatcctgggctcggccaagcacggcctgtacctacccacccgtgtcaccgccatccacatcgaccctgccacccacaggcagaagctgtacacactgcaggacaaggcccaagtggctgacgtggtggtgagcaggtggccgagggtcacagtggcgggaggcgtccacatctccgggctccacactgagtcggccccgcggcggcagcaggagcagcaggtgcccatcctggagaagttttgcttcactccccacacggaggaggggtgcctgtctgagcgcgctgccctgcaggaggagctgcaactgtgcaaggggctggtgcaggcactgcagaccaaggtgacccagcaggggctgaagatggtggtgcccggactggatggggcccagatcccccgggacccctcacagcaggaactgccccggctgttgtcggctgcctgcaggcttcagctcaacgggaacctgcagctggagctggcgcaggtgctggcccaggagaggcccaagctgccagaggaccctctgctcagcggcctcctggactccccggcactcaaggcctgcctggacactgccgtggagaacatgcccagcctgaagatgaaggtggtggaggtgctggctggccacggtcacctgtattcccgcatcccaggcctgctcagcccccatcccctgctgcagctgagctacacggccaccgaccgccacccccaggccctggaggctgccaggccgagctgcagcagcacgacgttgcccagggccagtgggatcccgcagaccctgcccccagcgccctgggcagcgccgacctcctggtgtgcaactgtgctgtggctgccctcggggacccggcctcagctctcagcaacatggtggctgccctgagagaagggggctttctgctcctgcacacactgctccgggggcaccccctcggggacatcgtggccttcctcacctccactgagccgcagtatggccagggcatcctgagccaggacgcgtgggagagcctcttctccagggtgtcgctgcgcctggtgggcctgaagaagtccttctacggctccacgctcttcctgtgccgccggcccaccccgcaggacagccccatcttcctgccggtggacgataccagcttccgctgggtggagtctctgaagggcatcctggctgacgaagactcttcccggcctgtgtggctgaaggccatcaactgtgccacctcgggcgtggtgggcttggtgaactgtctccgccgagagcccggcgggaaccgcctccggtgtgtgctgctctccaacctcagcagcacctcccacgtcccggaggtggacccgggctccgcagaactgcagaaggtgttgcagggagacctggtgatgaacgtctaccgcgacggggcctggggggctttccgccacttcctgctggaggaggacaagcctgaggagccgacggcacatgcctttgtgagcaccctcacccggggggacctgtcctccatccgctgggtctgctcctcgctgcgccatgcccagcccacctgccctggcgcccagctctgcacggtctactacgcctccctcaacttccgcgacatcatgctggccactggcaagctgtcccctgatgccatcccagggaagtggacctcccaggacagcctgctaggtatggagttctcgggccgagacgccagcggcaagcgtgtgatgggactggtgcctgccaagggcctggccacctctgtcctgctgtcaccggacttcctctgggatgtgccttccaactggacgctggaggaggcggcctcggtgcctgtcgtctacagcacggcctactacgcgctggtggtgcgtgggcgggtgcgccccggggagacgctgctcatccactcgggctcgggcggcgtgggccaggccgccatcgccatcgccctcagtctgggctgccgcgtcttcaccaccgtggggtcggctgagaagcgggcgtacctccaggccaggttcccccagctcgacagcaccagcttcgccaactcccgggacacatccttcgagcagcatgtgctgtggcacacgggcgggaagggcgttgacctggtcttgaactccttggcggaagagaagctgcaggccagcgtgaggtgcttggctacgcacggtcgcttcctggaaattggcaaattcgacctttctcagaaccacccgctcggcatggctatcttcctgaagaacgtgacattccacggggtcctactggatgcgttcttcaacgagagcagtgctgactggcgggaggtgtgggcgcttgtgcaggccggcatccgggatggggtggtacggcccctcaagtgcacggtgttccatggggcccaggtggaggacgccttccgctacatggcccaagggaagcacattggcaaagtcgtcgtgcaggtgcttgcggaggagccggaggcagtgctgaagggggccaaacccaagctgatgtcggccatctccaagaccttctgcccggcccacaagagctacatcatcgctggtggtctgggtggcttcggcctggagttggcgcagtggctgatacagcgtggggtgcagaagctcgtgttgacttctcgctccgggatccggacaggctaccaggccaagcaggtccgccggtggaggcgccagggcgtacaggtgcaggtgtccaccagcaacatcagctcactggagggggcccggggcctcattgccgaggcggcgcagcttgggcccgtgggcggcgtcttcaacctggccgtggtcttgagagatggcttgctggagaaccagaccccagagttcttccaggacgtctgcaagcccaagtacagcggcaccctgaacctggacagggtgacccgagaggcgtgccctgagctggactactttgtggtcttctcctctgtgagctgcgggcgtggcaatgcgggacagagcaactacggctttgccaattccgccatggagcgtatctgtgagaaacgccggcacgaaggcctggaccgccaggagctgagctttgcggcccggtccttctactacaagctgcgtgccgctgagcagtacacacccaaggccaagtaccatggcaacgtgatgctactgcgcgccaagacgggtggcgcctacggcgaggacctgggcgcggactacaacctctcccaggtatgcgacgggaaagtatccgtccacgtcatcgagggtgaccaccgcacgctgctggagggcagcggcctggagtccatcatcagcatcatccacagctccctggctgagccacgcgtgagcgtgcgggagggctaggcccgtgcccccgcctgccaccggaggtcactccaccatccccaccccaccccaccccacccccgccatgcaacgggattgaagggtcctgccggtgggaccctgtccggcccagtgccactgccccccgaggctgctagatgtaggtgttaggcatgtgctacgcactctgcggctattacggaaactcggagacactagaattgacgacttgaagactacttgatggtgacaactcacaggtgcctatcgcctaagaacatgtaatgggccctttgcgccacgagatgcttgcgctaggactttgtgatctggccaatcgataattatagcagttgattgaggtg

SEQ ID NO: 658573 - DNA, 4360 bp, Homo sapiens
  misc_feature (4332)..(4332): n is a, c, g, or t
  misc_feature (4334)..(4334): n is a, c, g, or t
atggaggaggtggtgattgccggcatgttcgggaagctgccagagtcggagaacttgcaggagttctgggacaacctcatcggcggtgtggacatggtcacggacgatgaccgtcgctggaaggctgggctctacggcctgccccggcggtccggcaagctgaaggacctgtctaggtttgatgcctccttcttcggagtccaccccaagcaggcacacacgatggaccctcagctgcggctgctgctggaagctacctatgaagccatcgtggacggaggcatcaacccagattcactccgaggaacacacactggcgtctgggtgggcgtgagcggctctgagacctcggaggccctgagccgagaccccgagacactcgtgggctacagcatggtgggctgccagcgagcgatgatggccaaccggctctccttcttcttcgacttcagagggcccagcatcgcactggacacagcctgctcctccagcctgatggccctgcagaacgcctaccaggccatccacagcgggcagtgccctgccgccatcgtggggggcatcaacgtcctgctgaagcccaacacctccgtgcagttcttgaggctggggatgctcagccccgagggcacctgcaaggccttcgacacagcggggaatgggtactgccgctcggagggtgtggtggctgtcctgctgaccaagaagtccctggcccggaaggtctacaccaccatcctgaacaaaggcaccaatacagatggcttcaaggagcaaggcgtgaccttccctcaggatatccaggagcagcctatccgctcgttgtaccagtcggccggagtggcccctgagtcatttgaatacatcgaagcccacggaccaggcaccaaggtgggcgacccccaggagcgtaatggcatcacccgagccctgtgcgccacccgccaggagccgctgctcatcggctccaccaagtccaacatggggcacccggagccagcctcggggctcgacgccctggccaaggtgctgctgtccctggagcacgggctctgggcccccaacctgcacttccatagccccaaccctgagatcccagcgctgttggatgggcggctgcaggtggtggaccagcccctgcccgtccgtggcggcaacgtgggcatcaactcctttggcttcgggggctccaacatgcacatcatcctgaggcccaacacgcagtccgcccccgcacccgccccacatgccaccctgccccgtctgctgcgggccagcggacgcacccctgaggccgtgcagaagctgctggagcagggcctccggcacagccagggcctggctttcctgagcatgctgaacgacatcgcggctgtccccgccaccgccatgcccttccgtggctacgctgtgctgggtggtgagacgcggtggcccagagtgcagcaggtgcccgctggcgagcgcccgctctggttcatctgctctgggatgggcacacagtggcgtggaatggggctgagccttatgcgcctggaccgcttccgagattccatcctacgctccgatgaggctgtgaaccgattcggcctgaaggtgtcacagctgctgctgagcacagacgagagcacctttgatgacatcgtccattcgtttgtgagcctgactgccatccagataggcctcatagacctgctgagctgcatgggacctgaggcagatggcatcgtcggccactccctgggggagtggctgtcggtacgcgacggctgcctgtcccaggaggaggccgtcctcgctgcctactggaggggacagtgcatcaaagaagccccacttcccgccggcgccatggcagccgtgggcttgtcctgggaggagtgtaaacagcgctgcccccctgcggtggtgcccgcctgccacaactccaaggacacagtcaccatctcgggacctcaggccccggtgtttgagttcgtggagcagctgaggaaggagggtgtgtttgccaaggaggtgcggaccggcggtatggccttccactcctacttcatggaggccatcgcacccccactgctgcaggagctcaagaaggtgatccgggagccgaagccacgttcagcccgctggctcagcacctctatccccgaggcccagtggcacagcagcctggcacgcacgtcttccgccgagtacaatgtcaacaacctggtgagccctgtgctgttccaggaggccctgtggcacgtgcctgagcacgcggtggtgctggagatcgccccgaccccgtgccctcaggctgtcctgaagcgggtccgtaagccgagctgcaccatcatcccccgtatgaagaaggatcacagggacaacctggagttcttcctggccggcatcggcaggctgcacctctcaggcatcgacgccaaccccaatgccttgttcccacctgtggagtccccagctccccgaggaactcccctcatctccccactcatcaagtgggaccacagcctggcctgggacgcgccggccgccgaggacttccccaacggttcaggttccccctcagccaccatctacacatgcacaccaagctccgagtctcctgaccgctacctggtggaccacaccatcgacggtcgcgtcctcttccccgccactggctacctgagcatagtgtggaagacgctggcccgcgcctgggctgggctcgagcagctgcctgtggtgtttgaggatgtggtgcagcaccaggccaccatcctgcccaagactgggacagtgtccttggaggtacggctcctggaggccaccggtgccttcgaggtgtcagagaacggcaacctggtagtgagtgggaaggtgtaccagtgggatgaccctgaccccaggctcttcgaccacccggaaagtccccaccccaattccccacggagtcccctcttcctggcccaggcagaagtttacaaggagctgcgtctgcgtggctacgactacggccctcatttccagggcatcctggaggccagcctggaaggtgactcggggaggctgctgtggaaggataactgggtgagcttcatggacaccatgctgcagatgtccatcctgggctcggccaagcacggcctgtacctacccacccgtgtcaccgccatccacatcgaccctgccacccacaggcagaagctgtacacactgcaggacaaggcccaagtggctgacgtggtggtgagcaggtggccgagggtcacagtggcgggaggcgtccacatctccgggctccacactgagtcggccccgcggcggcagcaggagcagcaggtgcccatcctggagaagttttgcttcactccccacacggaggaggggtgcctgtctgagcgcgctgccctgcaggaggagctgcaactgtgcaaggggctggtgcaggcactgcagaccaaggtgacccagcaggggctgaagatggtggtgcccggactggatggggcccagatcccccgggacccctcacagcaggaactgccccggctgttgtcggctgcctgcaggcttcagctcaacgggaacctgcagctggagctggcgcaggtgctggcccaggagaggcccaagctgccagaggaccctctgctcagcggcctcctggactccccggcactcaaggcctgcctggacactgccgtggagaacatgcccagcctgaagatgaaggtggtggaggtgctggctggccacggtcacctgtattcccgcatcccaggcctgctcagcccccatcccctgctgcagctgagctacacggccaccgaccgccacccccaggccctggaggctgccaggccgagctgcagcagcacgacgttgcccagggccagtgggatcccgcagaccctgcccccagcgccctgggcagcgccgacctcctggtgtgcaactgtgctgtggctgccctcggggacccggcctcagctctcagcaacatggtggctgccctgagagaagggggctttctgctcctgcacacactgctccgggggcaccccctcggggacatcgtggccttcctcacctccactgagccgcagtatggccagggcatcctgagccaggacgcgtgggagagcctcttctccagggtgtcgctgcgcctggtgggcctgaagaagtccttctacggctccacgctcttcctgtgccgccggcccaccccgcaggacagccccatcttcctgccggtggacgataccagcttccgctgggtggagtctctgaaggtcaagccctggcccaccttcagggcccaccccaccttccaacttggcgagngngggctgacccttcccgacccgctgta

SEQ ID NO: 658574 - DNA, 169 bp, Homo sapiens
  misc_feature (113)..(113): n is a, c, g, or t
tagaggatcccttctctgcatatctggttagtgaggtgagcctggcgcctttctttgcgctgagctaagctacatcaatggctttgtggcccatttctaccgttcatttctgntactgctctgggttgcctatctcctgagtccgttccaacatatgcccggtgctctc

SEQ ID NO: 658575 - DNA, 1252 bp, Homo sapiens
  misc_feature (136)..(136): n is a, c, g, or t
  misc_feature (139)..(139): n is a, c, g, or t
  misc_feature (144)..(144): n is a, c, g, or t
  misc_feature (147)..(147): n is a, c, g, or t
  misc_feature (157)..(158): n is a, c, g, or t
  misc_feature (162)..(162): n is a, c, g, or t
ggcactcacctatagttccacctactcgggaggagaatcgcttgaaccgggtaggtggaggttgcggagggaggagaatcgcttgaaccgggtaggtggaggttgcggtgagctgagatcgccccactccatctanccngggtnacnaaaatgaaanncgtntcaaaaaaaaaaagcccacccgcagtgtagcacagggcaggccggtgctgtgggtgctgccagcacctgctcagagcccgaccccacacggacatggagcacaacagggtgctggaggcgctgctgccgctgaagggcctagaggagcgtgtggcagccgccgtggacctgatcatcaagagccaccagggcctggaccgccaggagctgagctttgcggcccggtccttctactacaagctgcgtgccgctgagcagtacacacccaaggccaagtaccatggcaacgtgatgctactgcgcgccaagacgggtggcgcctacggcgaggacctgggcgcggactacaacctctcccaggtgcgcaaggggcctgacgggaacggggacagggacaggagtggggtgggacggcagctgatcgcatcccctgcaggtatgcgacgggaaagtatccgtccacgtcatcgagggtgaccaccgcacgctgctggagggcagcggcctggagtccatcatcagcatcatccacagctccctggctgagccacgcgtgagcgtgcgggagggctaggcccgtgcccccgcctgccaccggaggtcactccaccatccccaccccaccccaccccacccccgccatgcaacgggattgaagggtcctgccggtgggaccctgtccggcccagtgccactgccccccgaggctgctagatgtaggtgttaggcatgtcccacccacccgccgcctcccacggcacctcggggacaccagagctgccgacttggagactcctggtctgtgaagagccggtggtgcccgtgcccgcaggaactgggctgggcctcgtgcgcccgtggggtctgcgcttggtctttctgtgcttggatttgcatatttattgcattgctggtagagacccccaggcctgtccaccctgccaagactcctcaggcagcgtgtgggtcccgcactctgcccccatttccccatttccccgtggggtgctgcccttatgcccggcgccgggcaccaactccatgtttggtgtttgtctgtgtttgtttttcaagaaatgattcaaattgc

SEQ ID NO: 658576 - DNA, 161 bp, Homo sapiens
  misc_feature (43)..(43): n is a, c, g, or t
  misc_feature (70)..(70): n is a, c, g, or t
ctctaggatccacacgtacgctcagtcggatgatcagtctagngttttctacacgatcagttgatcatcntctgcgcgagacctgcttaagctgcacgctcctgcgagcgctgaggcacagtcggcattctacagtcacgcggaggacacgtcgttcacga

SEQ ID NO: 658577 - DNA, 127 bp, Homo sapiens
ttttttttcccccaaaacccttttttttcccatgcccctttaacaggatttgttttattcccccccccttcccagggtgatttgaggtaaactttgaagtaaaataaaagctgggtttgggcctcca

SEQ ID NO: 658578 - DNA, 775 bp, Homo sapiens
tcccccagctcaactgagtggtgtccctttgcggagttggtggctggccagccggtcttcgaggtgtgtcgttccatgctggcactcccgtgcagcctggccgaaatgactacacagttggagataacccagcatgctctgggcgtggatgattggcctgtggacgaccgagtgtccctgtagactggtcagctgcatctcatgcgagcgctactaaggcgcgtgtccagactctacgcttgccccctccagtggcccagccctgattggggagcacccgaggcagggggtgggggaagtgtgtactgaggagccgtgcgtcgtggctccctgggcttggtccccgggctcattaatttaaacaggcatgttgtttttgcgcaagtccttccaaaaaaaaaaagggcgacagagaggaaaagaatattaacagaaagcaataaagacatggggggggctgccgctgtcataagaaagtttctccgcccggggggggggggccgccccacagagattttgagccgtagatacccgcgcgttttgttgtgtgtccagccagggggggccgccgcccaaacggggggggcccgcggtatttaaacagccccgcagggatcaggaggccccatggctgggtacaacacaacccagcggtggaccccgcgcggggaaaaaccgcgtgcgcaacacgcgggggacaccccttggtggggaggagacgggacccctaaacctgcgcgggcgggggggagacccaaaaatgtcggcaccacaa

SEQ ID NO: 658579 - DNA, 431 bp, Homo sapiens
cgagactcagatcttggcgtggtgaataatcactctgttctgtcatactaactacaatgagataataacgcgagcattgtaacgcactgaaaataaggctaacagcagcacactccacgatcacaggatttaaatgccagaactgtgaaacattctctgtaggtgccgggacagtctggtggctgacaattaacgtccactccagcaccgagggctggacacttgtggtttctgttcacctttcctggcttggagcccagatctgtctcatgagcagagtaactactgaggaggcttctcggatggaaagttggttttaagccagaaatctggagagatgtcatgccaggcagcagcccccacgggcccaggcctttgtggggcagtgtcactgtctggtgtgccaccagtacccatgctgcaaggagtgg

SEQ ID NO: 658580 - DNA, 654 bp, Homo sapiens
  misc_feature (24)..(25): n is a, c, g, or t
  misc_feature (30)..(30): n is a, c, g, or t
  misc_feature (33)..(33): n is a, c, g, or t
  misc_feature (35)..(35): n is a, c, g, or t
  misc_feature (49)..(49): n is a, c, g, or t
  misc_feature (61)..(62): n is a, c, g, or t
  misc_feature (78)..(79): n is a, c, g, or t
  misc_feature (86)..(86): n is a, c, g, or t
  misc_feature (93)..(93): n is a, c, g, or t
  misc_feature (96)..(96): n is a, c, g, or t
  misc_feature (114)..(115): n is a, c, g, or t
  misc_feature (121)..(121): n is a, c, g, or t
  misc_feature (126)..(127): n is a, c, g, or t
  misc_feature (135)..(136): n is a, c, g, or t
  misc_feature (146)..(146): n is a, c, g, or t
  misc_feature (155)..(155): n is a, c, g, or t
  misc_feature (161)..(161): n is a, c, g, or t
  misc_feature (165)..(165): n is a, c, g, or t
  misc_feature (172)..(172): n is a, c, g, or t
  misc_feature (179)..(179): n is a, c, g, or t
  misc_feature (237)..(237): n is a, c, g, or t
  misc_feature (623)..(623): n is a, c, g, or t
ttttaaaaaaaagtttgatataanntagtnggnantgtgttaaaagaangtgttaaattcnngccaaaattcatattnnaatttcnacttcanttnaaaaaatgtcctttaggnncccatnaaganntagaaganntgatctgtanaatgcaaancaattntttnggcagantggaagnagaaatggactcaacgcgcacaaccccaaataaaacaccccagaattttcgtagaaanaaagacggttgctttcttctcctgaaaggaataaacatgtttcaccataagtacacgtacatagtgttgattatgtctgacacacaatttattcacaaccatcaaatataaaaaagctctacttctttaattagcacacaaattaccctataaaacaaaaaggtcctcggctaaaacaggaactaaaataattaagatcacctttaagataaaaagaaaaagattgaatcaaatgatacttagtttatatcagtttagattaaatattttaaaaatggaaataaaagcaaagaagtggccaggcatggtgactcacacctgtgatcctagcactttgggaggccaaggtggatggatcacctgaagccaagagtttgagaccagcntgggcaacacagcaatatttcgcggcacgag

SEQ ID NO: 658581 - DNA, 523 bp, Homo sapiens
agatgcagctccctttaagcttcatgctctctgttccctgtgcaggaacaccctcccctcgcttcagtcagatctctcctccgagagccgctaagtagcctgaccctagtcatcacttgtgccctccccaactactgtctttttttaattccaaaccattcgtcattccttgtcatgatactgggcgtggtacgctaatctgctgatcattggtattccctttgagaacatcaggtccgtgaaccagccgagagctatgcccagcacacagtaggagctcatgacacgtttactgaattaatgtgtctaccccggacattccgtgtgcctcgctccgtggccgtgtacccatcacctctcttgagcgttggttgacgcaacctagtctatccacagttaacgcctgccatccggccattcctgcagaccatctccatggggctgatgtccttcggggcaactacaaacgcacacgagacaggcctcagtgagtccaagtaaggttctactcgcagcctattct

SEQ ID NO: 658582 - DNA, 146 bp, Homo sapiens
gaaaaaaaaaaaaagagctggttcacttttaaatgtctatagctagtagcctgggccctttaaggtttaattggaatagatatatctgtttcccggggaattatctggaaggttttaaacaggaatgacctcatagttttaaaggg

SEQ ID NO: 658583 - DNA, 221 bp, Homo sapiens
  misc_feature (119)..(119): n is a, c, g, or t
cctgagggaggggcctctagcttgatgggggacaagatccttctgggacccttctagaattggagttccaaagaggcatgccctagttcaatagggacatgagccatgggctggaggcnccaccccccggtccttggggggaggggccctctacccctcattggtccagtgggttaagactccccccgttgggccagaaaaagcctttttgcagcaggtga

SEQ ID NO: 658584 - DNA, 160 bp, Homo sapiens
  misc_feature (21)..(21): n is a, c, g, or t
  misc_feature (128)..(128): n is a, c, g, or t
tgttgagatgacaacaagggntttaaaatattacataaacgacgttgagtagagcagaagcagtcagggttttggcgatggatttcttcaagttgtcaaagatcaggcggccctcctccacccccgtnaacgatggcggcaaagtttgtcatccagcagg

SEQ ID NO: 658585 - DNA, 153 bp, Homo sapiens
agtagccggaaagttaagtcccggagtacgcgcgtaatgtgtacgccagtctgcgcgtaagcacaagtgcagcagtaagcgcaaaggtgtgtcaaccagtggacaggtactccaagtccaagtcaagtcacagactgaggtaagtactcaacg

SEQ ID NO: 658586 - DNA, 343 bp, Homo sapiens
ggtcgacctcttagcttccaaaggctgctgacccgccctccccaaagttgcttccatgcttggactacagaacagagttggatgactttttctatccacgattctcttattttctgtgatccccggtgcccgtgtaacaaggtccagtgcctgggtcccctccttggactcctgagtggccgagacaccgctagtgcgtggacaccactccagcccccattacctttccacccttacaccacgacccacacctggcctcctccctaggctgacccagcgccccaccaccctatctatacactccaagttctcccacgattcctccacttgcagccgcgtcgac

SEQ ID NO: 658587 - DNA, 445 bp, Homo sapiens
ggtaccggtcttcctttgtctgattaaagtaaatattagtctgggcagtgggacatgcctgtaatcccagtactttgggaggctgagacagacggattgcttgagcccaggagtttgagaccagcctgggcaacacggaaaaacaccatctctacaaaaaatacaaaaatcagctgagctggtggcacacacctgtagtcccagcaccttgggagggtgaggcaggaggatcacgaggtcaggagatcaagaccatcctggttaacacggtgaggcctcatctctactaaaaatacagaagaattggccaagtgtggtggcgggtgcctgtggtcccacctactctggaggctggggcgggagaatgggatgagcccgggaggcgaagcttgcagtgagccgagatcgcgccactgcactccagcctgggagacaaagggaaaca

SEQ ID NO: 658588 - DNA, 507 bp, Homo sapiens
  misc_feature (190)..(190): n is a, c, g, or t
  misc_feature (196)..(196): n is a, c, g, or t
  misc_feature (204)..(204): n is a, c, g, or t
  misc_feature (280)..(280): n is a, c, g, or t
  misc_feature (282)..(282): n is a, c, g, or t
  misc_feature (294)..(294): n is a, c, g, or t
  misc_feature (333)..(333): n is a, c, g, or t
  misc_feature (480)..(480): n is a, c, g, or t
ctggcaagggcttcaaatgtgccatcttcacttttatactccttgtgtgtcttatcaaccatcatcctctggtcatttattgacagtcacacaatttcatttcacccaactctattgaattcatgagactttgatttcaatttcaaaccatcggcatgggttcctgctgtccaggagcaatcacgccttntgactnttccctgngtttggtactggagatcggggatgtcattttctcattgtttctccctgttatcttcagggttcctctcagacggtntntgcgacctgctnttcagagagcttccggaggaaatataattaacatgcatntaacaaagttaacctttttaacaatttttattctttttttttttttgagacagtcttgctctgtcacccaggctgaggcagaagaattgcttgaacccaggaagcagaggttgcagtgagccgagatagtattactgcactccaggntgggcagcagagcaagattccgcctca

SEQ ID NO: 658589 - DNA, 889 bp, Homo sapiens
atgaaggatagccccctcctcaatgattaccggggctttctagtgccgagaatgaagcgagtctttggactgggaggaggacgcaggacttctaggccgcggagacccctcgggcctgggtggcgggtgctctggggagggtccgctgtgttactggccggcgccagggtcgccgaccggcgccctctctccgtcgcctccctccccctcgtagccgtcgcgatgttccctgaggcctcctgattgcccgtccggcgtacgtgctgtgccttctgtggtccaggcactgagcggtcctggctcgctgcctgtcgcgcgtgggcctcagtctggtagcgagccgccggcctcttccttcacagccagctcaaggtcgacttccctatgttcactttggacgcggagttggtgcggctgcactacgcgtgcataggctgtggcctcctggtgtacacactggtagcaagactcaaactagacattggcgtccagcttgaccggagcccactcgtccgtacccccactctaagaatggcaaggacaaagtacgaatcgtattctagccgtactaggacctgagctgcccaaagatcgatccgtccatcccattgctaaatttcggaaacgaaaagaggaaatgaggggtttccccttagtctgactttttgtaacatccgaccgtaaagtaatgttaccggtgagtgagcagtggcaatgagaaccctctgtgaacagggagaaacagaggaataggaagtggtgcgggcacctggtaattgggaatggggtaatcgcagcagaacaaaacaccaagtgaagtcagaagactacagacaagagctgccctggttggaaagataaagggtgatgtagtacattacaaaaaaag

SEQ ID NO: 658590 - DNA, 246 bp, Homo sapiens
gaatcaggctaaccgtctgagcagctgggaacttgcttgtccgtactggatgatggttatgatggattatgacacagccgaatttcctgctggaggagacagcggtttctcagtatcactctgcaggtgtgaattagaaggcctttgaacatgcagtgggacggaggagtggtattggtcgtgctgatagggaatctctcgctatcactatataacatggattgatcatgagtttccaaagcaggg

SEQ ID NO: 658591 - DNA, 240 bp, Homo sapiens
  misc_feature (20)..(21): n is a, c, g, or t
gctaagaggatccctatacnncagctatacacctatacaccttacaccaggagtcaggcatagggaatttacactcataccaaaatttcagtatgatcttcccggaaaatgtctgggaaaaacatctaccactccatagcaaaagatgagcatggtcgggcgcagtggctcacgcctgtaatcccagtactttgggagaccaaggcgggtggatggtggtatagagtggtatggtggtat

SEQ ID NO: 658592 - DNA, 751 bp, Homo sapiens
agcgggagacacgccgcatgctgcagaagcgggagacggtgctgctgctgaggaccttccagggccgtcgctgcgagatcgtgcgcgagcactactgcaggtcctgcgtgccctgccacagcccgcgtctgcaccacagcccgccgcactgcagaccacgatgggaaactctctgtctagctgatgtgactcacttaccgtgatccctagacgtgggacaagttgttgcaccatatatctcggagatccttgcgctctcctgcggttgcaggcgccaccccatccagtgcatggcaaggaccagcccgtcgttcccggcacttgcggcacgagcactcaaacacgagcgccccgcggagcaccacgtgattcgatcacaaccctccgcccccacacaccccatgcgcctgtcaaccggcattgcgcgccggtcccctcgcactcatgtcactcttccatccgtgtcggacgtgccccctgtgacaaccttgtcgccaagccccacacggcggccctggcctgacatccgtagcccacacccacagcgcgccagacaacggaacgaggcacgacgctacccacatgggcaccgaacccgaccggagcccccggagaccccacagacgcagagcgcgttcatctcacacagaccgcgccacgcctggccaccacggcaccccccaacatccacatcccacactggccagagggaacccgcgacccggccacccaacagccgagcccacggcgc

SEQ ID NO: 658593 - DNA, 434 bp, Homo sapiens
  misc_feature (38)..(38): n is a, c, g, or t
  misc_feature (47)..(47): n is a, c, g, or t
agccatgacctgggggaaattaccgctgagggggcttngttctttcnagtgggtggaattaaagccaaaagtcctagcagcacaccgagcaggactgaagcagatcataattccgcagaggaacgaaaaggaccttgaagagatcccaagcaacggtcagacaggatctaagttttgttacagcaagctgcctggatgaagttctaaatgcagcttttgatggtggctttcctgtcaagaccagacctggtctcattgacagcaaactataggcccgaacataagctgaatttaattatgaggcaaagcttgtttgaggcaccaaatgatcaagcaaaatatccctaatctgtggatataatcaagatagcaatgagtctgtttaagtagttgtttattacagaaatgttggcttaataaagtcattaaaccta

SEQ ID NO: 658594 - DNA, 372 bp, Homo sapiens
gacgcgaaacgacatcgctaaggagacgatatgtccgtgtccctggagtagaagcagcacatataggcgaattgtgtcatactagcacaacgccgtgtgacgatatccgagactcccctatcaatatatcaatgactttcttcacatacttggaaaaaaaaatcctagaatttatacgaaagcaccaaagattcagaatacccaaagctctccttgagctcaaatgcaacaacactgggggaaccacatgacctgacttccagttatactacagagctattgtaaccaatacagtacggtactgtcataaaaacagtcataccaatggaacaggattgagaacccagaaacaaatatatttatctacaggtg

SEQ ID NO: 658595 - DNA, 125 bp, Homo sapiens
ggtcgggcattctattgatcaagtctcttccatatactgatatatgatggcttggacagctggcatattaggtggcatccatcatgagcggtcactgtcttgcccatttccgacatcttcactgt

SEQ ID NO: 658596 - DNA, 343 bp, Homo sapiens
cccccctggaggccaatgcaaatactgggggaaggttccatggtagctaagtgtgggcaagctaatccctgaagttccctgatgcagagttgataatctctctaaagttggatgaaagactgggctgcctttaagctttgaaaaatgccatgcccattcaaggcagggtttttattgttgaaactcttgggtaatgacatctttattcaggtgaaaaaacaggatgaatttccactatatgatattgtttatgttccccagacatgttatttgtctttacaaaaattggtttcaataaactgggtggctgatattaaataaacatgggatttttccccttcca

SEQ ID NO: 658597 - DNA, 436 bp, Homo sapiens
actggtgcagccacatagacagctgctaggtcccaggagggcctgcaggtcaaagactgtggaaggccctcttggctatcagggctctctccccatggccatcttccccacctctgtattgctggttgtgggccccatagctcatcacccctgtctcctgctgaagtgtgtcagggctgatgctggcactgagcgagctgacatttgggtcaaaggccagggctctgcccagccagggagacttgactgccactgggcgcccatgacccctcccgcgtgcgtgtccagggtccaaagatggagagtcctgcgcgtttgggtttagttcccgaactcgacgaatccgccatcctcgacccagggcgcaagagttctctaagtcttgacgaagaccttacagaagagcaggacgtttctcatagacgtatcaacacac

SEQ ID NO: 658598 - DNA, 435 bp, Homo sapiens
taagcgggttcagagaggagagaaggaatggcagaggagcaaatattcaaagacatcatggctgagaattttccagaattgaaggtgtttgtggatcctcggatgtgacaagcaagatttaaaaagtaataaatcctgatctggaagaccagctgcacgcctcctcgcacctcacattctgtcccagccctgcctccccagggcacttcccagaagctacctgccacgtcctgctgttttggctccaatccgacctggcacagggaggttctgactgtccctgcccatctgctactccccagagtccttgctgagcctcgacttccttccctcaaatggggttggaactagaaccatagaactgtagcagcagaaggggcgttgggtggcatcgtgacagcagacaacggctgagtttggattccgtactcccca

SEQ ID NO: 658599 - DNA, 177 bp, Homo sapiens
gcggcaccgagactccagcttaacgctatttggaggtcagcactggtgctcacagaagcctggaacttgtccaggaggcgtgcaccgcaggggtaactcggcggggaggtgggcggccaggatcaccagcaggcagtggcttaggagcttgaagttgaccgggtccacccgaagctt

SEQ ID NO: 658600 - DNA, 448 bp, Homo sapiens
ggctcggaccgtcgttagcatcaagattactggcaggatcagcaaaaagaatggctctagagactaactgagcctgacgtaataactgctgtcagattatagtatctcagttcatggctgagacagctgccataatcagagtcacctccaccagaggagttcaacttacgaaaaatctcctgcttctttgatttaaccatgggtgatgtattttcaagcttggtgtgagaatgaaggcgagtagctgatactccctggtgtgcgggcatcattcctctgccctgtgatggctctgagcccctctgagacaagagcagcaagctgtcctgtaactcatgcacaagcggaacctgtggtggcgagatgtgctcgttgggctccgaagagacgtgactcctctctggggataagccaggtctacatcccctggatttggcctcgagatttg

SEQ ID NO: 658601 - DNA, 215 bp, Homo sapiens
  misc_feature (109)..(109): n is a, c, g, or t
tcccttgacggcgggtgggtggacacgcagactagagagcaaacagcaagggcgtgagcacctgctgcaggcacttccctgttctttctggagcttcagttatttatgntgtggggatcctggacagttccctcattttctcttctcttctctttttcttttcttttctttttttttttttttgggaacagatttctattatgggtacaccccgg

SEQ ID NO: 658602 - DNA, 253 bp, Homo sapiens
ccccggaaattttttttggggggccccgttttaagattaaatctttttaaagagaaaggggggaaattttccggccgggaatccaaccggtgggggggttggggggaatttttttcatttttctttaaccccctgtttgggggggcaaaaaaacttcccgggctttttttttcaagaaaagacttcccttttttgaaggcaacagtttttgtaaacctaatggggacaataaaaggggttttgaataaatgga

SEQ ID NO: 658603 - DNA, 704 bp, Homo sapiens
gatggatttggagctggtggcccagaagcagcgggagcgtgtagtaatgagtatggatacggtgaggcattggaactgggtaacggcagcgccaggatatcatagggcaagtagttgtcagcagctacgacagtcggctatcatggaatatgagatgcgtccgggtctgctgaggagagcgcggagggaataatggtccgaggtgttagcagccagacataatgagttagtagttaaagatcgagagggacaaagcagagagagccaagaagtactggtgtgcagtagtgggcttctcagcgcatcccccatgtggcaccagagcccaggtcctgattccctcttctcccagccaggagctctcccaccaagcgtgtagtatgaccagtgtcgcatatcaggtcaggctgccagtatgggacctctactgtaccctagacgttccgggcccgggaacatgctgtcagtctgtgaggctcatatgttgagctcctagccgtggggaggaactacgtgggggccaggagccctgtgcaattgctcagtggcttccccagagcgggccttctgcagaagctgacatggacgcggacctctgcaggagctgcgcctcgtgccttctgctgttctcaatgtgtctcaagaaatgtccccagctgagggcctgtgtcccgatgataccgctgggaccagtcatcgtcctt

SEQ ID NO: 658604 - DNA, 108 bp, Homo sapiens
  misc_feature (8)..(8): n is a, c, g, or t
ccgccgcngtaatgtgaaatagtacagaaatacaatgaaagaaatatctatcaaatggcactggccagacaatgacgcagattacgaagcggcggacttgctgggcac

SEQ ID NO: 658605 - DNA, 476 bp, Homo sapiens
ataccaaagtgtagatagtaattgattaggagagttatgggtaattcgtgttttctgaatttttcttaactcaaaaagtaacattaaattgaaacaatattgacatttacaagtactattaactgatttgtacaggataagcaacctagagttatttagcaaattgatcaagtggaaagagaggttctatagcaggcagaggggatgtggttgttcaaatgacaaaattagggaagctttagaataacaaaagctgtctatctatcagtggtggagagctgaagcaagcattataattgttgagtataatatttaacactttgtaaagaggcttaacatttcatttcaaagtacttctatgcattattttcttttagccttatgattactatgggttaggtatactagatatattctacatttttaaaatagaaaaaattttcagaagaaacaacttttacaaggttgtttttttt

SEQ ID NO: 658606 - DNA, 2326 bp, Homo sapiens
ccgccccctcggcgtccgctccgcccccggcttcgcctcccgctgccgccgccgccgccgccgcagccgctaccgccgctgcagccgctttccgcggcctgggcctctcgccgtcagcatgccacacgccttcaagcccggggacttggtgttcgctaagatgaagggctaccctcactggcctgccaggatcgacgacatcgcggatggcgccgtgaagcccccacccaacaagtaccccatctttttctttggcacacacgaaacagccttcctgggacccaaggacctgttcccctacgacaaatgtaaagacaagtacgggaagcccaacaagaggaaaggcttcaatgaagggctgtgggagatccagaacaacccccacgccagctacagcgcccctccgccagtgagctcctccgacagcgaggcccccgaggccaaccccgccgacggcagtgacgctgacgaggacgatgaggaccggggggtcatggccgtcacagcggtaaccgccacagctgccagcgacaggatggagagcgactcagactcagacaagagtagcgacaacagtggcctgaagaggaagacgcctgcgctaaagatgtcggtctcgaaacgagcccgaaaggcctccagcgacctggatcaggccagcgtgtccccatccgaagaggagaactcggaaagctcatctgagtcggagaagaccagcgaccaggacttcacacctgagaagaaagcagcggtccgggcgccacggaggggccctctggggggacggaaaaaaaagaaggcgccgtcagcctccgactccgactccaaggccgattcggacggggccaagcctgagccggtggccatggcgcggtcggcgtcctcctcctcctcttcctcctcctcctccgactccgatgtgtctgtgaagaagcctccgaggggcaggaagccagcggagaagcctctcccgaagccgcgagggcggaaaccgaagcctgaacggcctccgtccagctccagcagtgacagtgacagcgacgaggtggaccgcatcagtgagtggaagcggcgggacgaggcgcggaggcgcgagctggaggcccggcggcggcgagagcaggaggaggagctgcggcgcctgcgggagcaggagaaggaggagaaggagcggaggcgcgagcgggccgaccgcggggaggctgagcggggcagcggcggcagcagcggggacgagctcagggaggacgatgagcccgtcaagaagcggggacgcaagggccggggccggggtcccccgtcctcctctgactccgagcccgaggccgagctggagagagaggccaagaaatcagcgaagaagccgcagtcctcaagcacagagcccgccaggaaacctggccagaaggagaagagagtgcggcccgaggagaagcaacaagccaagcccgtgaaggtggagcggacccggaagcggtccgagggcttctcgatggacaggaaggtagagaagaagaaagagccctccgtggaggagaagctgcagaagctgcacagtgagatcaagtttgccctaaaggtcgacagcccggacgtgaagaggtgcctgaatgccctagaggagctgggaaccctgcaggtgacctctcagatcctccagaagaacacagacgtggtggccaccttgaagaagattcgccgttacaaagcgaacaaggacgtaatggagaaggcagcagaagtctatacccggctcaagtcgcgggtcctcggcccaaagatcgaggcggtgcagaaagtgaacaaggctgggatggagaaggagaaggccgaggagaagctggccggggaggagctggccggggaggaggccccccaggagaaggcggaggacaagcccagcaccgatctctcagccccagtgaatggcgaggccacatcacagaagggggagagcgcagaggacaaggagcacgaggagggtcgggactcggaggaggggccaaggtgtggctcctctgaagacctgcacgacagcgtacgggagggtcccgacctggacaggcctgggagcgaccggcaggagcgcgagagggcacggggggactcggaggccctggacgaggagagctgagccgcgggcagccaggcccagcccccgcccgagctcaggctgcccctctccttccccggctcgcaggagagcagagcagagaactgtggggaacgctgtgctgtttgtatttgttcccttgggtttttttttcctgcctaatttctgtgatttccaaccaacatgaaatgactataaatggttttttaatga

SEQ ID NO: 658607 - DNA, 497 bp, Homo sapiens
  misc_feature (23)..(23): n is a, c, g, or t
ccagaacaacccccacgccagtnacagcgcccctccgccagtgagctcctccgacagcgaggcccccgaggccaaccccgccgacggcagtgacgctgacgaggacgatgaggaccggggggtcatggccgtcacagcggtaaccgccacagctgccagcgacaggatggagagcgactcagactcagacaagagtagcgacaacagtggcctgaagaggatcgacgacatcgcggatggcgccgtgaagcccccacccaacaagtaccccatctttttctttggcacacacgaaacagccttcctgggacccaaggacctgttcccctacgacaaatgtaaagacaagtacgggaagcccaacaagaggaaaggcttcaatgaagaactgtggggaacgctgtgctgtttgtatttgttcccttgggtttttttttcctgcctaatttctgtgatttccaaccaacatgaaatgactataaatggttttttaatga

SEQ ID NO: 658608 - DNA, 295 bp, Homo sapiens
  misc_feature (192)..(192): n is a, c, g, or t
  misc_feature (248)..(249): n is a, c, g, or t
  misc_feature (265)..(265): n is a, c, g, or t
  misc_feature (268)..(268): n is a, c, g, or t
ccggctgatgcacatatggaccctggtccaatattcgtacagcgtatgcaaatgatggtctgcctgagtcagtgctttaagtaacttctccaggtccttagcttttctctgtgtgtttaactgcttcaatgcactttcctccgtaccaggctgcttcctcctaactccctttgcctactttgtaaataaatnatattggcccccactgcctcttcactctgatgataagcatttgcttaactactttnnttcgtttaacacattnttnttcttcaactgatatttttgagccctg

SEQ ID NO: 658609 - DNA, 470 bp, Homo sapiens
  misc_feature (292)..(292): n is a, c, g, or t
  misc_feature (355)..(355): n is a, c, g, or t
  misc_feature (357)..(357): n is a, c, g, or t
  misc_feature (362)..(362): n is a, c, g, or t
ttctctgctgtccctgcacagtgggtggaggaagtgcttcagggccagccagggcaggtctgctgtgacaaggaccccaccaccccacccagcagctggaggacatccaaagagtcctccatcctgggctagccagagctgaagcttattgagcgcctactctatgcagtacctgcatgggctcatttctccttcgcactagcccaggaggcagcgctgcgattatccccctttcacagaggaggggctgaccccagagaggcacagtcacctgcccagggtgagtgtggcncagaggtcgagggtcacccggcaggtcctgatcacccatcctaggaaggtgcctggctctacncntgacncaggaactgatgtttctttctacccttgcccaggagttttaggaagaagcccgggtcccccaccccagcagggcagataaaggcttgggttccaggtttccccttttc

SEQ ID NO: 658610 - DNA, 456 bp, Homo sapiens
  misc_feature (5)..(5): n is a, c, g, or t
  misc_feature (47)..(47): n is a, c, g, or t
  misc_feature (50)..(50): n is a, c, g, or t
  misc_feature (52)..(53): n is a, c, g, or t
  misc_feature (128)..(128): n is a, c, g, or t
  misc_feature (168)..(168): n is a, c, g, or t
  misc_feature (199)..(199): n is a, c, g, or t
  misc_feature (352)..(352): n is a, c, g, or t
  misc_feature (355)..(355): n is a, c, g, or t
  misc_feature (362)..(362): n is a, c, g, or t
  misc_feature (366)..(366): n is a, c, g, or t
  misc_feature (382)..(382): n is a, c, g, or t
  misc_feature (410)..(410): n is a, c, g, or t
  misc_feature (419)..(419): n is a, c, g, or t
  misc_feature (449)..(449): n is a, c, g, or t
gcatncaggggtctaatctctgcctcatgatgcagagattaagcccntgnannagtcgcatgccaccaacaagatccccgtgaagtactggagttcatctcggaatgcatcatccaggttctgcaganaagcatcccggggactttggtgctgatgcccagggcgcantgaacaaggcctggagctgttccggaagacnatggcctccaactacaaggagctgggcttccagggctaggcccttgccgctcccacccccacccatctgggccccgggttcaagagagagcggggtctgatctcgtgtagccatatagagtttgcttctgagtgtctgctttgtttagtagangtnggcaagnaganctgagggctggggctnggggtgttgaagttggctttgcaatgangaggagatnttgggctggcggccacttgggaaagatttnactatct

SEQ ID NO: 658611 - DNA, 2290 bp, Homo sapiens
catccttggagctgccagctgcatcctctgggggaccgcccgtgatgcccctctttgcgggaggggtccccaggaaaggtcctgggagtccatagacgctgagcttggccccaccccctggttgcttcagagggccggatctggctttgctcagatcgacgacatcgcggatggcgccgtgaagcccccacccaacaagtaccccatctttttctttggcacacacgaaacagccttcctgggacccaaggacctgttcccctacgacaaatgtaaagacaagtacgggaagcccaacaagaggaaaggcttcaatgaagggctgtgggagatccagaacaacccccacgccagctacagcgcccctccgccagtgagctcctccgacagcgaggcccccgaggccaaccccgccgacggcagtgacgctgacgaggacgatgaggaccggggggtcatggccgtcacagcggtaaccgccacagctgccagcgacaggatggagagcgactcagactcagacaagagtagcgacaacagtggcctgaagaggaagacgcctgcgctaaagatgtcggtctcgaaacgagcccgaaaggcctccagcgacctggatcaggccagcgtgtccccatccgaagaggagaactcggaaagctcatctgagtcggagaagaccagcgaccaggacttcacacctgagaagaaagcagcggtccgggcgccacggaggggccctctggggggacggaaaaaaaagaaggcgccgtcagcctccgactccgactccaaggccgattcggacggggccaagcctgagccggtggccatggcgcggtcggcgtcctcctcctcctcttcctcctcctcctccgactccgatgtgtctgtgaagaagcctccgaggggcaggaagccagcggagaagcctctcccgaagccgcgagggcggaaaccgaagcctgaacggcctccgtccagctccagcagtgacagtgacagcgacgaggtggaccgcatcagtgagtggaagcggcgggacgaggcgcggaggcgcgagctggaggcccggcggcggcgagagcaggaggaggagctgcggcgcctgcgggagcaggagaaggaggagaaggagcggaggcgcgagcgggccgaccgcggggaggctgagcggggcagcggcggcagcagcggggacgagctcagggaggacgatgagcccgtcaagaagcggggacgcaagggccggggccggggtcccccgtcctcctctgactccgagcccgaggccgagctggagagagaggccaagaaatcagcgaagaagccgcagtcctcaagcacagagcccgccaggaaacctggccagaaggagaagagagtgcggcccgaggagaagcaacaagccaagcccgtgaaggtggagcggacccggaagcggtccgagggcttctcgatggacaggaaggtagagaagaagaaagagccctccgtggaggagaagctgcagaagctgcacagtgagatcaagtttgccctaaaggtcgacagcccggacgtgaagaggtgcctgaatgccctagaggagctgggaaccctgcaggtgacctctcagatcctccagaagaacacagacgtggtggccaccttgaagaagattcgccgttacaaagcgaacaaggacgtaatggagaaggcagcagaagtctatacccggctcaagtcgcgggtcctcggcccaaagatcgaggcggtgcagaaagtgaacaaggctgggatggagaaggagaaggccgaggagaagctggccggggaggagctggccggggaggaggccccccaggagaaggcggaggacaagcccagcaccgatctctcagccccagtgaatggcgaggccacatcacagaagggggagagcgcagaggacaaggagcacgaggagggtcgggactcggaggaggggccaaggtgtggctcctctgaagacctgcacgacagcgtacgggagggtcccgacctggacaggcctgggagcgaccggcaggagcgcgagagggcacggggggactcggaggccctggacgaggagagctgagccgcgggcagccaggcccagcccccgcccgagctcaggctgcccctctccttccccggctcgcaggagagcagagcagagaactgtggggaacgctgtgctgtttgtatttgttcccttgggtttttttttcctgcctaatttctgtgatttccaaccaacatgaaatgactataaatggttttttaatga

SEQ ID NO: 658612 - DNA, 498 bp, Homo sapiens
  misc_feature (5)..(5): n is a, c, g, or t
  misc_feature (47)..(47): n is a, c, g, or t
  misc_feature (50)..(50): n is a, c, g, or t
  misc_feature (52)..(53): n is a, c, g, or t
  misc_feature (110)..(110): n is a, c, g, or t
  misc_feature (170)..(170): n is a, c, g, or t
  misc_feature (210)..(210): n is a, c, g, or t
  misc_feature (241)..(241): n is a, c, g, or t
  misc_feature (394)..(394): n is a, c, g, or t
  misc_feature (397)..(397): n is a, c, g, or t
  misc_feature (404)..(404): n is a, c, g, or t
  misc_feature (408)..(408): n is a, c, g, or t
  misc_feature (424)..(424): n is a, c, g, or t
  misc_feature (452)..(452): n is a, c, g, or t
  misc_feature (461)..(461): n is a, c, g, or t
  misc_feature (491)..(491): n is a, c, g, or t
gcatncaggggtctaatctctgcctcatgatgcagagattaagcccntgnannagtcgcatgccaccaggtacttcacggggatcttgtgcttggtggcatgcgactgtnacaagatccccgtgaagtactggagttcatctcggaatgcatcatccaggttctgcaganaagcatcccggggactttggtgctgatgcccagggcgcantgaacaaggcctggagctgttccggaagacnatggcctccaactacaaggagctgggcttccagggctaggcccttgccgctcccacccccacccatctgggccccgggttcaagagagagcggggtctgatctcgtgtagccatatagagtttgcttctgagtgtctgctttgtttagtagangtnggcaagnaganctgagggctggggctnggggtgttgaagttggctttgcaatgangaggagatnttgggctggcggccacttgggaaagatttnactatct

SEQ ID NO: 658613 - DNA, 530 bp, Homo sapiens
ctaggtggaaagctgacgtgaaccgtctgcacgacgggtggctgggaggtcgaggtggtcactggggtggccacagtgtagtgtgacaggcttgatggcctgtggtagctgccgctggacggtgattaagactggctgactggacagaggtgaccctaggatcaacatcttcctcctggggcgctctgggcaaacctgggcttcctggatgacagcgagtttgggctgtgcatgcgcctgtgctcagtgctccaggtgtgccggtgaaccttccctcgacatgtgctctcaggggtcttgggcgccactagatgtgagcagacagcactcccgcgtgattggggagagggtgtggcaactcctagaagagagcggtccccagaggggttctaaagcagggcatgcccctagtgctgtccgtttcctaaaaagcctgttctattaattttgctttccagaggcttggtctaatcctccaagaaatgaggctttgcctggttcttcctgggaacgcgggactttgatgaaat

SEQ ID NO: 658614 - DNA, 317 bp, Homo sapiens
ccgaccgtatgtgggtggcttactttctgggattgaacatttccagcccctgaggaggctgcagacaagtgctgttgtagaacactcactaagttgtgatattttgaagtctgtggtgtgtgttgatgtaaatctcgacaatttctgctaatcagaactttcttgtttccagggttctcacagtgtgcctactcaggctatcagccgtccaggagactttctgtacttcatttctctccatagtcctcacatcgcagatctccaactgctgtgctaggtaagtacacaccttacctttccctcaggaagcttgtcca

SEQ ID NO: 658615 - DNA, 992 bp, Homo sapiens
gcagactcacttcgacaaaacctgggacacagctactacacgaacatcatatcgtacagagactgtgtgacaacgtacacgaagatggtcagtactggacgacacgtttgtcagccaaacttccaaactcttgactctgacaccgacgaagcatttctactggacttacaaaccatagtgaatgcacagtcatctgctggacaaagtcttatgtacgtacatatccctccttacatacggcatatcctacgctcactacaggatacacaaccatactggaagcgaagccaatataacatgtagacacagtgtgggaacattctatcgacttactgttccaggtgttaagaagacacatgatactgcacagtggaaaatccagcttactcaatgtacgatactgtgggacaacgctctatattatctcaatatcagttgacacgcacctcagagaactcacaacatggagacaaaactcctataaaatgtacacacatgtggataaagcattcaattgtcttcaggctcttgtctaaatacatgcacgaactcacactgaagagaaaagccgtacgacatgtaacggtaatgtgggcacacccttcagactatactatgatacttataagacggcatgaccaggacatcactaatggagacaagaacctcataaattgtacccaactgataatacagatcttccacatgttacccatcttcctatgcattcacacattgtacatcgcatccagataactggtaaagcgatatcactatgtagcatgtactacacacgtggtacaccaaagacttctagtctggcgatagatagccgttataccttacaaggaagagcgaatacataagtgaacaaacagaccgtcatgaatcgtaatgaatcggagagctaaacactaccagctgagtgacgctcgatgcatagtgctatctaacaagaacatagtacaggtcggaggttagagcaacacata

SEQ ID NO: 658616 - DNA, 2625 bp, Homo sapiens
  misc_feature (2346)..(2346): n is a, c, g, or t
ccgccccctcggcgtccgctccgcccccggcttcgcctcccgctgccgccgccgccgccgccgcagccgctaccgccgctgcagccgctttccgcggcctgggcctctcgccgtcagcatgccacacgccttcaagcccggggacttggtgttcgctaagatgaagggctaccctcactggcctgccaggatcgacgacatcgcggatggcgccgtgaagcccccacccaacaagtaccccatctttttctttggcacacacgaaacagccttcctgggacccaaggacctgttcccctacgacaaatgtaaagacaagtacgggaagcccaacaagaggaaaggcttcaatgaagggctgtgggagatccagaacaacccccacgccagctacagcgcccctccgccagtgagctcctccgacagcgaggcccccgaggccaaccccgccgacggcagtgacgctgacgaggacgatgaggaccggggggtcatggccgtcacagcggtaaccgccacagctgccagcgacaggatggagagcgactcagactcagacaagagtagcgacaacagtggcctgaagaggaagacgcctgcgctaaagatgtcggtctcgaaacgagcccgaaaggcctccagcgacctggatcaggccagcgtgtccccatccgaagaggagaactcggaaagctcatctgagtcggagaagaccagcgaccaggacttcacacctgagaagaaagcagcggtccgggcgccacggaggggccctctggggggacggaaaaaaaagaaggcgccgtcagcctccgactccgactccaaggccgattcggacggggccaagcctgagccggtggccatggcgcggtcggcgtcctcctcctcctcttcctcctcctcctccgactccgatgtgtctgtgaagaagcctccgaggggcaggaagccagcggagaagcctctcccgaagccgcgagggcggaaaccgaagcctgaacggcctccgtccagctccagcagtgacagtgacagcgacgaggtggaccgcatcagtgagtggaagcggcgggacgaggcgcggaggcgcgagctggaggcccggcggcggcgagagcaggaggaggagctgcggcgcctgcgggagcaggagaaggaggagaaggagcggaggcgcgagcgggccgaccgcggggaggctgagcggggcagcggcggcagcagcggggacgagctcagggaggacgatgagcccgtcaagaagcggggacgcaagggccggggccggggtcccccgtcctcctctgactccgagcccgaggccgagctggagagagaggccaagaaatcagcgaagaagccgcagtcctcaagcacagagcccgccaggaaacctggccagaaggagaagagagtgcggcccgaggagaagcaacaagccaagcccgtgaaggtggagcggacccggaagcggtccgagggcttctcgatggacaggaaggtagagaagaagaaagagccctccgtggaggagaagctgcagaagctgcacagtgagatcaagtttgccctaaaggtcgacagcccggacgtgaagaggtgcctgaatgccctagaggagctgggaaccctgcaggtgacctctcagatcctccagaagaacacagacgtggtggccaccttgaagaagattcgccgttacaaagcgaacaaggacgtaatggagaaggcagcagaagtctatacccggctcaagtcgcgggtcctcggcccaaagatcgaggcggtgcagaaagtgaacaaggctgggatggagaaggagaaggccgaggagaagctggccggggaggagctggccggggaggaggccccccaggagaaggcggaggacaagcccagcaccgatctctcagccccagtgaatggcgaggccacatcacagaagggggagagcgcagaggacaaggagcacgaggagggtcgggactcggaggaggggccaaggtgtggctcctctgaagacctgcacgacagcgtacgggagggtcccgacctggacaggcctgggagcgaccggcaggagcgcgagagggcacggggggactcggaggccctggacgaggagagctgagccgcgggcagccaggcccagcccccgcccgagctcaggctgcccctctccttccccggctcgcaggagagcagagcagagaactgtggggaacgctgtgctgtttgtatttgttcccttgggtttttttttcctgcctaatttctgtgatttccaaccaacatgaaatgactataaatggttttttaatgaaaaaagaaacacaccaaaanacgtcgggtctccgcggccccgggttattgtaggaaccatcccggcccgcgttatcgtaggaactattcgggcccgcgttactcgtagggtctggcgccgggccgggccccaccagacgggaatccccggcccaaatgggggccgaggaggtccttggccagagttttttgggagccaggccgggtggattggctcgccggggcccgtgttgttcctccgggccggggtttggtcccgaccggtcccgagggccggcccattgttgaccgcgggggttg

SEQ ID NO: 658617 - DNA, 313 bp, Homo sapiens
  misc_feature (112)..(112): n is a, c, g, or t
gaagatggagtcttgctctgttgcccagcctggagtgcagtggcacgatattggctcactgcaacctctgcctcccaggttcaagcaattctcccgcctcagcctcccgagnatagctgggattacaggtgtgcgccacaatgcctggctaatttttatacttttaatagaaacaggatttcatcatgttggccaggctggtctcgaactcctgacctcaggtgatccgcccgccttggcctcccaaagtgctaggattacaggcatgaccatgaggcccagacaatgatttttaaaactcctctattttaga

SEQ ID NO: 658618 - DNA, 842 bp, Homo sapiens
gcggacacccactttctcccgagttttttatggaaaactatgttttcccgcaaatgagaaggtggtgaagccttcccctggcacccccgttctcctataagaggctcttggatagtgcccccactcaagcgcccaaagggaggctttttatataggcgcgcccaacgagagcgcgcacacgctggtctttgtccaaaaaggggttggttccacaccacgcacccacccacatataaatggacagatgatgagagaagttttcccgccactccggtttgtcacgccccaccaccccttttttcctcagcggttgccgcgccccccgacggtaatgtaggccctcctcgggcggaagatccttctcccgcgaggggaaacccacggtgcccccccacattagtttttctctttcgcgagaagaggccgctctctccccgcgagaggatacccacggcttggagccacctatatgggctatattcactctccacgtgttccgcctgagcccctgatgttctgcactgaacgaatgatagaagacacagcacacaccacactctgtggttacacttgttggaatgtttatagccccacccagcacccacgagtgtgtaaccaagggctgtgatagagagagcctgctactgacccattgaatgtggccccacggtcaaccaacaccctgaggttcggccctgattggagagaagaaggcatattttctgaatggctcctgatttcgcatgctttgtgatcagttccccaccaaattgggatcattttaactgaatccccctgcctaattcttgaatatatatatatatatatcttttcccccatta

SEQ ID NO: 658619 - DNA, 996 bp, Homo sapiens
ggcaggatggtaatagaggtcatcgggaaggcacacaagaatggagctggagcccgactcccgagggaagactccgggcgggggacgtttgaggaatcgaggtgaaccagattcttaacgatgctccgagagaatggactgggctcctctgtgtcagaaaatccctgtgctgaggatacaaagcaatgttcaagtctatggtcgatgtgcggaaggctaaaggttccactgcagttaatagtctcccaggtcaatatgcgtgtcgttggactaggttggaacgtcagagggccataacggattccagtatcggcgttcaatgcatgcggactctgcctcacttcatccggaggatgatgtacggcctgtgagcagcgcaggagcgtgtgtggaggaactcctaagctagtgcggtgtcactacccgagctgagttgctttatcctcgacggaggatgtgggggcggtctgtgaagggagctcatggacgacggtgtgagccacgtactggtggagagtggatgacatcacaagcgtgttggggtggatcaagatttgcatggtagtggagtggatgaggtgaagtactgatgacgactgtgtggatacgtccaatcatagggaggatggtggccaggtggtggctgacggacgacggacgagcgctggtccaggtggaagagggatatggtgtcgcggaatctgggtagatgtgtagccggtccatggaaggctgtcgaagaagaacgggcctgggttccgagtggtgacatcagaggaggggcctggggggcaccctggacgaggagctggtgaaggcggtgctggaaaaacgggaacgccacagacgagggagcgggccattgagcccctgcgggagaaccacgaggggccaggcacagggcccggggaacacgcgacgggcgcacaggcgggggaggaagggaggcggcccctcaacagcgccgcacactccccaagagggccggaccaaggg

SEQ ID NO: 658620 - DNA, 1768 bp, Homo sapiens
  misc_feature (855)..(855): n is a, c, g, or t
  misc_feature (1176)..(1176): n is a, c, g, or t
gcccaggtcgcccggtcaggtctgcagtaggaggacagggagggagcagctggggtcttccgttcgaagaaggcgttcgagaatctgggggtcgtgggtgtctcgtgggtatgaatagcagtggcggggccattacgtaggcccggtggtatcgctagcactagtgagtgaagagaggtcagggagtcggctagcatgtagagaaactctcggcaaagatggggtgggctagtcactagagatgtggtctgccgctggcccacgaaggataggaggacgcggcgtaagagtccaggggagggcattggaatggatacgtatgtctcgctgggccagggattgattcataagccatgcttttgcgtgcgcgcgtcgttcctcgattgtgaacagcgtaggttcggggatgaattccgaggataggaatctatacatatgcccttcgcgcgttgagactcgtggccttctgcggaaaggagtactcgcagggcgttccctctgcacctgaattttcatgtggcttcaggggtgacggaggcatagggcggaacgtaccccgcaagtcgccaccggaggtcaaaaggaccaggcaactccgagtggttgtccaaatatggtgaccagtgagggcggatcccggcgtggacttcggtgggcgaagcttcatcggccaagggggccccctaggggatgcggaagctggcgtcgtgggggtgggatccaagaccgggtatggcgtccccctaatcgaggcaccgctggtgggggtgccgaacgcgccggacggaaaccgcggggtagagaggcgttggccacattcggagttgcacgtaggggggttccacaaggagcttntcgttactcgaattcagatgggcgccccgctgggtttgcggacgcaggggctttgtggcattggagaagaggcggaccacccatagggggaaaaccgggggttaattgcgcccgcaccaaaaaacaatggggtccccaccgtgtaggaaatatggcgctttaggagaccaaaagggcggtctggctctggaatttgtgcctttggcctccggttccggccatagagggggtcactctggcgcctgtccgaaatggttccccattgtggcgattcacttgcgaaaggggggggcccacaatggggcgggatatgcccgttanacatttctctgtgagagccctctgtgtgagcccctgaaccaggccaatgtgcctttgtctaccagtagacatcgggggccgagggcgtaaactgcgttgacattggagaacgtatgggtctttatggaaacctcattttaaaacctctcgggggttgtggggtatgagcaaccgcactaggcacaagccctcgtgggtggacatacaacccattaagggcggaacggtgacccaaggcggcaaggaagggggccaacttttcgttacaagacacccctgaagcggggctgctgggctggagaagccccgctcaagaaaaaacctccgtgcgaaaaagcgggaggagcgtggtagtccgcagcgcgacactggtgtgttcgccgtaatgaggggccgatgtacacgtggagtgcccacactttgtggggcggagaaaggcgcgcacccacgagaggtgctcaccagacacgaggggggaaccatccgcgtgcatccacagcggtggtgttaacacacgacacgggggtctgtcacacacagagaaaacacaggggcagatcaggcgcggcgagaagacaccaacgcgcgagaa

SEQ ID NO: 658621 - DNA, 2240 bp, Homo sapiens
ccgccccctcggcgtccgctccgcccccggcttcgcctcccgctgccgccgccgccgccgccgcagccgctaccgccgctgcagccgctttccgcggcctgggcctctcgccgtcagcatgccacacgccttcaagcccggggacttggtgttcgctaagatgaagggctaccctcactggcctgccaggatcgacgacatcgcggatggcgccgtgaagcccccacccaacaagtaccccatctttttctttggcacacacgaaacagccttcctgggacccaaggacctgttcccctacgacaaatgtaaagacaagtacgggaagcccaacaagaggaaaggcttcaatgaagggctgtgggagatccagaacaacccccacgccagctacagcgcccctccgccagtgagctcctccgacagcgaggcccccgaggccaaccccgccgacggcagtgacgctgacgaggacgatgaggaccggggggtcatggccgtcacagcggtaaccgccacagctgccagcgacaggatggagagcgactcagactcagacaagagtagcgacaacagtggcctgaagaggaagacgcctgcgctaaagatgtcggtctcgaaacgagcccgaaaggcctccagcgacctggatcaggccagcgtgtccccatccgaagaggagaactcggaaagctcatctgagtcggagaagaccagcgaccaggacttcacacctgagaagaaagcagcggtccgggcgccacggaggggccctctggggggacggaaaaaaaagaaggcgccgtcagcctccgactccgactccaaggccgattcggacggggccaagcctgagccggtggccatggcgcggtcggcgtcctcctcctcctcttcctcctcctcctccgactccgatgtgtctgtgaagaagcctccgaggggcaggaagccagcggagaagcctctcccgaagccgcgagggcggaaaccgaagcctgaacggcctccgtccagctccagcagtgacagtgacagcgacgaggtggaccgcatcagtgagtggaagcggcgggacgaggcgcggaggcgcgaagcgggccgaccgcggggaggctgagcggggcagcggcggcagcagcggggacgagctcagggaggacgatgagcccgtcaagaagcggggacgcaagggccggggccggggtcccccgtcctcctctgactccgagcccgaggccgagctggagagagaggccaagaaatcagcgaagaagccgcagtcctcaagcacagagcccgccaggaaacctggccagaaggagaagagagtgcggcccgaggagaagcaacaagccaagcccgtgaaggtggagcggacccggaagcggtccgagggcttctcgatggacaggaaggtagagaagaagaaagagccctccgtggaggagaagctgcagaagctgcacagtgagatcaagtttgccctaaaggtcgacagcccggacgtgaagaggtgcctgaatgccctagaggagctgggaaccctgcaggtgacctctcagatcctccagaagaacacagacgtggtggccaccttgaagaagattcgccgttacaaagcgaacaaggacgtaatggagaaggcagcagaagtctatacccggctcaagtcgcgggtcctcggcccaaagatcgaggcggtgcagaaagtgaacaaggctgggatggagaaggagaaggccgaggagaagctggccggggaggagctggccggggaggaggccccccaggagaaggcggaggacaagcccagcaccgatctctcagccccagtgaatggcgaggccacatcacagaagggggagagcgcagaggacaaggagcacgaggagggtcgggactcggaggaggggccaaggtgtggctcctctgaagacctgcacgacagcgtacgggagggtcccgacctggacaggcctgggagcgaccggcaggagcgcgagagggcacggggggactcggaggccctggacgaggagagctgagccgcgggcagccaggcccagcccccgcccgagctcaggctgcccctctccttccccggctcgcaggagagcagagcagagaactgtggggaacgctgtgctgtttgtatttgttcccttgggtttttttttcctgcctaatttctgtgatttccaaccaacatgaaatgactataaatggttttttaatga

SEQ ID NO: 658622 - DNA, 2282 bp, Homo sapiens
ccgccccctcggcgtccgctccgcccccggcttcgcctcccgctgccgccgccgccgccgccgcagccgctaccgccgctgcagccgctttccgcggcctgggcctctcgccgtcagcatgccacacgccttcaagcccggggacttggtgttcgctaagatgaagggctaccctcactggcctgccaggatcgacgacatcgcggatggcgccgtgaagcccccacccaacaagtaccccatctttttctttggcacacacgaaacagccttcctgggacccaaggacctgttcccctacgacaaatgtaaagacaagtacgggaagcccaacaagaggaaaggcttcaatgaagggctgtgggagatccagaacaacccccacgccagctacagcgcccctccgccagtgagctcctccgacagcgaggcccccgaggccaaccccgccgacggcagtgacgctgacgaggacgatgaggaccggggggtcatggccgtcacagcggtaaccgccacagctgccagcgacaggatggagagcgactcagactcagacaagagtagcgacaacagtggcctgaagaggaagacgcctgcgctaaagatgtcggtctcgaaacgagcccgaaaggcctccagcgacctggatcaggccagcgtgtccccatccgaagaggagaactcggaaagctcatctgagtcggagaagaccagcgaccaggacttcacacctgagaagaaagcagcggtccgggcgccacggaggggccctctggggggacggaaaaaaaagaaggcgccgtcagcctccgactccgactccaaggccgattcggacggggccaagcctgagccggtggccatggcgcggtcggcgtcctcctcctcctcttcctcctcctcctccgactccgatgtgtctgtgaagaagcctccgaggggcaggaagccagcggagaagcctctcccgaagccgcgagggcggaaaccgaagcctgaacggcctccgtccagctccagcagtgacagtgacagcgacgaggtggaccgcatcagtgagtggaagcggcgggacgaggcgcggaggcgcgagctggaggcccggcggcggcgagagcaggaggaggagctgcggcgcctgcgggagcaggagaaggaggagaaggagcggaggcgcgagcggggacgagctcagggaggacgatgagcccgtcaagaagcggggacgcaagggccggggccggggtcccccgtcctcctctgactccgagcccgaggccgagctggagagagaggccaagaaatcagcgaagaagccgcagtcctcaagcacagagcccgccaggaaacctggccagaaggagaagagagtgcggcccgaggagaagcaacaagccaagcccgtgaaggtggagcggacccggaagcggtccgagggcttctcgatggacaggaaggtagagaagaagaaagagccctccgtggaggagaagctgcagaagctgcacagtgagatcaagtttgccctaaaggtcgacagcccggacgtgaagaggtgcctgaatgccctagaggagctgggaaccctgcaggtgacctctcagatcctccagaagaacacagacgtggtggccaccttgaagaagattcgccgttacaaagcgaacaaggacgtaatggagaaggcagcagaagtctatacccggctcaagtcgcgggtcctcggcccaaagatcgaggcggtgcagaaagtgaacaaggctgggatggagaaggagaaggccgaggagaagctggccggggaggagctggccggggaggaggccccccaggagaaggcggaggacaagcccagcaccgatctctcagccccagtgaatggcgaggccacatcacagaagggggagagcgcagaggacaaggagcacgaggagggtcgggactcggaggaggggccaaggtgtggctcctctgaagacctgcacgacagcgtacgggagggtcccgacctggacaggcctgggagcgaccggcaggagcgcgagagggcacggggggactcggaggccctggacgaggagagctgagccgcgggcagccaggcccagcccccgcccgagctcaggctgcccctctccttccccggctcgcaggagagcagagcagagaactgtggggaacgctgtgctgtttgtatttgttcccttgggtttttttttcctgcctaatttctgtgatttccaaccaacatgaaatgactataaatggttttttaatga

SEQ ID NO: 658623 - DNA, 3218 bp, Homo sapiens
  misc_feature (2939)..(2939): n is a, c, g, or t
ccgccccctcggcgtccgctccgcccccggcttcgcctcccgctgccgccgccgccgccgccgcagccgctaccgccgctgcagccgctttccgcggcctgggcctctcgccgtcagcatgccacacgccttcaagcccggggacttggtgttcgctaagatgaagggctaccctcactggcctgccaggatcgacgacatcgcggatggcgccgtgaagcccccacccaacaagtaccccatctttttctttggcacacacgaaacagccttcctgggacccaaggacctgttcccctacgacaaatgtaaagacaagtacgggaagcccaacaagaggaaaggcttcaatgaagggctgtgggagatccagaacaacccccacgccagctacagcgcccctccgccagtgagctcctccgacagcgaggcccccgaggccaaccccgccgacggcagtgacgctgacgaggacgatgaggaccggggggtcatggccgtcacagcggtaaccgccacagctgccagcgacaggatggagagcgactcagactcagacaagagtagcgacaacagtggcctgaagaggaagacgcctgcgctaaagatgtcggtctcgaaacgagcccgaaaggcctccagcgacctggatcaggccagcgtgtccccatccgaagaggagaactcggaaagctcatctgagtcggagaagaccagcgaccaggacttcacacctgagaagaaagcagcggtccgggcgccacggaggggccctctggggggacggaaaaaaaagaaggcgccgtcagcctccgactccgactccaaggccgattcggacggggccaagcctgagccggtggccatggcgcggtcggcgtcctcctcctcctcttcctcctcctcctccgactccgatgtgtctgtgaagaagcctccgaggggcaggaagccagcggagaagcctctcccgaagccgcgagggcggaaaccgaagcctgaacggcctccgtccagctccagcagtgacagtgacagcgacgaggtggaccgcatcagtgagtggaagcggcgggacgaggcgcggaggcgcgagctggaggcccggcggcggcgagagcaggaggaggagctgcggcgcctgcgggagcaggagaaggaggagaaggagcggaggcgcgagcgggccgaccgcggggaggctgagcggggcagcggcggcagcagcggggacgagctcagggaggacgatgagcccgtcaagaagcggggacgcaagggccggggccggggtcccccgtcctcctctgactccgagcccgaggccgagctggagagagaggccaagaaatcagcgaagaagccgcagtcctcaagcacagagcccgccaggaaacctggccagaaggagaagagagtgcggcccgaggagaagcaacaagccaagcccgtgaaggtggagcggacccggaagcggtccgagggcttctcgatggacaggaaggtagagaagaagaaagagccctccgtggaggagaagctgcagaagctgcacagtgagatcaagtttgccctaaaggtcgacagcccggacgtgaagaggtgcctgaatgccctagaggagctgggaaccctgcaggtgacctctcagatcctccagaagaacacagacgtggtggccaccttgaagaagattcgccgttacaaagcgaacaaggacgtaatggagaaggcagcagaagtctatacccggctcaagtcgcgggtcctcggcccaaagatcgaggcggtgcagaaagtgaacaaggctgggatggagaaggagaaggccgaggagaagctggccggggaggagctggccggggaggaggccccccaggagaaggcggaggacaagcccagcaccgatctctcagccccagtgaatggcgaggccacatcacagaagggggagagcgcagaggacaaggagcacgaggagggtcgggactcggaggaggggccaaggtgtggctcctctgaagacctgcacgagtgagtgtcccgggccgtggggtttggactcctgagcggcagcggtgtgacgcgcaccctgggtccgagccgctcctcctgtgccagtccctctgggatgggtcccagggatgtcgtccttactcgggcctcccaccttcacagctgaccccagggccccgctggctggcacttccggcggcccctacagagaggcagctccagggctttgagctgcctgcccctggcctcctgggaaggtggcttcttgccgagcctccagggtggcccaggtaggtaggccccgagcacaggcacccggctatctgacggtgcctgtgcccatcactgtgggctgctgtctggtacaaggctcagtggagtcactcacttacccagcagctgccttgtgctatgcctggctggcgccagcgtggggaccctggagatggttgtggtctctagtggcagaagacaggcagataggagggcggcactcgagcctcaggtgccacaacgggggtacactcctcggtgcccatcccacccaaccgccctacaggcagggcaggggcgggagggcatcctcacaccgcctttgctgttcccaccagcagcgtacgggagggtcccgacctggacaggcctgggagcgaccggcaggagcgcgagagggcacggggggactcggaggccctggacgaggagagctgagccgcgggcagccaggcccagcccccgcccgagctcaggctgcccctctccttccccggctcgcaggagagcagagcagagaactgtggggaacgctgtgctgtttgtatttgttcccttgggtttttttttcctgcctaatttctgtgatttccaaccaacatgaaatgactataaatggttttttaatgaaaaaagaaacacaccaaaanacgtcgggtctccgcggccccgggttattgtaggaaccatcccggcccgcgttatcgtaggaactattcgggcccgcgttactcgtagggtctggcgccgggccgggccccaccagacgggaatccccggcccaaatgggggccgaggaggtccttggccagagttttttgggagccaggccgggtggattggctcgccggggcccgtgttgttcctccgggccggggtttggtcccgaccggtcccgagggccggcccattgttgaccgcgggggttg

SEQ ID NO: 658624 - DNA, 2261 bp, Homo sapiens
ccgccccctcggcgtccgctccgcccccggcttcgcctcccgctgccgccgccgccgccgccgcagccgctaccgccgctgcagccgctttccgcggcctgggcctctcgccgtcagcatgccacacgccttcaagcccggggacttggtgttcgctaagatgaagggctaccctcactggcctgccaggatcgacgacatcgcggatggcgccgtgaagcccccacccaacaagtaccccatctttttctttggcacacacgaaacagccttcctgggacccaaggacctgttcccctacgacaaatgtaaagacaagtacgggaagcccaacaagaggaaaggcttcaatgaagggctgtgggagatccagaacaacccccacgccagctacagcgcccctccgccagtgagctcctccgacagcgaggcccccgaggccaaccccgccgacggcagtgacgctgacgaggacgatgaggaccggggggtcatggccgtcacagcggtaaccgccacagctgccagcgacaggatggagagcgactcagactcagacaagagtagcgacaacagtggcctgaagaggaagacgcctgcgctaaagatgtcggtctcgaaacgagcccgaaaggcctccagcgacctggatcaggccagcgtgtccccatccgaagaggagaactcggaaagctcatctgagtcggagaagaccagcgaccaggacttcacacctgagaagaaagcagcggtccgggcgccacggaggggccctctggggggacggaaaaaaaagaaggcgccgtcagcctccgactccgactccaaggccgattcggacggggccaagcctgagccggtggccatggcgcggtcggcgtcctcctcctcctcttcctcctcctcctccgactccgatgtgtctgtgaagaagcctccgaggggcaggaagccagcggagaagcctctcccgaagccgcgagggcggaaaccgaagcctgaacggcctccgtccagctccagcagtgacagtgacagcgacgaggtggaccgcatcagtgagtggaagcggcgggacgaggcgcggaggcgcgagctggaggcccggcggcggcgagagcaggaggaggagctgcggcgcctgcgggagcaggagaaggaggagaaggagcggaggcgcgagcgggccgaccgcggggaggctgagcggggcagcggcggcagcagcggggacgagctcagggaggacgatgagcccgtcaagaagcggggacgcaagggccggggccggggtcccccgtcctcctctgactccgagcccgaggccgagctggagagagaggccaagaaatcagcgaagaagccgcagtcctcaagcacagagcccgccaggaaacctggccagaaggagaagagagtgcggcccgaggagaagcaacaagccaagcccgtgaaggtggagcggacccggaagcggtccgagggcttctcgatggacaggaaggtagagaagaagaaagagccctccgtggaagaggtgcctgaatgccctagaggagctgggaaccctgcaggtgacctctcagatcctccagaagaacacagacgtggtggccaccttgaagaagattcgccgttacaaagcgaacaaggacgtaatggagaaggcagcagaagtctatacccggctcaagtcgcgggtcctcggcccaaagatcgaggcggtgcagaaagtgaacaaggctgggatggagaaggagaaggccgaggagaagctggccggggaggagctggccggggaggaggccccccaggagaaggcggaggacaagcccagcaccgatctctcagccccagtgaatggcgaggccacatcacagaagggggagagcgcagaggacaaggagcacgaggagggtcgggactcggaggaggggccaaggtgtggctcctctgaagacctgcacgacagcgtacgggagggtcccgacctggacaggcctgggagcgaccggcaggagcgcgagagggcacggggggactcggaggccctggacgaggagagctgagccgcgggcagccaggcccagcccccgcccgagctcaggctgcccctctccttccccggctcgcaggagagcagagcagagaactgtggggaacgctgtgctgtttgtatttgttcccttgggtttttttttcctgcctaatttctgtgatttccaaccaacatgaaatgactataaatggttttttaatga

SEQ ID NO: 658625 - DNA, 2919 bp, Homo sapiens
ccgccccctcggcgtccgctccgcccccggcttcgcctcccgctgccgccgccgccgccgccgcagccgctaccgccgctgcagccgctttccgcggcctgggcctctcgccgtcagcatgccacacgccttcaagcccggggacttggtgttcgctaagatgaagggctaccctcactggcctgccaggatcgacgacatcgcggatggcgccgtgaagcccccacccaacaagtaccccatctttttctttggcacacacgaaacagccttcctgggacccaaggacctgttcccctacgacaaatgtaaagacaagtacgggaagcccaacaagaggaaaggcttcaatgaagggctgtgggagatccagaacaacccccacgccagctacagcgcccctccgccagtgagctcctccgacagcgaggcccccgaggccaaccccgccgacggcagtgacgctgacgaggacgatgaggaccggggggtcatggccgtcacagcggtaaccgccacagctgccagcgacaggatggagagcgactcagactcagacaagagtagcgacaacagtggcctgaagaggaagacgcctgcgctaaagatgtcggtctcgaaacgagcccgaaaggcctccagcgacctggatcaggccagcgtgtccccatccgaagaggagaactcggaaagctcatctgagtcggagaagaccagcgaccaggacttcacacctgagaagaaagcagcggtccgggcgccacggaggggccctctggggggacggaaaaaaaagaaggcgccgtcagcctccgactccgactccaaggccgattcggacggggccaagcctgagccggtggccatggcgcggtcggcgtcctcctcctcctcttcctcctcctcctccgactccgatgtgtctgtgaagaagcctccgaggggcaggaagccagcggagaagcctctcccgaagccgcgagggcggaaaccgaagcctgaacggcctccgtccagctccagcagtgacagtgacagcgacgaggtggaccgcatcagtgagtggaagcggcgggacgaggcgcggaggcgcgagctggaggcccggcggcggcgagagcaggaggaggagctgcggcgcctgcgggagcaggagaaggaggagaaggagcggaggcgcgagcgggccgaccgcggggaggctgagcggggcagcggcggcagcagcggggacgagctcagggaggacgatgagcccgtcaagaagcggggacgcaagggccggggccggggtcccccgtcctcctctgactccgagcccgaggccgagctggagagagaggccaagaaatcagcgaagaagccgcagtcctcaagcacagagcccgccaggaaacctggccagaaggagaagagagtgcggcccgaggagaagcaacaagccaagcccgtgaaggtggagcggacccggaagcggtccgagggcttctcgatggacaggaaggtagagaagaagaaagagccctccgtggaggagaagctgcagaagctgcacagtgagatcaagtttgccctaaaggtcgacagcccggacgtgaagaggtgcctgaatgccctagaggagctgggaaccctgcaggtgacctctcagatcctccagaagaacacagacgtggtggccaccttgaagaagattcgccgttacaaagcgaacaaggacgtaatggagaaggcagcagaagtctatacccggctcaagtcgcgggtcctcggcccaaagatcgaggcggtgcagaaagtgaacaaggctgggatggagaaggagaaggccgaggagaagctggccggggaggagctggccggggaggaggccccccaggagaaggcggaggacaagcccagcaccgatctctcagccccagtgaatggcgaggccacatcacagaagggggagagcgcagaggacaaggagcacgaggagggtcgggactcggaggaggggccaaggtgtggctcctctgaagacctgcacgagtgagtgtcccgggccgtggggtttggactcctgagcggcagcggtgtgacgcgcaccctgggtccgagccgctcctcctgtgccagtccctctgggatgggtcccagggatgtcgtccttactcgggcctcccaccttcacagctgaccccagggccccgctggctggcacttccggcggcccctacagagaggcagctccagggctttgagctgcctgcccctggcctcctgggaaggtggcttcttgccgagcctccagggtggcccaggtaggtaggccccgagcacaggcacccggctatctgacggtgcctgtgcccatcactgtgggctgctgtctggtacaaggctcagtggagtcactcacttacccagcagctgccttgtgctatgcctggctggcgccagcgtggggaccctggagatggttgtggtctctagtggcagaagacaggcagataggagggcggcactcgagcctcaggtgccacaacgggggtacactcctcggtgcccatcccacccaaccgccctacaggcagggcaggggcgggagggcatcctcacaccgcctttgctgttcccaccagcagcgtacgggagggtcccgacctggacaggcctgggagcgaccggcaggagcgcgagagggcacggggggactcggaggccctggacgaggagagctgagccgcgggcagccaggcccagcccccgcccgagctcaggctgcccctctccttccccggctcgcaggagagcagagcagagaactgtggggaacgctgtgctgtttgtatttgttcccttgggtttttttttcctgcctaatttctgtgatttccaaccaacatgaaatgactataaatggttttttaatga

SEQ ID NO: 658626 - DNA, 153 bp, Homo sapiens
tcatttgacacaggaggtggaggttgcagtgagcatagattgcatcactgcactccagcctgggacagagtgagactccagctcaaaaataaataaataaaataaatatacataattcatttatccatttctctgttgatatgcattcaggaa

SEQ ID NO: 658627 - DNA, 2225 bp, Homo sapiens
ccgccccctcggcgtccgctccgcccccggcttcgcctcccgctgccgccgccgccgccgccgcagccgctaccgccgctgcagccgctttccgcggcctgggcctctcgccgtcagcatgccacacgccttcaagcccggggacttggtgttcgctaagatgaagggctaccctcactggcctgccaggatcgacgacatcgcggatggcgccgtgaagcccccacccaacaagtaccccatctttttctttggcacacacgaaacagccttcctgggacccaaggacctgttcccctacgacaaatgtaaagacaagtacgggaagcccaacaagaggaaaggcttcaatgaagggctgtgggagatccagaacaacccccacgccagctacagcgcccctccgccagtgagctcctccgacagcgaggcccccgaggccaaccccgccgacggcagtgacgctgacgaggacgatgaggaccggggggtcatggccgtcacagcggtaaccgccacagctgccagcgacaggatggagagcgactcagactcagacaagagtagcgacaacagtggcctgaagaggaagacgcctgcgctaaagatgtcggtctcgaaacgagcccgaaaggcctccagcgacctggatcaggccagcgtgtccccatccgaagaggagaactcggaaagctcatctgagtcggagaagaccagcgaccaggacttcacacctgagaagaaagcagcggtccgggcgccacggaggggccctctggggggacggaaaaaaaagaaggcgccgtcagcctccgactccgactccaaggccgattcggacggggccaagcctgagccggtggccatggcgcggtcggcgtcctcctcctcctcttcctcctcctcctccgactccgatgtgtctgtgaagaagcctccgaggggcaggaagccagcggagaagcctctcccgaagccgcgagggcggaaaccgaagcctgaacggcctccgtccagctccagcagtgacagtgacagcgacgaggtggaccgcatcagtgagtggaagcggcgggacgaggcgcggaggcgcgagctggaggcccggcggcggcgagagcaggaggaggagctgcggcgcctgcgggagcaggagaaggaggagaaggagcggaggcgcgagcgggccgaccgcggggaggctgagcggggcagcggcggcagcagcggggacgagctcagggaggacgatgagcccgtcaagaagcggggacgcaagggccggggccggggtcccccgtcctcctctgactccgagcccgaggccgagctggagagagaggccaagaaatcagcgaagaagccgcagtcctcaagcacagagcccgccaggaaacctggccagaaggagaagagagtgcggcccgaggagaagcaacaagccaagcccgtgaaggtggagcggacccggaagcggtccgagggcttctcgatggacaggaaggtagagaagaagaaagagccctccgtggaggagaagctgcagaagctgcacagtgagatcaagtttgccctaaaggtcgacagcccggacgtgaagaggtgcctgaatgccctagaggagctgggaaccctgcaggtgacctctcagatcctccagaagaacacagacgtggtggccaccttgaagaagattcgccgttacaaagcgaacaaggacgtaatggagaaggcagcagaagtctatacccggctcaagtcgcgggtcctcggcccaaagatcgaggcggtgcagaaagtgaacaaggctgggatggagaaggagaaggccgaggagaagctggccggggaggagctggccggggaggaggccccccaggagaaggcggaggacaagcccagcaccgatctctcagccccagtgaatggcgaggccacatcacagaagggggagagcgcagaggacaaggagcgaccggcaggagcgcgagagggcacggggggactcggaggccctggacgaggagagctgagccgcgggcagccaggcccagcccccgcccgagctcaggctgcccctctccttccccggctcgcaggagagcagagcagagaactgtggggaacgctgtgctgtttgtatttgttcccttgggtttttttttcctgcctaatttctgtgatttccaaccaacatgaaatgactataaatggttttttaatga

SEQ ID NO: 658628 - DNA, 328 bp, Homo sapiens
tgagcatataagaaacattctccttaaacatattagatcacaggcatatcatcatcagagagaatccatatactggaagccaagaaacctactccatcatcagaacgccagcccttggtctgagcctgcggatgtaaaattggaactcacagcatatgcattgttggcccagctcaccaagcccagcctgacatcaaaaggagatagcgaaggccactagcatagtggcttggttggccaagcaacgcaatgcatataggggcttctcttctactcaggatactgtagttgctctccaagctcttgcctgaatatgccattcttgcag

SEQ ID NO: 658629 - DNA, 164 bp, Homo sapiens
tactcccccgggcctactctctaggctccccttgcactgactcactcactgacacgactctgcgcgcgctcgctactccgcgctttaaactttgcgcctgctacgctactacgttctacgacggtacccgcgttagttacaccgttacgaccgcgctaccgtac

SEQ ID NO: 658630 - DNA, 1235 bp, Homo sapiens
gactgaccttcagctgcctcgtgtccagcgccatggcgccctccaggaagttcttcgttggggtgaaactgtgaatgatgaacgggctggcagcagagtcatgggagagagctcatcggcactcatgaactgcggccaatggtgcctggcacgacacctgaggttggtttgttgctccccctacttgcctatatcgactatcgccctgtgcagacgctatgactcccaagattgctcgtcggctgccgccagaactgctacaaaagttgactaatgtgggctattaactggaggaccatcagccctgtgcattgatcaacatgaactgctggaagcccaccgtgggactgctccatgggtgtcacctcacagagatgaacgggcatgtataatgagggaagtcccgcatgaagcagactaggggccagaacaacgagggcgccaagacccaggcaagaacggacctccgcgaagtcacatcgccctgccatcggggcgagaaagctaagaatgacagggaacccgggacccaaagacaagcagtagaccacgagcagaccaagggcccgcagacaagcggaaaggaccgcaccacggacacccagggcgcaagagcccgggcgccccaatgcgacccgacacactcgacaaccacaaggacccaggaataccgagacagccagatagcagagccaacgcagccgagcgggccacaaacccggaaactacccgacctgccagggcccggtcggcaggcacagccaacgcaacaccagacgaggacacaacgagaggaaaacgcacacagaacaccaacatgcccgaaagcacacgacagagagccagcgagcaagacagccaaagaggggagacaaaaagacaaaccgcaaacccaaagagacacatgacacacacgaacgccacaccgaccacaccccgccccccccacctccccgacacctcactcaataccaccctcacatacaccactttcacaccctcttctacacgaggacatcagggagctgaggcgacagcaccagcacgcagagatccacatacgaagcggccgcgaaccgcgcaacaacgacggcaagggacggcgccaagaacgcgagaggtcaaccgagagatacagcgggggggggcggggagagagtggaacaagaaagcagggaagagggcaaaggcacacggtggcacacacgaaacagagcaagaggcctagggaccca

SEQ ID NO: 658631 - DNA, 1192 bp, Homo sapiens
ggtggctgaagttagtggagggccttcggggaccaggaactgggccctcaggactgggtcgaggagctgctgggaagtccgatcaacggcaagaatggagtcgaagaaggatgttggtgcaggattggcactgggggccatcgcgtgtgcgcgggactagatgcctgaggtctggttgccgtgtggggggaccggagtctatgtggcgtacgaggcctcattcgaattggatacgatctcgtcagacacagagatcgccatgtgatggcctctggctagggaatgaatgctgggctggacacagaatttctcgcgggagctaggggtgcccctactactgggggcagccaaacggtggcacttggagtggcacatgtgtccgtcaacatcgttgatctcatacacgaacgggcatgctcaatgagggctctggaggggggcctcgagtgcgacttggctagctgctcaactgggagaaacgaggcatcagggcctggagtcgaagaggtgactggcactgtgagatgcacccgaagacaagtcaagttgacccgcagtgacggtctcgacaccggggaattgtctggggtcagacaacaggagtcctgtcaactaggggtgcaggagcaacaggggtaccttctcaccggcgaatatggtcgtcctaattgaccatgttatttgggggggcccgtgggtggaaggctcaggtgactgccgtttggtgcatgcctttccttgtgctccccttggtggacctgtgtgctcccaaggatgggttttatgggaacgtcgtcaaatctactttgcgctttgcccacttgggggccattaaatcccccattggaaggggccccaaggttggacttccccaaaaaagcgttacccttggaaggaacggggggatgggacgggggtggtcctacaaatctctttccacaaagggagcggctcctttcttgggatgaagtcttcatttggggagcccgttcgccaatcgtgtcaacggaggaaaccggaaaggtgcgtagtcctgattggagggtccccgatcggtgcgatagtaatgggagtaagctggaatctgaagcgaccccgatatgggcgcccaggatacgggcaaaaacagtcacttcatacagacccagaattggtggatccttacaaacacagagatgtacactcatgaaga

SEQ ID NO: 658632 - DNA, 129 bp, Homo sapiens
ccaccgagaacgaggaactcttctgggctctgcgcggagcggctgagtcgttcggtgtcgtcaccaacttctacctccgcactcaggctgctcctgaaatcctcacctacttccagttccagtggggcg

SEQ ID NO: 658633 - DNA, 226 bp, Homo sapiens
agagtggcagtatcagcaacgttgtgtcctacagggttgctgtgctggcacacggagagcctagagagctcatggattgtaactaagaagaaaggttcctttttgtgtttttaaaaatgattttaataccgttttttacaccgttctctcggtacttttttttaagcgtaagtcagcattgtcttccagtgttaaaggcatacctcacctctgcaaggaacccacg

SEQ ID NO: 658634 - DNA, 110 bp, Homo sapiens
  misc_feature (97)..(97): n is a, c, g, or t
gggcacaatcacagcacactgcagcctgaaactctgggattactcgagcctagaagttgctgctgcagtgagctgagatgatgccactgtattctangcattaagcaaac

SEQ ID NO: 658635 - DNA, 439 bp, Homo sapiens
  misc_feature (17)..(17): n is a, c, g, or t
gaggtgtcaggcctctnagccgaagctcagccattgtaacccctgtgacctgcacatatatgtccagatggcctgcaggagccaagaagtctggggcagctgaaaaaccacacaagaagtaaaacagccagttcctgccttaactgattaaccaacattacaacattccaccattgtgacctgtccctgtcctaccttaactgatcaatcgaccttgtgacagtcttcttctggacaatgggtcttatcatctccccaccatgtaccttgtgaccccctcctctgctaacaatagataaccactttttactgtaattttccattacctacccaactcctataaagcaaccccttccccatctcccttcactgactctgttttcagactcagcccacttgcactcaagtgaataaacagccttgttgctcacaaaaaaaa

SEQ ID NO: 658636 - DNA, 1113 bp, Homo sapiens
gctggtgcgagaaagggggcgccgggccggtctagccggtgaggccggtgggctctctgtggctgcggctggggtaaatcgctgcggagagtatggtgcccttggtcggtgggaccgatgcccttggtccaggctgcctccctctctcatccctggactggggacgatgctttggacgctcgtggcttgcaagaccttccgtgtgtgcatgcatgctgcaaggtggcagctggtgccttgggctgcccgtgccctcgggaatttcgtcttgatgccaggtccttgaacctagctgtccctacgtcctggacagaggtgggaccctttgcagggcagcttcaattcgaaggtcttcaaaccctggattgtgtcccgcgcccgtggggttgattcttgtgtacaatggcaataaggacgaccaatgtgctctcgttattgagacactgcccgtcatcgtggaggcggaaaggtaagtcaggcgccccggggagggtcctgcttccacgcgtacaaaggaaattgccttgggaggattagcttcaaggggtctgttgtcgccggtggtggaaggagactctaatttcaagcgattggaagaggagacaggcgcttagaggaacgagacatctccacaggtcaaatggggcagtgggtcccccgagttggaggcggttccgcggaggtagattccaatgggagggacgcacccgttttttccacttattatagtggcccaaggaaagtagccagcgtgggcctataggcacaattcctcgcccggtggactcagggggttggaggggacttaggagaaagtggcaagagcgaacaggcaagggcgcaagtgaaggggaaaccgaaaagggtggtaaagccggcaggcccgtcgttcatggtcggtgggcggagcggaacaaagagcggtttttgaaaggaccggggacattgggcccttctttcaggcataaaaaccaaggccccctcttgcggtggaaagagggaccgcgccattacgttgtgcgaaaggggttttaggttttcagccccattattgggggccccagaaaatcggtggtttgtagcacttgggggagataacccggtggaccaccg

SEQ ID NO: 658637 - DNA, 159 bp, Homo sapiens
aggacaagtcgactacagcaaaatcatgaacggcaaactgtctgctcgaaatagaaaggttcagtgccatgttccaggaaaagaagcaggaagtacagactgcattttaagggtgatcagctagtcagcattggagatttaaagaaaggaaactgatgg

SEQ ID NO: 658638 - DNA, 442 bp, Homo sapiens
  misc_feature (16)..(16): n is a, c, g, or t
  misc_feature (124)..(124): n is a, c, g, or t
  misc_feature (132)..(132): n is a, c, g, or t
  misc_feature (143)..(143): n is a, c, g, or t
  misc_feature (152)..(152): n is a, c, g, or t
  misc_feature (158)..(158): n is a, c, g, or t
  misc_feature (172)..(172): n is a, c, g, or t
  misc_feature (174)..(174): n is a, c, g, or t
  misc_feature (177)..(177): n is a, c, g, or t
  misc_feature (179)..(179): n is a, c, g, or t
  misc_feature (182)..(182): n is a, c, g, or t
  misc_feature (202)..(202): n is a, c, g, or t
  misc_feature (204)..(204): n is a, c, g, or t
  misc_feature (210)..(210): n is a, c, g, or t
  misc_feature (222)..(222): n is a, c, g, or t
  misc_feature (228)..(228): n is a, c, g, or t
  misc_feature (303)..(303): n is a, c, g, or t
  misc_feature (315)..(315): n is a, c, g, or t
  misc_feature (343)..(343): n is a, c, g, or t
  misc_feature (353)..(353): n is a, c, g, or t
tttgctgtgacagccnctgtaggaaaagagcacgcacttccccttgacagcttcaaatgcacagagctgaataaaggctcgacaggggccccggactgtgacgaagttgttaccgttgcccatncagccgcngtactgaaaantctcacagnccatgnatgtaccattatananatncntgntggtcattcccatgcagggncngccaantagcccagctgncaggantcttctttcttggtgacttcagttaccagttgcccaccccgtgatccttcctcttcttggggtagcacagccctncgcactctcggnattaagatgggctctggttcgtgctccncagggacacnttcacctcggtcagccatggtgaagatggagtcctcaggtatgcccacactctgggcaaccactctaaagtcctgcaggagagtttccc

SEQ ID NO: 658639 - DNA, 289 bp, Homo sapiens
  misc_feature (119)..(119): n is a, c, g, or t
  misc_feature (134)..(134): n is a, c, g, or t
gagacagtaatctctcaccccagtggagtgcaacagcggtgtctccgctcactgccagcctccacctccccgattcaaatgattcttgtgcctcagcctcctgagtagctgggactacnaggcatgtgacactnatgcctggctaatttttttgctatttttaagtagagacggggttttgccatgttggcccgaggcaggtggatcacttgaggccagaattcgagaccagcctggccaatgtggtgaaaccctgtatcactcttttaggcccttctgtcgtcttctc

SEQ ID NO: 658640 - DNA, 319 bp, Homo sapiens
ttaggaccacaatgtagtaaacttgaaagaacagcacaggtagacttctcttagtggtgactttgtctgctgcgtttcagttgtgtgacttattcttagacatttcacaagggcaccttgtataggttatacaggcaatttctctccatccactacgtcatttcattaattctccagtgacttgccgctttccccggacaacactcaacaggttgtgtaatttcatggtgaacagagtgtgagctgggaatcatttattggctattgccaaagcaggggaattcaacctggttccatcttcataatttaaagtcgacgc

SEQ ID NO: 658641 - DNA, 166 bp, Homo sapiens
agtgtggtgcgtgtgtgtgtctccccaaagacagaaatgggataaaaaaagagagattcccagctcgcgctctccctcacattctatttcgctctcttcgccacaaaatatatgtgagataagcgggtgcacgtataaagggacggtatagagagaaacaggatag

SEQ ID NO: 658642 - DNA, 708 bp, Homo sapiens
  misc_feature (368)..(368): n is a, c, g, or t
cacgaggctacgatgaagtaccatgtgcgtgcttattataccaagaaatggcggacaccctatatgactaactgagatgcctagaaggaaatatgctagtgagctaattatatgatacggttatgaccctgagcaccctaacaatatttaacagagcacctccgactacgttactaaacatagtggtgtgcgatatggcgaggggactaacctatctagcctgaggatcgctaacttgtcaacgtagactacatacttcaacctacaagtacttcaatgctcaatctaatagcccttcaacaataacacgttacgccacaagaatgagctatttggagcactaggagacaaactcaaccagcgagagnataattattagcattatctcgctttatattttccgccaaatgacaacgcgctaggatcacactcactagcttacagtgcgtcaacatatatacaccgtcttaaactaactaggcgaatgttaaccctacagagaacgaaggtcagggtaagtattctgagaaccgttgtcacgggataaacgtgtcgcatatataagtacttgactgaccatgctcaggcttattaacaccacaagcgcacaactactcatagcctatattggatatcccacagttagtccacccggcgagtgtctttttcatagggaatcagggcggtcccctgtacgcgtagttactc

SEQ ID NO: 658643 - DNA, 141 bp, Homo sapiens
  misc_feature (101)..(101): n is a, c, g, or t
ggtgtggtggtgcgcacctgtaattccagccactcaggaggctgaggcatgagaatcgcctgaacccaggaggcagaggcagcaatgacccccgatctcgntgctgcactccagcagcctggcaacagccagactgtctcg

SEQ ID NO: 658644 - DNA, 793 bp, Homo sapiens
agcggtctaccacatcggctctgtctctgactccatccaagcgtgcaagctggcccaggagaatggctggggggtcgtggatgagtcatcgctcacgagatgactgatgacactttcattgctgacctgtgtggtggggctgttgaacaggcgacatcaacactggtgccccgttgccgctctctgaacgatctgggctaaagtaccacaccaggctcatgagtacattgacgaacatcgtgggtgcgatgacagcgtcgtctttgccggacataactgtccgtattcccagtgtgctgttcattcctctggcttgtgctggcagactgtgtgagacctctgtctcatctctcctgtgtaactcttgcatgtcctgatctgtgatacgttcacccttcctgatatcccctgagccccagcggctgcccacgaacttccctggagttgacctgctcgcgcgtgcgtccttggcttaccgtgacgctcgttggcatgtctcatgtcatcgaccctctctttcgtgtgccgctacgtccatttggggttccagcgctttgccagcttgcttcactctgtctcgtttctctcttccctcagaaactagaaatgtgagatgaggattattataaaagggcggtcgtgttggcaagcaatgatcagccatctgtgatgggagcgtcagggttggcttgtgcctcgaggtgtatagagtagggaccatgtgtcacttgatgcttctgctcttgtcccacgtgtcttccactttgccttatgagccgtgaactgtgctata

SEQ ID NO: 658645 - DNA, 380 bp, Homo sapiens
acaatctcggctcactgcaacctctgccttctgggctcaagcaatcctcccacttcaacctcccaagtagctgggactataggcatgcgccaccatgcccagctgatttttgtaattttttgtagagatggggtttcgtgacattgcccaggctggtctcgaactcttgagctcaagcagtctacccaccttgacctcccaaagtgctgggattacaggcttgagcaaccatgtttggcctttcttttaaatttgttgatgttttttgaagaattaagtcattacttattaggcaagttactattttgtttttttgtcattggtggtagggactaaggaaggaaacagatattttaaaatactcacaacatgtggatttc

SEQ ID NO: 658646 - DNA, 705 bp, Homo sapiens
  misc_feature (3)..(3): n is a, c, g, or t
  misc_feature (97)..(97): n is a, c, g, or t
  misc_feature (104)..(104): n is a, c, g, or t
  misc_feature (109)..(110): n is a, c, g, or t
  misc_feature (114)..(114): n is a, c, g, or t
  misc_feature (199)..(199): n is a, c, g, or t
  misc_feature (210)..(212): n is a, c, g, or t
  misc_feature (215)..(216): n is a, c, g, or t
  misc_feature (227)..(227): n is a, c, g, or t
  misc_feature (235)..(235): n is a, c, g, or t
  misc_feature (253)..(253): n is a, c, g, or t
  misc_feature (265)..(265): n is a, c, g, or t
  misc_feature (269)..(269): n is a, c, g, or t
  misc_feature (279)..(279): n is a, c, g, or t
  misc_feature (287)..(287): n is a, c, g, or t
  misc_feature (312)..(312): n is a, c, g, or t
  misc_feature (314)..(314): n is a, c, g, or t
  misc_feature (322)..(322): n is a, c, g, or t
  misc_feature (324)..(324): n is a, c, g, or t
  misc_feature (330)..(330): n is a, c, g, or t
  misc_feature (341)..(341): n is a, c, g, or t
  misc_feature (344)..(344): n is a, c, g, or t
  misc_feature (346)..(346): n is a, c, g, or t
  misc_feature (355)..(355): n is a, c, g, or t
  misc_feature (360)..(360): n is a, c, g, or t
  misc_feature (365)..(365): n is a, c, g, or t
  misc_feature (371)..(371): n is a, c, g, or t
  misc_feature (378)..(378): n is a, c, g, or t
  misc_feature (433)..(433): n is a, c, g, or t
  misc_feature (439)..(440): n is a, c, g, or t
  misc_feature (566)..(566): n is a, c, g, or t
  misc_feature (662)..(662): n is a, c, g, or t
gtnttgatatttattgccattattttcttgtgattggtacaatttaaaaataagtctatgttttcacattgattttaaaaaatatagcatgtttganttacaantgatnngcanactctattacttcatagctgaccatcttccagaaaattcccacttaattgaatacttagaaaaggatggccagtggccgattganaggtatattannnttnngggccgttttnattctgangacaaatatcttcatggnaatctatttgtnagcntctgcgattnctgctgancgtctaccgtctgtgaatataccantncccctttncncctgangcagatcattntgncntcctggccngcctnccctncccttngggggtnggtgtggctgccactgctacgctctcaattgcacactcatcagttcctctgcggntccggnngtagccattctcaccccagccggtgccccagctgtttttaacaatccagtaatccatcccagaggctgagtcagtgccatagcccacaagcagaacagcatgattagtcagctcaaaggggttganagggtctcttagacccgtgtggtggtagatcccctttttgtagtggaggaagtcatcatatacttcaaaagcaactgccatgggcccatgatggancaactcaagcttcatcagggcttcattgcagcctccatagaaa

SEQ ID NO: 658647 - DNA, 802 bp, Homo sapiens
gagttagtgtctcgcaacgattggagctcgaatccaggagcaacactggatgtcgcttggatgaagagagctctcaacaccatcccggactaccttttgcagtgaatgcttgggagcgacaaagcgtagaacccggcaccctgtagcgtgcttgaactaggaatgtccaatatgcacgcaaatgccctcgcagtccggctgtgcagtaagattcggtcctcagctggtgtgcttccattcatgctgtagtgtccgagccatgacgcctgcgagagatcttcctactaggtaagaacgagacctgtgaacaagttcaaccttggccaggttcagtaccatcatacagcaccagcatgtcaccgtctcctactaacgagttacaactgcggccaacatggcccttgatactgctgcctgatgagctgtccctagcgacgttgccttgcagccctcctgtcccttccccgccagtcagtactaccctgctagaagccccttccctcctctattactcaggagggctgggggggctccgtggcttctgagcactcagccatttccccgccccgtctcgtgtcctccccgtctgcactttgctatgacttgtttggcacagacgtgcggcctgggccttctcagcagccgccttctagttggggtgctagtcagactgatctgccggctcccagcccagcctgtgtagataaggaggcccacgtgcactagggagccgaattctacaatcccgctggggctggccggggcgggagagaaagctgtaccgcccgggtggcctgggggg

SEQ ID NO: 658648 - DNA, 368 bp, Homo sapiens
aagaggaaacgtgaggcccagtcttggctccactatgaaccccaatttccccaggggaagctgaagaggagttggcagaccttcctgtccctgtctgaggttggggtggggcaggaaaaccaaaggtgaggccagtcacaagtcaagggtgaagggaagtcacacgagtggtgggctgggtcccaggacagggtggccgggagcagtgccgccccagggaaaagacgagaattggctgataacaccagggagcaggctagggtgtcgggggctgtcctcagaattaagctacccctgttttcccttgagcattaagcctcccccaaccttatcatcccctcatcactgctgtgacctctgctgagttt

SEQ ID NO: 658649 - DNA, 416 bp, Homo sapiens
  misc_feature (3)..(3): n is a, c, g, or t
  misc_feature (97)..(97): n is a, c, g, or t
  misc_feature (104)..(104): n is a, c, g, or t
  misc_feature (109)..(110): n is a, c, g, or t
  misc_feature (114)..(114): n is a, c, g, or t
gtnttgatatttattgccattattttcttgtgattggtacaatttaaaaataagtctatgttttcacattgattttaaaaaatatagcatgtttganttacaantgatnngcanactctattacttcatagctgaccatcttccagaaaattcccacttaattgaatacttagaaaaggaaagggaagagaagagaaaaaagtattgcaaataatttatgtagatcctctgtcctgaagaaagtagaacgtaactccccactccttaagtatggattgcacatgtgacttccgtccaaagagtgccatgtgcgaagggggaataaaagtaactttacagtggagaaacctgactaatgctacattgccagatgatcaaggtcaacccaatagtgatgtcatggtgatagtgtgtat

SEQ ID NO: 658650 - DNA, 117 bp, Homo sapiens
gtcggtactctgtgcgatttaggtcactggattcatggaaatcttttttttggttgtttgttttttaaagacaggtcttgctctgtcacctaggctggagtgcagtggcatgatctt

SEQ ID NO: 658651 - DNA, 313 bp, Homo sapiens
ccctcagattacctcaaaagttccattatacagacactaatagcatctactaagtgtcaatctgtagtgcctgctatgtgccaggcattggagataatataatgatgaacaagataaacatggcacttggaaaagagagtctagttcccactctcagcccaccccaaagagaagccagaattcagcttccaaagatctcagatgcccttgcatcacctccctgaagagggtgggtgaagctttggtgtctgaagagaatttggctggacaatcccccaggtttggaacaatgggaaggagctgccatctgtgt

SEQ ID NO: 658652 - DNA, 748 bp, Homo sapiens
  misc_feature (442)..(442): n is a, c, g, or t
  misc_feature (523)..(523): n is a, c, g, or t
  misc_feature (580)..(580): n is a, c, g, or t
  misc_feature (587)..(587): n is a, c, g, or t
  misc_feature (601)..(601): n is a, c, g, or t
  misc_feature (608)..(608): n is a, c, g, or t
tccctgaagtgtctttccccatttatcttccatgttctcaagactgggctcagatgtccttaagccccatgccttgtgcctgtctcacagcaccttatctgtgcttgccatttaggattatgtacagctgtagtggttccagatcttgacctagtgtggcagctctgcttcccaaaatcatcagggatccagtgtccttctactttgcacaatgtaactctttgattgccatatcatatccaatttggctgcttaaattccaaccatcatacctttaacccagcacataggaaggatgaatagtcaaagaccagcacacaactcctccccttgaaatacctttttgattagttgcaaatatttctacttacatcccattaaccagaacctggtcatacagctatactctgctgcaagggagtctgagaaaatgtagcctttntctgggaaggcatatattcaggtcaatattgaggctctattatagtactaatgaagaagagataatgctgagggatactgnaggtataacagtctctgcttgcaagatgaacacggcaagccattgctttcatctccntttcagncttcactcaatcanaacttgnctattggagttctactgtctaagaagaaaacaggaccagcatggtcccttgctttatgaaccttcaatccttaaccagtacccaccagatgattcctgatcgctctgttagcccataaggttccggccggcgggggttcc

SEQ ID NO: 658653 - DNA, 100 bp, Homo sapiens
aacattaaagatacagagtgaattctgatcggaacctatctgaaattattttacttaataagaagtggaaaaacactaagtgcttaccattaacattaat

SEQ ID NO: 658654 - DNA, 641 bp, Homo sapiens
ctgtgttatacagcctcatattatcgagctaatgacagctgacatctgattcatctgttgttggacagcgttgatgagacccgctttagcatatcgagagtttctgcgtactactaagatttatcaatctgttgtcgatacattcatgcagtagtgtcagatttacttttacaaaggagagagtgtccctacactcattgaggcttctgcatcacctctaatcctaggacagttgttggaaccaatggtgccacttcagctgccgtcaccattggaacctcctctggtacacaccacagttgcatacagattctcttggtattatctgcctcggatgtgattgaagacgagctgtagtcatgcataacgccaatctagacatacctgtgtaattgttcagcagtatacttcatggatgatacagatggtccacattcaacatacattgtgtctatgagctagatggcattccttattcacttagcattcagatgtaaggccatgtgtgcatgcatgactggagaggcttaagtcttatacacagatatcgatatagagtactcagctgatgctgcgtgcacacttattggaatcagtgcatcatatctgtggtgtccggaccttattatgtgcatacctct

SEQ ID NO: 658655 - DNA, 307 bp, Homo sapiens
  misc_feature (40)..(40): n is a, c, g, or t
  misc_feature (279)..(279): n is a, c, g, or t
  misc_feature (294)..(294): n is a, c, g, or t
  misc_feature (298)..(298): n is a, c, g, or t
gagtaacctaaagaattactctggtgtctgggcacagtantcacgcctgtaatcccagcattctgggaggctgaggtgggcagatcatgaggtcaggagttcgagaccaacctggccaacgtgatgaaaccccatctctactaaaaaaaattcaagaagtagtcaagagtggtggtgtgcacctgtaatatcagctactcaggaggctgaggcaggagcatcgcttgaatcctggaggcaaaggttgcagcgagccgagatcggaccattgcactccancctgggcaaaagagnccgnctcgtctcc

SEQ ID NO: 658656 - DNA, 161 bp, Homo sapiens
gtgacatcaggtgattggtgacaaatatgtgtgtagagtcagggagagtgcgtcatatgttgtcctaggaagattgtagtggtgagggtgttattataataatgtttgtgtattcggctatgaagaatagggagaaggggcctgcggcgtattcgatgtag

SEQ ID NO: 658657 - DNA, 468 bp, Homo sapiens
  misc_feature (21)..(21): n is a, c, g, or t
  misc_feature (25)..(25): n is a, c, g, or t
  misc_feature (43)..(43): n is a, c, g, or t
caggttacccttagcgaaagnaggnacattgcaccattacggnaaagaggatacaaactgtcaggcctctgagcccaagctaagccatcacatctcctgtgacctgcacatatacatccagatgacctgaagcaaatgaagaaccacaaaaaataacattccaccattgtgatctgttcctacccaccctaactgatcaattgaccttatgacaataccccctccccgcccttgcaataatatactttgtcatactcccccgcccctaagaaggtactttgtaatattctccccgcccttgagaatgtactttgtgagatccaccccctgcctataaaaaattgctcctaactccaccgcctatcccaaacctataagaactaatgataatcccagcaccctttgctgactcctttcttggacacagcctgcttgcacccaggtgaaataaacagccttgttgctcat

SEQ ID NO: 658658 - DNA, 693 bp, Homo sapiens
agcgatataacactgggactgaacaggcagccaactggtatctttgaacatgtatgtcacgtacaccacaatggacctagttgaacacagtctactggggaccacctgtcagatgggcgcaactgatgcgcgagtaggatctgaggctagagcatactcatcctggtgggccgagtcaggaactgtcaaaagtgctgctggagtaacagcatcctcgaggtagcaccaatatgcctatatttggttcagaaggctggggtgcccagaccttggactagaagtggctgcaatatttatgcttggtgcgtcgagtatgagagagtagggcatgattgacgcgtcagattatgtttacttggtgggatcattgtgtgtgctcatttccaaagaggtgcaagatcgtgctagttgttcgactggagccaaggagacacgatggtattgttccttgatgaaatcatgcatgggcctattataccgtcacgaggagacgatgcccggtcctgatcagcaggtgtggagaagctgatctgcgaggatgtatgctatggtcgaacaatgggtccgcttaatatcgcaaagggaaaaattcactgggtggatcgctgcattggatttactgcacgaatcaaggagggaaaacccggtacccaaagaggttgttagggtgtggtggggaattgaggttaaaaa

SEQ ID NO: 658659 - DNA, 111 bp, Homo sapiens
attcggaagagaccaattcaccttattacaagaaaactttagcaaacaatttaccaaataaagtataggggttagagattgaaacctggcgcatagatatagtaccgcagg

SEQ ID NO: 658660 - DNA, 774 bp, Homo sapiens
ctggcgctcatacattttcctcccacaagcatgagccacccacggcctaactcttcatcctcctcttcaccatctccacccgcttctctgtgccccatatgggtatatgtcagcttcttctggttcccaaggggaccttcactggtgccattcctgctctctggaacgccgctagctcctaccccttcccatgcttctgacaactcctctgtaaaaatgtcacatcctccgaggggcctcctcgatcacccagtgctaaacactctcctctctctctctttgtttcttttggagatggagtctcgctctgtaacccaggcaggagtgcagtgggtgtagatctacggatcaatgcaacctctgcttcctgggttcaagcaattctcgagcctcaggctcccgagatagctggggattacaggcgcccgccaccacgccgggcataattgtcattaggaattcacaagctagagaccagggtttcaccatctgggaccaggcaggtcttaaactcctgacctcgtgtccacccaccggggctcccaaagtgctggaatgacaggcgtgagcaaccgaaaccgggcacgctctaacaaacggggtacagcactatcatcggactggagcggccacggtggaacaatagccactggaacacggcccctaggtcaagggacactcaggctcagccctaagcagtgggaccgaggccaaccggcaactggcaatagtgccccacggcacacgggggaacgcaggtgcagggggctcgaa

SEQ ID NO: 658661 - DNA, 103 bp, Homo sapiens
gcccgtccgcttgttctacggtggattccggccgcttgtctagggtggaaccccccagcttgcactagggtggaacgcggagcgagagaggcccgaacaccag

SEQ ID NO: 658662 - DNA, 229 bp, Homo sapiens
tgacggtgaatgttagttagaccagaaagtgtgtgtgttctgtagctcagttcccagacagctttttaggtagtggaggaggtggcttcatgtggcacgttgtggcatttatattccactttgggagggtcaggctgttggccttctggcagcaggtggctatgttaagggaacgctcagcagggcatgtgcacgtgaggctccgcgaatagactgtcttcgatcactt

SEQ ID NO: 658663 - DNA, 243 bp, Homo sapiens
ccttcaaaagtggccttgcgcctttgttggaatgccttggttaaagtgcactaacgcatctgctacgttggtaatgttgaattgatccacgttaatggctgcttgccagtccactaaagagttcgcctggttgaatcacataccctaacttggtttgcataaaagccgcggccttttcaggattctgttcccagactgaggcccaagtttcgccacgaaattgctgatccagccatgtttggc

SEQ ID NO: 658664 - DNA, 644 bp, Homo sapiens
aactgtggattaacatctttttatgttatatgtattatatactgtactcttataatcaagtaaactggctgggcatggtggctgatgcaggtaatcccagcagtttgggagacagaagcagcggattgcctgagctcaggagtttgagaccagcccgggcaacaccgcaaaacctcatctctactgaaaatacgagaatctgccgggcgtggtggtgcgcacccgtagtcctagctgcttgtggggctgaggcgggaggatcgcttgagcctgggaggttgaggctgcagtgagccgagatggtgccactgcactccagcctgagtgacagagtgacaccccatttctaaaaaaaaaaaaacaaatgaagtaaactagggaaaatacattcttagaaccacttaatggactaagtagagatcgattactagaaaactatacaggacagtgacaactacttttacagtactgtactgtctttatggataccgaagtttacttcaatctgtttacccagatgttttgtctcgtctcgaactagtaagcaaccaaggttaagaactcaactattagttcaaccagtcattcaagcaccttttcctgaatgtcctgaccctctcggtcttgggaccttcgaaacctat

SEQ ID NO: 658665 - DNA, 515 bp, Homo sapiens
gaagaaataactgaaaaaaaaaacaactctggtaaaacaaggctaaaaacagcattctgcgtgttgcataacaagaaccgacccgtttacgaagacgacgcgtagataactgccacgcgtcgacgggactcgtaccgtacggcgcagtaggctgctgcgaactccgatgcgacacgagaacgaaccggcgaaacgtaaaacgaaaacgcaaacgaaaacttccaaacgaaacggctgcactatacgatgactgtcccgttttgcgattgcacgtttagactcgtggtgggcgggcttcagcagcaaccaagacccccctcagtaaaccaagggcaaaaccccgcagcaattccgccacccagatgcgagggctcagcagtctctggtctttgctcgtcactgccccgaggtcgtctgtacctgggcaagtaacctccaccttctgtgagcgcgtgcagctgccgcggggtgttagaacggattcaagcaaagaactcctgtaagatcttcttatg

SEQ ID NO: 658666 - DNA, 282 bp, Homo sapiens
ttttttcccccccccccgccccccccgggggcccgggggttttttttcccaaaaaggggccgcccccccccccccccccccggtattaagggccccccttaaagggtgaagggggggccccccccccaaaaaagggggggaacccgggtttctccctaaggggaccccccggggttttggcttgaatgggggggggcccctttttttaaccctttttgggggggggggggggggtttaaaatggggggtttttttaaaaaaaaaggggggttttttttccca

SEQ ID NO: 658667 - DNA, 134 bp, Homo sapiens
atgacccatatcagtcaccatgccttgtgacaactgtgggttttatagtaaagtcagtctctagattaaatcttggcagaaaaagccgctttcagaaacttgtctcactacaaaaacaacaacagctgcggccg

SEQ ID NO: 658668 - DNA, 209 bp, Homo sapiens
cgagtccagcatatcaacgaggctgaggtgggaggatctactgagcccagcacagttaaggctgtagtgagccatgcatcacaccactgcactctagcctaggtgaccaagcacgaacttgtccaatttaaaaaacaaattaactcatacattagtaagcaaccacatttttaaatagtctacagagggtacgtctggctgagccgggg

SEQ ID NO: 658669 - DNA, 136 bp, Homo sapiens
ctcaggctactcttgaggatccccacccgtcaacgacataccatctcttctaagaggcaacaactctacgttgcgtcacggctgtggtgtcacacaccttgagcctgcacctgttgcaggcgtatggggctgcctg

SEQ ID NO: 658670 - DNA, 143 bp, Homo sapiens
aactgagtgattaccctgtgattgcttctcctggttcagaagctcccccactgagcaccttgtgacccccgcccctgcccaccagagaacagacccctttgactgtaattttccattaccttcccaaatcctattagaactgg

SEQ ID NO: 658671 - DNA, 225 bp, Homo sapiens
agaggattcactggagctgaactcagccacaccttaacaggctcagactgaagcatgccctgtcacctttacatagcgtcaactgccagcagatgcttctgtggacctggggagccccctgttggtggaagctgtgtttgtggactggaggcagtggaaggtacagcacgtggatccgtggggagctgatgtatgaggctaacagcatacaaccgaaagcctgct

SEQ ID NO: 658672 - DNA, 483 bp, Homo sapiens
tcagctacccccagacccgttttcagaggagggtgttgaggccagagaggggagggaccttcccagtccctgagcctgccaaggtgggcccagcttggggtggggacagaggggctgctcctggctggggcaagagttggaggggtctccgatgggggcatggccacgccctgtgccatgaagcccctcacagaaactagggagtcgtgggcaacaccctgtccctgtgacaggaggggaaactgagtcacggagtgcccagggccccatggcaggagtgggcagggcctggttcttgtgccttggcctccatctgggaggaggcagggagcagagctcagactcctcccagtgagggccccccatgtggctctgctgcacggccccagttggggggctccctgggtgggggggctctgggaagcccacagttacccccaggtagaaatgtctgtggcctgcacctctgcagcctggcctcct

SEQ ID NO: 658673 - DNA, 367 bp, Homo sapiens
ggtcgacttttttttttttgtagagacagtgtctcgctgtgttgcccaggctggtcttgaactcctgagctcaaatgatcatcttacctcggcctcctgaagtgctgggagtacaggcatgagccatctcgcctggctgacatttgacaaaatgattgaatagatttttgttaaactttaattattatgatactatacattcaatattaaaaaataaactcttaggcatgtcttgaggattcactcattatacttaagtaggtatttattattttacagcagctgataaatactggacagtgttgatgatgggcagcatgttctcttggatgaagataatgcaaataatagtctggacttctgatag

SEQ ID NO: 658674 - DNA, 375 bp, Homo sapiens
  misc_feature (319)..(319): n is a, c, g, or t
gggatacctcatgttgagctttttttttttattattatttatttgagacagtcttgctctgttgcccaggctggagtgcagtggtgcgatctcggctcactgcaacctccacttcctgggttcaagtgatcctcccacctcagcctcccaagaagctgggactgcaggtgtgcactgccatgcccagctaatttttgtatttttagtagagacaggatttcaccatgttggccaggctggtcttgaactcctgacctcaagtgatccggctgccttggcctcccaaaatgctgggattacagatgtgagccaccatgtntggccctcatgtttgagcttcgaccataacttgggtgtgccctgggaatggcaaag

SEQ ID NO: 658675 - DNA, 780 bp, Homo sapiens
tcaaatgccatctgctttttaaggccccctctcagtaggaagcagaagaatacaagtatgattctgctgctactgagaggcggacttaataagcagatggatgtgagacaagtggatgaaagcatgtgagagaagaaagggtaaccaacagataagaaaaaatgagggaagcgcggatggagaagtgtgtgaatagtgtacacggaacagaaacgatacacttaactagaagataaagatcttacaacaactgatatcactgccattttagtacacagagaaaatccacaatatcagcaccatgactgaaatcagcatatctagggatgcaaggtcagcataccctgtaatagtcaatcaaagagtcacacacgaaaaattcgaagataccgttaaccaaggatctgagacactattactgtcacaagagacctaggcagtgcccctgacacctaagcacaagacgcggaacgcacaagcgctaaaaacgcgtcacaccacgtcaacctaccaagagccaacccctagacacatccacacgacaccaagagtcagagaaacacctcaacaaccgacacacacgaagaaacccaccatacacaccatccgccaccacgactcaccaaagcctaacaagcagacaaacagcatgacaataccacaagggcatccaacacgcacaacccacccgacacaacacaccaacaacccgagcacacaccgcacagcgcaacaaccagcacgaagagaccagcagacactagacagaacgcaaacaag

SEQ ID NO: 658676 - DNA, 133 bp, Homo sapiens
atccgtatgaggagagctgtgctcgaatatatgactacctgtacctggaagttcttcatcagatatttctaaatttggcacagcttgaagattatcacctttacaaagaataatcagttctcatccttcggag

SEQ ID NO: 658677 - DNA, 124 bp, Homo sapiens
  misc_feature (6)..(6): n is a, c, g, or t
cggaanacacagcgatgataaatgtggaaattataagtgcccagggtaatggtgtgtagaacaaacttcttcacttggggtggtattcgcatcaaagaggatgtccactccaagagtcgctggt

SEQ ID NO: 658678 - DNA, 1262 bp, Homo sapiens
  misc_feature (375)..(375): n is a, c, g, or t
  misc_feature (384)..(384): n is a, c, g, or t
  misc_feature (448)..(448): n is a, c, g, or t
ggccgaggagttgtcggggtttcctgcttcaacagtgccttggaccggaatcccggacgctcgtatccccaccccgggccggtcgcccatagccagccctccgtcacctcttcactcgcaccctcggactgccctctaggccccgcgccggcggcgtccatgcgtccgcgcagtcctaccgggctgccgcctgcccagccatctctcttaggtcgccgctcgagtggatcgaggcgcgtctcgcgctcgcgaggattggcagccggaacgtcactcgagccaggacttcgagaagggcctcgccaatcaaagcacggcacgaaggatccaactcgtgagagcctctgtacgccatccgtactggttctaccttgntcctagtgntcattacttacgtttgcactcgacgatggaatgatggcgttatgaacgtgaacgttgtgccaanatctagcgttatctatcacgcaagtcatcaatggaggcacgcagaggaaccatgcatgtaggaaaacctgtatgcatatgcctgaatgaatccgaaggaagcgtggggcggatcatcatatcctttcgaggactatctagatgagaaccatggacctgtgatctgaactggggaacgacgcggaggcatgaactcgcaactggacggtgttgcatttacctatttttgcgatcaaccacatactgttgaacaatcaaggttctgcgtacattggaacacatggtaactggaagcgtggaaccgcatgaatccaatggataatcccgccaatggtgctgttgactttacagttccgataactaccaattagacttgacatgatgcagggtgaaaggaccagtcgagctgaacttgggggtgaccatggttgatccaatgttaggagccaaaactgcggaagcagcccgatatcatgggctgagcgggcacttatcttgtttggaaccatggacctcgcctgggtgagaccgttgatagatcgaaagttagacgtacggcctaattgccccatagccaggtgggtgactcactgtgtcaccagggtgcgggcatgaactggtgggggtttaccataacctctggtcacaaatgggtatcccgagaatcccctataggtgttctcgaatggtacgctcctcttgacaacacgaatgggccccaaaacaagacgaaacgcgggtcctatcgctgggaacagctacaaagcgcagtctaaactccacagagtctgccacggaaaaagccagagtagata

SEQ ID NO: 658679 - DNA, 988 bp, Homo sapiens
  misc_feature (865)..(865): n is a, c, g, or t
atcttgactcttcggttagagggagtctcattggagatttgtctctgggattaatgagtgtatgcctagctactttctccagtttacttttagaccatatgttgtttgttttgaatatcattccttaggctatgttgagagtagagtggcttcccattaggagaactaatttagggcatgtcttttgctgaatcccgtcagcatatttaacaaattcccaattctagatatttccttttatttctctagtaccctttgccagggctctacacatcaaaggtgttcatgaagtatttgtcaaaggaaagaacagtaatgacacctaacacataatgagtgattagtatgttccaggcattgcgtgagctatttactgtgagtgatttaatgttatcttcccagcagacctctgaggtaggtactagtatgatccccatttcgtacatgaggaaactgacactaagggacataaaataagttttttgaagtcacaaagtgaataaaaggaagaaccaggtttaattgaagcccatagcaatgaaaacattgtggaacttattcttcatgaatggtttacaatttaaacaaaatgtcacctagaaaatagatgaaaatatgttcaaccaggtctggatttttccaagtgtttactactgaattttcattcaataacaagtttaacttccaaaaaggtgttggtatctgattttctgcctgcctcagaatgtgatttgtctgcctttgggtaatccagccttgggtagagaaggaatttgaactcaggaaattcaactccagaactgatgttcttttttttttttacatttaagttcggggatacatgtgcagaaggtgcaggttggtnacattaggtatacttgtgccaggggggttggcggcacctatcactccatcatctagatataaagctctgcatgcataagatattggtcctaaggctctccctcccatggccccgggccgaatg

SEQ ID NO: 658680 - DNA, 135 bp, Homo sapiens
ggtatgtagtatttctgcaggcacaggttacaactccaaatccagacctttatatcatcattatttcaacgcaacaggaggaggctcagccttgctttggctcattcccagagtaagagcgcatgctggagggga

SEQ ID NO: 658681 - DNA, 976 bp, Homo sapiens
tcgctgctcgccagccaggactcggcctggcagtggcggctggtgattcggaccgatccgacctgggcggaggtagccgtgccccgcggatgagccggtgaccaagctgggtgccgagcgggaggcagctgtggcgattgagtgtgatggacgaggctgtctgtgtcattatgtgtgcgtcggtcacgtataatatccggggtcctgccctcatcccaagaatgaagaccaagtcaccgaatctactatatcaccctcttctccattgtcctcctgggcctcattgccactggcatgtttcagtttcaggccccattctatcgagtcctcaaatgactggaatgtaggagaagcgcaggatccgtgatgtgccggttgttaggctgcagtcgagcagtccatcccaaagcggggggatctcaggtagcatgaatggcacacgtgattctcgagtgtctatcgctggtggagttcaacccaaaagaacgaaaatcacaggtgtataatctatgctctggaacaagagtacgtggatgactttggggtcctctgctcaggaatcaccgatctcccgggagtataatgaactgctcatgggccatctcagacagtgactactagagtgatgacatcaaccgggctgtctgtttgttcccgtccatcgatgtgcttaagcagaacacgactgcgcatcaatggagacatgcacaaagcgatggggccaggtctctagtcgggatcgagtacgaatcgcctgtttgttcagcctgttgcctggagttccccagaataataaaaagcctggagttccaaaaacaggcctgtggctgtgcgggttccaaatgaactacgggcaggtacaattcgactccggccaatgccacgaagcgaggggttccaaaagaaggcggggaaaactcgcatcaagggcgccctaaagggacaacccgccagagagttttaacccccagttttc

SEQ ID NO: 658682 - DNA, 1271 bp, Homo sapiens
ggaaagtgccgtgtactcgtcgccgttactccgaggagataccagctcggtagaggagaagtcgaggttaagagggaactgggagagcacgtttgctgtcgtgccaatcggaagttagagtggtgcaaaaatgcagcagtaataaaactttggacacttgagagcaagcaaaaccataactcccaagcaaagcatccatcaacatcacccacccagcaggcaggcaccaccagcacgcaccagacaacgcagaccgcgcacacaccgccaataccatgcaacactagggccaacagagccacgcagacccaacacactgacacgcgccttgacctatatgaacctagcacagcaactcggcagccaacacacccacggcagcacgaagcagccgtatccaaccgcacaccgaacgaccgacaacatcttaatagcggggcaccacctctataccatacccgacccaatcaactgcagcgaacgcaacacgcaggcaacacccaattcatgagaacaactactgagaacacggccccgccgacagccccacccatcccccaccgcgcctacacagcgacaccgcacacccaaccgccacgcgccacacccgccacacaccaacccggcccacccgccccccgccagccccccgcacaacaaccaacaggacccacccccagccccacagccagcccgcactgatgccaccacaaccaccgaccccaccccgccactacccacaacagccccgacaacacctaacacccacccctagagcccccaccgaacacagccagcgaaccaaccccaccccccgccgctacgcgcccaaacacagacgcaggagcacgtacaccacctggacaacctcccctcaacgtaccagacccaaccacgacccacggccacacccgacaaccacacccgcccaacccaaccacccccggccacgacaccgcccccacaccccacaacacagcaaaccccccccccacccccccgcgcccaccgagcgcccggacaaccccacaaggcccacctgacctccaccccgcgcccccccccaccacctgcccacctccccaccgcccgccgaccgcaccactccgaccccccccccagcccgggccccggcccccaaccagcgaggcctgggagcgaccacccaccgcacccccaccacggccccccgcggccggcgcggccgccccccccgcacgcagcaccccccgcccccgccccaccgccccccaccgcccccccccaggcac

SEQ ID NO: 658683 - DNA, 367 bp, Homo sapiens
ccaccaggcgcacttctggccccacatcctccgagtcgcgcagcccaaagatgtcacggagacctgcctaagcatgtcaacgctgacaaatgccttcaaggttgaagaccctggacaccaagccaggcctctacaccgcttacacggcccacctccaccgcgataaggcgctgctcacacgggtgctcccgggcgtgcacgaataagcggccgtcagatctgcagagcgccctgctgcggtggcccctcctggagctcacccagagcttcatcatccccctggagcactagcattgccagcctcatgcccctacagaagtgcgcctgggtgcagaagtgcgcctgggtgcagaattgcgcctcggta

SEQ ID NO: 658684 - DNA, 245 bp, Homo sapiens
  misc_feature (139)..(139): n is a, c, g, or t
  misc_feature (198)..(198): n is a, c, g, or t
  misc_feature (207)..(207): n is a, c, g, or t
  misc_feature (244)..(244): n is a, c, g, or t
ttctcgttgaggtggcgcagggcctcttcggtgagcttgcgttcggtctcgtcgatcacaaagatgtagaaaccattcaccgagccgtcactgctaaaccgcggcaggtacttcatcagcgcatggcggggcggccatngcgatgaggcgtcaccgtcatgaagctgcacgccttgcccttgagcgcgcggcgatctntctgcgcgncgcatacacctcgtcccgagcacttcgcgatgtctgnt

SEQ ID NO: 658685 - DNA, 313 bp, Homo sapiens
gtcctcccgctcgtacagttgcgacatgtgggacgctgacgctaaggtgcgctcgatggccaagccggtgccggcaaggctggagggcgaacgcctgctattcgaccgcccccgaatatggcgtcgcgccggggcaggcggcggtgctgtatgccggcgaccgcgtgctgggcggcggatggatcgaggggacggaggcggcgtaacagctcctccccgtaccggggaggaacttgcagctatcgcacgcaccgcctacagccccgacccgatgctgcccgcgctatcccatgtccgcaactggtacggcggg

SEQ ID NO: 658686 - DNA, 800 bp, Homo sapiens
tgaccacaggagagcctagggggaggcggtccaccagcagccccatacatggacactccgcaggttacccctctgggcaacgtggatgacagcaggtctaaggacatgctcgcaggcaggagagccccaaggtcaggtcccactcacagcacatgtcttggtcagtgagcagctctgtcggatccactgactggcagcgatatagatcaggcctccttcaagacggccagccccaggtccatatcaagcatctggagacaatagacaagagttgtccatgcttgtaaccagatacacggtccatgaagacgagccccagaaatagagatcatgacctactgcttcccagcacaaaatccaagtcccctgcaagtgtctatgagtccttcagaatccagacgtgggacaggcaggttcaagatcgcgaggacaagtcagagtctagctggtttgcccaagttcagctcctgggtaaagacaagatgtcacaagactggcgagtgtgcctgagagagagccggagtcagcccccttctgccccgagtgctgaggctatcaagtccatccaggacatggtaggctcagcccgtcgcagagtgatgctgaccatgatcactagacaggtgcactacactggcgcagcgagtggccctcaggctgccatgtaccaacaagtctgcatgaggagccgagctgagcatccaatggcccacaactctgaagctgaagctttaccgatctgatgagtgccctagtgtgcaagtgggggcataatgtggtggacagacttaggagacctg

SEQ ID NO: 658687 - DNA, 123 bp, Homo sapiens
gtatctctggttactttagtagccaacactcttggctactcagaccttggtcccattaaatccctgcgaaccttgagagcactaagacctctaagagctttgtctagatttgaaggaatgagg

SEQ ID NO: 658688 - DNA, 755 bp, Homo sapiens
  misc_feature (98)..(98): n is a, c, g, or t
  misc_feature (163)..(163): n is a, c, g, or t
agcggggcagtcgggagggcagggagcgagcaggcgaagccgcggaggacggggtgaagatggcggccttctccgagatgggtgtaatgcctgagatngcacaagctgtggaagagatggattggctcctcccaactgatatccaggctgaatctatcccatngatcttacgaggaggtgatgtacttatggctgcagaaacaggaagtggctaaaactggtgcttatagtattccagattatccaggtgtagtttatgaaatctctgacagacctatcatggaaggcatacataaaggataaatacaacaattaagaactggtgcttcaggtgctgaacaatctggcagatgaacccatatgacatgaggatctgctttggcaatttgggtcagatggtcttagttgtcaacagcagacgaagctaaaggaactggcactgggtgtatgagcctagctaagaggattagatgaccagggaaacactactatgaagtatcctgtcatgaccaagggttagtgccgggtcgggtggctctaccatgcaggccctctttggtacctaggtactgacaagtttcggatttaggcttcggtggaacaggatagagatcccaatagcaaacaatttgataactcactggagaggaattcactatgcatgataccattggatgtgacctggatatgcataagggacatgtcaaagttctccgagaatggaaacagatcttggactggcatttgaaatacac

SEQ ID NO: 658689 - DNA, 198 bp, Homo sapiens
gtcagacatgtgtactgagtcgcgaagtcgggaccatcgacgtgcggatcgtgtgcattacaggagtcctccacttggcactggttataggtatggacacagtaagagtcctcatttcagagcgaagagcccagtcagggagccagttgataatctgagtcctgaggcgcgtgatgcccgcacatgttttctgtatgc

SEQ ID NO: 658690 - DNA, 428 bp, Homo sapiens
cgtgcacctgctgtactaaaagtccataaataaccgggttgaggcagcaaacattatatggcgcacacttgatagattaggcaaaagaatgacttgaacccgtgagatgaagattgcaatgggccaagatagtgcctctgtactccagcctgggtacaagatttgttttgagacggagtcttgctctgtcgcccaggctggcacaatctcagctgactacaacctctgcctccaggttcaaacaattatgcctcagcctcccaagtagaggggattacaggcatgcaccaccacgcccggctaatttttgtatttttagtagacacagggtttcaccatgttgcccagtctggtgtcgaactcctgacctcaaatgatccacaaagtgctgggattacaggtatgagccatcacgactagtcctcgtg

SEQ ID NO: 658691 - DNA, 216 bp, Homo sapiens
ctgggcagtagagctactccagccaggtgaagatgtgccagcttccccgttccccttccaccatgattgtaggtctcctgaggccttccaaccatgcttcctctacagtctgtggaactgtcagtcaattaaacctcttttcttcataaattacccaggtctcaggtagttcttttcttttcttttgagacagagtttcagctcttattgcccagg

SEQ ID NO: 658692 - DNA, 188 bp, Homo sapiens
  misc_feature (6)..(6): n is a, c, g, or t
  misc_feature (137)..(137): n is a, c, g, or t
  misc_feature (168)..(168): n is a, c, g, or t
ccactnggcacgagggcggacatttcctttataatcctctttttggaattcaggtcagtcctattaaaccaattaaaaggggacccacctctgggaagatgtaactctccctcttgataaggtgactggaatttgtnaaaaaccgtcattccagttctaacccctctnaccattccccctcacaaatg

SEQ ID NO: 658693 - DNA, 141 bp, Homo sapiens
ttagaaccagatttactacccaatccaccccccccaacaggcccctttaagggcctccttaagaaaaataaggagttgactagggaccggatcaaatattagacatataattttttttgaatttcaatatggctttttcta

SEQ ID NO: 658694 - DNA, 176 bp, Homo sapiens
gggggaatttttaaaatttcccccttttttttttcgggaccaaaaccaccccttaccttaaccttttgggggttatggggaccccccccggcctttagtaaaaaaaaaccctttttttcccccgggtttaaaaaacctaggggaaccctttttttttataaatttcttccctttta

SEQ ID NO: 658695 - DNA, 328 bp, Homo sapiens
  misc_feature (108)..(108): n is a, c, g, or t
  misc_feature (179)..(180): n is a, c, g, or t
gcaaaagaaaagtgacgtggaggatcactcgtttcgttcttgtcgcccagactggagtgcaatggggcgatcttggctcactgcaacctacgcctcgcaggttcaagngattctcctgcctcagcctctcaagtagctgtgatcacagacagggtctctgtgtcatgcaggctgagtgnngtgcgcaatcacagcttactgcagcctcgacctcccgggttcaagtgatcttcccacctcagcctcccaagtagctgcaactataggcacgttaacacacctggctaatttttgtaaaattttttgtagcgatggagtctcactattg

SEQ ID NO: 658696 - DNA, 123 bp, Homo sapiens
ctgagtgagagatttatcgggatgacaattccagtttcccttacattttatttaatcaacattcccctgatgattgtggcctggtatcaaattggacataagtttacagttttcaccttcata

SEQ ID NO: 658697 - DNA, 181 bp, Homo sapiens
ccacgacctcttatctgacaggccaggatatctatcacctggtaggacttgatctggagccctgcagggtgccctgctgtgcagctagtgctatcctgaagcggaacttgtactcagaccttaagaatctatgatactaggatccgggcacagaagaaaaagatttagttccaccagggag

SEQ ID NO: 658698 - DNA, 416 bp, Homo sapiens
  misc_feature (360)..(360): n is a, c, g, or t
gcggctcaggaaatgcgccctccgctggcgctgggtcgcggttctggctgcgttactttttccttgcatctgtggcccggcgcgccagcctggacactagatccgcaagaagggagttttcccagggccggctgaagaatgagaagtccgagctgcggggacgttgggggtctgtgcttagcggccacagcctgcccaccacgggttcccgccaccccgcctccccacctcccttcgcgccagggctgaaagtcccaggcgcccaatgcgtgcccaagaacgagccgtgaaccttttatctacccgtccccttccccgccatggacccaggacgacaccccacacccagacaccactctntccaggggcagatgctccggcgcgccccgcgccctgaagttcaacttggaatccag

SEQ ID NO: 658699 - DNA, 102 bp, Homo sapiens
tgaccagcacttgggaggcagttcaggagagttgcttggggcaggagtttgagacagcctggtcaacagagcaagaccctgtctctacaaaaaagctaaaaa

SEQ ID NO: 658700 - DNA, 739 bp, Homo sapiens
ctggattcttctcgaagaatggctgtcacagcgtcaattcttgataacgcgcatctacttttgaatactcattgctacagggctctgtagttaccccatagcgacatcatctgcacacttcggcaggtacaacgcatactccacacaattgtgaagctgcctcatgtcggaatcacgtccacgcctgtggcttcttccactggcctggcactgattgtgcacaccatcttgtgcgatacgcacgtatatcgtggggctccaggcaatgtagctgcttgcatgctttgtacatcctccaagacttgctctttgactggacggacgtctaaccgtaactcagtccaacaagatcaggacaattatgacttgagtccacaaggacacataacacctgagtatgctgggcatgcccttggcagggtctaagccaggaagtcaagaatgatctggccttagatatttaagggaactcataggaagaggcctaggttctttaaaatcctgtctctttgtcttaccataagaggctgagcctctcttcatttttttgaagggcacacttcgtgttatctgttctgggaacttcattcattatttctactgggttgttgatctatgcagtaatttctaggagctgtttatgtttggaggtaattggtcatttgtccatatatatgagatgtaagtcgttattttccagttatctggcaagctgatttttgatgactttttattgtaa

SEQ ID NO: 658701 - DNA, 311 bp, Homo sapiens
ggggcccaaaaaaagggccaaaggggcctttttcccccccctatacccgtccggctggtttaatcccaaaaaaaaaaatccagaatttccgggtttaattgggggcctggcccccatttgaatttttttttcctggccaaaacccccgttgggtcccccctttggggggggctctccttgtaagtagtaaagttttttttttttaaatttttttttttgttttccaaagtaattaaattttaaaaaaaacccccccttatttttaaaaaatgtttacctttttgggggttttcccctttttgtgggggtta

SEQ ID NO: 658702 - DNA, 404 bp, Homo sapiens
gagagagcgtgagacatctatacgagcgtatgtgtatatgtaatgttataacatacatttgtgtcatgactctattaaactggactgacagctatgataatactgcaacagaatgcacagatgccttgggacacatactgagcacaatatgcagacttcagtgcgtgcatactaagcacgttcatacctcactctagctaatactgtattagaatacgctatactgggctctgctagttgaggaggtacactggagacagcttgatctactgtcaagcgagcattgtcgaatggtcattctgctagtgcgctccttagttgcctgagctgactcactgacgatgatagcatccacggatgctactagacggcacagctgctagaggaagctgcactactagtgg

SEQ ID NO: 658703 - DNA, 409 bp, Homo sapiens
cgcatgtgcattgagagcattagaggaactggcttcaaggccttttcttactgcggaccttagagatatgcttgactgcgtggatataacatctttcagtattacacctattcttctactgtggtttttgcacagggctgtcccacaggatgccgagataggtgcacactgacagttaattgaatacgatgctaatgataggagcatacaaatgatgcgagcattggaccataaattggcagctatacaggctgatatctgtgaattagacagagtcctcatctgaggtgacagcgacaccttctataaagacatgattaatcgcacagattctcggtgatgaccttgagtccacgatgtgttcagaatctgaagcactatgagttaccttagggggatacataggttc

SEQ ID NO: 658704 - DNA, 136 bp, Homo sapiens
ttaagccaccattacgttcctcatttgtgaactgtcttctcatattttaagttcaagtgtattaagatccattttttccctaagttgccaactttgttggaactccttaaaataagcacccatgaaaagccagtca

SEQ ID NO: 658705 - DNA, 163 bp, Homo sapiens
gcttactactctcaacgctttatactttctcaacgcttatacttcctcaacgctttatacttcctcaacgctttatacttcctcaacgctttatacttcctcaacgctttatactgtcctcaacgctttatactgtcctcaaccgcttctcactttcactttg

SEQ ID NO: 658706 - DNA, 134 bp, Homo sapiens
aggctacctgaggatccctttgagaggatctgtccttagtacgagagaccgggatggacagaccgctggtgtacgagttgtactgccaagttgcacagctcggtatgctacgtctgggaaggataagtgctgaa

SEQ ID NO: 658707 - DNA, 858 bp, Homo sapiens
taatttattgtacaaaaatgaaaggaatactaatcagtctcagaagcacctgcatgcataagattatactccatgttaacatgtggctttagagctggtgtacgataagtgtatgatctactcatgactgtatattgtttgcatcacaacgtaattttcttttagacttaagtatccgtgcagacaaagtgggttagtactacagaatttggcgttacttccaagtactaagtatgcacggtttcctggtaccattgagttgctgctattaacagctcacacacgcacaatggtaactagttacaagtgtgcacacttatgactgcgtgagccctctagaaacttaccacatgtataaagcggctcgaacacatgagctgtcaacactagaaagttaggagtgtgttgatatgtaccagagtttgtgcaatagcacaactcagctgtcactagaccagttgactaatgtagttctactcactttttcataattttacgcaatttacgtacacaccactgcacttcattgcgtaactacacctgccagaaatacttcctagctgtctgtaagttcccacagcgctgtcatacaagtgggagtcttacctgtacctaagatgtgcgcccttgtcaaacactctgcgtcgtaccgttgctacgatctggtacctcaacgtgcgccgtcatcaacacttaagacgtcaggacagaacgaagtattcattctgtggtgtgccacatcgtgtgtatagcaaggagggatagaacgaaatgctgaaagtaggcgggggacacagagggttggaaacctcccagggacgtgcttgcacaggaactatccaccatgagagcataaga

SEQ ID NO: 658708 - DNA, 174 bp, Homo sapiens
  misc_feature (83)..(83): n is a, c, g, or t
  misc_feature (101)..(101): n is a, c, g, or t
  misc_feature (165)..(165): n is a, c, g, or t
cgatcaaccttttatgttgctgtgcggatctgaaaaaaaaaaaaaggaaaaaaggaaatggtctttctacccttagttggtcnccttgagggctgagttanagggctggtgagaatcaatactcaggtgcattaattatatccaaattaaacttttctgcagtancgtaaaagg

SEQ ID NO: 658709 - DNA, 192 bp, Homo sapiens
ctgtacctttgatcatcatcttcccatttcctacctcccctacagatccctgccaaataccattctaattctgtactagtttctatgagtttgacttttttagattccgcatgtgagaacataaagtatttgtctttctctgtctgacttagcataatgccctcaaggttcatccacttttgttgcaaatga

SEQ ID NO: 658710 - DNA, 1347 bp, Homo sapiens
cgtcagttgttctcccggtctgatcgctgtatatccgctgggttgttggcgccgcgctcttgggtgtgttaccacaggggttggtgtccgcagcacagggacgctctccctcgccggcttcggtaggacgtctcttgtttcgagaacgtttatttgctctccaagggagatccgtggcgcttgagacgtgtgcccggcggaacacgtttcgaggtcgaagttgttttggctcaatgtgcgcttaaggggctactattcgccccaaagaggtattttttgtcgcccgtgtttccacggggcgcgcaaataccccctgggtgacccacttgggttatccaacccccctgtggggtgaaagatcgcacccaacaggctttatagcaaccacaattttggaagggaaagacccgtccccccgttgggggttgtgtccaattggccgggtacacatctgggctgtgggattatagccgccttaattgggcgttttcacgactttttattgccaggaatgggaccgctcttagtgggaaaatttcaccgcggggggatatgggaaaagcccccacaaacgcccatattgggagaataaattaagccgctctcccaacgtggtgtgccacaaagtttgagacaccccagaccttattttaaagaaatggaagaaaatagcacctcttgaaaattccccgccactcttggctttttagcctttattcccaagtgtactctaaaataagaggacccctctggatatgtttaatttaaaacttctctctctctgcttgaaacaaaattgggaaaatattccaaaccactcttacacacgaaagagaaattgggagaaaaccaccctgataaccacagaggttttctcccacacccacaaaagagaagttggaggccacccttggatctccacacaaaccaccgcagaggagaagaaagagaagctccaaagctcttgagagccgctcggaagagaagaaaaagagaaaaagaacacacgcgaagagaaaaggaataagaatatagaaatccacgaagaattttgaatgtaactccacattttgggggcacccacacttcagcagtgtaaaaagccacacttcctaacttcttccaccacactataggagaaggctttatctttttttaaactggccccacgtgggagaaaatatggaccacttacactactgaaattgggtcctctgtcacatttctgtcccacattgaaaaactttatattgtaaacgaatgaatggttaacccctcaatggaacgtcttaattttccacacacatcccctttttttggaataaaatcttgcggaaatggaaatga

SEQ ID NO: 658711 - DNA, 662 bp, Homo sapiens
gcctagtcggggggctccgtggcccccgcgtggccccttgggctcgtggggttcctgcgctcgccctgacctttctggttttgggcgcgccgcccctgtttccgcgaggctgactcactcttttggctcgcgggtccccgggccactattgccccccggtgatcttcgcgcccacttttccggccccggggtgctcaactccctcgctcggccccccctccctgctagtgtgtctgtgtgcagcatatactgtctcacgccactgtagacggtaattggttctccaaaatgttcgtactgctgctataatgttcctttagacgaaatatttcgtgacccaatcgtcgctccgccgtagttatgatcaacgctctcctggtgaagattcgtcgacgcccccccgagtagggatactttgctggggagcggcgcggccgccctcggtgggttgtatatccgctggagaatactagagacagcttgacgacaccctcccgcgaggccgtggggaaaccccagcaagcttttgtcaattgctccgccagactgtggcaagcttttgtaggtatgtttgtaacctacttattggcacctctggtccgggactggtgggcgcacaatatgcccgctagttattaccaaaaggaaacaaataacaaaac

SEQ ID NO: 658712 - DNA, 1018 bp, Homo sapiens
ggagagaactagtctcgagttttttaggggtttttttactttttaaaaatccttttatattactcttttttaaaaaatgcaacaagagccttacaaaccatccatctgaagagcaagcacaaagaccggatattgtgtggtgccaccgcagttgcaagaaaggaattgtcagctcagaaaatgaattgtgtttcagtcactctgcatgtggttgctgccacgcattggaacatttttaggccaacttttaaaatttcccagttaaggtaagcaggaaatttagagtgatcttcattaaaattccagtggggtgtatctgagctccgtgggtgccaaaggggccacataattacgatgaatttctgtgcattcccaaaaacaagcctcttctcggttttccaaagtgcttcagttatacgtgaagaagaacgtggtgccttatattcccgagaacccgaagccctttctttttgtggacctccaagaggccttaaatataaagtggccaaattcgaggggccaaactttgtaagaaacgagaaagaagaaaaccctccccgattactctcgagtgtctcccctgtagaaaatgtgtaactctaaaacctttgcgccatattctctcaccatagaaaagtgtctccccccagaaatctattccaccgtgtaattcgtgtctcaacgactgtgaaaagccatgtctccacgaaataaaccaagcccccttttgaatttgtcgcaccgttggcgcttaacacgggaatttctaggaggagaaccccgacgagaaggaatttttctccaactaccaattgctgggtgtagttgcccatctttaaagggcggtgggctcaaacacaacaatttgggggacttaaaacttcggtggaaaacgcggtgttggcacactttccccaagaaagttttaaatattttaattacccaacaggagcggccgccggcctccaaatattcgttggtgttacacgtgtgggcggccccaccgaagacacaacag

SEQ ID NO: 658713 - DNA, 715 bp, Homo sapiens
  misc_feature (6)..(6): n is a, c, g, or t
  misc_feature (66)..(66): n is a, c, g, or t
  misc_feature (284)..(284): n is a, c, g, or t
  misc_feature (292)..(292): n is a, c, g, or t
  misc_feature (295)..(295): n is a, c, g, or t
  misc_feature (304)..(304): n is a, c, g, or t
  misc_feature (313)..(313): n is a, c, g, or t
  misc_feature (328)..(328): n is a, c, g, or t
  misc_feature (335)..(335): n is a, c, g, or t
  misc_feature (337)..(339): n is a, c, g, or t
  misc_feature (341)..(342): n is a, c, g, or t
  misc_feature (344)..(344): n is a, c, g, or t
  misc_feature (350)..(350): n is a, c, g, or t
  misc_feature (353)..(353): n is a, c, g, or t
  misc_feature (360)..(360): n is a, c, g, or t
  misc_feature (362)..(362): n is a, c, g, or t
  misc_feature (368)..(368): n is a, c, g, or t
  misc_feature (381)..(381): n is a, c, g, or t
  misc_feature (386)..(386): n is a, c, g, or t
  misc_feature (391)..(391): n is a, c, g, or t
  misc_feature (507)..(507): n is a, c, g, or t
  misc_feature (535)..(535): n is a, c, g, or t
  misc_feature (550)..(550): n is a, c, g, or t
  misc_feature (577)..(577): n is a, c, g, or t
  misc_feature (622)..(622): n is a, c, g, or t
  misc_feature (639)..(639): n is a, c, g, or t
  misc_feature (677)..(677): n is a, c, g, or t
aaagcnagcctgcaaagtattcaaatgtgcaaaaatgacagttcaatatctcaaactattcctggntcagcagactagctccttcactttcacacatcaatatttgatacaaaaagttattttggcaaaatctgtaatgccaagaaaaaggacaatttgcaatttcagtcattaagtccaaaatcctatagccagcagtcagatctctctgttttagctgcaaccagttctgggagagagagaccactgtatttcatttctgtgatgagttctgaccagttttngtcaagangtnttctctganccagcggangacaggatcttagangggcaanannngnngnaagggntangggagcnangggccngaaggggccaggnttggntgagncgcaattaaaaaacacaatgaaaaaataatttcattttcctatccaggatccagctatatccaacagttttaaatgagacagcattttccaaaacagaaataatccaaaacaaaanagggatggcagatctgtcagaattaaanactgaaaaggacggncttaaaaacatttccccactaataaanagtaaaggctctgtttgtaaccagttatatatcaaaattgaccanacagtagtaaaatacanataaaactttctttatgtcagaactggggctattcacntggaaaaggctgaccaggtcaaatgtgtatgggaacga

SEQ ID NO: 658714 - DNA, 922 bp, Homo sapiens
agcggggggggcgcagcgggcggaggcggcgtgtgccgctgggcagaatgtctacgatggacgagggcttggtacgcccctgctcccacgacaggctgtgtctacgcagatcttcctgagtcctggtgccctggctcgactgtgctggccgcacgggcgtggtgtgccgcaaatggcatggccggtgtcagtgggacagagttcctgatggagggatgcgacgttctaccgacgtactaccaggtggccacgcgagcgtgacccgacacccagtggtcactgtcctgggtactaaggatttccatcgggctgatatgactacggtgccctgcgtggaggtgcagacttctgcgggaatcggctcgagaacaggtccttgcatcctctagtcttctcccgattcgggaggttaccacgttcagcagtccatgctcacattggactagcgagtgctgaacgatctgtggaggcatacgacgctggacctatctcagcgtgtgtgcaactatgcgctggactatgacggatcacctacaacctgagaggcaaacgaatccaagtttctcaccgagtttcaaatcagagctagcgagtctgctaacttggcatgggcctctgtgaggaggtgttgcccttggcggccgacagcgaaattccttgcattcacggcgagaaggagttgctggtctatcacgcacttatgatttcactttcagcgcatgcttggtctccagcgagttgcgggaacaatggcccgtagtggacggtgtttgggctgtttggctcacctgacgaactaggcatcactctcgtgggataccttgcacctgagtcgggcagaataatctaccgtctttgactcgggtgtctgtggagtcactccaattggccttcccaggtgagtgttggatgtcttgaagaa

SEQ ID NO: 658715 - DNA, 694 bp, Homo sapiens
  misc_feature (300)..(300): n is a, c, g, or t
gttgggattacaagtgcctgccaccacacctgactaagttttgtattttttagtagagatggagtttcaccatgttggccaggctggtctcaaactcatatcctcaagtgatccaccctcctcgtcctcccaaagtgctgggattttgccatgagccaccacgctcagccatgtttagccatttttaaaaggtgtgaacagataattaagtctattagcaacattagaaaatttaagttaaaatttaaatgactctagcaagaattagcctttaggtgccctgggtccccctcctcaccnccccccaccccgccgccttctgagaagcgttttgtaatttttcttatttataaaatgggtttgattcaaaactgacttttcctcttcacagtctcacaggtccttccccaggtccaagaggctcttctgtgtcctgatgacaagtagctggcctagccgtgggtggcacctcctatcacatgttaaggggaccccttccccagggccacacctggcagaaggtggcttatgatgttcgcagcttgaaagtagtgttaaccaaagataaaattctaagcccactcccccagccattggaatggaccccttctcttggccaggggaccttcaaagtaaccctgaaaaaacccgtttcaagctgtgaaaaaaaaagtggagttggccattggcctca

SEQ ID NO: 658716 - DNA, 1826 bp, Homo sapiens
tacaaaaccccctttttttgggggtgcttgggggggagtgattttttttttaaaatattaaaaaaaacgaaaaagagtaaaaacaataaaaaaaaaatactcaaagtggtgggagaataaaaaagaaccacggtgggtgtgtggggggggagaacacaacgagcaaaagagagagaatagagtaacagagtgtgtgagacaaaaacgagagtgagagaaagagtgtcgcgcggcgccctctatattatctattacagaagagacacccggtggcagaaaaactctcacacgcggcgctctcatcatttaggaggggcctcactgtgtgagaaataaatctctcatatatatcgcgcgcgtgatcaacaaacaaaacacaccagagagagagagggggggaggcgcgcgcgcctacacagaaagaatatctctccgcgcgagaggggcggcacacaaagactacatagcgagagcgataacacgcacgaagcatatctagcggtgcacacaagagagaggggagccgccccctaatatagtgaggagcgcaggctcgctatatatataaacacaagcgcgctgagagcgcaacgcgcgcgcgcgcgcgctgcgtatctcacaccaacagcgcgacggcgagcgcaggtgagagacaacaaacatcgtgtgctaccgacagtgtgcgagcacactctcggtgaggagaagagagagcagacacctcatataacaacacgacggggggggggggggcgcgcaggacgatcccactcatatagtggtggcgacgaacacgaacacacaacaccatacctcccaacaaacagagaaaagcatataatacacaacagcagcccctaccaacacaagacgggaaggcgaacaacacataactacagcacggatcacttacacacacacagcgcggacgcacgtaacacatcacgctcggcgctcgccgaatccaccacacacaacgaccagcgcgatacatacaaacaccttcgccaccgcggcgtcagacaccagtaacagacagcacaacagcagtctgcgcgaggaccaaaccacaagaagagaaagcaaacaatcatccacatcacagacagacagacccaattctacttcaacacacccaggggagagggaggagctgtactacgaatgaatcaaataaacacgcgaagcaacacaacgcacgacaacaacacacacacacacgcagcaagcaacaaaccacgccacgcacaaccacacgcacgaaagcacgaaaagagcacgacaccaagcacgcagcaagcagcaccgacgaacaacacaaagacacgacacgcaaacaacaacatgccaggccgagaggacgcgcgacaagtcaccagaccagacacagcgagccagcctcaaacacacacacacaccacaagacagacatcccagcaatacagagaacccgcacagcacaacacagaacacggcaagacacaacacaccgacacaacaaccgcgacccagagaccgcaggcacgaacgagagcaacacccaacacagcacacaaacacagacagacagacacacgccagaccactaacgcaaacacagcccaagccagcgagaggccaaaccagaccacaagtacctgaccgacacaacacagacgaacggaaagagccacacgacagcagcacaaacaccactgacacgcacaccagaaccgaatgccaagcgacactacacgacaaggcgacggccgagaaggaaagaacacgacagccaacgacaggaccaacaacacaccaagaaacaaggcgtagagcgcgccgacacc

SEQ ID NO: 658717 - DNA, 508 bp, Homo sapiens
tttctcagctagagttgaacagggacatttgccatgactgcagctctgccctgaaccctcacacccagccctagacaagggtgtgttgcaccccttgtaagtggcttgataccacgtcaggtccaacgttgtggtgatcctgtgcgagtggagagtgagttcctccccttttgcagtccccaaaggaccttgttgatggctcgattattttttttatgcctcaatttttgaactgattctaagtccctttggggatccaagcagaaagacaaccttaagtaggaaaacagccaaattattctgaaagaatatgttttgctataactgtaaaattaagataaagaaaggatgtcagttgaaggctacttccagagaggatgtcctgaaaaacacagatggtactattttattagctaatagtgtcactctggggcacaaaaaaatgatttccaattactagagctgaaacgtatcaaagactgaagtaactctttgcatcctattcttc

SEQ ID NO: 658718 - DNA, 540 bp, Homo sapiens
taggtcgtctagaggatccctcctcagtgaaaaagagaagcatgacacctaacatggcccagcctgcttcattctgttctcccctgaaacaacattcctttagtaatactccgaataacagcttcatcagtctgtctaccgaacactcttcaggcttcatcttatatgacctcccaaaccgcactaagggttgtattagagaaaagtggataaagttcggagtcaggctgcttgagcttaaatgccagcttcacttaccagccaactgaccatgagtcagctgcttaaccattctttgccacagtttccttgtctatgaaaagggaaatggctcccacctcaaaaagttgttaacattaaattcaatcatgtattcaaagtcctgagcagaatgtctggccatgactgggacttaacagatgttagcatttattattaagatctgtcagtcttgaaatgttctcttcccttggctttcatgacattccacactctcctggttttctcttacctctcttgtaatacctgtttgcttatcct

SEQ ID NO: 658719 - DNA, 192 bp, Homo sapiens
actacctaaatggctgtatcacagcgctgcttcttatcaaagccggggaaaactcatgcctttcctttttacaaaatgcttttatgtatttgtccatacgtcactatacatctgagctttataagcggaagtttccaagctaggaatggagcaccactgcaatgaaatgtgtccaccaagctcattgtccct

SEQ ID NO: 658720 - DNA, 242 bp, Homo sapiens
  misc_feature (22)..(22): n is a, c, g, or t
  misc_feature (238)..(238): n is a, c, g, or t
  misc_feature (240)..(240): n is a, c, g, or t
ccaccaggtttagtttccgggnacggggctggctggaggaggggcagcccgagacgcggacgccagggcccgacacccatacggcaccgggacctggcttagccgcggcggcagtcggtccgaacccttaagctaggcgggcgccgaagccgggacgcggagatagtgtctcagctggggccacccgccgcgggaggggcggaggacacaggacagagggcgggcctgcgccgggctnantc

SEQ ID NO: 658721 - DNA, 323 bp, Homo sapiens
aagctgttactgcatatgaccaggtcttgggctaaagtggggaaccaaaggggcatctaatataaacggaaaattagtcaaataacaaacaaaaccaaagactgactctacattccttcttcccaccgtgcccagtccccacacacttgtcacaagcacattcaatctttgtgtgcccagagtgccagttggctccatgcctttgtccatccccagccagttttggtgcaccactgcagtgatgccatgcaatccacttccaggtccagtgcagttccaagcactcagccattggcccacaccatgcgcagcacaacccccat

SEQ ID NO: 658722 - DNA, 305 bp, Homo sapiens
tttacaacaggaaactgccgaataacttctgtagttgtttaattagtataggggaaaaaaaaaccttcaaaagcgtatcttcacactttgattctagatgcctttcgtctaagtcatgggaagcccacgtgagtcatctttgccatctccaggagtggatagttcgagggagggaataggaatccccatcagctgagggagcttaactaggctggtcgatgtggtcttggtgcagcccacacgtggcaactgtgcctggtgctgagcaccttggcactatgccacgcacttgagaaagcacctct

SEQ ID NO: 658723 - DNA, 779 bp, Homo sapiens
tggacattttgtgtgccaaaaccttttaattatcccctggtccccaggtttgttttcataaaagcggaacacagaagtgtcttccagtttcttggtccccaggtttcaggttcccttcccagcggaaggttgggagggcacgcccctcaccacctgtggccacccctgtaagtgtgccatactctcctgtggaggaaagttcgtttgagcgtgggcacaggcttgcccgctgtggggggttgcctccggcacaaggcgttccagagggcatttctcctctcgcatcccgagctatattctcgagtctccacgcgaggatacgtgggcggtgtgtctccccctcgagggtccatatagtgtgttggccccatctccaggaccccatgtgatctcaaattttttctttctccacgagtgttctccacagggcgaaagggcggacaggagggctctcagacaccaggagaatcttgcgcccatctcttagattatacgccagcggcgcctgttgacatctcccttgtgggtgaaagttgcagagacctgtgggggtgactctgtgtggctcctcaaagaagggcggagaaaggcaggctctcgtgcgtgctctttcgtcggaagaaacccttttaacgcgtggaaacgccgtatcacttcccaacagcgggggggtttattagcgagggcaaacttcaattcgctgtgtagccatctccttgctccgtgaagaaccccgtattaagggcgcaaaggcgtgggaaggggcaatttccccttaa

SEQ ID NO: 658724 - DNA, 276 bp, Homo sapiens
  misc_feature (19)..(19): n is a, c, g, or t
  misc_feature (41)..(41): n is a, c, g, or t
  misc_feature (139)..(139): n is a, c, g, or t
  misc_feature (158)..(158): n is a, c, g, or t
  misc_feature (178)..(178): n is a, c, g, or t
  misc_feature (197)..(197): n is a, c, g, or t
  misc_feature (235)..(235): n is a, c, g, or t
  misc_feature (257)..(257): n is a, c, g, or t
ccttgataaaatgtttatncccatacaggtcaagtacaccntacttctattcacagtgccgtagccaataacaacaaaccgcgcttacaaatttggggggcgtggattttagtaccttccatttgaagtgtaatcattnctaaattattattattttncctggggcagttatcagtgntttaaacaggaactttagnggcttcaattcgtttaagaaacatattaagtttggagnggaaaaatttcccatggaaatnatttgggaacgttaagagt

SEQ ID NO: 658725 - DNA, 247 bp, Homo sapiens
  misc_feature (37)..(37): n is a, c, g, or t
  misc_feature (192)..(192): n is a, c, g, or t
  misc_feature (197)..(197): n is a, c, g, or t
  misc_feature (201)..(202): n is a, c, g, or t
  misc_feature (206)..(206): n is a, c, g, or t
tcggactgagagacgtgttgcatggacagctactgangacactctcagttcactcacagcgcagtgcccaagaacttaaaacgtacacagtaagacaacatgtaacttcctagacttaacgtttacagttcaaactagttccaattacttttcttttgcttggtgtttttttttttttttttttaaaagagngtctngctnngtgncccaggggggaagcaccagggggggtgaccccggctcattg

SEQ ID NO: 658726 - DNA, 393 bp, Homo sapiens
cgggggacgtggaatggcgcactcccacgttccagtatgcctaattacctctacaaaactctcaacccactctctgttaaaccagtccaacccttctttggcaaaggacgctggcttgcatttctctatcagctaccacttacgttgccactctcattcccacaaaaaactgggtagttactagcttaacctaccaccctcgtaatgaaggaaaaagccccttctaactcctacatatgcagtcattggccaacttctccatcaatgaaatgaccgaaaataccctgacaggtcgtgcagttcaacttttacgctcctacatgtccagcctcacccattacacaagtaatgaaaagcccatacacggccctgtgactacaaacgctgtcttaa

SEQ ID NO: 658727 - DNA, 787 bp, Homo sapiens
aaactgggtcactcatacatagctgctgaagatataaaatggtacagacactctagaagacaatttaataaattctgttataaactgaatgcagaactaccctgcaatactggacatttatcccagtgaaatgaaaacttgtgttcttgaaaaatcatatacccaaatgttcatagcatcttccttcttgataatcaaaaactgagagacaacccagatgtacttcaatgggtaaactattaaaaacactgtggtccatccacagcatggtattcagcaacaaaagggaacaaatcattgagaacaagacccgggtgaatctctagagaattacactgaatgaaaaagccattcccaaaaggttatatgctgtatgattccatttgtatatcattcttgaaattacagaaaaattatagaaatggagagcagaatagtgattggtcagggtttaaggagagatggggcctagagagaagtgggtatggctatgaaagggcaacatgagggacccttatgggaatggaaatattatgtctcttgactgtatcaatgtcaatattctggttgtgatattgtactatagttttgctcgatgttaccactgggaaagggcccctgggaaagccgggttacatcttacaactgcggtgaacatgatttcctaaaaacccaacatacaacttattagagtaaagaaaaacaaaaaacccggggggcggccaatgccaagacgatcaaacgcgcggtaacacgggaaacagccccagggccctagcgatgccct

SEQ ID NO: 658728 - DNA, 908 bp, Homo sapiens
aacgaggcggtctcgcccggcgcgaggccgggctgtgctcgcctcggagatcgctgctctttaggctgggtgcagaaggcggctccgcggctcgcggacgactggtctggggcgcgaatcagatgggggggctttctcccggtaccgcttccgcagctcgtcctgggctcgcggttgtctccggggacacagccgatggccccgagggcggactctcgatgaacagcaacaagtgaaacatggacagcaatgagtggtcatatattctaatttgatcccagtggttattggaagtgtacccatctcagatgaactggactaggggaatcattcaacctacgcatgtttttgccactagcaccggatcgtgagaatcatggtttcgaaaaaggaatgtgctaaaaagggccgtttgatagaaccgaacggagtgaaattatgcacggggaacagatgtcggtcaagtgtgttcagaatagtatgctcaaatacgcgttggtggaaacactggtctagcactgtgtgtccgtggatcgggaaagatgctaatgatcggtgtgatgatggagtaaggtaatgtgccatggttgatggcgagggctaaagtgtggactcaatgatatgattgcttcaagctggagtgaggaggttgatgatgctgattgattttagaatacatgggaatgcactggtggaattgtctttaaaacagaaatccaggcactgccagggtgtgatgcattctgccaggtatgagtgcagtactgctctggtgtggaatgagcaaccaaagaggcagatgttactcttcaagggaagaggtttgggaacctaaaatgaggattgggtgagggcaaaggtggaaaaaaaggggggcaagataatatgggaaaaatgggaaaagtggg

SEQ ID NO: 658729 - DNA, 181 bp, Homo sapiens
ggacttagggagtgggctacaacgtataggtgtcggtgtagtacgatgtctagttgatgagttggctattacaatggccagtcaggccacctagggtgaaaagaaggatgattcctagggctcagagcacggcagcagatcatttcatatggcttcggtgcacattaatgggggtattccg

SEQ ID NO: 658730 - DNA, 290 bp, Homo sapiens
accaagatgtctgagttacttccttccctgtcaaaattttgcctcctttgattttcaatatatatatatttttttgtcttactctgttgcccaggctagagtgcagtgacgtgaccttggctcactgcaacctctgcctcctgggctcaagcaatcctcccacctcagcctcctcagtagctgggaccacaggcatatgctacaaagcccagattatttttttatagaaacagggtttcaccatgttgcccaggctggtcttgaattcctgggctcaagtaatctaccca

SEQ ID NO: 658731 - DNA, 419 bp, Homo sapiens
ttgtctaaaaggtatacggatcttcttctgtctaacaaggtatagtatagggtaaacattctcttgtgaaggctcctatatatatataaaaatttggcaagataagaatgcttaatatctaggtctctgtcccatacttcacgaatttatttattcttagtctaaaaggtataggatcttcttagtctaaaaggtatagtatagggtttacattctcttgtgaaggctccgttgagaagctaaagcttatcaacggattgtattttttaatctcaatttagagttaggggtcgagtctcacaacaagttaaatgaatggccttaagtcaaaaaccaataaaccaaatagcacaagaaatccaactgcaacgtttagataccagttctagattgactcccggtatagtataacgggagcg

SEQ ID NO: 658732 - DNA, 486 bp, Homo sapiens
tgtattctcatgtttattattcaagttgtatgacaatttcatatcagccccccagagagttggcatttggattgaaatcatactgagtctctagattaatttagggagaagtgacatctttataattttgaaatcttcgctatcgcatgtatatgcgagtgttttgtatttcagtggcattttcaattttcttcaggtaggtctcttagtgtttattccaaagcatgtacatctgttaaatgactttatgtgaaatgcaagatgttctaacctcccattgatatttatactgaattgtgagcataaggataaaactatcgcctgaattgtgtaatctcacacagataattagtaaaacctaggtgccacttcatactcaatctatatttaatgaaatttatacatagcttttccatggtctgttactttggaagttttcagagtgcccaattatataaattgcaaataaagaaaaatttacctctt

SEQ ID NO: 658733 - DNA, 106 bp, Homo sapiens
tggtctgaccactactggctgacccacgtacatggccagtactggctacactacgggcttttaactgcagcaagtttaatatacgctattggagctagaattaccg

SEQ ID NO: 658734 - DNA, 251 bp, Homo sapiens
ctgaggatccccaaaagccattactagtagcagcagtttctagagagctcgtgtagccttataacaaacttttttttattttcttttgggcccttagaaccagacatcttccatttttacggtctcaacaattatttcccagggtaccgggtatggcagttcgggaaagggaaaaagagggaaaaaattgaatccaaccgaaatacggcatggcgggaaaaaagggtcaaaagaaaatatgttatatctcg

SEQ ID NO: 658735 - DNA, 454 bp, Homo sapiens
  misc_feature (8)..(8): n is a, c, g, or t
  misc_feature (11)..(12): n is a, c, g, or t
  misc_feature (228)..(228): n is a, c, g, or t
ataccctnatnntagtatgatgatggtcactgagagaccttagagataatttattactttgaaaggattatcatccagcagaaaagatttaaaaattatgtttaaattggcccaaagcagacagggactggtgaggggagttcaaaagagagacctcccttgcagataggcatgagtgacaatgaggtggaggttggagtgggcagatccaggaaggaggagaagggnacccttaagccacccttcccttatgaacagactcttatcagtggggatggcctcatcttctgagtcctattcaatgtgcaagactttcttcactcccctcctgctatctttcttcctgtttatgatcaccagaacaattttaggaagaaattgttctggcaatgttggttaaatagctccatctctggttctctatttgaagccgacttcttaattatgcaccatt

SEQ ID NO: 658736 - DNA, 508 bp, Homo sapiens
  misc_feature (121)..(121): n is a, c, g, or t
cttgacttgctactcatttaatattccgtgtgataaaaacttcccaaactctgactcaaaatttttctctgacttagcatagcttctcagataaagtctctgctgggcattattatcaganttgaaattgcttatacagataaggaggaaagataaattcaaaacccagtgctgttcaataaaaatattgtatgagacattgataaaatgtaaatttttttccagttgtcacatttagttaaaaaaaggtaaaattaatttcaagtatatattttatttcagtaaatatatccaatatattgtcattttgagttgaaaactaatataaaaagtatcaatgagatttttttaaatattatgactttgatctctggagttcattagatccttataacacatcccaaattgaacagcctcatttcattgcacccaaggaccacatgtgactactggtttccatatccattagcaaaattataaattttgtatatgtctttcagttattgaa

SEQ ID NO: 658737 - DNA, 425 bp, Homo sapiens
  misc_feature (69)..(69): n is a, c, g, or t
  misc_feature (377)..(377): n is a, c, g, or t
  misc_feature (382)..(382): n is a, c, g, or t
  misc_feature (403)..(403): n is a, c, g, or t
  misc_feature (419)..(419): n is a, c, g, or t
aatttgagacggagtttcactcttgttgcccaggctggagcgcaatggtgcaatctcagttcacctcancctccacctcccaggttcaagcgattctcctgcctcagcctccctagtagctgggattacaggcatgtgccaccacgcccggctaattttgtatttttagtagaggcggggtttctccatgttggtcaggctggtctcgaactccccacctcaggtgatccgcccgccttggcctcccaaagtgctgggattacaggcatgagccactgcacccagccataacaactttttaaaagcactccaatagcatgcctaaagtctaaggactaccactaattaagtttcaaaaaaattgccaattttatttnagganaaaacatggaaaggaaaccancagaacacaatttttncaacca

SEQ ID NO: 658738 - DNA, 361 bp, Homo sapiens
  misc_feature (144)..(144): n is a, c, g, or t
  misc_feature (201)..(201): n is a, c, g, or t
  misc_feature (206)..(206): n is a, c, g, or t
  misc_feature (224)..(224): n is a, c, g, or t
  misc_feature (235)..(235): n is a, c, g, or t
  misc_feature (246)..(247): n is a, c, g, or t
  misc_feature (255)..(255): n is a, c, g, or t
  misc_feature (270)..(270): n is a, c, g, or t
  misc_feature (281)..(281): n is a, c, g, or t
  misc_feature (299)..(299): n is a, c, g, or t
  misc_feature (301)..(301): n is a, c, g, or t
  misc_feature (307)..(307): n is a, c, g, or t
  misc_feature (310)..(311): n is a, c, g, or t
  misc_feature (322)..(322): n is a, c, g, or t
gggggttttctttttccccccatcccttgaggggttgggccttcccaaaagggttttgtttttttgtttcttttgggggtgaagcagaccaggttccccccgggccccccggttgggggggggccgggtttttttttaaaaacntcccctttccccccggggtcctcccccttcccagggggccaatttttacccgcaaanggganttgggggttgtttgtttngtttggggtanaaagggaaggnnggggggangcccccccccggggngggggggttcntttcccttttccccgggncnggggtnttnnggggggggggnccggtaggggccctttgttttaaaaaaaaaaggcccata

SEQ ID NO: 658739 - DNA, 122 bp, Homo sapiens
tagttatacgagtcccctgggctggcgacacggtttgcgcctacgtgggtctcctgttcccagtgctaccctgcatcgctggctccttcccaggctctggggcagcgcaggcggggtaggct

SEQ ID NO: 658740 - DNA, 331 bp, Homo sapiens
gagttccccctggttttaggacattttaacaagttttgtccaggggtttccccattcccaccaggccttgcacacacccattcggtaacttttcccctgtacttgtgccaagcctagcacttgtgatgcctccatgccccgagggccctttttcagttttgggaggatgactccagtccctgcacgccctggcacacccttcagggttgctacccagggggccaagttccagcccgtgccagacccaggtgccccagtgcctttgtttatattttgttcccagcctgccaggcccaggaggaaataaacatgccccagttgttgtttttta

SEQ ID NO: 658741 - DNA, 220 bp, Homo sapiens
cagattcggcttcataggtatgaaggcagtgttcattccatgagcagtgggtatgagtgtccattctagacattataatataaaaaaaaatctttgacagacctactaggacaagaaatggtatactatattttttcttgctggatttctataggttagtcaagaataggcttttaatacaatctttacgtgataatggatattgcgttactttattggg

SEQ ID NO: 658742 - DNA, 321 bp, Homo sapiens
agcttcttttttttcttttaaatataaggattttttttaggctgggtgtggtggctcacatctgtaatcctagcactccctcaggctgaggtttttggattgcttgagcccaggaatttttttttttcctgggcaacatggcaaaaacccatctctacgaaaaatagaaaattacccaggtgtggtggcaggcgcctgaagaacaagctacttgggaggctgaggtaggaggatcacccgagcctgggaggtcaaggctgtggcgagctgtgatcgtgccacttgactccagcctgagtgacaagagggatccttgttcaa

SEQ ID NO: 658743 - DNA, 681 bp, Homo sapiens
  misc_feature (600)..(600): n is a, c, g, or t
  misc_feature (681)..(681): n is a, c, g, or t
tcaaggctgtggtttcctcatctatgaaatgtgggaattgggccaggtgatttcaaagtcctttgcatcttctaatttttaatgagtttaaggttttgtatgaaatctctgattatagcccagccgtcttgttatgagaagtcggactctccccactttctctctttcctggcttagtctcattccagtccagctgtatgaaatgagcaatgcagttgtctatgaattcttttcttttaaaaaaattatgtgacatttgacatatatagaagatacatatgtaacttgaaagtgatgaagcagaatgatagcaaatactttgataggtgtattttatgcttccttttccaaaggtagtaacacctaacatttagtgactgttaacagtgttacaggaactgctgtttatgtgtattgactcatttacacgtagtagctcattcatacaactacctcatgaaataagcactaatattatccccattttacatatgagaagactgaggccaagagagtaagcaacttgacttaaattagctgtaagagggcagagctgcgatcatgctcctgttctctctgctgcgcgcacactttactganaacacacaggccgtggattacagtgccctgtgtgtactcttagttgccaggccccttattttaccattgggatctgggtcn

SEQ ID NO: 658744 - DNA, 336 bp, Homo sapiens
agcactgttgcaggaaatgttttgaacaccaggagctctgttctaggcgaggggcgcgggatgagagttgtgttgagcctgtgtggctcatacacagggatattttatgaacatatagggatactatgagcggtgaggggtggacagtgttcgagtgagacactgatccacggagttcgcgaacagtgggtactcttggtgaccgggacactggtggctgttaacccagaggatggtcgtaacatgtgctaagctgacactgtcggtcctacatattgcactgtgaaggcaagtgggtagtgcgcacaactggtgcgtttagagatctctgagctt

SEQ ID NO: 658745 - DNA, 1094 bp, Homo sapiens
taaggggtcaataatagtctttatataattcagtggtccggctcagaaggcagggaaggaggtggaagcggcaggggagggcgtggcgggaggcccggcaggggggctcaggggcaaggtggcaggagggcggagtggggggcaggcggggggcaccggggcagggcgcgcgtgaccgtggtccgggggcccgggatggggggcagaaagtgagccgtgcccacgcgtgtcccgccagggtaggcgccaggcatcctcgaaacaggcgccagggcaggccttcgggctccgactcggggacaaggcgggtgcagggcaaatgggtatgcagggtccggcccggggggcccgggaaagcctggcccgtagggaccagagcccaaggacggggctcaacattcagtcacagggggggtatgacgacggccagacaacgggggagggcatggagggacaagggggtccccacttccagggacgcccaatagcagagccatttaacacgcggggagagggtgccggatgagagggagtccatccatcacggcccgggatccaaaatcagggggctgggggccagccgagacgggtgaaatgccgcaacgaggacagggacaggggcggaaaaaagggcaccgagggggggggccaccggccatggcaaggaaggcgaccttggggagggggtccaaagggggaaggaggtgggactctcccaaatcacatcaccactatacccgggatggtgggcccagcggaggaaccttgacgcagcctgacacccgggggacccacagaggagcccttgaaacacgagggaagggcgtatataggggggcgcctgccccataaaaacaaggggataacaactagccgacgcctgagccgccatataggtgagtacaagaagatgggtagaggttgcagaagtggcgaaagcgcagcaccgggacgacaacaaaacaccgcgaggacaacgagagacacgcagtgcgcagaagctctggacgccgagaggagcggtcgcaaacgacgcatgtaagcgaaaaggaggacggggagtatacgagaacctagaaagaacgatagtgaaa

SEQ ID NO: 658746 - DNA, 224 bp, Homo sapiens
caagcaggtacagtgtatcactcccttcttcctacatgggaccatcttatactactacttcttgtaatattactggagaaaggcagaactaaaaaagtgtgtcattttcatataaaaataattgcttagctatatagcctacactttctgtataactaagccaatacaatactgtctatagtgttagaaggaaaatgtgattataatatttaaccagtcattga

SEQ ID NO: 658747 - DNA, 644 bp, Homo sapiens
ctgtatgctgatctagagatatcccgactgtctcgctggctatcccatctacgggtatataccctaaggattagaactcatgctgctataaagacacatgcacacatatatttattgtggcactattcaccatagcaaagacattggaaacaacccaaatgtccatcaatgatagactggattcagaaaatgtggcacatatacagcatggaatactatgcagccatgaaaaatgatgagttcatgtcctttatagggacatggatcaagttggaaaccatcattctcagcaaactatcacaaggaaaaaaaaccaaacaccacatgtactcactcataggtgggaattgaacaatgagaacacttggacacagggtggggaacatcacacactgggtccttttgtggggtggaggtatgggggagggatagcattaggagatatacctaatgtaaatgacgagttaatgggtgcagcacaccaacatggcacatgtatacacatgtaacaaacgtgcacgttgtgcacatgtaccccagaacttaaagtgtaatacaaaatatatatcttaaaaaaataacaaaaagtgctaattgtaaagacaacaaaaaagattcgattcagtgaacctcatgtaaactaa

SEQ ID NO: 658748 - DNA, 115 bp, Homo sapiens
attgcggcctatgcgacgagtcagtatgaacaatagaaaatcttaagaagccgtaagctaaaaacatcaaatgattatagcgcaccaactgctcgactggaagcagcgaaattac

SEQ ID NO: 658749 - DNA, 202 bp, Homo sapiens
atattatacagactgaaaatgtcctggacagcagagagatgtatacctatattttcagacttgataaaaaatggacttaaccctaaagattttccattttccttccttctgtcttcttctctgtgtctatcctgacacaagaattaccaagatgagacatacaaggaggaaagtaacataaggatagtcttaatagggcaat

SEQ ID NO: 658750 - DNA, 185 bp, Homo sapiens
agactctagaagtatccgataaacagccaatatctacgatcaaccaacaagtcattattaccctcactgtcaacccaacataggcatgctcataagtgaaaggttaaaaaaaagtaaaatggaactcggcaaatcttaccccgcctgtttaccatataacatcacctctgtgcatcaccagtatt

SEQ ID NO: 658751 - DNA, 211 bp, Homo sapiens
tactcagcgtgttagacggcacttaatagccatgagattgcacgtgagtgtagatggagaagagcagcagtttgaagaccaagacctgagacagtccagcatttataggcttaggagtgattaagaagaaccagtagaataaagttaagaagcagtcattggggcagatagcgaatgaaggagtctaatggacgcttaataaagagagtgt

SEQ ID NO: 658752 - DNA, 249 bp, Homo sapiens
  misc_feature (247)..(247): n is a, c, g, or t
atatggctaggttggttacgaacacgactaaaagtatgtgcaaggcaaacatacttacaacggaacggcacgcctaaaaagggttaagagggcaaaaaagggactaaaaagacattaaaaaatcaatcagttaaataaacaaatccatggtcggacgggatatggtatatacaaatcatatgccacacacagaaaaacatcatggggaaacaaacatatcagaataaacatgaggtagagagccggnca

SEQ ID NO: 658753 - DNA, 143 bp, Homo sapiens
agccagttttgcaggtatcctagtcataaaaacaatataggcagagcaaagggacttaggccagccatcaaccacttctttgagcaggcagatggggaaatccaatctgccctctgccgataccaagctccaacacagggagc

SEQ ID NO: 658754 - DNA, 842 bp, Homo sapiens
aatatataccacggttcatgtacatcccacattatacatccttgtaccaaatgaggctttcatgtagtagaataagaatcgtgtaaatttctaagagattttagcaggttgttctttgcctattcattgatttctcactcagttctaaaaggattcctttaagcatgtcagagtgaccaagcaattaggacttaaaagttgtccatatgaatttccctttaacccttgaggcttcattagactcttttcacttactaaacgtgttgtatcttctttgttttgacacactcccctttgcttttatctcttacctgccagaatgttctcaaatggatttagttcaaatactgaaatacttaatgagcaattacttgatttttaatgatgacttcgaaggagtcatcactaggtgctttgtccttgtttgtattctagttgcacccacctcttggattggatatagcaataacatcttacttggccgttgtgagctcttgatcccagtcattaccccatgagaactaaaaaatagataggttcttaacttcaacattacttgagaaaatttccgcgcaaacaagtagcaaatctgacttgttccctcttcacgttgccgtggctcacttaaaggtgtaggataaactgaagcactgcagcagctacagggctttgctacttaacttctgggttggactaattacagaatcctatgtactctcatacccttctccattagtccttcatatttcctctgcctctattcttctatactgcagatttttctcaccattattgtacaaagaaattgcgatgtatatattactccagtgattttggatctt

SEQ ID NO: 658755 - DNA, 739 bp, Homo sapiens
tggaaagggagtctaactctgtcccccaggcgggagtgcagtagtgcgatctcagctacactgcaacctccgccccccgaggttcaagcaattcctccgtgccttggccctcctcaagttagcgtgggatttacaggcattctgtgccaccatgtgcccgggcaaattttgtgggtgtttttagatagagacagggttttggccagtgttggcgccaggcgtggctcctcgaacctccgtgaactcctcagggtgatcacacccgccttcagccttctccaagaggtggcgtgggaattaatataggtgtgtgtgaggcccacgcgtgtgccccgtgccgtggaactcgtagttttcactatagccagcgccaggtggaggaacactctttggggtaacatgtaaaggcccgaggggccacacaaagccgtctcaagagaggttcagagggtgttagggcccagtgaggccgggcacctatgctggcaggcaagggttcccaatccccgttgccctaaggcaactctctctcccagagcgccagtgtgggggcacctggggggaagcgctcagtctcagaaatttctgagcagaagacctcttaaacccccatcccaagcaaccccaatccggtttgtcccccagagcgtggtcttcccatgagttgtgctaaagccaaatagccggggcccccaaccaattttatcacaaaccggcttcatacccccaaaaaattcca

SEQ ID NO: 658756 - DNA, 231 bp, Homo sapiens
  misc_feature (101)..(101): n is a, c, g, or t
  misc_feature (155)..(155): n is a, c, g, or t
  misc_feature (181)..(181): n is a, c, g, or t
taggggatgaagaatttgccctactttgcccagttcctaagacagtgaggtggcaaaaccccagacaggaagctcgccaaggagcaaaaggcgcattttcnccgtgtcatgtaaaatttctaaggtgtttggcagcactctgtaccctgtggagnactcaggacctttgtttgatgggcgnacaagacctgaaaaaaaatcccttaaaaaaaaaacccattaaaggggagc

SEQ ID NO: 658757 - DNA, 137 bp, Homo sapiens
acaagaaccgaaccttccctgctcgtctcggtccctttccctatcccgatctcggtcccccctgtcccgctccctttctctttccctcttctgtctcctctaaggacaattgtcattggctcagtcttatcccggat

SEQ ID NO: 658758 - DNA, 818 bp, Homo sapiens
cactagtggtgtgtgtggacgacagtgagttatagtgctggaattggtaggacttcgttagcccgaccatggtggtgcatggcaccagtcatgcgattgcgtgtcttatcatacgatttgtcgattcaaagacccgacagcagaccctgagaacaacgtgtgccttatcacactggtctaatgactgtgaagctgctgaccacagctcagcccagacactgggccggtatccctgtcacaagctagagtactgtgcaacccaagtggcaagatcagcttctgcgacgggcgatccgcagtggcccatctggctctgaagcaccgacaaggcaagaatcacaagatgcgcatcatatgcctttgtgggaagcccagttggatggacaatgagaatggatctggtgaaactggctaaagcgcctcaagaaggatgagaagtaaatgttgacattatcaattttggggaacgaggaggtgaacacagaaaagctgacagccttatgtaaacacgttgaatgtgcaaaagatggaaccggttctcatctggtgacagtgcctccctgggcccagtatggctgatgctctcatcagttctccgattttggcgttggtagatcaggtgtgtgccaatggatgggatcttggatgcaggtgactttagaatatggagtaaatcacagtgctgattcatgagctgggctggcccatcgggaatcaatgaaggagacgggagggacgaggagatgccggggagatgagatctatgtagaagcaggatgacaaacggaggaagccgaaacctgtaatactcagcattt

SEQ ID NO: 658759 - DNA, 1097 bp, Homo sapiens
  misc_feature (438)..(438): n is a, c, g, or t
caccatcctttttcggggatcttttttcggggttacacacccctctggagagtgttgaaagtaggttcctgatgatgtccttacacacaaggggctttccccggacaattaatgtctgtgcccccccgtgagttggggaaagcccgtttaggtcttaattctcccccgggggatataaaaatggagaccccccgtttggggggagaaaacacattacgggttaatagggttcttgagccctaattggaaatagctccccaggtttggggcctttccccttaaggaggttttttaattctgttggtggagcgccacccccagcaaaagaggtgtgtaccccggtatggggaaaatataagccgtatggaacacacccccggggccacatagtgttcgaccccccttccccgtcttaccccacgtaatttctacttccgncatatatctccccacccgcggcggttccaaccagggtatatttaagccgtgagactcggcccaccacacttccaccggagaggcccacatattgaaaactcgaattctcgctgcacacggtgggcttctgaggccccctatgggaattccaatgctcttgcgtgtttgttcaccccgctaaggtggccccgtgaactggggcactgtggtaattatgccacaactctcactacactctatgaccactcgctattctaccaccgacacaccggtattctaccgcgttgataggctcaaccgttccacctaatgtttcctcattcacaaatggaagcctgtatatttgcacactccaataaggagggcttacacattcacctagaatttccccctcaatttctcacggctacacacccctatgagccacaaacctataccccacaaaatccacatttcacctatcatattcatcggcgtaaatttaactttcttcccacaacacacttttctcggcctatccggaatgccccacactataatactacccgtatggcccacccactaattaacccccataactccttacactattcctcatcaccccaactaaaaatattaaaccaccaactaccccctacctccctcacccaagcccccta

SEQ ID NO: 658760 - DNA, 192 bp, Homo sapiens
gcactctaaggatctgctgatcgcttaggaaaagaaaaaaatcacaggctagtacgatatcagatcactcttgtagtccagctactggaggctgaggtgggagtattgcttgacgcccagagtcatgatgagctggacacatagcagacctatctcttaaaaaaacaaaaataaaattaatttaaaaaaata

SEQ ID NO: 658761 - DNA, 382 bp, Homo sapiens
tcaattatctccctccctcttcagaggcaaccacattaccagctatttacctttcccatgatagtcactgcctatacaagcatgccaagtatctctctgtgtttttaatacacactgtggtgtattatacacactgtcctgtaccttccttcttacttaccaatgtcatttcagtgcttctagatgtactgcattcttttttaacaggcattatattcactgtatggctacgatgaacatttagcttgtttctagtcatatgctaatataaacaatactgcaatgaaaattcttatacctaagtctttgtatcaagccagtatatctctacaggataaagtcctaaaaatggaattgctggctcaaggggtatgtgaattta

SEQ ID NO: 658762 - DNA, 318 bp, Homo sapiens
tggcatatgtgaatgatggtgatagtagtggtagcttacccttcttttcttctatatgtgtgtcccactaggtaaaattaaaagttatggtactatgttagcccccataattttttttttctttttaaacaacttccctaattctggactcctctgtccaggcactgctggccagcctccaagctccatctccactccagattttttacagctgcctgcagtactttacctcctatcagaagtttctccgctcccaaggctctgagcaaatgtggctcctgggggttctttcttcctctgctgaaggaataaattgct

SEQ ID NO: 658763 - DNA, 407 bp, Homo sapiens
ccatgcccaatgtttgcctgttccataacactaactcccttcccccttgctaatcagaagccatctcctctcagtggctgatctctgctcttcatacatgattacagtcatggggtagagagcgcttgctaaattatgcagttaatcctatggagctttaattttcaggccttcaaaacacacttgtacagtgatgtgcagatttttaaacacatgaacttccttggactacagcatttgtattgacagccaaattcgcctttcattcttcaaattgcgaatacagtgatttttacagggctctcagccaagttttgcctttcatgtaaggcttgtaaaaccctagcaaatatatctgcttacatgaaagacgcaaattctgttttcaccctgacttttttaacaaa

SEQ ID NO: 658764 - DNA, 279 bp, Homo sapiens
ctgtaatctcagcacttttggaggccagggcgggaaggattgcttgaggacaggagttcgagaccagtgtgagcaaaatgtggagaccttgtctctgcagaaaataagatagttgtgggtgtggtggtaccagatgtggtggtacacacctgtgtagttccagctacccgacaggctgaggcgggaagagctcttgagcccaggagttcaaggctgcagtgagctatgattgcgccactgcactttagcctgggtaacagagcaagtccttgcctccca

SEQ ID NO: 658765 - DNA, 290 bp, Homo sapiens
tggagaaggaccacactggataggagtgtatgggatggtgtgggggaaaggaaaacaattgacataatgtacaaggcacattcaataacaacacaagactcaaccaaaatagaatacaagaaacataataataccccaccaatcgttttcacaatgtactacaatgggatagttataatgatcatattgtgaacacatgaatactgatctggttgaaattgctctttatttctgggaggattggggtgggcagtgtggtgtgtgtggtaaggtaggattggtacctcaga

SEQ ID NO: 658766 - DNA, 180 bp, Homo sapiens
  misc_feature (10)..(10): n is a, c, g, or t
  misc_feature (55)..(55): n is a, c, g, or t
  misc_feature (116)..(116): n is a, c, g, or t
  misc_feature (118)..(118): n is a, c, g, or t
  misc_feature (144)..(144): n is a, c, g, or t
ggcctgccanactcaagagctacctgaggcagaagctccaggccctgggctgcgnctgggggcctgaagggggctgaggggatgatgtggggttcaggatggcccccccatggtgngnattgatttgcactttggttccctgtnttttgatttctcattaaagttcctttccttccccgt

SEQ ID NO: 658767 - DNA, 398 bp, Homo sapiens
agagatctcccacctcagcctcccacagtgctgggattacaggcgtgagccgccacacccagcctattcaaaatttttttttcttagagacagggtctttgttgcccaggctggagtgcagtggtgtgatctcggctcactgcaagctccacctcccggcttcacgccattctcctgcctcagcctcccgagtagctgggactacaggtgcccgccaccacacccggctaattttttgtatttttagtagagacggggtttcaccgtgttagccaggatggtcttgatctcctgacctcatgatccgcctgctttggcctcccaaagtgctgggattacaggcgtgagtcaccgcgcccggctcattttaaaatttttgtagatcagtgtactgttgt

SEQ ID NO: 658768 - DNA, 899 bp, Homo sapiens
  misc_feature (11)..(11): n is a, c, g, or t
  misc_feature (822)..(822): n is a, c, g, or t
  misc_feature (887)..(887): n is a, c, g, or t
gaacagagacntccgcaccgtaaaggggaagaaaaacacccctcctgttttgtttttctgcaaaaggtggagcttgtggaattcattcccacagacgacagatgagaagtggatcacagtgcccataacaaaactggtaacgaagtcaaaggacccgagtgaatgtgacatgtgaaataaaagcagattcgatgcttccttgtcctactctcacatctgcattcctctatcaacaatggactgatctcattcatattgaaaactaagaagatgatactgtaaatcacatgctccctgacttagttctgtttagaacgccaacatctatagggaacatgggccagagagcatctctgaatctttcatttccaaaatactgtttttcaaatggctgcttaaaattgcctgcaaatgaatatgctatatgatttgggcaaaaacacagcagaatcaatgagtaaatttctaccaagagtcgggtttgccacagagatgtgaatattaaactaaactattattttttaaagaatcctcacatgcctagagcattctgacctcttcttgtttagagtgataacattttttcccagacagatgacagcaacaagatagctctacttttttatatggaaataacattatgttactgacaaggtcattttctaccagagacaattagaggactggtacttttcctaagttgtgtattactgagtcttggagtcatctctgagagcaaatgtatgttcctgaaaagctaattttacacctcatttactgtaggtaacaggaacaacctcaatttttccaaatttttgaagntttatttatgggggctagaattcccctgcataggagatttgtgtaggggggccagaattctttcnctggaaatgcta

SEQ ID NO: 658769 - DNA, 284 bp, Homo sapiens
  misc_feature (15)..(15): n is a, c, g, or t
  misc_feature (44)..(44): n is a, c, g, or t
  misc_feature (114)..(114): n is a, c, g, or t
tagaggatcccccgnatggcgtacatgtgacttggcagaatttnaaaagtagcaggagcagaagatgaaaggcatcttgaagcctaggcttggaactgacacagtgtcactttnatcacagtctcttggtcagagcaaatgacacagccagccagattcaggtggaaagagccaccaaagtggacctgagaccacccaactctgaactttttgctaagtaatgaaagggatcctgaagtttaggccactgtcagtcagttttctgttacttacgcgatgacggg

SEQ ID NO: 658770 - DNA, 139 bp, Homo sapiens
  misc_feature (130)..(130): n is a, c, g, or t
gtggggactacaggcgcgcacccaaaatgcccagctaattttcgtatttttagtagagacagggtttcaccagtgttggccatggatggtctcaagtcacttgatcttggtgaccatgccctgtctcggntctcccaaa

SEQ ID NO: 658771 - DNA, 404 bp, Homo sapiens
  misc_feature (52)..(52): n is a, c, g, or t
  misc_feature (71)..(72): n is a, c, g, or t
  misc_feature (82)..(82): n is a, c, g, or t
  misc_feature (91)..(91): n is a, c, g, or t
  misc_feature (93)..(93): n is a, c, g, or t
  misc_feature (95)..(95): n is a, c, g, or t
  misc_feature (99)..(99): n is a, c, g, or t
  misc_feature (108)..(108): n is a, c, g, or t
  misc_feature (120)..(120): n is a, c, g, or t
  misc_feature (134)..(134): n is a, c, g, or t
  misc_feature (136)..(136): n is a, c, g, or t
  misc_feature (139)..(139): n is a, c, g, or t
  misc_feature (144)..(144): n is a, c, g, or t
  misc_feature (149)..(149): n is a, c, g, or t
  misc_feature (152)..(152): n is a, c, g, or t
  misc_feature (160)..(160): n is a, c, g, or t
  misc_feature (167)..(167): n is a, c, g, or t
  misc_feature (172)..(172): n is a, c, g, or t
  misc_feature (191)..(191): n is a, c, g, or t
  misc_feature (194)..(194): n is a, c, g, or t
  misc_feature (196)..(196): n is a, c, g, or t
  misc_feature (227)..(227): n is a, c, g, or t
  misc_feature (231)..(231): n is a, c, g, or t
  misc_feature (233)..(233): n is a, c, g, or t
  misc_feature (255)..(255): n is a, c, g, or t
  misc_feature (259)..(259): n is a, c, g, or t
  misc_feature (261)..(261): n is a, c, g, or t
  misc_feature (275)..(275): n is a, c, g, or t
  misc_feature (291)..(291): n is a, c, g, or t
  misc_feature (293)..(293): n is a, c, g, or t
  misc_feature (306)..(306): n is a, c, g, or t
  misc_feature (324)..(324): n is a, c, g, or t
  misc_feature (331)..(331): n is a, c, g, or t
  misc_feature (333)..(333): n is a, c, g, or t
  misc_feature (352)..(352): n is a, c, g, or t
aacagcaaaaaaaggaaaccgggccccacggccgggaccccccaaccccganaaacccccaaaacaaaacnnccgggccccnccacccccnananaaancccaaaacncccacccccganacgaaaaaaccccncncanaacanaggcngcnggccacanaaacccnccaanccacaaacccgccccccanaancncggcccaacccaagccacgaaggacaccaanccanangaacaaaagggggaacccaaanaaangnacaggggaaaaaanaaaaaccaaggggaananaaaaccccaaaanaagggcaaaaacagcaanaaggccnanaaaccaggcccgaaaacanaaacaagccccaaggacaaaaccctttcgaaggctaacccagtttcgtgagg

SEQ ID NO: 658772 - DNA, 194 bp, Homo sapiens
cctacccccaccgccaccaaaagtcatccattgtgtagaaccactcttcagcatgcttatcacaatttttacaacttctcttccacggggtggtggtggtgcacgcctttaatcccagcacttgggaggcagaggcaggtggatttctgagttcgagaccaacctggtctacaaagtcagttccaggtcgacgc

SEQ ID NO: 658773 - DNA, 181 bp, Homo sapiens
tacacaggtaagaatttgtatcttgagaccaagtcttaaaatgactgcatggtggaaataaggccactttcgtctcttgaaccagagataatatgtgtcagtccattggacaaagcatagtactaattctaagtacagataatgagtaatcagaaagttagtggtgtggaaggttaacatc

SEQ ID NO: 658774 - DNA, 201 bp, Homo sapiens
gtccattggacggggccgtggtggacgaggtgcccctactatggcgtcaatggcccctatccggcggctggggctgggcctgtgctcttctggctgtttctgtcatcactatgcttctccttatgccttccccaaggcctgttaggcatctgagccgttcaggcctgatctagagtgggatcctactcagagtcagacctt

SEQ ID NO: 658775 - DNA, 133 bp, Homo sapiens
gggaacatgcccgacgtgcccagccacccccaggaacctcaggggcccagcctggagtggatgaagaaactgagagcacctccactgatagaggcggcccctcccacggttcccaataaaaatgtgaaaacca

SEQ ID NO: 658776 - DNA, 431 bp, Homo sapiens
gggcgtgtcagtcatgttacatgagacaatggcgttagatagggcaacaattgtcgctgttctgtgaaccacgactgcagtgactcagagttggtcttacctaggtatacacttggcacacgttacaccgaagtagggtcagcaagtttctccatggctcaatgtgattgacatgcgaggacggatgtcaggtgtctcatggagcttaggattgctatgccctaaaccctttgccctaggatccatgagttcatgacgcagcccattaaaggtcactcatgctcggggattcaagtgcacatcttgtacagtcatcccagtgataagtctgttaagaaagtggtcgtgattccagatcatgctgcattctgtaggtatcaaggcagtgagccacgacttgccacgcagtgtgcaccagtaacggcttgtgc

SEQ ID NO: 658777 - DNA, 242 bp, Homo sapiens
  misc_feature (29)..(29): n is a, c, g, or t
  misc_feature (71)..(71): n is a, c, g, or t
  misc_feature (91)..(91): n is a, c, g, or t
  misc_feature (96)..(96): n is a, c, g, or t
  misc_feature (110)..(110): n is a, c, g, or t
  misc_feature (140)..(140): n is a, c, g, or t
  misc_feature (144)..(144): n is a, c, g, or t
  misc_feature (155)..(156): n is a, c, g, or t
  misc_feature (175)..(176): n is a, c, g, or t
  misc_feature (201)..(201): n is a, c, g, or t
  misc_feature (203)..(204): n is a, c, g, or t
  misc_feature (223)..(223): n is a, c, g, or t
  misc_feature (232)..(232): n is a, c, g, or t
  misc_feature (236)..(236): n is a, c, g, or t
cggaaactggcagaggcggaggagacacntaagcgacctcagagccagaagggaggtcagggaatcaacgncgtgaacacagaaggcaatnccatnaagagcaccattgncaaccccaccaccacccagtattccagccntaancacagccttanncctaaggcacggagcaccnngtcggtacaatgacccccagaacgngnntacccttctttgaaattgngctcaaganaaantaaaat

SEQ ID NO: 658778 - DNA, 131 bp, Homo sapiens
gcatcatcacgagaacatggcctttggtttttaagtcatgaaagcctttatgaaaaccttcagctagctaggctgattaagggtggactagtcttctcactgtttaacgtcccctagccagacgaagtata

SEQ ID NO: 658779 - DNA, 310 bp, Homo sapiens
  misc_feature (190)..(190): n is a, c, g, or t
  misc_feature (202)..(202): n is a, c, g, or t
gcaaggtcgacaactagtgggatccaaaagaatgcgggacacgagggaagagggtaaagtaaaacgcctcgatgctcaaaactagcaggcggtggtggcctgatctcggcgtaccaggaaaggattttgtgaggaaattgtgctttagtcaaaagaagttgttcgtgaggcagaggatggggtgatgggngtctcgctgcanaggggcaacaccctgtgaatgttctgtgggaggtgcttaaaactcatgaattctaatcagcttctaagatatctcccacctaatctttatcattacatttaagaactg

SEQ ID NO: 658780 - DNA, 438 bp, Homo sapiens
  misc_feature (1)..(1): n is a, c, g, or t
  misc_feature (84)..(84): n is a, c, g, or t
ngctgaagtcttgctttcagacagggcttcagcctagccttgcgtagttctcagctatggtcttctgaacacagtcgtggatgnaagtcaccttcacatacacaccatactcagcctcagcacagctcttatcagtgcttaagatagcagtcgcataccaggtgtcctcattcaggtcgtgttcgtcataggcactgccagcatcgccatagcaggtgtcttcttggtacttagacatgccagcacagaaggtgtgttcattcagtatggactgcacccctacagggctcttcggtgtcttcgtatcggggactgtgctgccttcataatgccttatgcattggtcttggtcagccacagtcagcatggcacacttcatatggtcagtaaatttagaattggcatttcgcccacagccagaaacataacccacacgcc

SEQ ID NO: 658781 - DNA, 304 bp, Homo sapiens
gctcgacctttgggagtccaaggagggggatcgggtgagtccaggagtttgagaccagcctggacaacatggtgaaacccgtctctacaaaaaatacaaaaattagccatgcatggtggctcatgcctgtagtcccagctacttgggaggctgaggcaggaggatcacttaagcccagaaggcagaggttgtagtgagctgagatcgcaccactgcactccagcctgggcaacatagcaaactcctgtctcaaaaaaaaagttaaaaaatattgcccggctcctagaatttatttatttcctga

SEQ ID NO: 658782 - DNA, 236 bp, Homo sapiens
ttcatcacagtcacacggcagcatggtgtccttgctcgaaagatgagtgacatggactaaagtgtcatctgacaggatgcctgcattggctaacagcaaatactttctctccttcagccatctcaggtccgaggctgatgacctgttcttccttctattccttcccctttcgaggttgccatttctgccctttcgtctgcagactccatagcgaacagcaggagagtaggagcgtc

SEQ ID NO: 658783 - DNA, 435 bp, Homo sapiens
caaactttggttatttcgacttaagaggttatcaagaattaggcttaaaaatataaaataaagagggccaggcgcctgtaatcccagctcttgggaaggccgaggtgggtggatcacttgaggtcaggagttggagaccagccgggccaacatggtgaaaccccggttctctactaattaagtacaaaaattagctggggtgtggtggtgtggatgccggctaatcccagtctactcaggtggaggctgaggcaggagaaatcgcgttgaacccggggaggcagacggttgcaggtgagccagggatcataccacttgaactccagcctggggtgacagagtgagactctgtctccaaaaaaaaagaaccgagccgagtaaaaaaacctgattgcgataaatagtcctcttggtagtgttagcaaaagtgtggcc

SEQ ID NO: 658784 - DNA, 159 bp, Homo sapiens
tcaagcttctaacgatgtacggggacatggtaaaaccccatctctacaaaattaggaggttgaggtgggaggatgatttgagtctaggaggcggaggttgcattgagccaggatcacaccaatgcagtccagcctgggcgataaatcttgtctcaaaaa

SEQ ID NO: 658785 - DNA, 227 bp, Homo sapiens
cgagtaggtactctccttcgtagacatcttcatgtaactttctagtcattgcatttgttagtacttacccgttgcatcataagaacaaattggaaacgaaaggctgcagtaactggatcaggtacagaaattattgctactatacttcactacaaagcctgtctatacagtatcatatgacctttgattatgaaaaaatcagaataaaaatctttagtgacataagc

SEQ ID NO: 658786 - DNA, 381 bp, Homo sapiens
ggcctctgtgcctattagtcacctatgagactgcatcaccgcacctatccattcctacctcactcatgcagcgcgtctgtcgtgactagcaaggagtctgggaaacctgcgccgtgaatcatctgcatgccggtaatcaggcatcatctgtcatcactgcgctcaggaacagcagggtgactcgccgaagagaggaaactcatagattacgacatcttacatacctgaatgcgggaacctcgggagaaccaagtacagcttacagtgtctactctcattctgtgtcatatctttatctcatttatggtatttacgcctaggacaaggatgaaagcaaacaaaagcaggcctgagtaaccctggcctgtctcctctggactg

SEQ ID NO: 658787 - DNA, 127 bp, Homo sapiens
gccttcagctgctttcttgcgagcactgctccacggtcggctgtcttggcggcggcgtcgctgtcggcggtgctgtcgtcactcttctcctgcccttcctgccatgcggccgcacgtactcttccag

SEQ ID NO: 658788 - DNA, 905 bp, Homo sapiens
ccgctcggttccatggcaccccgcagccctgcccagtgtgccatggcctgcatatgtaccgccctggcctgcggcttaactggcatggtctgagccccttgggctggcatcatgcccgtagcatccagaccctgcgagtgcttatgtggagatcttgtggccagcttcccactggcattcgcgattttagtagatgcacagtgcccgcctgtgccaaccagaggtgcatccacatctagtgatggaactgattgctgagaatacttgccacactgaccctgctggagcagcagggcctcatcctgaaagctccccaagtacaataacttgctggctggccctgcacagaccccaaggatgtggcactgagtaagagagcaatgacggtgatttgtaacatccttctcagcggtgacacagggtaccactcccgcctggtgggggcccgtgggcagctgggcaactgtatgtccccaagactgatttccagcggagctgtggatgagaggttatccaggctgccatgccagggccgcacatgtatgtgcttccatttcaggcatgggtcgtgttggtgctccccgctgtcccgcaattcggtgggtgcatgctcactgcactcagcctattgtggttggcaaagcatgctgtattattgaccccgagctggggacacctgtgcttcaggccctgtgagattggttaactattgtccagtgttatgcactcgagtgccccgtcccttaccgtgacatgtgttgcctgttgagcctgttggctttcatccatagaaaacctgattggacactcttcctacagtggagacaacatctcggacgggtaggtgcactctgtggaagagtattgccagcatctttcgatgcggatgtgtttagcaaaaattt

SEQ ID NO: 658789 - DNA, 582 bp, Homo sapiens
aagttttgtaaggtacataaaatccaatttatatgtaaacaagcaataatttaagttgagaacttatgtgttttaattgtataatttttgtgaggtatacatattggggaattgactcaaaaatgaggtacttcagtattaaattagatatcttcatagcaatgtctcctaaaggtgttttgtaaaggatatcaatgccttgattagacctaatttgtagacttaagactttttattttctaaaccttgtgattctgcttataagtcatttatctaatctatatgatatgcagccgctgtaggaaccaattcttgattttaatattgttaatattctttctttaaagaacctttagaaagactacatgttactaagcaggccaaattttatggttgttttgtcttgcccactctgggagggggaaaaaatcttttaattaataggtggtaagttttaaaacaaacttcaaatacccaaaaaaacggatggaccctttttttgagcctattttcttacttaaaccccctaaataccctttcctttaccctaaaatttccagaaaggaaattctttttttggat

SEQ ID NO: 658790 - DNA, 883 bp, Homo sapiens
gagaggacgaggagaaatggaaaaggaggaggagagaagaaggaggggaaaataagaaaaaggggcaggcaggcagaggcagcaaggtgccaggcaggaaacacaggcagtcaaacagtggaggagcaggcagcaagcacaggcagtcaggaggcagcagctagcagcaaaggtgacggagcacgcacaaagcaggcaatgctagaattactgaacaaagcagcaaggcacagcaacaaaaggcagtggacgcacagcgaggagcaggctagcaactaaggcagctaccacagcgcaaggagcgcagcacagccagcaagcgccacgcagcgcagcaagccgcagcgcaacacaagcagggcgcagcgacagaaggcagggcaccagcgaggcagcgcagcacaattcgggccacaaggcgcagcgaagggaggaggcacaggcacaacgggcagggggggcaccacacactcacacgcaaacacaaagggcgggcacgggcacgcggcaggcacgcggcacgcaacaggggttgcccacgcgcaaggggcaacacaaacacacgcgccagttcacacacaaggttggggccacgcggaaggcaagcgccacccacacccacaggggcaggctaagcggcaaggggcaagcacgcgacgccaaggcacaccacggggtctgcacggggcacgtaaacggaacacccacacgcaaggagcacctttgttcaggacactttgaccttaaacacaagcaagcaagcacaacgggacggacaccacaccggggaagtttggggacgcaacaggggaagggaacgaacgttcacggaaacttacaggggaggttacgcaacgggcaccgcagggaacgaccggcacac

SEQ ID NO: 658791 - DNA, 376 bp, Homo sapiens
cacaacagaccaactattatagtcatgcatcgcttactgacggggatgcattctgagaagtgcattgttgggcggcttcattattgtgtgaatatcacggggtgtacttgcacaggcctggatggtgtaccctatcccacgcctgggttgcaaacctgtacagcacgttactatgctgagtatcttaagacaactgtaacgcaatgttcagtgtttgtatatctaaacatacatagaaaaggtagagtaaaaatacagtattgcaatattatgggaccattgtcatatatgcagcctgtctttgaccaaaacatcattatgcggcacatgattgcatatgatcacattcttgtgaaatgtccagaaaaggttaaaa

SEQ ID NO: 658792 - DNA, 148 bp, Homo sapiens
gccggatgcctggccctgctttagcttacggcgctgccgcgcaaaggggagctgcctgcctatcaggggcgtgcctgcgctggagctccatggagcccaggcgtggcgtgtgcaggcacagcagcaccgcaggttaccgagctcgcaa

SEQ ID NO: 658793 - DNA, 151 bp, Homo sapiens
cactgttctgagtcgctggacactacaggcctggcccaccaggatgtggctcatttttaaaaaatttcttgtagagacaggctcttgctacattgcccaggcttgagtgccgtggtgcattcacagctcaccgcaggctcacactcttggc

SEQ ID NO: 658794 - DNA, 87 bp, Homo sapiens
  misc_feature (21)..(21): n is a, c, g, or t
gggcagggcccccccccaaanttaaccgaatggaaacaacttaactgaggcctgactttttcaataaaacattgggtagttttggga

SEQ ID NO: 658795 - DNA, 219 bp, Homo sapiens
  misc_feature (88)..(88): n is a, c, g, or t
  misc_feature (101)..(101): n is a, c, g, or t
  misc_feature (113)..(113): n is a, c, g, or t
  misc_feature (166)..(166): n is a, c, g, or t
tctagatacaggtactttatttacaaatattgagattaatagcattttgttacatcaaaggaggggtacagcagtctgaataaatccntcagtcacaaaancaataaaacccnctggaactaactttgggtgtcagggtatttcacctcaacaagccgcagtcttnagtttgggatttctacctgatttcccaaatggggggtcttgttagttttgtgt

SEQ ID NO: 658796 - DNA, 406 bp, Homo sapiens
ttttttttgggggggggggcctttttttggggggcggggcttggtttcgggaaaagaccctccccccaaaaatttcagtttttttccaggggggagaacccggttttttggtcaagggggaattgcccctcaaaaaaattgcccctttttttgccccggggggccccccagggcccaaaaaaagtggggttttttagggcccttcccctttaaaaaattagggggaagacccccccccccttttccgtttttcccccaaaaaaatgaatttttaaacctttaaaagcccccccactaaatgccaaaaaggggttgggggaatccaaagttaatttaaagccaaaattttttccccccggtttttaaaaattggggggggccaaaaccggaaaaaatttttttttta

SEQ ID NO: 658797 - DNA, 183 bp, Homo sapiens
tctaggggatcccccgatgtacttaaaacgggggcttcttcctgcgcatccaccccgacggccgagtagcacggggtccgggggaagagcgaccctcacatcaagctacaacttcaagcagacaagagagaggagttgtgtctatcaaaggagtgtgtgctacccgtaacctggctataaagg

SEQ ID NO: 658798 - DNA, 996 bp, Homo sapiens
ggactcaagcgtgccgtgacgtgcactgtgtggtgaagctacgttgggtcccgggacgcgctgtcggcgtgctgggcggtgggctgccgcaacttgcaatagactaaagcagattgcagagataccaatggacgaatttgttgagctataccgttaattgatgaatcgaaagcgcaagatgtgggtcccagaagggagatttggtagggaggtagatgaagtataatgctgttgtggagacatgacaaggatacgcgcgcaagtggtcgggcctgagattcaatgcaaaggtattacttggaagaatcgttctcgaaggaactagtatgttgatgcatgtaaggagagtctcgatgcgtttgcacggcctgggtgaaatagatggtgtcaagggaagttagatgaacgaattggtcgggtgatggggtagagagtgttgggtgaggactgggtcgaagtggcattggcttcagggtgagaccatagtgatgaagaatcctaggcacgaggagaagctatcagtggagaattttgcttacatggttggggggagcatatttcgttgggagaagattctgttgaagatgtgcaggaggagggagatcggtgtatgtgcgttaaagcgtgaggaatgggtagattgagtgagctgtgttgagaaagtggtgtctatgaagtggataggcgggtgagtcacattgtctgttacatggattttccttctgtcaatgggatagaggatcatgtgaatggaaatctagttcttcaggggactttcatcattatttgggggaaggttggaagttgtgttttcccgtggagtggtacatggcgacatgtggttaaaggttcttccagcatagaataaataaagaaggtgggggggggcagagaattacaaagtgggggggggcagagaagagaagatgtgtaaaagaagaaggggacaaaaaggggggggaaaaagatgtgtgttagagaacaccggaggagaga

SEQ ID NO: 658799 - DNA, 100 bp, Homo sapiens
tagaggatccccaacgctggtcttagctagtcagactgatcctccagatgacagacaagtcccccaaatgagtacacatctccagctattcagacagatg

SEQ ID NO: 658800 - DNA, 163 bp, Homo sapiens
  misc_feature (21)..(22): n is a, c, g, or t
aggagttcataagtatatttnntgaattggtggtttaggaagtcaactttagttttgctttgtttgcatgtccactaattttttattttgatattagtctttttaaaaaaattttacagtagtcattgaaagttatgtttcttgttacctcaattttccccta

SEQ ID NO: 658801 - DNA, 198 bp, Homo sapiens
ctagcacttgggaggcgagggggggcagaatcactatgaccacagggggtttgatgaccagcctggggaacacgggggagcgccaactccacaaaatatacaaaaaatagccaggcgtggtagcggtgtgctataatcccagctacctgaggggctgaggcaggaggattgctatgaggctgggaggtcaaggctgca

SEQ ID NO: 658802 - DNA, 706 bp, Homo sapiens
  misc_feature (529)..(529): n is a, c, g, or t
actggtctttgcctagacgtcgtattacgacttgactactcgactcatgcactcattggatcgccatctagtctatccgctaaatgaatacgtcctatgggggtagatatatagcgcacaggaatgattacaaggtcgataggaccttcatagcgataccaacatgagcgactatgatccggaagcattcaacgaccgttattctgaggtttactatcatgctttgagagagaaatgaaccacagcagcgggacaactcgaacaagctaaggcagaaacagacccagttgtgagagatgtttgacgatccagtcactacaaggctaatgctgacaatcagtgatggaagcatgctctgtgactacctggagtacaagcgtggctttagcatagaagatctcgctacactttacagctatgctgagtttcagtacgaaagtatgcttaactctagagcagaacagtatcttcatcattttagagcgctcgatcactgcgcagcatagattgctataagttgactctggcngaacgtgtactccgaaagagtatgcagaactgagatcgatacatcgaagacctctcacgacctatagagtccgtcgatataccgtcatgtgagtcatacacttgagactgcttcgcagtaaacatgagtcactcacctgacgactgtaaggtaacgtgaatcccacgaggggtcacg

SEQ ID NO: 658803 - DNA, 453 bp, Homo sapiens
  misc_feature (298)..(298): n is a, c, g, or t
ggagacgggggtctcacgggggacagggaagcccaggtttctaatccctcggcagtatcacggcaactaggacaagcccccaaggaaagcatgagatcagagacactcgggaggaaaggcatacacagaaaaggaagaacaaaggtcagtaacatctactggcattctttaatgggacagtattctggggtgactgcattctcacgcaagtctcttcaattggaaaacttacataatttggttagtggttaaaagtcaaaattgagctgggacatggtgggcatgcgtctggcaatcnccagccacttgggagaggctggaggcacggagaaatggcctggaacctaaggaggtggaaggctggcagtggagtcaaggatcggggccactggaactcccagcctggggctaacaggagcaaggattccattctcgaaaaagaacaagaaaatt

SEQ ID NO: 658804 - DNA, 971 bp, Homo sapiens
aacgcatcctcattcctgggctcctcctcgacctctcagcccgtgtccagggcacatcatgaacacagagatggattaagagtctgagaggtacaggcaaagcagagaaccaagaaactggccatgattctctccctgccacctcttcaggccactgccacagttcccggtgcaggttaccacctgaaaggagttgacttaccaacgggtagtaaccaaagaaggccagagtcacatttgggaaatttggtatcaggagccttggaccaggagatcttattctgacctcattctgatatttcatagcctgacgtcaacggtgaagcctctcaacctctctaagcccagtttctccacgtataaagtaaggaccgttttatccaccagattttcactgggttttattactcaaagataaattgcaagctacaaagacgtgtgtgtataagggattgttattatccaggttaaaacataacctgtattcaaaagaattcgatcaatgcacatgtgacaaaagctgatgaattattaaaaggagcaattcctggattcctctcctaagtcttagctcagaacctctctacctagctaggcctggtgctaagggctggagatctagaaacaaggcacgggtcctgctctggaggaactcctggcctcatagaagtgtgttgttgacctactgtgtgcctagcactgtgaagcatgccagaatagacatggtcacacttttcttaaggagcccaaataaaacttttcagggagatgaacacaagacatacacctatgaaacagagaaggaagattgtaacttatctgggaagaaggctctaatgcatgtctccagtaggtacaggaagattcctgtactatagcatggaaagaggagattgagtcaaaggggcaaacactagtctacattataaaagtctctggttggctagagaagaaaaaatttttgcaaaaaa

SEQ ID NO: 658805 - DNA, 747 bp, Homo sapiens
gatatgtcgaccagcgtcgccacgcgtcggacccacgcgtcgactagttctagatcgcgagcggtcgcccttttttgtttttttggtaaaaatggggtctcccactggtccgagacagcagttgtaaacgaccgccagtgcctagtatatacgactcactatagggacacgtagtacaacgaaagctgagatacgcgtacacaatgcgggcccctcgaacgggcatactctaagagcgagcgcccataacagaacacaccaccacaccagggtcccgcagaaaaaaccgcgccacaaaccacaccggagacgacacaatcaaaacacaacaccgcgacaacacccaacagacgacccccaacacaacaacacaacgcccaacaacactcgggcgctcacaacaacacacttacacgcgtgaaacaccccaacagacgggaccacaccccacacatcacccaatcagaagaaaccacaccacgagcgcagaacaacaaaagcaacactacacacaaacacaggcaacaccaacacctaaccagtgcgacacagactgaaagagaacaccaaccagccgacggaccaaaaacaagacggaaaaccaaacaccagcacagaagacagaacacgaaacacgccacagcaacaacacaacgaaaacacactaaagacccaacagacactcacagccaacgcccctaacacaaccacagaggaagcacagaaacaacgaaagaacacagaagc

SEQ ID NO: 658806 - DNA, 368 bp, Homo sapiens
gtcaggaatctgggaggggtgctaggttttgagtaactagaggatgtgttcccctcaggtgctgtcagggtggggagggggccggagtgcaaggtgctttcacctagagcttgttacttgtgccctggggtgaagcttggtccacgtgtgcctgggagcctgtgcctctctccccagcctccagcagctgtgctcatgagggctggtggcatgatggtggacaggtcctggggagagactgggccctttgccctgtgcctcatgcgttcatggagatagggctgggcattcagcaggcatttgctaaatgcttattgagctcgtttatcaagcttcttgaacaggcagatggcagatgaggagttaag

SEQ ID NO: 658807 - DNA, 400 bp, Homo sapiens
  misc_feature (2)..(2): n is a, c, g, or t
  misc_feature (5)..(5): n is a, c, g, or t
  misc_feature (350)..(350): n is a, c, g, or t
anccngtcatctagaggatcccttcaacgtttgcaacacctttcgcctctctcctgctgcaacctgagcagacgcttctgcttcttcgtcttcttctgccgcctcccttcaagcaggcgctgcaggccttctctgggatctcatcttcagggaaaatgcctcctgccaggtcctgcagcttccggatcactttgtagagacgctttctgttctgagaaggggtgctctggcggctggccatttcaaacagcctgttagcaactgcctcgtagtcaaactggagaacggggccgccactgtccctgtcgtcacctgcctgctcctcaccagcctcaggttcagccctgcangatggagcctgcgggcggcttctcagacctcttctgggaacctgcgcgtc

SEQ ID NO: 658808 - DNA, 254 bp, Homo sapiens
cctttttttgggagctccttcttgccactgcctgggcacctttttgccatagaaaaagacattcacgcttacaccagcctccgggggagccagcctgcctatgaaggacagcctcttactcatcaccggggctccccgcatgcagcgagcccgagactcatctcgccacctggcttctgcccacggggtgagtcatgccaaggttctttgcgaaacctgaactcacttactttggttgacttaagagagatgtt

SEQ ID NO: 658809 - DNA, 159 bp, Homo sapiens
ggatgtgtatgggctggccactgctgggatatgtatcgatatggtggcctgggatcgctatgatgaccgaggcagcagagactatgatagatgtgctatgattcccggataggcatgtggcagcaagagcattattggcatgtgggtatctgcagggat

SEQ ID NO: 658810 - DNA, 796 bp, Homo sapiens
ggatagataagattcattaaaaaaggcaagttattctttgggtcagggctgtttatctgtagaagaagggttaaagtttctagagggtaagaaggttggttataataacgaagtctggacaagagagtctagtatacaatttttctacttggtctcaatgatggttaagtagagggatcatacgaagctaagattttattaaagaagagaagtttttttgtagattggctgatttatttatgaaaaatttgtgacatatttataaatgttttcatgatatttatatgaaaatatattgtagggttttcttggtagaagagagggggagaataaaggatgatgagggtggaagaataaggtgaatttagtattattttttttagtagtaaggaaagggatattgtagggtataggaatatgttattagggggtgttttaagaataaggttggttctaacctgatcagtataggtgaccatatttgtttggatttcttaaatagaagcaatggcaatgacaagtgatttgtttaattttcttgacagaactggggcagatacagagggtgttgagggatttataaattctttcagtttaagaggtatttattaattgaaataatagttatgctaccccttgcgtcagacttactttcatctgtttagcaactgctttatatgaaacacaaaagagctcagcaatgacactcgtgtcttaattaaccattgaataccttatagagcagctgtcacaactcttgtcacttgaaaggaagcacagtggtccctgtttaaaa

SEQ ID NO: 658811 - DNA, 308 bp, Homo sapiens
tagttttttcatacagtggtattaggttttctgcaaagacaatcatgccatatgtgaaggcagtgttatctgttttgtttctaattgatttgcctgactctgcaacataaagagtccttatttgggctgggcatggtggctcacatctataatcccagcactttgagaggctgaggcaggcgggtcacctgaggtcaggagttcgagaccagcctgaccaacatggcaaaaccccatctctgctaagacggggtaatttatgaagaaagggtttccttgactcacagttctgcaggatatacataagc

SEQ ID NO: 658812 - DNA, 1045 bp, Homo sapiens
aggaatggcctgcgcatggtgcaccatgttctgccgccgccggcctagcgccccagtgtccctggagaaggggcaccagtgcggccagtgtgcccaatgcttcctggtggcacgctcacccgcgcagtgactgagtgccgcggtcctgctcccgctccctgctctgggcctgtctcccccttccatgtgctccatgtgccaagggcttcctgcccagacaatgccctgaccctgctctgtcagtgactgctgtgccctggggttggtggtgctggggcggagcggaggcggagcggagctggagcctggagctgtaggaattccactttccccggggttttgtggggaggtggagtgcctgcaaggccctggcttttttcgcggtgtagcggtcgcggggtggatgtgccgagtgtgcccaccctgatgtgggggcggtgaagccttcgggtttgtgtgaagccccgcgcgaggtagaccttttggagaagtgggagggtgaggtggacgaacggggacagtaggtgggtcggggaaaggtgcttccttcgcatgttttaccactgccccccctgcccagcttcttgggctgcgtgggtaacaatcctcggacaacctggtgtccagggcttgggccgaagatccgttggcaccgggacgcgggggccacggttgtggggaattcccttctttggaaacgaaactattacggtacaatccgaaagtttggggactggggaccttggggctggggacagacggatggttttggtacccggtcccgggtaaaacgacgccctgtagtggctgtgccgcaggctgggccattgggcacctcctttttagcaacgtttttggcacgttttgttacgttgtacagcagagggagggtgaccacactacttcccccggtttgtcctgcaaaagacccttctatcggtgtataagtaaattatggacccccttcacatatataacaggagtatcgctggtgaacttggcatctattataggcgggggatgatatttctagtccgcggcgcca

SEQ ID NO: 658813 - DNA, 113 bp, Homo sapiens
gacggctcggtgctgcgggtctgagtgggtcagggcccaggcaggcaggaggacagctggtgtcagctcaggagcaggccaggccatctcggctggtgggtcggccctccagg

SEQ ID NO: 658814 - DNA, 183 bp, Homo sapiens
caggtacgagctgcgacagatcacgagtgataattgaatagacagttctagagtaggaaatgttttgcgagatctgctgtagggtgactgtgaaacggggtctacattcgaggtaagtgcagcaggtagaggcttacacatgaatcgattctgcactgaaataaccggggagtgatgctttga

SEQ ID NO: 658815 - DNA, 261 bp, Homo sapiens
gtacttacaggatccttagtggagccttaccctgtgtggggccatgctggagaggggcggggcaggtggtcttccaggccccttcctggcattctgttaccagacctcaactggcttggagtggccagtgttccttgttagtgccctgccccgcaccagtgcaacgctaacacaggatgggaggcttaggctaaggcacatttacagtagagggtgcaggaaatccgaggctcacgttccaactgctggagtgcccaccat

SEQ ID NO: 658816 - DNA, 378 bp, Homo sapiens
  misc_feature (7)..(7): n is a, c, g, or t
cccgtgntgcagcgctgaggcaggtagatcaaaaggtcaggagtggctgggcgcggtggctcacgcttgtaatcccagcactttgggaggccgaggtgggcagatcaccaggtcaagagatggagaccatcctggctaacacggtgaagccccgtctctactaaaaatacaaaaaaattagccgggcgtggtggcaggcatctgtaatcccagccacctgggaggctgaggcagaagaatcgcttgaacccgggcggcagaggttgcagtgagccaagattgcgccactgcactccaccctgggcaaaaagagcaaaactgtctcagaaaaaaaaaaacgaaaaagtcaggagttggacaccagcctggccattttgg

SEQ ID NO: 658817 - DNA, 198 bp, Homo sapiens
tgagttacgcacgagacgctgaaaaggcagctttctgatcagcagctcgtgtggacttctggtagcggcgaagcgcgcggagagccactgtaccaggccgatagcgatggggctatcttgacaccgccggtggccggagcgctcatatccgagccgccttggatggccagctgcatgcgcggagccttgccgccggtg

SEQ ID NO: 658818 - DNA, 522 bp, Homo sapiens
  misc_feature (237)..(237): n is a, c, g, or t
tgtcagaggatccctatgccgaagagtatcatctatagaaatattggtttttccaaggaataatgctttaagaagagacttgtagaaacagtgggactacatcaggaccagaatgacagtgacacagaggacggcaaatgttaagactaggattagcttttcacttggagcttgttatgtagaggacgtctccttctgttgattcctacagccgagacaagatgtgatcacaggagnactccaaaattctcaaacggggcttgagtcacaccctatagtaacttcaggaaccccactgtaggttgaagttactgcatactgtggccccgtgaaaaagaggtgcaagtgcacaaagattcatgcagagcctgctggaacagagggtggtggcggcgggttagtccacacttacacaccagcaggtatgctggggaagggccccccaggtggagtgcctgacatagggctcgctccagaggcgtctgactcagaagctcctgagagaggtgtctactcttcggg

SEQ ID NO: 658819 - DNA, 1386 bp, Homo sapiens
  misc_feature (250)..(250): n is a, c, g, or t
tggtaaaaatggggctttgctcttttaccccacccgggtctgaaacccctgtgggcctcccgcagatttctctcccacctttgtgcctccccaaattgtgcgtgggggatctacacgggcgttgagttcaccattgcccagcctatagcagtgagttttaggataaagatttgggtatactgcgtgggagacaagtggagaacaagcgcaggattaggggcgccaccgacagggcgtgagagagagacantcgaggagtctctgtgtgtggggcgtgtgcgatcgtggaatataccgccatgtgagaaggcgcacagacacagggagagcgctctctctgtgagagagagaagagatgtctttgtgagacacaaaccgacacgagcaggaagagacaccctcgcgtagtgacgcgcacgtggagagcccaccatgtgtgaggagaaattagtagcgcctctgtagagggatgaccccaaggggagtggtgggggcgccccaccatggtaggatgttagtcccaccaggtgagctagcagaaaccacccagagcagtgccgagagcgcctcctaccagcgaggattcgttgagagcagagtagcagagaggcgccacgtcgttgcgacaacgctatattagacctaccacaggacagcagcgtccacaaagaccggcggaaagaccagaagacctcacctagtgataagccgcccccgagtgggaaaacacccccctctatcacagctgtgcgggaaacactctctcttccccgcgcataaaactcactttatctttttactccaccagaaaagaacgtactcacaccaaacgagttatgcgtcttcttctatctaacacctcccctcttttcttcagaagcggtcgctgctataacagatgtgggcctcctcaaaatatatcaaccagttgtgtctacccccacaacaacatgtatttttaccgccacaaagaacgacgattcttgttctccacaaaagacttctctttaccacattcagtcctcaccaaaatggagtgtcctctcccccaagatggaggaggacccccctgtatataccggatgaaacttctccgacgtggtcgtcgcgacaaaaaaagccccccccccctcctccgtctgtggctgctcaaacgcacgatagctgtgagtaatcaatcctgctggcgaaacaccaccgctgttcactaacaggcgcggtggtctcagcttacattgacaacacaaattgggcgtgtccaatacatattcacagcaatatgtcgaatatcgatacgtctcctgtggcgccacggacgaagaaacatatattcttgggcgacaaccctccacccctcagtgtacaccaattctcgattgatgggaa

SEQ ID NO: 658820 - DNA, 1259 bp, Homo sapiens
atgagctggagtaggcgtgcgctaacgcggcgtgccggggcgggacgcggtggccgtggcgcggagaagtcggggcgggcggcagagaggccgggacgcggaccgggcctgtgtttcgcccacaggcgacctgacggcgcacagagagcgctgcgccccgaaaggcccgcggcacttagcccgggcggtgcatgggggctgcagcgagaggcacagcctgaaagccccaggtgcgtgagaccgggacggaacacgtgcacgggaaggcgggaagggggcaagaaaacggcagcgccacataggtataggccaccagagggccaagccctaaaatccgatggaggaggcggggcagtggaggggggaaggggccaccaagaaggcacggggcgcttgggagagacttgtaccatagggaccaggagaccagggacataccagtggcttcaaagaattacacaatgatgccccagggggaccccttcacatggcgatatcacagtgggactatggagaaggaagggtgatatcattggcacgcataccaatttccagtcgacagggaaccaaggcgaagaggttccattcagttccagtaaaggggatcaccgtttaagcaaggacacacgacgtgttgggccttgtggaggggggcgtattttaaagggggcaaggtatcaccaaaaggttgcgcccagttcacgacagattgtcgttcagaaaagagcgcacgttcgatatcgcaaagccgaaaggttgcggcattggcagaaggcgcaatttcgacaacaaagaatgcaaaaagagtaggcgcgagaccgccagtaaccgaaagtaacggacaggaggcacccaaactaggggagtatcagtacacagaccaagaaggcaataggtggaaacgagagaaagaagggggatccaaggggagcccacgaagggaagagtacgcagagtacagacaaagagggggatacccacgctaacgcaaagaggcgttatacagaaaagcacacaggcagaaaagtaaaagcaagaccgcagtattacagagaaggagggccacagattaacaccgaaagagatagtgatagcaggtcggcatcgaggacgacagaagaagacgccccggagggagtggcaccacgagagagcaatacgcccggacgtagcagagatagaccgtacctcgcagagtaagcagtacagccggtcgaggagcaccaagcgaacagagcgcccgcgagctgatccagggg

SEQ ID NO: 658821 - DNA, 108 bp, Homo sapiens
aggatcccccgctgcaacttcctttgagatttaatcttgcgaccgtactccccagtggataacttaatgcgttagctgcgcgagccaagcaccaggaaggcggcggcc

SEQ ID NO: 658822 - DNA, 300 bp, Homo sapiens
aacatctctgcctttgcctgtgtgtgttttgggggaggggggacatggaaaaatattgtttggaccttacttgggtgagtgcccatgaaaacatcagtgaacttgtaactattgttttgttttggatttaaggaaatgttttagatccggaaccgctaataggaatatgcgagttaattcagaattgaaaccatttttccctgttctacccatcccccccttttttccaattgaactctttgttatatgtccctttctattcatggaacttctttttcctttaacatgggtccaaactta

SEQ ID NO: 658823 - DNA, 580 bp, Homo sapiens
tttagaggatccccttcgacggtgttctgaatatacaatattagctctcattccaattttttctaacatgaattttcctggttgacatgatttcaaagggttttatgtattaaagtgacagaatcttattaaatgtgaaacatggcaaggagaaaaaaaaaaaaagaaactcaggctaaatttggatccccaaggggggggtgcggtgtggggagggggggcctagtggggaggtgtcggggtaatgggggccagatctctccggaatgggctggaaagtagctctgggaaggcaatggagtggcttggctgctcaaggagcccgggatatagttctccaagaacttacaggtatgtgggccagggtggcaggggctcacacctggtaattcccaggcacttgggggagggccaatggcagaagggatcggctggagggccgggagagtttggagaccaggtctggggcaacattagcaaggacccggattctctacaagaattaacaatttaaataaattggagcagggacatgggtggacacttggcctggtatgtcccaagctactcaagttgggct

SEQ ID NO: 658824 - DNA, 315 bp, Homo sapiens
  misc_feature (302)..(302): n is a, c, g, or t
tttcggcacagtcgtgtgtttattgagacggaccaagcctgggcaacagtgagactgtctcaaaaaaaaaaaaaaaaaaaaatttctagcagacactgaagggagagggagaggaacaagccccagggaccctttatccgacttccttccacctgggggactccctccacgggcccttgctttaagggcaaatggcgagggcaccagaacacagggaggccatgcgaacgtccctgctgcaaccatgcggccccccagctcactcccagcagccaagacgaaggggggcctgggctcccctnagggaaggcgcct

SEQ ID NO: 658825 - DNA, 153 bp, Homo sapiens
cctccacgtggccttgaaactgcagatggacgccagtgacgggctgctctcaggacaccacacggtcccactcacagggtctccctggagtcgtggactggtggctgcagtgagcaggatttactcctcctgttatgtactactaggcggcag

SEQ ID NO: 658826 - DNA, 423 bp, Homo sapiens
cacactctatgtaatactatgcaggtggcgggcacgaggctcacaatcctagcaactggggaggccgagacgggtggattacctgaggtcaggagttcaagatcagcgtggccaacatgatgaaatcccatctctactaaaaatacaaaacttagccaggtgtggcagcaggcacctgtaattccagctactcaggtagctgaggcaggagaattgcttgaacctgggaggcggaggttgcagtgagtcaagattgcaccatcgcactccagcctggggaacaagagtgaaactcttgctaaaaaaaaaaaaaaaaaaatatccaagcaggcctggtgtttggccctgggggggggggaatggctgccaagtgtccagcatagggagggtaatgggtggggggggggctccaacttgagacag

SEQ ID NO: 658827 - DNA, 1025 bp, Homo sapiens
ggtgagtgagcggcgggttccgggctccgggctctgggtggctggcggctgtgagcggacggcactgcgtgcgcaggcggcggaggccagcggtgctgccgtctggcggctggccctgtctggccgctgggatgaggaagcggacctgagccctgtctgccttgtgagcatgagctgctgctgcctgcctgctgggctcgtcctcctccggctctggcctgccgccggcgctggacgccgactgccgcctgaagcagaacctacgcctgacgtggcccgtgcgtgctgtgctgaggccgctgctgcgcagccgacgcgggaatgaagcgggcggctgggcagtgcgaaatgtggcgtgtggttgcgcctgaagggaagatactttaacttggggtttgggggtgtggacacttggcctatgccatttctactatcaaacatatgtcctggcaatacgaaggccaaagtgattaacttgaatctcgtacagagatcccctattatcattgatttgaaaaaaccacaggatcaaggtttgaatcacacagtgtaaactacgtacctgcaggacagaggaacgacgttgacccattggagtctggcaacaccgtccctggaagtcctggtgggaagaaacgaccaaggcaaagacagatgtgggtatgagggaatgccttgagttcacaggccaaaccgtagtcatttctggtaacctgcattggggaacggcacaggtgtccaagagggaatagcgcacaacagagttgaagcttttaccaggtgctggagaaccgttggaataccaatgtgggacaccgatatgactacagacggatagggggtggaatacggtgggtcacgcccaatcctgagacgcgggcattaacctattacagacactcccaaggtaatagacttgaatccaaacaggacgttggggcaacaccccgtggacctttggggccagtcccatggccctagtgatgagcacaatacagatcgccggcactgtccacgagagaccc

SEQ ID NO: 658828 - DNA, 283 bp, Homo sapiens
ctgaggtcgatctagaaggatccctgtgggtctcttcttgacagtgtcacgagaactccatcgatgtgtttgacgtgaggagggcagaatgggagcagacctgtgccgctcaagaaggtgctggcccctcaatccagaggtgctcccttgttcctcatacggcacctgagaaggtccgccttgacctacctcatggaaccacgctgtgcagagacaggactgagttctgcacatccctggaccttcacctgacaaccagccgggctgccagcttgttcctgca

SEQ ID NO: 658829 - DNA, 924 bp, Homo sapiens
  misc_feature (153)..(153): n is a, c, g, or t
  misc_feature (165)..(165): n is a, c, g, or t
  misc_feature (168)..(168): n is a, c, g, or t
  misc_feature (171)..(171): n is a, c, g, or t
  misc_feature (185)..(185): n is a, c, g, or t
  misc_feature (187)..(187): n is a, c, g, or t
  misc_feature (189)..(189): n is a, c, g, or t
  misc_feature (198)..(198): n is a, c, g, or t
  misc_feature (201)..(201): n is a, c, g, or t
  misc_feature (207)..(207): n is a, c, g, or t
  misc_feature (212)..(212): n is a, c, g, or t
  misc_feature (248)..(248): n is a, c, g, or t
  misc_feature (255)..(255): n is a, c, g, or t
  misc_feature (262)..(263): n is a, c, g, or t
  misc_feature (271)..(271): n is a, c, g, or t
  misc_feature (301)..(301): n is a, c, g, or t
  misc_feature (308)..(308): n is a, c, g, or t
  misc_feature (322)..(323): n is a, c, g, or t
  misc_feature (325)..(325): n is a, c, g, or t
  misc_feature (327)..(327): n is a, c, g, or t
  misc_feature (335)..(335): n is a, c, g, or t
  misc_feature (337)..(337): n is a, c, g, or t
  misc_feature (339)..(339): n is a, c, g, or t
  misc_feature (351)..(353): n is a, c, g, or t
  misc_feature (368)..(368): n is a, c, g, or t
  misc_feature (381)..(381): n is a, c, g, or t
  misc_feature (386)..(386): n is a, c, g, or t
  misc_feature (389)..(389): n is a, c, g, or t
  misc_feature (393)..(393): n is a, c, g, or t
  misc_feature (397)..(397): n is a, c, g, or t
  misc_feature (401)..(401): n is a, c, g, or t
  misc_feature (403)..(403): n is a, c, g, or t
  misc_feature (408)..(408): n is a, c, g, or t
  misc_feature (414)..(414): n is a, c, g, or t
  misc_feature (418)..(418): n is a, c, g, or t
  misc_feature (420)..(420): n is a, c, g, or t
  misc_feature (425)..(425): n is a, c, g, or t
  misc_feature (453)..(453): n is a, c, g, or t
  misc_feature (468)..(468): n is a, c, g, or t
  misc_feature (470)..(470): n is a, c, g, or t
  misc_feature (475)..(476): n is a, c, g, or t
  misc_feature (486)..(486): n is a, c, g, or t
  misc_feature (524)..(524): n is a, c, g, or t
  misc_feature (528)..(528): n is a, c, g, or t
  misc_feature (540)..(540): n is a, c, g, or t
  misc_feature (559)..(560): n is a, c, g, or t
  misc_feature (593)..(593): n is a, c, g, or t
  misc_feature (713)..(713): n is a, c, g, or t
  misc_feature (918)..(918): n is a, c, g, or t
ctgcctcgccactgtcctgctgccctccagacatgctggggccctgcatgctgctgctgctgctgctgctgggcctgaggctacagctctccctgggcatcatcccagttgaggaggagaacccggacttctgagaaccgcgaggcagccgangccctgggtgcngcnaanaagctgcagcctgnananaaagccgcnaanaacctnatcancttcctgggcgatgggatgggggtgtctacggtganagctgcnaggatcnnaaaaaggnaaaaaaaggaaaaaatggggcctgagttanccctggncatggaccgcttcnnanangtggctcnananaaaaaataaaannnaaaaaaaaatgtgcnaaaaagtggagcnaaaanaanggcntaantgtncngggtnaagggnaacntnaaaancattggcttaaatgcaaccgcccgattnaaccaatgcaacacnanacgcnnaaacgaggtnatctccgtaatgaatcgggccaaaaaaacagggaagtnaatnggaatggtaacnaccacacaaataaaaacanntcgccagccggcacctacgcccacacggtgaancgcaactggtactcggacgccgacgtgcctgcctcggcccgccaggaggggtgccaggacatcgctacgcagctcatctccaacatggacattgacgtgatcctaggtggaggccgaaantacatgtttcgcatgggaaccccagaccctgagtacccagatgactacagccaaggtgggaccaggctggacgggaagaatctggtgcaggaataggctggcgaaggccaggggtacccggtacgtgtggaaccgcactgagctcatgcaggcttccctggacccgtctgtgaaccatctcatgggtctctttgagcctggaganatgaaa

SEQ ID NO: 658830 - DNA, 132 bp, Homo sapiens
gtgtttttttttgaccaaagttcccttttgccaaggggagcttccagcttttccccttccttccgttgttttttggaaggggtgctttgtgggcccttccggaaattaaaccccccccttttttttgcaaga

SEQ ID NO: 658831 - DNA, 947 bp, Homo sapiens
  misc_feature (160)..(160): n is a, c, g, or t
  misc_feature (163)..(166): n is a, c, g, or t
  misc_feature (168)..(168): n is a, c, g, or t
accggtacggcccggaattttgggatgggaaggagagccctgcaggcatggggcttccaggcttgggacacctgggcattcctgggccaggaaagcacccaagtaaacctgcaactcagaagccaaatgagacctatcccaggcaggtccgctctgcganggnnnntntcatcggcgtcaataggaggcatcggggacagccgctgcggcagcactcgagccagctcaagcccgcagctcgcagggagatccagctccgtcctgcctgcagcagcacaaccctgcacacccaccatggatgtcttcaagaagggcttctccatcgccaaggagggcgtggtgggtgcggtggaaaagaccaagcagggggtgacggaagcagctgagaagaccaaggagggggtcatgtatgtgggagccaagaccaaggagaatgttgtacagagcgtgacctcagtggccgagaagaccaaggagcaggccaacgccgtgagcgaggctgtggtgagcagcgtcaacactgtggccaccaagaccgtggaggaggcggagaacatcgcggtcacctccggggtggtgcgcaaggaggacttgaggccatctgccccccaacaggagggtgaggcatccaaagagaaagaggaagtggcagaggaggcccagagtgggggagactagagggctacaggccagcgtggatgacctgaagagcgctcctctgccttggacaccatcccctcctagcacaaggagtgcccgccttgagtgacatgcggctgcccacgctcctgccctcgtctccctggccacccttggcctgtccacctgtgctgctgcaccaacctcactgccctccctcggccccacccaccctctggtccttctgaccccacttatgctgctgtgaattttttttttaaatgattccaaataaaacttgagcccac

SEQ ID NO: 658832 - DNA, 156 bp, Homo sapiens
  misc_feature (82)..(82): n is a, c, g, or t
  misc_feature (114)..(114): n is a, c, g, or t
  misc_feature (135)..(135): n is a, c, g, or t
  misc_feature (143)..(143): n is a, c, g, or t
tcgtctccatggtgactaactgttttttccccggttgtaatacctctaccttgtgccctgattagcaaccgaatctgctttntgcctggatgggagctccctctccttttttgnctgggtgggactcctttctgnctttttgncctgagcccagag

SEQ ID NO: 658833 - DNA, 976 bp, Homo sapiens
  misc_feature (160)..(160): n is a, c, g, or t
  misc_feature (163)..(166): n is a, c, g, or t
  misc_feature (168)..(168): n is a, c, g, or t
accggtacggcccggaattttgggatgggaaggagagccctgcaggcatggggcttccaggcttgggacacctgggcattcctgggccaggaaagcacccaagtaaacctgcaactcagaagccaaatgagacctatcccaggcaggtccgctctgcganggnnnntntcatcggcgtcaataggaggcatcggggacagccgctgcggcagcactcgagccagctcaagcccgcagctcgcagggagatccagctccgtcctgcctgcagcagcacaaccctgcacacccaccatggatgtcttcaagaagggcttctccatcgccaaggagggcgtggtgggtgcggtggaaaagaccaagcagggggtgacggaagcagctgagaagaccaaggagggggtcatgtatgtgggagccaagaccaaggagaatgttgtacagagcgtgacctcagtggccgagaagaccaaggagcaggccaacgccgtgagcgaggctgtggtgagcagcgtcaacactgtggccaccaagaccgtggaggaggcggagaacatcgcggtcacctccggggtggtgcgcaaggaggacttgaggccatctgccccccaacaggagggtgaggcatccaaagagaaagaggaagtggcagaggaggcccagagtgggggagactagagggctacaggccagcgtggatgacctgaagagcgctcctctgccttggacaccatcccctcctagcacaaggagtgcccgccttgagtgacatgcggctgcccacgctcctgccctcgtctccctggccacccttggcctgtccacctgtgctgctgcaccaacctcactgccctccctcggccccacccaccctctggtccttctgaccccacttatgctgctgtgaattttttttttaaatgattccaaataaaacttgagcccacaaaagacgaaaaaaacttctccagcgcgg

SEQ ID NO: 658834 - DNA, 191 bp, Homo sapiens
ttgcctgctgtgccataaactttggtccctacttccgtatgaacgatggaaaccttgacaggagactggagcaaaattcagcttgaagtgaacagagcactttttactaaagtagtagcatgattttcagctatgccatatgaccaaacatgaggcattttggcgatttgtcattttttcattcggagtct

SEQ ID NO: 658835 - DNA, 240 bp, Homo sapiens
gcggtacctcagatggaaatggcagaaatcacccgtcttctgcgtcgctcacgctgggagctgtagaaccgagctgttctctattcaggcatctttggcttctctccaagagatgttgtactatatatatttggaaagggattatgataaaggcttactatgctatgggtaatagatataattgagatagtgtcatatatccacactcttttctatatagggcacgagatttggatacca

SEQ ID NO: 658836 - DNA, 1027 bp, Homo sapiens
  misc_feature (160)..(160): n is a, c, g, or t
  misc_feature (163)..(166): n is a, c, g, or t
  misc_feature (168)..(168): n is a, c, g, or t
accggtacggcccggaattttgggatgggaaggagagccctgcaggcatggggcttccaggcttgggacacctgggcattcctgggccaggaaagcacccaagtaaacctgcaactcagaagccaaatgagacctatcccaggcaggtccgctctgcganggnnnntntcatcggcgtcaataggaggcatcggggacagccgctgcggcagcactcgagccagctcaagcccgcagctcgcagggagatccagctccgtcctgcctgcagcagcacaaccctgcacacccaccatggatgtcttcaagaagggcttctccatcgccaaggagggcgtggtgggtgcggtggaaaagaccaagcagggggtgacggaagcagctgagaagaccaaggagggggtcatgtatgtgggagccaagaccaaggagaatgttgtacagagcgtgacctcaggcctgccttggggctggggctggggtggaggccagccagtgtcctcccatagtggccgagaagaccaaggagcaggccaacgccgtgagcgaggctgtggtgagcagcgtcaacactgtggccaccaagaccgtggaggaggcggagaacatcgcggtcacctccggggtggtgcgcaaggaggacttgaggccatctgccccccaacaggagggtgaggcatccaaagagaaagaggaagtggcagaggaggcccagagtgggggagactagagggctacaggccagcgtggatgacctgaagagcgctcctctgccttggacaccatcccctcctagcacaaggagtgcccgccttgagtgacatgcggctgcccacgctcctgccctcgtctccctggccacccttggcctgtccacctgtgctgctgcaccaacctcactgccctccctcggccccacccaccctctggtccttctgaccccacttatgctgctgtgaattttttttttaaatgattccaaataaaacttgagcccactcctaaaaaaaaaaaaataataaaaaaa

SEQ ID NO: 658837 - DNA, 405 bp, Homo sapiens
cccacggatgacccctcaggcatggggcacagaagacaacttttctcagcccactcagggtggcccattaaggctggggcctggagctgggtgtgcaggtcattctctctcccaggcccagagtgggggagactagagggctacaggccagcgtggatgacctgaagagcgctcctctgccttggacaccatcccctcctagcacaaggagtgcccgccttgagtgacatgcggctgcccacgctcctgccctcgtctccctggccacccttggcctgtccacctgtgctgctgcaccaacctcactgccctccctcggccccacccaccctctggtccttctgaccccacttatgctgctgtgaattttttttttaaatgattccaaataaaacttgagcccac

SEQ ID NO: 658838 - DNA, 711 bp, Homo sapiens
  misc_feature (160)..(160): n is a, c, g, or t
  misc_feature (163)..(166): n is a, c, g, or t
  misc_feature (168)..(168): n is a, c, g, or t
accggtacggcccggaattttgggatgggaaggagagccctgcaggcatggggcttccaggcttgggacacctgggcattcctgggccaggaaagcacccaagtaaacctgcaactcagaagccaaatgagacctatcccaggcaggtccgctctgcganggnnnntntcatcggcgtcaataggaggcatcggggacagccgctgcggcagcactcgagccagctcaagcccgcagctcgcagggagatccagctccgtcctgcctgcagcagcacaaccctgcacacccaccatggatgtcttcaagaagggcttctccatcgccaaggagggcgtggtgggtgcggtggaaaagaccaagcagggggtgacggaagcagctgagaagaccaaggagggggtcatgtatgtgggagccaagaccaaggagaatgttgtacagagcgtgacctcagcgtggatgacctgaagagcgctcctctgccttggacaccatcccctcctagcacaaggagtgcccgccttgagtgacatgcggctgcccacgctcctgccctcgtctccctggccacccttggcctgtccacctgtgctgctgcaccaacctcactgccctccctcggccccacccaccctctggtccttctgaccccacttatgctgctgtgaattttttttttaaatgattccaaataaaacttgagcccac

SEQ ID NO: 658839 - DNA, 131 bp, Homo sapiens
  misc_feature (10)..(10): n is a, c, g, or t
  misc_feature (49)..(49): n is a, c, g, or t
  misc_feature (111)..(111): n is a, c, g, or t
ccggcctggnagtgcctggagaaggaggtggagagcatgggggcccatntaaatgcctacagcacccggaagcacacagcttactacatcaaggcgctgtccaaggttctnccgaaagctgtggagctcct

SEQ ID NO: 658840 - DNA, 1068 bp, Homo sapiens
  misc_feature (160)..(160): n is a, c, g, or t
  misc_feature (163)..(166): n is a, c, g, or t
  misc_feature (168)..(168): n is a, c, g, or t
accggtacggcccggaattttgggatgggaaggagagccctgcaggcatggggcttccaggcttgggacacctgggcattcctgggccaggaaagcacccaagtaaacctgcaactcagaagccaaatgagacctatcccaggcaggtccgctctgcganggnnnntntcatcggcgtcaataggaggcatcggggacagccgctgcggcagcactcgagccagctcaagcccgcagctcgcagggagatccagctccgtcctgcctgcagcagcacaaccctgcacacccaccatggatgtcttcaagaagggcttctccatcgccaaggagggcgtggtgggtgcggtggaaaagaccaagcagggggtgacggaagcagctgagaagaccaaggagggggtcatgtatgtgggagccaagaccaaggagaatgttgtacagagcgtgacctcaggtgagaagccccagggccaggggacacatgggggataggacccctggggctcctgcatcctagtgctggggctcaaacctagagtcctgccttacccccaactggggtcccaagccctacagacccctgcagaccataaggctaaactagggtgggcgtctccttacccccaacagcatcagaggtgccctggagtcagagggagcaggggagggtcccagcagggccaggctctgagctcctgggaaggggctgcgagcctgactccagcaggcctgccttggggctggggctggggtggaggccagccagtgtcctcccatagtggccgagaagaccaaggagcaggccaacgccgtgagcgaggctgtggtgagcagcgtcaacactgtggccaccaagaccgtggaggaggcggagaacatcgcggtcacctccggggtggtgcgcaaggtgagccccggccctcatacctgcacagttcctctccttgggcccagaaaggcttgtgggcggaggcggcatcactccaatccaaaccccaggaaacaacacggggggctgcggctggcttcagattcagtaaccacttgagcgccggcatggggtgg

SEQ ID NO: 658841 - DNA, 439 bp, Homo sapiens
  misc_feature (40)..(40): n is a, c, g, or t
  misc_feature (43)..(43): n is a, c, g, or t
  misc_feature (51)..(51): n is a, c, g, or t
cttttttctcctaaaacccccaaacaaacgaagggttttnaanaaaccttntctgtgagttgtttcagggcagaatgtaccagccagtcagcgttgtttaacaaaataatcagatttttgcctagcactcggttttggtggagctgacgattttgagggctgaggctggttaggtagctggaatgtgcctatgtgaccagctcacttgcagacaccctgccggaagcagagcttaatcttcctaggactgaggtcttagcacatgtactggtggagtttccagaccaccagtatgaataaaagcttgttctgtgtgacccagcaagtggaaggacaaagaactgtgagcctcagatctttggacctttccaatgcgtctctttctcctgttattgctgcaatgtattttcttgcttatattaaagttgtttcatcagta

SEQ ID NO: 658842 - DNA, 180 bp, Homo sapiens
gactgtttctctcggatcatcatgtgtctgtgtgagctgacatcacgtcagactctcatgatcaggtgtctgttctcagcaggggcaaccaatagtaccagaagtcacaactcagctatggcactggagcctgctgcctttgggtaagattagcattcataactgcatactgctctcgtg

SEQ ID NO: 658843 - DNA, 465 bp, Homo sapiens
  misc_feature (160)..(160): n is a, c, g, or t
  misc_feature (163)..(166): n is a, c, g, or t
  misc_feature (168)..(168): n is a, c, g, or t
accggtacggcccggaattttgggatgggaaggagagccctgcaggcatggggcttccaggcttgggacacctgggcattcctgggccaggaaagcacccaagtaaacctgcaactcagaagccaaatgagacctatcccaggcaggtccgctctgcganggnnnntntcatcggcgtcaataggaggcatcggggacagccgctgcggcagcactcgagccagctcaagcccgcagctcgcagggagatccagctccgtcctgcctgcagcagcacaaccctgcacacccaccatggatgtcttcaagaagggcttctccatcgccaaggagggcgtggtgggtgcggtggaaaagaccaagcagggggtgacggaagcagctgagaagaccaaggagggggtcatgtatgtgggattacattttttttttaaagaaagaataaattaattgtgattaaagttg

SEQ ID NO: 658844 - DNA, 2185 bp, Homo sapiens
gtccagagccttgcctgcttgtgatcctggtggagaaggtggagtatggtgagctgcttgctaaggacagccaggcaacactgtgtttgtgaagatgtgctccaccttctcctctgtgcatcccagctcctcctgctgaaacagctgagcttgctttttggatttcttagactcctggcctctgagagacacctctaaggacaaactgaccttgcattgggaactttattatccagatcctcataggcttgtctactctggattgcttgttgcaacagttcttaggaagcaagattgtctcctgcaccagcatctgcctgtgtttgcttttacctactttgagcaagacccagtgaggccctagctctgttggtcctgaaaagcctgaaccctgaggctgtttctcctgcctccaaaatgcaattataggaaataagaagcacagaaacagtggaaacaaccaggaggagaaacaggaaaacctaaaattttcaatattcaaaaatacctgtcgtggtggttgatgcagaaaacactgagttcatcaaagagcttgtaattgttggaccagagaacccctttgctacaggaactgatatgttttgtctttctggcctagtcaagggaggataagtaagtatctggggcatggaaggaatgcactcttgggctgttttgcttgtatctgactcacccctgactctccagtgaagcagaaaggaagaaacctcacaccacccaggtgtggccagactttggccattattgtgaatccccaagagttaccacaggcccttcccaaatatatatttaatcttgtggttcaaataagcttttggctcacatctaagcacatcataaagaacgctgtagaagaggtgacatgatgaggcgggaagacgaggaagaggagggaacaatgatgaaggcaaaaggggacttagagatgaaggaggaggaagagattagtgagacaggagaactggttggcccttttgtgagtgctatgcccactccaatgccccacaacaagggcacccggttctctgaggcatgggaatatttccacctagctcctgctcgtgctgggcaccatcccaaccagtatgccacctgccgcctgtgtggcaggcaggtgagccgtggccctggggtcaacgtgggcaccactgcactgtggaagcatctgaaaagcatgcacagagaggagctggagaagagtggccatggtcaggctgggcagcgccaggatccaaggccccacgggccccagctccccacaggcattgagggtaactggggtaggctcctggagcaggtgggcaccatggctttgtgggccagccaaagggaaaaggaggtgcttaggagggaaagggcagtggaatggcgggagagggctgtggaaaaaagggagcgagccctggaggaggtggaaagggccatcctggagatgaagtggaaggtgagggctgagaaggaggcatgccagcgggagaaagagctgcctgcagcagtacatcccttccattttgtttaaattgggcttggagaatctattctgaaaacattgactctagacttgtagaaaagagccattttagtttcaactcaaatgtaaagcaaagtagtttggtgacattttgcttttatgtgaaatagtgcacagtatgagttaatctgagcaggtctgaattgaccaaatgcttatctacgaggttcctagagctctgctgacccttggccgaaactctaaaatgtacctattaaagataaatgcttctaccaaagtaaaactctgtgagttgtttcagggcagaatgtaccagccagtcagcgttgtttaacaaaataatcagatttttgcctagcactcggttttggtggagctgacgattttgagggctgaggctggttaggtagctggaatgtgcctatgtgaccagctcacttgcagacaccctgccggaagcagagcttaatcttcctaggactgaggtcttagcacatgtactggtggagtttccagaccaccagtatgaataaaagcttgttctgtgtgacccagcaagtggaaggacaaagaactgtgagcctcagatctttggacctttccaatgcgtctctttctcctgttattgctgcaatgtattttcttgcttatattaaagttgtttcatcagta

SEQ ID NO: 658845 - DNA, 288 bp, Homo sapiens
gtattcagagaagtcaggcaccttgatgtctgtgttgggtgataacatcacgtgatttatcgcccaaaaccgtggtgaagcaatgctttgagcctccctcctttgtgcgactggttccttggctgggatgatgatcacttggtctgtggaccccctggacagggccatggctgagctggctggctgaagaggggcagggcccaaccatgtcaccggtcagtgccttttggaactgtccttccctcgaagaggccttagagcgagcagagcagctctgctattagtgtg

SEQ ID NO: 658846 - DNA, 975 bp, Homo sapiens
  misc_feature (160)..(160): n is a, c, g, or t
  misc_feature (163)..(166): n is a, c, g, or t
  misc_feature (168)..(168): n is a, c, g, or t
accggtacggcccggaattttgggatgggaaggagagccctgcaggcatggggcttccaggcttgggacacctgggcattcctgggccaggaaagcacccaagtaaacctgcaactcagaagccaaatgagacctatcccaggcaggtccgctctgcganggnnnntntcatcggcgtcaataggaggcatcggggacagccgctgcggcagcactcgagccagctcaagcccgcagctcgcagggagatccagctccgtcctgcctgcagcagcacaaccctgcacacccaccatggatgtcttcaagaagggcttctccatcgccaaggagggcgtggtgggtgcggtggaaaagaccaagcagggggtgacggaagcagctgagaagaccaaggagggggtcatgtatgtgggagccaagaccaaggagaatgttgtacagagcgtgacctcagtggccgagaagaccaaggagcaggccaacgccgtgagcgaggctgtggtgagcagcgtcaacactgtggccaccaagaccgtggaggaggcggagaacatcgcggtcacctccggggtggtgcgcaaggaggacttgaggccatctgccccccaacaggagggtgaggcatccaaagagaaagaggaagtggcagaggaggcccagagtgggggagactagagggctacaggccagcgtggatgacctgaagagcgctcctctgccttggacaccatcccctcctagcacaaggagtgcccgccttgagtgacatgcggctgcccacgctcctgccctcgtctccctggccacccttggcctgtccacctgtgctgctgcaccaacctcactgccctccctcggccccacccaccctctggtccttctgaccccacttatgctgctgtgaattttttttttaaatgattccaaataaaacttgagcccactcctaaaaaaaaaaaaataataaaaaaa

SEQ ID NO: 658847 - DNA, 1732 bp, Homo sapiens
  misc_feature (28)..(28): n is a, c, g, or t
  misc_feature (39)..(39): n is a, c, g, or t
  misc_feature (71)..(72): n is a, c, g, or t
aatgtcgagcgtcggtacccccatagtntgggcatcacntggagagtacaggggtgagtcagatacaagcnnaaacagcccaacgagttcatcaaagagcttgtaattgttggaccagagaacccctttgctacaggaactgatatgttttgtctttctggcctagtcaagggaggataagtaagtatctggggcatggaaggaatgcactcttgggctgttttgcttgtatctgactcacccctgactctccagtgaagcagaaaggaagaaacctcacaccacccaggtgtggccagactttggccattattgtgaatccccaagagttaccacaggcccttcccaaatatatatttaatcttgtggttcaaataagcttttggctcacatctaagcacatcataaagaacgctgtagaagaggtgacatgatgaggcgggaagacgaggaagaggagggaacaatgatgaaggcaaaaggggacttagagatgaaggaggaggaagagattagtgagacaggagaactggttggcccttttgtgagtgctatgcccactccaatgccccacaacaagggcacccggttctctgaggcatgggaatatttccacctagctcctgctcgtgctgggcaccatcccaaccagtatgccacctgccgcctgtgtggcaggcaggtgagccgtggccctggggtcaacgtgggcaccactgcactgtggaagcatctgaaaagcatgcacagagaggagctggagaagagtggccatggtcaggctgggcagcgccaggatccaaggccccacgggccccagctccccacaggcattgagggtaactggggtaggctcctggagcaggtgggcaccatggctttgtgggccagccaaagggaaaaggaggtgcttaggagggaaagggcagtggaatggcgggagagggctgtggaaaaaagggagcgagccctggaggaggtggaaagggccatcctggagatgaagtggaaggtgagggctgagaaggaggcatgccagcgggagaaagagctgcctgcagcagtacatcccttccattttgtttaaattgggcttggagaatctattctgaaaacattgactctagacttgtagaaaagagccattttagtttcaactcaaatgtaaagcaaagtagtttggtgacattttgcttttatgtgaaatagtgcacagtatgagttaatctgagcaggtctgaattgaccaaatgcttatctacgaggttcctagagctctgctgacccttggccgaaactctaaaatgtacctattaaagataaatgcttctaccaaagtaaaactctgtgagttgtttcagggcagaatgtaccagccagtcagcgttgtttaacaaaataatcagatttttgcctagcactcggttttggtggagctgacgattttgagggctgaggctggttaggtagctggaatgtgcctatgtgaccagctcacttgcagacaccctgccggaagcagagcttaatcttcctaggactgaggtcttagcacatgtactggtggagtttccagaccaccagtatgaataaaagcttgttctgtgtgacccagcaagtggaaggacaaagaactgtgagcctcagatctttggacctttccaatgcgtctctttctcctgttattgctgcaatgtattttcttgcttatattaaagttgtttcatcagta

SEQ ID NO: 658848 - DNA, 893 bp, Homo sapiens
  misc_feature (160)..(160): n is a, c, g, or t
  misc_feature (163)..(166): n is a, c, g, or t
  misc_feature (168)..(168): n is a, c, g, or t
accggtacggcccggaattttgggatgggaaggagagccctgcaggcatggggcttccaggcttgggacacctgggcattcctgggccaggaaagcacccaagtaaacctgcaactcagaagccaaatgagacctatcccaggcaggtccgctctgcganggnnnntntcatcggcgtcaataggaggcatcggggacagccgctgcggcagcactcgagccagctcaagcccgcagctcgcagggagatccagctccgtcctgcctgcagcagcacaaccctgcacacccaccatggatgtcttcaagaagggcttctccatcgccaaggagggcgtggtgggtgcggtggtgtatgtgggagccaagaccaaggagaatgttgtacagagcgtgacctcagtggccgagaagaccaaggagcaggccaacgccgtgagcgaggctgtggtgagcagcgtcaacactgtggccaccaagaccgtggaggaggcggagaacatcgcggtcacctccggggtggtgcgcaaggaggacttgaggccatctgccccccaacaggagggtgaggcatccaaagagaaagaggaagtggcagaggaggcccagagtgggggagactagagggctacaggccagcgtggatgacctgaagagcgctcctctgccttggacaccatcccctcctagcacaaggagtgcccgccttgagtgacatgcggctgcccacgctcctgccctcgtctccctggccacccttggcctgtccacctgtgctgctgcaccaacctcactgccctccctcggccccacccaccctctggtccttctgaccccacttatgctgctgtgaattttttttttaaatgattccaaataaaacttgagcccac

SEQ ID NO: 658849 - DNA, 2233 bp, Homo sapiens
gtccagagccttgcctgcttgtgatcctggtggagaaggtggagtatggtgagctgcttgctaaggacagccaggcaacactgtgtttgtgaagatgtgctccaccttctcctctgtgcatcccagctcctcctgctgaaacagctgagcttgctttttggatttcttagactcctggcctctgagagacacctctaaggacaaactgaccttgcattgggaactttattatccagatcctcataggcttgtctactctggattgcttgttgcaacagttcttaggaagcaagattgtctcctgcaccagcatctgcctgtgtttgcttttacctactttgagcaagacccagtgaggccctagctctgttggtcctgaaaagcctgaaccctgaggctgtttctcctgcctccaaaatgcaattataggaaataagaagcacagaaacagtggaaacaaccaggaggagaaacaggaaaacctaaaattttcaatattcaaaaatacctgtcgtggtggttgatgcagaaaacactgagttcatcaaagagcttgtaattgttggaccagagaacccctttgctacaggaactgatatgttttgtctttctggcctagtcaagggaggataagtaagtatctggggcatggaaggaatgcactcttgggctgttttgcttgtatctgactcacccctgactctccagtgaagcagaaaggaagaaacctcacaccacccaggtgtggccagactttggccattattgtgaatccccaagagttaccacaggcccttcccaaatatatatttaatcttgtggttcaaataagcttttggctcacatctaagcacatcataaagaacgctgtagaagaggtgacatgatgaggcgggaagacgaggaagaggagggaacaatgatgaaggcaaaaggggacttagagatgaaggaggaggaagagattagtgagacaggagaactggttggcccttttgtgagtgctatgcccactccaatgccccacaacaagggcacccggttctctgaggcatgggaatatttccacctagctcctgctcgtgctgggcaccatcccaaccagtatgccacctgccgcctgtgtggcaggcaggtgagccgtggccctggggtcaacgtgggcaccactgcactgtggaagcatctgaaaagcatgcacagagaggagctggagaagagtggccatggtcaggctgggcagcgccaggatccaaggccccacgggccccagctccccacaggcattgagggtaactggggtaggctcctggagcaggtgggcaccatggctttgtgggccagccaaagggaaaaggaggtgcttaggagggaaagggcagtggaatggcgggagagggctgtggaaaaaagggagcgagccctggaggaggtggaaagggccatcctggagatgaagtggaaggtgagggctgagaaggaggcatgccagcgggagaaagagctgcctgcagcagtacatcccttccattttgtttaaattgggcttggagaatctattctgaaaacattgactctagacttgtagaaaagagccattttagtttcaactcaaatgtaaagcaaagtagtttggtgacattttgcttttatgtgaaatagtgcacagtatgagttaatctgagcaggtctgaattgaccaaatgcttatctacgaggttcctagagctctgctgacccttggccgaaactctaaaatgtacctattaaagataaatgcttctaccaaagtaaaactctgtgagttgtttcagggcagaatgtaccagccagtcagcgttgtttaacaaaataatcagatttttgcctagcactcggttttggtggagctgacgattttgagggctgaggctggttaggtagctggaatgtgcctatgtgaccagctcacttgcagacaccctgccggaagcagagcttaatcttcctaggactgaggtcttagcacatgtactggtggagtttccagaccaccagtatgaataaaagcttgttctgtgtgacccagcaagtggaaggacaaagaactgtgagcctcagatctttggacctttccaatgcgtctctttctcctgttattgctgcaatgtattttcttgcttatattaaagttgtttcatcagtaaaaaaaaaagtcgacgcggccgcgaatttagtagtagtaggcggccga

SEQ ID NO: 658850 - DNA, 927 bp, Homo sapiens
  misc_feature (160)..(160): n is a, c, g, or t
  misc_feature (163)..(166): n is a, c, g, or t
  misc_feature (168)..(168): n is a, c, g, or t
accggtacggcccggaattttgggatgggaaggagagccctgcaggcatggggcttccaggcttgggacacctgggcattcctgggccaggaaagcacccaagtaaacctgcaactcagaagccaaatgagacctatcccaggcaggtccgctctgcganggnnnntntcatcggcgtcaataggaggcatcggggacagccgctgcggcagcactcgagccagctcaagcccgcagctcgcagggagatccagctccgtcctgcctgcagcagcacaaccctgcacacccaccatggatgtcttcaagaagggcttctccatcgccaaggagggcgtggtgggtgcggtggaaaagaccaagcagggggtgacggaagcagctgagaagaccaaggagggggtcatgtatgtgggagccaagaccaaggagaatgttgtacagagcgtgacctcagtggccgagaagaccaaggagcaggccaacgccgtgagcgaggctgtggtgagcagcgtcaacactgtggccaccaagaccgtggaggaggcggagaacatcgcggtcacctccggggtggtgcgcaaggaggacttgaggccatctgccccccaacaggagggtgaggcatccaaagagaaagaggaagtggcagaggaggcccagagtgggggagactagagggctacaggccagcgtggatgacctgaagagcgctcctctgccttggacaccatcccctcctagcacaaggagtgcccgccttgagtgacatgcggctgcccacgctcctgccctcgtctccctggccacccttggcctgtccacctgtgctgctgcaccaacctcactgccctccctcggccccacccaccctcgtcatctgacgcactaggctgcgggattatatgaatcaataatgacagtacg

SEQ ID NO: 658851 - DNA, 259 bp, Homo sapiens
ttcgactcgttatagatggtcagacccagatgactcatgcctgtgccacgatcctacctcctcaggggtggcaaaacccagatcctcatacctgtcatgagatcctacctcctcagatactgacagagccagatcctcataccagggccagatcctacataaacagaccctcgaagccacagaccctacactaccaagggccagatcctaccacctcaaatgggggacaaacccagaatacctcataacagggaacaga

SEQ ID NO: 658852 - DNA, 772 bp, Homo sapiens
ctcgagtactttgtttttcttttttaaaggttggagggggaatgctggaaattgtaatggggtatggaaacttttcatataagtaatgctagggtgagtggtaggaagttttttcataggaggtgtatgattgggccgtagcggaatcgggggtatgctgtccgatttcataagaccagggaggttagaagtagggtctgggtgacaaaatatgttggtgtagagttcaggggagagtgcgtcatattgttgtccctaggaagatggtagtgggtagagggtgtttataataataatgttaggtgtatccggctatgaagaatagggcgaatgggcgcctgcggccgatatccgagtgttgaacccgtgagaactagtttcggactctcccctttcggcaaggtcgaagggggttcggggtgggtcctcgttgcataggtggtggaggatacacgtcattttatgtggccagggggtccattgagtggcgcggagttacatcagagggtgatccgtggctgtccggtgcacacggggtggcgcagtgtcccagggagccctcctttttcagcccatcgtcgatcgtacgaatgctggccagggcgtgacttcatatgagattcgttggggctacctgctcgcagttgcgccgatcagggcgctcacttgggagttggatcgctcccccctgatccagaggcttggggtcacccgggctaggcccacacggttggcctccgcatacactgggggggccctacgtctgagcgtc

SEQ ID NO: 658853 - DNA, 123 bp, Homo sapiens
  misc_feature (104)..(104): n is a, c, g, or t
tccaggagttacaggtagacctaacactgtagttacactatatagcagtgaccaaaaagggctaatatatactacgaatagtttaaattacagacataatgtanatatatacctatatgtaga

SEQ ID NO: 658854 - DNA, 469 bp, Homo sapiens
  misc_feature (6)..(6): n is a, c, g, or t
  misc_feature (240)..(240): n is a, c, g, or t
agtttntgtcactctttagtttttaagttaaagcatactgatagactttttcctctaaaaagccattccactccagattttaccctgggggaatattctacaatactgcttacttttctctataaaaactcatcaataaaatcatgaaagggcactgagttttgtaaaatcaggacccctaaatgtttaattggtaaataagtttccagataattattataagctttgccgtggaaagtntgttggttttttttctcactaagttaagtcacctgcttctgaaatacctctgaatgtaagattatgcagttctttccaaggcataaatatttaacctgtaatatgctacctgaagaagattccaataaagctgctccacctacccctgtttaggtttaaatactagggtttgttctatatttaaaacatgcattttggatgattaaagaatgccgggttttcgttgcca

SEQ ID NO: 658855 - DNA, 293 bp, Homo sapiens
tgtgagtgagccgagattgtgccactgcactttagcctgggtgatagagagagaatcagtctcaaaaaaataaagaaacaagcaagtcagtccaggctcttagacaattcaccatgagttttgccaaattcagtccatatgcagaatggtggtacacatgtggatttggtgtttcagggcccttgtgcaagccatcaaacagggcaaacctgccacccttgcaaaatgtggtaactaaagagcttcttatcaataaggggcatctatacaggtcaagatttcacatgtgacta

SEQ ID NO: 658856 - DNA, 377 bp, Homo sapiens
  misc_feature (44)..(44): n is a, c, g, or t
  misc_feature (61)..(61): n is a, c, g, or t
  misc_feature (72)..(72): n is a, c, g, or t
  misc_feature (74)..(75): n is a, c, g, or t
  misc_feature (167)..(167): n is a, c, g, or t
  misc_feature (203)..(203): n is a, c, g, or t
  misc_feature (214)..(214): n is a, c, g, or t
  misc_feature (220)..(220): n is a, c, g, or t
  misc_feature (283)..(283): n is a, c, g, or t
  misc_feature (338)..(338): n is a, c, g, or t
  misc_feature (353)..(353): n is a, c, g, or t
  misc_feature (373)..(373): n is a, c, g, or t
atctccccggggccgctctccggccctcgccctgtccgccgccnacgccgccgccgccaanatcgccaagcnanncccgcgcgccgctcttctcccgctgctgctgctgctgctggcggcgcccgcctcggcgccatgtcccgggccggccgctcggcgcctttggncgccgaggtgcccaaacacgctgcgaaccggcgcgntgcccgccgcnaccggnaccatgcgaaggcggccgggcccgggcagcgtgcggctgctgcgaagtgtgcggcgcgcccgnaggcgccgcgtgcggcctgccagcaggcccgtgcggcgcagggctgccatgcgtngtgcccttcgttttncaaaccatcataaacatttncttc

SEQ ID NO: 658857 - DNA, 418 bp, Homo sapiens
  misc_feature (284)..(284): n is a, c, g, or t
  misc_feature (286)..(286): n is a, c, g, or t
  misc_feature (290)..(290): n is a, c, g, or t
  misc_feature (353)..(353): n is a, c, g, or t
  misc_feature (362)..(362): n is a, c, g, or t
  misc_feature (411)..(411): n is a, c, g, or t
  misc_feature (418)..(418): n is a, c, g, or t
gcaacggcctgcagagcaacatgcccaagttttattgtgactactgcgatacatacctcacccatgactctccatctgtgagaaagacacactgcagtggaaggaaacacaaagagaatgtgaaagactattatcagaaatggatggaagagcaggctcagagcctgattgacaaaacaacggctgcatttcaacaagggatcctctacttcattctctgctcctctctgcaggggccgatgatccactcccccagctttccggtctctcgcctgtatgatgcngnaccnatatgggggcctccatgatgccatgatggcctctctctggatatgcagtggactgtctgatangcgccatgnaggcaatgcatatgctggcccatgtctctgccgccatatgtccatcgcngtgctcn

SEQ ID NO: 658858 - DNA, 104 bp, Homo sapiens
atgcttactaatgctgtacctaatgcaactcgtgatcgccaaatccagcagccatttaggtaacagccattaaggtaacagccatttaggtacagccatttagg

SEQ ID NO: 658859 - DNA, 988 bp, Homo sapiens
gcaaacctgtaccatcttgtgcttacccatttgttagaccacacatctcgttaccatgcttctaagaagagggaatgtgaatttcgtagtctgaacctcatacatcagaacatgtggtctttatacatgtagcgtgaattatgtccactagagtgagtaacatggtgtgtctataagtataataactgcatgttacatcatattgtggtaacttgaggtttagtagctgactttattatcacaacattagttggtaagactttcatcgataagtgtacataattatccgagtgatcacgaaggaccattactcttagcgcaccaacactatgtactcttctgctagtagacattaaacacgcatacggatgccacgagaccagagtggtgcaagttgcgcatgccacagctcatgtaaagttcaaccaagcacgtgttagaaatcggccattatggatgggtcggcatacacatttgacaaatcagagagaggattcggaaagagcacagcccatggactgacatggatggatgacaagccaccatcatactacataaaaatagtaacgagaggaatattacgccaggagcagttaactggcttagctcacgtcttggttacatctccaagccttactcgcggcaggtctagaacgacgaggaaggaagtctgggtttgaatcgcgcgtggcagagtagtaatgtgtccagatgaggactagagatcgattgccatctgactctgccaaaactggagtcgagtagcagccagaaatctcatctgtcacattattccaactacacataaaagatactaatagagctcagtaaagggtgccccctcgtaaggtgagatgatgttacgaagagaggctcggatgttcacgctcagccccaggtcctggcctggaatctcattctctgacttggccctcccttgacaggttcccacagattttcttcccccttttaagtatgctatcacaga

SEQ ID NO: 658860 - DNA, 359 bp, Homo sapiens
caggtggcgcccgaaaatgcgccgctctctgtaggaaaagatgtcgccacacgttgtgggtaagaagagaaattcgttgggccaccagcagcgggggcggtcaaacacagacgtggagagcacccacaccacctcgtggggggatgcgctcagcggtggggcgacagacataccaacgtgggagcgcgcacacggggatcacacacaaccgctctgccggcgcggcacacacaggctgggggaagaccccgtgttgcctagccgagaagaaacgacaagagagcaccgccgggggacacagggggagcagtgtcccgccggccgtcgggcaactggagatccccgcccaacattgtgcg

SEQ ID NO: 658861 - DNA, 123 bp, Homo sapiens
gatctgcgagggcatggcctatctgcacgcgcagcacgacatccccctcttggtttcatcctggagcagggagcctcctgctccctgctcagtgaacagaagggagtaggctcacaaaacggg

SEQ ID NO: 658862 - DNA, 204 bp, Homo sapiens
gaggcagtgataggtgagcaggttgcatacagggtcagggcagtggagatcggaaacacgagtttcagatttgatgtcattgctatgacaggtcaactctgtggaatcgatacctcgttgctgtgctgcggggagctgactgggggggagcccctcagtaggatcgaatggacgtatatgccagggtacgagctgaatcgtatc

SEQ ID NO: 658863 - DNA, 957 bp, Homo sapiens
  misc_feature (279)..(279): n is a, c, g, or t
ctatcatacagtaaaggccacacccgatgacggcctaacagggagccctctcacccctcctaatgacctcgcggtctagccatgtgagtgcactgccaatcctataccgctccctctgtacgtaggcctactaatctcaaccacaatcatagagcgcaagtaataccaattgatggcggcgtaggtgatcagcagagacatgcgcataaccaaggtcccacccacgacgctcaactggtccgaatcaaggtctacgtatacggagagaatccatatgtnattacgctcaaggaagatgtgttgctgccgtcgaggtctgctgcatgagtccgtgatacacaactcctagattagcctctcttagcgcacgcacaaatttgagtggcggccgctggcacctcatatcggggaatacactcactggtggaaaatgggcctgagatgttgtgctacctaaagcaaatcggggataactgcgctgtctgctgtctccatacaagtgtgaactacaccatagtttactagatgaagagcgacagcgggttgatgtgagtgagctgctgattaccatgacactggggtcgctcatttttgcctcctgtcactgctttgaaatagcccgaggacgacccttcaccattatcggacggatctccggtccacggtacaggtgtcacagggttccacggaatgtcggccacgtctgtgttaaatctggctgctgttggtaagccgcagaaatctgcaagcaggaccgcacatccggcgaagtgaaccgggggattctgccaatgggaaggggcgccaacgggggtccccgggaggggtcccaggagtggaaaacccgtgggcgcttcacacacgaagccggggcgccagaaagagccccgcctaacgaaaccgccaccaagcgcgggacacacaccgggcgcacacgcaacaagtgtgatacgaaaa

SEQ ID NO: 658864 - DNA, 147 bp, Homo sapiens
ctcgagctctgtacctgcagctctctctgatgacatgagccctccaggtgacctcagccctcccaggtgactgtcttccctggtctagtgagacgacggctgcacactcacgacgacgacggctgccggggactcctctacgacgtc

SEQ ID NO: 658865 - DNA, 108 bp, Homo sapiens
  misc_feature (1)..(1): n is a, c, g, or t
nggtttcaaggcttcacagaatgagttaggaagaattcccttctcttttatttttggaatagttgaggagaatggtattcttggtaagttggtagacaaagggaaaca

SEQ ID NO: 658866 - DNA, 136 bp, Homo sapiens
ggttaggatacgtgggagaagaaagagaggacgtaagttaatttatgccttttggggttgaggtgatgatggaggtggagatttggtgctgtgacaattgttttaggtaatagcttttctagccggtgcaggtgtg

SEQ ID NO: 658867 - DNA, 103 bp, Homo sapiens
gcggccgcctactactactactactgctcgaattcaagcttctaacgatgtacggggacatggaaaaatggttgatggaaaataaacatcagtttccaaaaaa

SEQ ID NO: 658868 - DNA, 408 bp, Homo sapiens
  misc_feature (295)..(295): n is a, c, g, or t
  misc_feature (383)..(383): n is a, c, g, or t
tgttgggacagacctgtgagaactgacaagaccaggagtccctggccttagctaataatcgaatcctcagtgtccccagtccacaggccttgtggcaaacatggtggaagccctcctgtgtgcaacagtaactggggtcctgctgtatagggtgccagggtgcgaggagcaggcagtaaggacacagacggggatcccagtgggcagagatgcctaggtcctgccggttggggtaggatcttgcagtagcttagggggctttaatcctccaagccccatacacctgccttctttntattttattttagtttttagcaatagggtcaccctctgtcacccaggctggagtgcagtggcgtgatcgtagttcactgcagcctcanactcctagactcaagtcttttgagt

SEQ ID NO: 658869 - DNA, 123 bp, Homo sapiens
tatctgcaatgggaaaggcgggcagagaaaggggaatgacaaggcatacgggagagttacaagcatgccaactccaccattacccctcctaagagaggctggagagaaagccacatagacatt

SEQ ID NO: 658870 - DNA, 245 bp, Homo sapiens
tcttcagcttaccgatctgcaatgcagctgaaaagcaaccaaattatattttgctgaaactagatgttttacatgagaaatactgtatgtgtgtctaagatgtcagttatataaatctgtattcagatttcattctttgttagctcactttatgatttgtatttatttactgtatagactaaatatattctattgacatgtatgtcaactcattacttaatacctgtgaacagtattgagaaaac

SEQ ID NO: 658871 - DNA, 414 bp, Homo sapiens
aagtttcagtaaatcatcaacacagggactggagcgctggagagtgcaccgcagttctcagccacacccacgaggggcagggggctcagaagccacacacagtgacctggagctgcagccaggcactgggtacggggtttactaggctacaatctctactcctgaactggaaaatgttcacaataaataggtcaggaaaaaaaggaatgatttcactggttaatgtgtactcataggcactgcccacacaacggtgtgttttccactttcagtacagtcccacctttcttttcctctgctattttcttcagccagccacagggttaagagcattagctctggctttgaatcccagctgacctcaggaaaatttcttatctgtgactcagttctcccatctgagtgagctccctg

SEQ ID NO: 658872 - DNA, 87 bp, Homo sapiens
aaaaccccgggttttttggttttttttttggggggtttgggggggttgggtttaaaaccatttattaaggcccggaggttttttgga

SEQ ID NO: 658873 - DNA, 940 bp, Homo sapiens
agctgccatgtgaactacctcatgctgtacttcccccaatgtaccacagaggcctgctcttgacacagaaagccaatggtgcctcacgctatctttaaccatctggttgtttcccaataccaaaaatggagtctcttgcacaacaatgcaagtaatattcaaccaagcattacagatatattcatctcccaacataggactctacataattcgttgcctagtgtaaaacccctggactacaaaagtgtttggttgccccgatggcttgcatcggtgcataacgtcagtgatccattgttgtccctgcttaggcttatcgcaacactactagcacaccatagcgtgttgccaccttctccttggcttgtcccaaaactaaggaattcataaaagagaccaaaacccagagaaattcaaacgcccatatttaatttaatttctctttgggccccttgtgaaaagccacattttctgtggagaaccctttaagccccccaacttataatttataattgccgttggaccccccaaggaagttggttcccgccaaagtgggcgttctccaatttctccacacgctattatatataaaacagaaaaatatttcccagttttgcccctttagatgacacgcgataagtaggcacgaaccaccggggaactcaccggttttggattgccctctgtatgagggccgcgttagaagcaacagggctttatataacaggcaggcacccgccatgtgtgggttcttacacttacaaaagtacccccattataaagctcttgggctacaacattaatctttcaggattcaggaggttcccaaaattgtggaaagagaccgccattcaaaacattttcgctacgatatttacaacagggttttcccccacttcaatagcgcccccatctgtagagtggcaacatagatttccct

SEQ ID NO: 658874 - DNA, 266 bp, Homo sapiens
atatgtgttcccgaaaccagccgtcaggaggctgaggcaagagaattgcttgaacccgggaggtggaggttgcagtgagccgagatggcttcattgcactcaagcttgggtgacaagagtgaaattccatctcaaaaaaaaaaaaaaaaaaaaagacacttgcaaagtggcaccagatattagaccttgaagatattttctcaaaaaaaatctcattccgggttggccgttatctcgaaggggggagctcctcttaaaattcaccc

SEQ ID NO: 658875 - DNA, 182 bp, Homo sapiens
aaaagcaacgcgtgcgtcacactgagtgaagtcttcctgggacataatctttcttgatggcaggcactaccagacaacgtcaggaagtgctcagccattgtggtgtacaccaaggtcgaccacagcagctgcaacctcagacaatgaaggtatggtcattcggacgtgtgcagagggatcct

SEQ ID NO: 658876 - DNA, 148 bp, Homo sapiens
tacgggtgttttccggtatccttaattagcatgggtgttgcgctgcgggcttcctgaccgatttgttcctcggcgagagcgcacagcggtgagtcaggcgcaggacgcgtgcggaccacttatcctcattcccttacgaccgggcctt

SEQ ID NO: 658877 - DNA, 831 bp, Homo sapiens
aatgttgaatgaatgatgtgttttcttgtgtaaaatggattaccacctttcctgctttcttgagccaactatcacttttcgtcaggttcatcattatatccagcagttaatgtcctatgtggcagttcagtgatgcccttaggggcttggaggtgctgtactctgaattcctttttcagcttttcatgtgtcctgttcttttccctgcctgctggccaagtgcttgatgtgtaatcaatctgctgtggttctgtagcatcctccctgccttcttatttccttctcctaatctgcagtgggctgaaataagatcacctagcatgattgggataagactggtaactaagggctagaaatctctgatggaggtcctaaacggctctctaatgggaacaccgtgtagatgcatgtgcacatggacctggtattggtagaggcctttaaacttcctgtcttcctgctcaaggaaaggtcagataaccatctcctgggcaggagcagggggtccatcagtcctgcagaggccatgtcaggagtagaaggttcatgacattggattctataaacaaaagaaataagaaactgtgtctgttctccagtggaactccaccaattatttgggcaaacatgtgaatgctccatccaataggtattgagtgtagtaaaacttagcatttttgtagggcatttgaaaaggggtggcttacccaaaaggaaaggtggtaacacgtggcacaactggcaattttggggacccattgaagggataaatgaagggacatatttgagggggcctaagagaacagaaaatggggaacaaattggcaagga

SEQ ID NO: 658878 - DNA, 188 bp, Homo sapiens
caggcccggccggtaagcagacatggccggtgcaagccgaagcgggccgctagccccggtggccgaggagaaggaagaggcgcgggagaagataatggccgccaagcgcgcggacggcggcgccggcagcgagggactagggcgtgaccctgcaggggaacatcacgctactcaagaggcgtggcgtc

SEQ ID NO: 658879 - DNA, 283 bp, Homo sapiens
gcatttcaagtatcccgtgatgatccagcgggctgtctacctgcctcccaaggatcccggctactgaacagaactgaaggaggaatgtgatggggaacaccagtatccagatgatgaagtttggaagaaactccttcctgctcaagaaaattaagtgctcagccccaacaactgttttctttctgaagtgaaagggcttaaaatttcttggaaatagctgtacgaaaatggattaaaaagatcctaccgatcaagatgagttcagctagaagtcataccaccc

SEQ ID NO: 658880 - DNA, 272 bp, Homo sapiens
  misc_feature (272)..(272): n is a, c, g, or t
gttactttatcgcctgcgatcactctaccccacgtctctattctcctgtgctcactctacatttggttttctcacatagcattctaatgtactagctatacatcgccaccatctactcttgtcacttctgtctcacagctgttactgtctctcatcccacgacatatatgtactgctatcctagacgctgagcattaatcgaatctatactgaattgtctttctttgacatgtttacgatcgagcttgatgttgagtatctgtgtccgtccn

SEQ ID NO: 658881 - DNA, 104 bp, Homo sapiens
ttctgagcataacatctatgaaatcacaggactgatgtgtcatgggtctgtgcaccacctaaaaactgcaatagcaaactgggatggatctatgagtctgccac

SEQ ID NO: 658882 - DNA, 637 bp, Homo sapiens
tcacgtggacactatcagtccctcattctgaaggttcccttctcgccacaggacagaggtcgacattcacacctcaaggtctacaatatcaggaccaccctgtcttgtggacacggaggatgattgaggatgcaagttcgaagtcacagcgaatcagcatcaccttcgcccctgtccagtacccccaagctaatctgagactccaacaggcaggtcacagcggatcaacccccgtgccagcacaaaaagagcgggcaccagtatctgggacccaggagaaaaacaaaattaggcctcgtggaccgagagattcaagctattatagtgaaaatagaagccagttgaagtgatgcttctccactcggatagggtcaggctctttagcaactggccgtccggttacatggcacggagatgttgcagtaaagatcctaaaggttgtcgacccaaccccagagcaattccaggccttcaggaatgaggtggctgttctgcgcaaaacacggcatgtgaacattctgcttttcatggggtacatgacaaaggacaacctggcaattgtgacccagtggtgcgagggcagcagcctctacaaacacctgcatgtccaggagaccaagttcagatgtccagctaa

SEQ ID NO: 658883 - DNA, 430 bp, Homo sapiens
tatatagcagtgctctccgagcaagtattgaatgagttcatacgtaatggactatgatcattttctgtccatgtaatctattactatatgcaggtttaattggagcaataagattacttctttactgtactatttagagcgaatcctttacagtttttgataagaactgtgacatttgttctttgtggataaaactcctgaaaataactcacaaggtcagtgctgcactctggcacatgtaggttgtaaagagggtcagttggttggttggttggctggttgattggttggttggtttagaacactaatgtacttgtaatgaaccaaactctggtcttacagtcttaaataccacctcatggggctgtttactctgttagcaatgaaacctgtgccaggtgtagtggctcacgcctgtagtcctggcact

SEQ ID NO: 658884 - DNA, 1418 bp, Homo sapiens
  misc_feature (278)..(278): n is a, c, g, or t
  misc_feature (349)..(349): n is a, c, g, or t
  misc_feature (353)..(354): n is a, c, g, or t
  misc_feature (358)..(358): n is a, c, g, or t
  misc_feature (362)..(362): n is a, c, g, or t
  misc_feature (366)..(366): n is a, c, g, or t
  misc_feature (375)..(375): n is a, c, g, or t
  misc_feature (378)..(378): n is a, c, g, or t
  misc_feature (380)..(380): n is a, c, g, or t
  misc_feature (387)..(387): n is a, c, g, or t
  misc_feature (396)..(396): n is a, c, g, or t
  misc_feature (407)..(407): n is a, c, g, or t
  misc_feature (414)..(415): n is a, c, g, or t
  misc_feature (419)..(419): n is a, c, g, or t
  misc_feature (441)..(441): n is a, c, g, or t
  misc_feature (487)..(487): n is a, c, g, or t
  misc_feature (1417)..(1418): n is a, c, g, or t
ccaagcagagagagagacaattacgccgcagagctctccacccagaacgagccatggacaagcacagtgacagcgaagaggagcttgctgccttctgtcctcagctggacgattctactgttgccagggcaactggccatcacagactctgagcactcagacgctgaagtctcctgtacagacaatggcacattcaatctttcaaggggccaaacacctctaacggaaggctctgaagacctagatggtcacagtgatccagaggaatcctttgccanagaccttccagacttcccttccattaatatggatcctgctggcctggatgatgaggacgacactagcattnggcnntgcnccanggcnttgatgtanccngngtctccngaccagggngctgaggagcncccaggnncccnacctgccagccgggacgaggcntgcgctgccggagctcctgcttggtgctcttcctgtaggatccaanctctaccagtcaaaccttgtcctagcctaggtctcccatgggtgatgattcaggcttggccttgtcatggggcctccgcgaaccaggccgctttctggagcacgctgcccagagagcaacgagaggcttcctccggtcccccagttcagacctggacactgatgctgagggggatgactttgaacttctggaccgagtcggagctgagtcaggctggaccctaggcagtgctaggagccactgaggcagagactccttttgggagtcactgtggtttaggtttttttctccccatcccacttaaggtgatggggcaagggaagaactcagctcccctcccctgaattatatttgtatgctgggtggcctggctgatgctcagaggcctccttagagaggacactcactcccctcccaccagctggatgcccatttctgagctcaagtcactgaagtgagagtgtgctccccaagggagggcttctctccatcaggatgggtactgttgggggaacaaaatagtcagggctattggttcccttttgagaggtgctgctgaagcactaaaagatgagtgccagggggcctcacttgaaagagcattgctggcttctacttattcgctctctagaggccccaaggtcggcagcagctggacaggtacctggccccaccttcttcagagcaaggtcgccttgttggctagatggcgggtagcgaggagataggatctacaaaggttgcccacggcggaaaggggtacgacgaagcactaaggaagcgagcggccgagaaacacgcagcatatccgcgcgtgcaacacgagcaacacacagggcgcaaccaacacagacggccacgaggagttacaacactagcgcaggtagtgagcgcggctatgatcggtagcgttctgaggttttcatggcnn

SEQ ID NO: 658885 - DNA, 134 bp, Homo sapiens
cctgagcgacgtgttgcatgacccgctcagaactgatgagatcaatgggaatgttcaagcgaaaagcgagcaggacggaccttccaagatgtgccagcttcctgggatctcactgcagcagagcgtgaggccca

SEQ ID NO: 658886 - DNA, 881 bp, Homo sapiens
agcccagaagtttagggaagagctgcgagaaatacagacatctcaaccagaaggaggatgtggcctatgcagtcaactcctgggaccactagttattctcagggtactgcgtgctgaaagctgggaaatccatgctacaattgagtgtggcgagcatggttgatccagatggggctgtaagcagtgggaaccttgtcacatttgttctctaccagatgcggtacaaccaggctgtggaggtacgtgctctccatctaacccagagtacagaaggctgtgggctcctcagagaaaatatttgagtacctggaccggacccctcgctggccaccctaggggtctgtcgactcccttacagctggagggccgtggtccagttccaagatgtctccttggcctagccaaaacgcccagatgtctaagtgctacaggggctgacattcaccctacgccctggcgaggtgacggcgctggtgggacccaatgggtctgggaagagcacagtggctgccctgctgcagaatctgtaccagcccaccgggggacagctgctgtgggatgggaagccccttccccaatatgagcaccggtatctgcacagagcaggtggctgcagtgggacaagagccacaggtatacggacagaaggtctttcacgaacactcatggctatggtctgagccagaaggccaactatggaggacatcctggctgctgccgtaaaggctgcgggaccataggtccaatctctgggactccctcaggggctatgacacagacggtagaccaaaggctgggaagcaagtagcaaggagaccagagaaaaggaaaaggcctatggcccaagacatggaacacgcgaacccgggcgaacatacacg

SEQ ID NO: 658887 - DNA, 124 bp, Homo sapiens
  misc_feature (13)..(13): n is a, c, g, or t
aattccattccangcgtacaatgccgttcgcagctatattcaattccattccagcgtagaccggagtaatccaggtcggtttctatctacttcaaattcctcccggtacgctggaatggaatgg

SEQ ID NO: 658888 - DNA, 114 bp, Homo sapiens
gagtcaacttactttctaagggtccaagtcccagagatccatagtcgtcaaacgcttgagagtatctttcttcccagccagtcagtggcttgagccctatcttccactacaaat

SEQ ID NO: 658889 - DNA, 445 bp, Homo sapiens
ctccgggaaaagtttcaccccgggtggaaccttaacttttttcaatttttcaatgcggtaagctagataaagcactcttgcactactcggcctttggcaagtacctgacaagaatcttaagggtttattaagaactctttattttcttcataccctgttctctgcagtgctttctaacagcttctgggtgcagattttcttcggcatcctttgcactcagcttattaccaggtaggtagtgcttaagaaaagtcatggaggactaaagcctaagtccttttcacttttcctccatctgaaggtaggtgagttcatcctcttcatagtaatgctgttttacccaagactttatagcagatggacccagaaagaatttctgctattgtgttcactacaacaggatagggacatcagacagccccagaaacccccttccagatctgat

SEQ ID NO: 658890 - DNA, 195 bp, Homo sapiens
tctcatgctctcagcccacctgtggtgggccacagtgactggttgagtcatgaatcgagggtctgtgtggagtcggagatgcaaaagtctaagaaaacatctcagaaatgctaaggttaggtttacaatagtgatgttatctaggggaatcattgggggaaattgcaagtctgtgttacctccagcacaagaaca

SEQ ID NO: 658891 - DNA, 507 bp, Homo sapiens
cagtctcaacgttgatttcgacgcacagtctattgtagtccgactcgcatcagtccgaaatgggtacatggcccctccagcatgttccaacctcctgccaccttaattcttcagctagggcagcgaaagaggtacttgatcacatggttgccacgttcgactacgatgcacgcatcagtagtccagtatgtcacaggtccagtggcagagtaccaacatggacacttcgtgtatgatctaggtaggtatcagaggtgatcggcgatcatagagcgatgtagttctagatccattgaaacgagctgtagacagtagcatgcagtcccgctacgtgtaccagcatccccagcgtatggcattccatgcatttgctcgtgaggcatccacggtgcttcaagctatcggtttacttgtacctatgcctcatctttcttcttgtgcgcttcagcgtgcgcattagcttcttcatccacatggctctcatcgctcataggtttccacaggcat

SEQ ID NO: 658892 - DNA, 406 bp, Homo sapiens
  misc_feature (2)..(2): n is a, c, g, or t
anagcttcttaacttctatactgaccattctgttcactcatgctctataccttcatcactatatagcgttcaatatctgtcatcttggcactcctctctctggcttcaatcttattggcccatcgtgtggctgcccatggtgtagtgatgtatgccctctgccatgctggtcggacatacttctggtgggcactgtgcgttaacataagcatgtaatcagtaagctgcatgcacttgataggcatggcctgtctcctcacttgagcgcatggtccatagcccagagccctgttctgatcatataccatccactatcgcgacctatcgtacggcatgaggtacaaaggagacataggtcacgcgcacgctctacacggagcgtgtgcacaacatggtggtctcgtgc

SEQ ID NO: 658893 - DNA, 125 bp, Homo sapiens
gggtggtcctacttcgagggacgcatcattgtaataatagccattttatgcacagatgaggtgattcccacacttcttttcgcagatgtttcattatctgaatggtgtctgaatggtcgtgaagt

SEQ ID NO: 658894 - DNA, 119 bp, Homo sapiens
tactctctggcactgggtcctgcaaactctggaccccttggatctcctttatggaccctcaagcaatgtctcctcaactacagggagttgccaggttggtaccatgggttagctgcccc

SEQ ID NO: 658895 - DNA, 153 bp, Homo sapiens
cagatgagcgccggtcgtaccataaccagttgggctggtgttaaaatagtcgagactacgactcctcagagaactatccgggctacgtgcatatacatgactaactggactggtaataggtactatagcaggaatcagtaaacaagtcagtaa

SEQ ID NO: 658896 - DNA, 610 bp, Homo sapiens
agcggcttctgccaactgcactccaggctgggtgacagaatgagactgtctcaaaaaaaaaaaatcagactgggtgcaagtggctcacccgtgtaatcccaggactttgggaggccgaggccaggcggctcacgaggtcagcacagtgtgcggcttgacagtcactggggccgagtaaagatggccacccatcatgaggcatgttgaaccaggcaccggccatctgctgcagccagagtcctctggattgcctgtgcttgatcaagggggctgacccggcggaaccgcgttcgagggccttgatggccacctcgaatgccagcgccagtatttctgggcccacgcgacatttccaacacccttcaacctggcaatcacaagctggcaacagtgcgcatgtttgcagcacacctccgttccgtcactttcttaagggcgcacgcgaccttcttgcacacccgatactagccctccaagctgactggtgtgcctgcgcgccgcagtgtcttttcgcgccctaggcgctcatgtccttctgggccgctggcctttgcacaatgtgcccctcggtggccccatccgggcccttcccccgtcccgcgggctccta

SEQ ID NO: 658897 - DNA, 178 bp, Homo sapiens
tcagtcactttcaaagaaaaacttagatgatttcaggcttgcacttagtgcagacttaactgcagtcagaggatccctcgccttgcttctgtgtgcctggctcagtggcccatctttgctctgtgaggagctgggttaatggcagtgaggctgggttagtcagggcctccgtgtcttc

SEQ ID NO: 658898 - DNA, 710 bp, Homo sapiens
tattcccgagtttaaggcaaaacaggggtaacttccccttaatgcttaaagagcggacccttgggcatcacctgaccaggccccgaagggcttgaaaaaattcctcttcataacaaaatattaacctggcaagtcagtaacaataccgagtattgtttggggcctcctcgggtagcttggataaagaagaccagtggctttttttcaaagaaaggtggaatgatgcttggcatacaaggataatcttgctcactctcaaacaaggccctggttggaggtcgggaactcataggtggagcctcacctgccctaactgaaaacgacagtttccctagatgcttttggtgtgtcaggatggtagcaactgctctgtgaacactaatggacagtctgcccttatgtggaggtcataagaagccacccggggtgttgaaagaagagaccttttgaccctgcagtcgtggaggttaaatgcatgaatggtctgtagagcaccgagaacggcatatgctttctggcattgggaatgaccaattacgctatgaaaatggtaatggttgtatttgaggacatagatcaccgtctatatgccgaaatgaacgttaagttctgatttacaacccaaacgtcagttttaaagggcgggtcgagactaccttgtaaaaagtcattccttcccccaaagttatgcaacacatttatgctcataa

SEQ ID NO: 658899 - DNA, 414 bp, Homo sapiens
agagtcgctgagcctggggggcggaggtgcaggagccgagatcgcgccacgcacttcagcctggcaacagagcgagactgcgtctcaaaaaaaaaaaaaaaaggaaaatccaaccctatacctcaaacaaggggtaaatatctaaaggataaactccgtttaaaagatgccacaggagtgaaatcatggagggtatgggtctttcgggtgtcttattgggcttacttgatatcctcaggttaatccggggtgggggcaaatgataggggttccatctcttttataaagagcggaatagtactccatgggtgtatatataccacatttttcttttttctggaggggaaactcggggggcccaaaaattactaaactaggggaaaagacaagctcggaagggctcaggacaaaccg

SEQ ID NO: 658900 - DNA, 132 bp, Homo sapiens
cctcgctgaccctataaaggcacgtgtggttctcacgtataggccttctgatgggaacttgtgtgttaagagtaacagatgatttcgttagaccgtgtcttgctctattgctcaggctggagtgcagtggcc

SEQ ID NO: 658901 - DNA, 107 bp, Homo sapiens
ctgccctatattacttggggctttcaaaggagaagttctgaaactctgcccatcggggggtgatcgctggaggtgcgtggagctgcggcttctctggcctgggcagg

SEQ ID NO: 658902 - DNA, 128 bp, Homo sapiens
aggtgtcgtgaaactaccctaaagccaaatgggaaggaaagactcatatcaacattgtcgtcattggacacggagattcgggccaagcccaccattactggccatctgatctataaatgcgggtccat

SEQ ID NO: 658903 - DNA, 646 bp, Homo sapiens
  misc_feature (333)..(333): n is a, c, g, or t
  misc_feature (355)..(355): n is a, c, g, or t
  misc_feature (478)..(478): n is a, c, g, or t
cgggtgtagtggctcacgcttgtaatcccagcactttgggaggctgaggcggtgtggatcgcctgaggtcagcagttcgagaccagcctggccaacacagtgaaaccctgtctctactaaaaatacaaaaaattagctgagcgtggtggcgggcgtaatctcagctacttggaaggctgaggcatgagaatcacttgagcctgggaggcggaggttgcagtgagcaacctgcaccactgcactatagcctgggtgacagagtgaaactccgtcttgaaaaaaaaacattataaaacaaaaacgtgttatgaaactattgaaaccaaaagacangaatgaatatttaaagcagcangagaaaactgatgcctcaagtacaaaagatcctaaacgagattagcagcagatttctcctcagaaacctccaaaagcagtaggataacatatataagtcctaaagggaaatacttgcacccangaattctacatctgaaaatactatccaagaaaatgaagagaattacgacatttccagaataagactaagggagttgctaactactaggaccagatctaccaggaaatggctaagggaggcctttcaggctaaaatgaagggaccaccagacagtagctaaggggcttt

SEQ ID NO: 658904 - DNA, 459 bp, Homo sapiens
gtccctgactttcatttgctgtgaaagttaggttgatgggtttaagaaacattaatggtgctgaatactctggcctgatggtttctactaaagtgcttgattcttgttgttcctctgacaggagagatgatttcttttcagaattaaaattcctccatgagacatacagaggttctcttggttcctgatgaaggttgatattatcccataacagctgaatatacacaagtttgctatcctggggacagagatgacagaggaagctgtacaccttcattacaatgttcagatgtgaggataagtcctggcaagttactaggaaggtccaaacgtctgaaataccaaacgaggttccagaaaatgattggatgttgattgatgaaagaagatgtatgaatcacctgatcaccttcattttctagcaaagattcaagttctttacggagtactagaggactc

SEQ ID NO: 658905 - DNA, 633 bp, Homo sapiens
tggcattgtccagactccttaaaaaccccatcctcaaacctctgaggaggctaatttgaggtttcctcccatcttctcattcagctaccctgagatgattaaactctttctctgctgcaactcctgctgtttcagtgtgttggtctgttactgcacgatgggtttaagagcatcctaagagctccctactcctcacacactgcctggcacatagcaggggctccatgatctgtcatccatcatccatcacgatgtggggaatgacagaagacagcaaagtacgccccactcttcatggggtttatgaagaagaaaagaacttggggctgggcatggtggctcatgcctgtaatcccaacactttgggaggttgaggcagatggatcgcttgagcctaggagtctgagaccagcctgggcaacatggtgaaaccctgtctctactcccccacaaaaaaaacctgttgggcatgatggtgcatgcctgtggtcacagctacttgggagactgatgtgtgaggataacttgagctctgggaggcagaggttgcaatgagctgagatctctcaactgcactccagacctgtctcaaaaaaaggaaaagaaaagaaaagaacttggtattgcagagag

SEQ ID NO: 658906 - DNA, 346 bp, Homo sapiens
gctagatagagttcaggtccacggaagtgagatgcgaacctgggactgctttagtaggagcctatgaaatggaatgcgatcagaactgtctgcttaagaacaccatggtgttgatcgccaggggaattatcccgaggagtgctcactttgggagcatatgcataactggaaggactgagagagatactcatgcagtaagtgaagaatagcgcattaacagtgacagatagcttatacgcactgatgcaccagcatgtacacactggcagcttgtttgaactacctactggaacaggctaactagtgagcactgcaagctcctgagatagaagtgcttctagcgact

SEQ ID NO: 658907 - DNA, 319 bp, Homo sapiens
gatgggagttaattgatttaatttagattagttgaaaattattacaaaatattctaaaagggttttttgttggtacttcaaggaacccgattagttttgatctattgaaatcacaaaggtagaacagggcattttatttttggtataatttaggattaggtatgcttcctgtgttctaacaaggacatgttttctaacccttctcacactaggcacccagcacagtatttgcacctgctatgggatatatagagtgtggagatcagctcagatgacattaaagctgccgtagtgttattcttgtatgccaaatcttttt

SEQ ID NO: 658908 - DNA, 1211 bp, Homo sapiens
ggtggatccttgttcccctcgtatcgccttgttttcccacatgcccgttctgtacctctccaagggccagaccacgcactcgtgtagcccctgcagactcgccaggtggaccggccggggacaacgttacaaggctacatgtacctaggtttgattcttccctttatcgtacttgggcacctatatccctcacaagatagttgggtttgcccattaatcccccgttgccgtcattggcccgcccatgttgcctctcaggaagggctagacaccatcagagctgtgtgcgaaagttccaacatggtcttcaaacgcatgggtcctctaccctaagttaattaccacactaatttcttgtcttagaactatgtccttacggctacccgctgtacaaacttgtttcgactccattgggcttgtattcttaggtctaagcccctcgcgaggcccacggtaagtcgcgccggttttcggcttacgaagttcccgtaagggaatcacactgtaggaggctcccctcgcacctttgtttgtctacttacccatcaccaccgaccatggctcatgggctatccgagctagtacttcctagctggacttgggtatacctatctgacatttctaggatgataaggctactgggactacgctacacttggactactatgcagtgtgcgtgtggaacaagtatcatggtgtctactcgcgcagtgttcacgtgtggggcactgtgccgtccgtgtgtaccctgaacggagcagtgagatacggttgtcagcatgttccatgtgagcaccatggagctctactcaccccgcatccagagaacaacaaggatgaaagtgactcctgcggcgacggatacgggaatccacgggcgtcctaactgagcattgatgaggattagaggatggcattgttctcgtatggaccttgatgatgcatgtctacaagatcctctaacctccgccttcacaattgggtgaagctaccggtggaagctctcgatagtcagaggcagggaccggtggacttagtcggatgaagagtgatcctccttccgtccgtggccaacggtctgtgacagcaagatcctcgtgcatggggtaggcggattgattctgccgatatccttttgtgtttcatccctagttgtaccatcttattccctaccgggtgctcattggaatctgagtagagtctgggggagg

SEQ ID NO: 658909 - DNA, 146 bp, Homo sapiens
gtgcacagccatgcatcactgtaaccagaagatgtggatggcctccggaaactgtggcgtgataggcgcgtgctctcagaacatcattcctgctctactggcgctgccaggtgtgggcaggtcatcctgagctgaacgggaagctc

SEQ ID NO: 658910 - DNA, 310 bp, Homo sapiens
ttttcaaaaacactttccattttattgatcttttgtatttttatttatttcaatttcatttatttacactctagtctttattattccttttcttttactaattttaagtttggtttactcttgcttttctagttctttatgatgtattgttaggttgtttatttgaagatttcatgcttttctgatgtaggcattgctgggcaaggtgccacagccctggcatcaggaagtggttgacttgtgtgttggtaagaagaatttaccgatgacagtataggtttgaaaaaggaaagatttattggagtcgacc

SEQ ID NO: 658911 - DNA, 1120 bp, Homo sapiens
  misc_feature (482)..(482): n is a, c, g, or t
  misc_feature (1032)..(1032): n is a, c, g, or t
  misc_feature (1120)..(1120): n is a, c, g, or t
tatgcctctttataccccattaaattattttatatttaatcattctaggcccctgcatgaggtgtagaagaatggaagaagaccagtcacaaacgggtcctgagcagtgaggcagatgtataataatacggccctctatggaacaagatcttgattttcccaacatgtgtataatatgccttcgtttagagtctagcaagagtgcgaatctatccaccattcgtttgaacatgctctaaatactagcctgcctgaataattcttcgcacatataaagctcttccgacaattcaaacatcgtccaaatcgtgtcttactaatatttattaaaaaaataacactccttcaacctctatctatagcgtataacacaaaataactaataaataggcatctccttctcggacactttaaaatgtgttagagaaacatcctagcattgcatcacatttatcacttaatattacgagcgactatcaatnactacataactaccctcataatataactcagaactcgtccatgcctcatacagctacgacaactgagtattgcaatactgaatcgtggctatatcacgctataactccgataagtgctccgtcgactcctctgcatatacccccagtcttcctcgcggacataaaacatctaagtaatcgtaattactgttaccccacattatctcgccacccctctactccgctccacttaaccactgccaaccatccgcgctcgctaatgtgcttaaggtcgctacccaatccattctgagatcctaccatcatcttattataataacaatccacacctaatgtcctaatcgtctgccatcgtacatgcatggccgacacaaccactccacacccatcatatcgtcttcagtcaccaccattatcagtatacaccgaaccggtaaagcaacaacactcgaagtcacctgacacatctggtttagcacacgcatatcaccgaataactcctgacttgcatctttcactgtgcttccatagccgcttatcatcgcactanagtacgcgactttctctacgataactcataccggcatagagacgggttgaatttgcatacacctactactcatagtctcttcctcttn

SEQ ID NO: 658912 - DNA, 368 bp, Homo sapiens
gtgcctgtgactaatttgtttgtctcaggccacacagcttgggatgttgtgcaaactagctattccaattcagaggtctacggatccaaagtttgcatgcattgcacaccgtctgtcgcctcccctacttttatacgagcgtggaaactgaggcccaaacaacagcagggatgacttgaatctctaccaaacttcccgttcatgtatcttcctgttttgcacgatgcttcgtacgcggtgggctctggctggtaacagtagtgaacagcttcccagtgggatgtggctctagcttcctctgcatctcccacctccccaggagggtctcagggcttaccagactggaggagctcagctttagtcacatc

SEQ ID NO: 658913 - DNA, 221 bp, Homo sapiens
  misc_feature (8)..(8): n is a, c, g, or t
  misc_feature (25)..(25): n is a, c, g, or t
  misc_feature (29)..(29): n is a, c, g, or t
  misc_feature (41)..(41): n is a, c, g, or t
  misc_feature (208)..(208): n is a, c, g, or t
  misc_feature (210)..(210): n is a, c, g, or t
tcctctanaacggccgccccactgnacanagtccactgganttctcagtgagaacatttggtcgaaaactatcgctcaaaccaggagctgattcccattacccgcatccagtcctgaccccagcctacccgtctgtatggcgatgatttcatcaactgaccatcgatctggcaggtcccctgaacccctgggatttttctagctctancncactgtttatc

SEQ ID NO: 658914 - DNA, 727 bp, Homo sapiens
ggacgtcagcggaccgggcgctcggggccgggctgtatggggctcccgcgcgggtcgtcttctggctgctgctcctgctcacgtgtgcctgctcggggctcctcttgtgccctgtacttctcggcggtgcagcggtacccgggccagcggcgaagcaagggacaccacatcatttgaagcattctttcaatccaaggcatcgaattctgtggacaggaaagggccaggcctgcgaaaactgcttcacctggccattcaggggcacccccaacttcgcgtggcctgtcaattctctccattccagtgctgctgtggggggacctcttcaccccagcgctctgggaccgctgaggccaaaaaaaaagccctgtatggctgggggggctctctcaccaagtcatcgcctcaaccctgagccttctgaagcggtacagagaggtgcaagctgttgtgcccgcccaggggacaccccctccaaaaggtgtatccgtgtgtgccgtgttggggacaacgggagggcaattcttgaaatggggtccggccagggttccccaacaatcgatgcccaatgactatgtattcagactcaatggacgctgtgatcaagaggcttcggagcgcgatgtggggcaccaagacttccttctatggttcactgtgaacccggatgaagaacttccctcgttttcctagtggaatgtgggttcacctccgggcaagggcacgc

SEQ ID NO: 658915 - DNA, 357 bp, Homo sapiens
  misc_feature (330)..(330): n is a, c, g, or t
  misc_feature (340)..(340): n is a, c, g, or t
tgagtggttggaagattatatggataacttttaataaatgacactagattctcactcttggtagatattatcactaggctaagttttaaaatgattatagagccatatttggtacctatcattatagtcattttggaaacagggacactgagactcagagcattaacctatccaagttcaagcaactaataagggacagagtcaggaatttgaacccagacatctatctgacacacaaagttgactttcccctttaggatcacctggcctggcttaggccattgttcaaaggacggaggggtgggccaagtttttccaggaaaatgtggnttttattccntccaaacattttaggcc

SEQ ID NO: 658916 - DNA, 776 bp, Homo sapiens
  misc_feature (39)..(39): n is a, c, g, or t
  misc_feature (96)..(96): n is a, c, g, or t
  misc_feature (99)..(99): n is a, c, g, or t
  misc_feature (103)..(103): n is a, c, g, or t
  misc_feature (123)..(123): n is a, c, g, or t
  misc_feature (172)..(172): n is a, c, g, or t
  misc_feature (223)..(223): n is a, c, g, or t
  misc_feature (287)..(287): n is a, c, g, or t
  misc_feature (367)..(367): n is a, c, g, or t
  misc_feature (550)..(550): n is a, c, g, or t
  misc_feature (602)..(602): n is a, c, g, or t
  misc_feature (626)..(626): n is a, c, g, or t
  misc_feature (698)..(699): n is a, c, g, or t
  misc_feature (772)..(772): n is a, c, g, or t
caggctgccaacgtaaacataaggggcagggggctaccnggccctgtccccaacccctgagacagggaggtcactgtcaggggcccttagccatcnccncccnctaatctcagccctgcgggngggagggggggaatgtcagaggtggggaagaactcaacgggaatgaggnagagactttgtaaactcagaaccagggtaaagggccgggggcaagggggcnctgggggcccttgccctggcctaggggtggggcccgccccccccccaggacctcggggaatacnggtggcttagtccccgccctgcccgcccccttcccagcttcttcccccatccctcctccgccgaccccagacaggccgcnctgcccggcctcttcccccccgtctggggggcctcccagggggggccccgccccgggagccggggtcccctctgggggcgttgggtctctggggtgttagagggaacagagctggcccggtgctacttgacgggttcccccccccggaccttgccctcgcgcttggcaatcttgtccagaganaacacagccttgtccgggggcaggtagagggggcggccaacaggagaggccncagggggcgtgatggctctgcgcnccatcacactgcccgacctcatgaggtggcttcgggaaggctgctggtgggagaaggactgggagcggcccnngctagcctgatgcctctccaccaagtcccggacagcagggctgctgggggctgctcttgcgggagaggggccnggcc

SEQ ID NO: 658917 - DNA, 191 bp, Homo sapiens
aagaaagaaacacaaagacacgacaagaccaaaaacaacagaaaacaaaacgactcaacacaccaacacaaatgacacagcacaaagaaaaaaaaaacaacaacgaaaacaacacgaaaaaaacaagaaaaaaccaacaaaaaacacgaccaaaaaagactattgacctcttatggcgctgctgttttcat

SEQ ID NO: 658918 - DNA, 179 bp, Homo sapiens
tacaatgtgcaaaatactttattacaaaatacaccacggggctcacaaacccttttccaatattctctaacactgacactgaagcgctgcaaaatcccttgcagtgcccgcaatctaacgtgtacaataacctgaacccccttagttacacaaaaactctgcaacaggcattggaatgg

SEQ ID NO: 658919 - DNA, 442 bp, Homo sapiens
cggctgtctagaggatcccacaacgcgactcttcccaaaaaaaaaaaaaaaaaaaaagactacatagcttatatggcagataaccaatataaaaaaatacataaaacattaaggataatatttggtacatacctttaataaaaatatttatttaaggcacaattcagattcagaagcgtcaacagttagtcagaaagatacatgaagatgaatggaatgatatgaaggattatcttccccagggtcaacaggaacaagaatctttcatagataataagtcatggaaagaaaatctggcagggggtgggacacttacggaagcagagaagatgtccttggaaactcagaaaaggaacctggctacagaaaatcagtattaaagagtatcctgggagaaggaagaaaaagcctaatcctcataacgggaagaggtcagcgtggg

SEQ ID NO: 658920 - DNA, 219 bp, Homo sapiens
ggtcgactgccgcttgtgtggttcgtgaggaactcaggtgggctggatggtatggggcggcccttggcaagaggcgggcgtttggagtatcgcggggaggcgtcgacgcgacgaggattgtcaggggcgcaggtgccggatttcagttccagcgcgccgttgcaggtggtgctcggggcgcagatcggtgagttcagcgggcaaagtctgttgtcgacg

SEQ ID NO: 658921 - DNA, 314 bp, Homo sapiens
  misc_feature (132)..(132): n is a, c, g, or t
  misc_feature (166)..(166): n is a, c, g, or t
acttgaatttacaaccaaaagcctgctcagttgattacagctgggccaatacagtacaaggcaataacaaattagtgtgggttgattctggaattgaaaaagcttttgcttgtatggatacagcaaatccanatgtctgtgaacaaagcaacaatttaaaacaacnacattttctgtcctttaagcacttcacatcaaaaaaaagtgttttcaaaggcaaaaatctgcattttaagcaaaaggtggcttcccagctctaacaaggtaactggttagcatgacattaaagcttgggcaaggcttcaaacttaaaa

SEQ ID NO: 658922 - DNA, 188 bp, Homo sapiens
aatgtgtggtgttatgctcgttgaggtggaaagagttttagtttgtccttctgccccatatgcactctcttcgatttaaaaagaaaaagttatgttaattcttaaaggacattaggatgtccgatggattttattcaaacattggtcattgtgtaaatattgataaaaaaagatacgcggattaaata

SEQ ID NO: 658923 - DNA, 353 bp, Homo sapiens
  misc_feature (241)..(241): n is a, c, g, or t
tgccttgcaagaagcagcgcttagcaggctccgagaaggataacactggctgaacaccgggaaggaactggcacttgaagtccagacatctgaagcttgtcaagactagtttttggaacttggcccactccatgtgagtggaagcatggcctgatcacccacggtgtgcctgtattgacatctttgttctggttttgacttggtttgacttggtaagactagtctttggaacttgccccanctccacgtgagtggaagcgtggcctgatcacccacggttgtgccctgtatcggcactttagatactggttttgacttggcttgacttggtaagactaagtcttgggaacttg

SEQ ID NO: 658924 - DNA, 118 bp, Homo sapiens
tagattacttacaataattactatagtgtaagtggtgtataaatagttgctatactgcattgtttagagaataacaataagggggaaaagtctgtacatacttagtacagacacaatt

SEQ ID NO: 658925 - DNA, 348 bp, Homo sapiens
  misc_feature (43)..(43): n is a, c, g, or t
aacaaagaaccggtaaaaagggcgcacacacagttttgcagtntgcaccaaaccaaaatcagagtatccagaaatccaagccaggtcaaaaccaaaaccaaagtatcaagcaatccaagtcaagtcaaaaataaaaaccaaagtgccaggagaggcacaccatgggtgatcaggccacacttccactcaaatggagtaggcaagttcccaagaccaatcctgtcaagcaattcaaaccaaaaccaaagtgccaataaaggcacgccatgggtgatcaggccatgcttccactcaaatggagtgcgcagttcaaagactaccttacaagtttagatgtcagactccagg

SEQ ID NO: 658926 - DNA, 366 bp, Homo sapiens
ccaattggacttttattatatcaggctgattcactgtttctaatgcaatgaacttgacacatattttaaattttttctcaatctgccccattgtgtagacaaattaattcaaagttcttgttcttccttctttttttcatctaagcctgtgcttatgagtagaaaaagagaagaagctaccttgaaatgcctagggcccaaacttagaaggctctgcacataactgagcctcccttcctactaataatggaatagggattgcttataggggtggtggtccaaacataagttgtggatgaattatttccaggttgctatcacctaaggtaacttcaattaatcttttgtttttggaaaggaggatta

SEQ ID NO: 658927 - DNA, 411 bp, Homo sapiens
gctgatgactgtctgttatagtgtccattgcaaccttctggtcttgaggacatttgctaaaggacagctaagtagggcggttgtccctgtcctgttctggtgacattactgcctctcctgggtgttctggcatgctctccccttgagcaccatgccctgttatctttcctccatttccacctggcaactggcaccttgctctgtacagagctcccatctctaatcattgtcaattgggcttaaaagtcaattgatgtggatgctaaccagatctagctggaaagagacctcagcagagtcttctttgtggtggggaggggttttcagtcttctctctcctccccatccttccatggggtgtattggagatcagcgtcctccacccggttaagccgggcggtagctgtaggc

SEQ ID NO: 658928 - DNA, 337 bp, Homo sapiens
tctgtgtgatacgtgtgtttcgtgtgtgtaccttgcgggttggctgtgctgtgttgtgggaagttcgtgcctcacgttgctctcctggtgagagtccggagcaggatgagggggttcctggctttcacaaaatcccggtacccagaacaagcccacccagagtccacttgcccctcaagccttcagaggccaagctggctcctgctggacggcgatccctgaccactgtgctctgtgggccttctggaagccactgtccctcccccagtccctgtgctgaagccagacacctgcagccgtcctgcccccaaccccagctacccaggcctgaggctgg

SEQ ID NO: 658929 - DNA, 180 bp, Homo sapiens
gtgctatacttagtgcctgtagtttttttgtttgtttgtttttgttttgttgttgttgttcttttaagacagtcttgctctgtcgccaggctggcatacagtggcgcgatttcagctcactgcaacctctgactccctggttcaagcaattctcctgtctcagcctcctgagtagctgga

SEQ ID NO: 658930 - DNA, 1629 bp, Homo sapiens
  misc_feature (292)..(292): n is a, c, g, or t
  misc_feature (396)..(396): n is a, c, g, or t
  misc_feature (424)..(424): n is a, c, g, or t
  misc_feature (979)..(979): n is a, c, g, or t
gcacagatacttgagcactctgtacattacctggacagaccttctaatctgcatggttaactcaatggtaggaacggagtagtacaattgcatgagattgacttgacccgaaagagcactgacattgcgtacgggcatgaatactgaccaatcattatcagtcatagatggctcctctacgcgtcagcaagagaccacgctcatgcgagttagtcaccaagcaactttcgatggaacgcccaatacatgatgtatgtagaccagaggagcagtctccgcattgacaacctcngttctacactcattactctgttctgacacacatcaatacctccatacgatctctggtagccaagagacatacatcaacacaatacagacatcatacatacatantggaaaacacaacacatcacacacaaanaacagagcgagagcgcgcgcgcggtgcgtcaacgctgtctatcactccctaaaggggggggtgccgtactattgaatttcgtagggcgcaacccgtcgttatgtctcttaggagacagaagagagcggcgagagctcctatctatggaatgagcgcggggtaggatgtacaatacgaacaaaaggtgcgagagagggtgagcgggcgcgcgtgaaattccagagcgcagacgaacgttggccgggaagagccggggataaagacacagcgagagagcaaaattccgtgcgaggttcaattgtatagggtgcgaagaagcgcgtgaaggcccctattccatttccgtgaggggggagtgccgagagccattataaactggaggggtgacacagatatgagggcttccccccattatatagagaagagcgtctctttacaccaaagcgcgcttcttaaagtaccgagggaagaacaataccaaataaggaaagatctattccatcatagggagtgctgcacatacaccgggggcgccgagttacaaattaggacacncgccgtgtagagggactcaacttagaattgactcgggaattcttgaaaataccatacactatcaagcgttaacgccaagggaaggaaacatcatataaaccctgtacaaaggcagccccccttttctgatataccatcgcgcgaggaggggggcagagaaatgaaaacattaacaaaacaacagcgagcttctctcaacagggacatttccaacccattacggacaatttacagcccgggtaaagggacaccccatttatcggcacccgtaaattccgtccattaaggcccgaaaaattacaccgcaacaaccagttatattaattaagttaaacgccggcggtcagaccacacgttaacagactcgctttcgcctaaggggaaaacgaacccctaaggacacggcccaatcctaccccgtgtgaactctacgacagaaaacgaatcatgatggaggcacaccagaaggaaacccacaacgcaccataaccacgcccgggggtcctagaggaacaagcgcggagacagggcaatgtccccgctcgacgaagcctatacacacagacaacacgactagagcaccgactacaaccaacaggacgacgagaacgacgaataacaagacgagaacagaggacgaggacgtacac

SEQ ID NO: 658931 - DNA, 334 bp, Homo sapiens
  misc_feature (121)..(121): n is a, c, g, or t
gatgacatcacgcctattatgtcttaagtcctggtgttgtgtggatgacaagcagaagcagttatgatgacaggtgatagatcaaaataattgcccatttgttacattttccaatttctanaacataccttaagaaaatcatatatggggtcacaccatcctcacggtagtccaatagagcaagcatgccatctggattcatgttttcaccaaataaagaaactggtagtatttgaaattagcaaggatgtgctttgatttgttctgcagccccctgtcataaaaaggtttactctttctgggtctctgttcttcaagtagctctgccaaaggg

SEQ ID NO: 658932 - DNA, 262 bp, Homo sapiens
taagcagacatttagaggatcccgcacgggtatacagagttactgattcagtctgaggtggatgatgtgtgtagtcaccagcattttggcgaggctgagagacattaggatcatagagcgccaggagatcacgagcagactggcctagatggtgaaagcccatctctactaaaaattcaaaaattagcccagcatggtggtgggcacctgtaatcccagctacttgggaggctgaggaaggagaatggcgtgaacccgggag

SEQ ID NO: 658933 - DNA, 476 bp, Homo sapiens
  misc_feature (67)..(67): n is a, c, g, or t
  misc_feature (100)..(100): n is a, c, g, or t
  misc_feature (167)..(167): n is a, c, g, or t
  misc_feature (175)..(175): n is a, c, g, or t
  misc_feature (324)..(325): n is a, c, g, or t
  misc_feature (328)..(328): n is a, c, g, or t
  misc_feature (331)..(333): n is a, c, g, or t
  misc_feature (337)..(339): n is a, c, g, or t
  misc_feature (395)..(395): n is a, c, g, or t
ggccaggaggttctgggctgcctctggctccgtgggcactgctgcttggctggtggtctccgccgcnggaaaccaactccaaacgtcttctccttcgcgnagaaggctgatttggcctgaagaagccctgtgtgcactggccctagcaacccccccagagccagctngggagggncccacctagggcctagctccgaaacggcacaaaacgcgctgctaggagctgcattctgcaaagggaaactgggctcggggaacaaacctcagccccgatgcggcttggctcaggagcgcagcgcctgcctggttctcacctagccctcnntcnccnnnggcnnnggagggtctgggctgcctctggctccgtgggcactgctgcttggctggtggtctcncgcattgggaaaccaactccaaacgtcttctcctttacgcagaaagctgatttggcctgaagaagccctgtgtgcactggc

SEQ ID NO: 658934 - DNA, 287 bp, Homo sapiens
aatcttacgagttgtctgatgctagttgtgatctcggtcactgactccgctcccgtcagcgattctcctgctcagctccaggtgctggggtacaggcacccaccaccatgcccagtaatttttgtacttttagtagagacaggtttcatcatgttggccaggctggtcttgaactcctcacctcaggtgatccacccacctcggcctcccaaagtgctgggattacaggcgtgagccaccgcacctggcctacatgtgcatcttgatctaaaagcctagaagcacag

SEQ ID NO: 658935 - DNA, 479 bp, Homo sapiens
  misc_feature (70)..(70): n is a, c, g, or t
  misc_feature (103)..(103): n is a, c, g, or t
  misc_feature (170)..(170): n is a, c, g, or t
  misc_feature (178)..(178): n is a, c, g, or t
  misc_feature (327)..(328): n is a, c, g, or t
  misc_feature (331)..(331): n is a, c, g, or t
  misc_feature (334)..(336): n is a, c, g, or t
  misc_feature (340)..(342): n is a, c, g, or t
  misc_feature (398)..(398): n is a, c, g, or t
gcagttgctgctgcagtcgatctaaggatccccgcgctagcggcatagtgaacgggtggtctccgccgcnggaaaccaactccaaacgtcttctccttcgcgnagaaggctgatttggcctgaagaagccctgtgtgcactggccctagcaacccccccagagccagctngggagggncccacctagggcctagctccgaaacggcacaaaacgcgctgctaggagctgcattctgcaaagggaaactgggctcggggaacaaacctcagccccgatgcggcttggctcaggagcgcagcgcctgcctggttctcacctagccctcnntcnccnnnggcnnnggagggtctgggctgcctctggctccgtgggcactgctgcttggctggtggtctcncgcattgggaaaccaactccaaacgtcttctcctttacgcagaaagctgatttggcctgaagaagccctgtgtgcactggc

SEQ ID NO: 658936 - DNA, 149 bp, Homo sapiens
tactacttcaccaaaattgcttggactgcttttatattactgggttaaagtttggcatgtgtcagcatatgttagggaaaaaacatcaattcccagttaattccaaattcagcttcttatgtaatttatacaacacaaaaatttaaatg

SEQ ID NO: 658937 - DNA, 199 bp, Homo sapiens
  misc_feature (32)..(32): n is a, c, g, or t
  misc_feature (85)..(85): n is a, c, g, or t
tgatgggatgaaaatagtcgcatacattttgncagatgtaagtttctccaaagaatggggccacaagagaaatggggaggggggnctacatgcaagcagatgaggggcatttgcttgcccatattcttatattttttactaatggtgtctcattaagaatactaataacagctcaagttcaaaggcaaacttgctaggg

SEQ ID NO: 658938 - DNA, 138 bp, Homo sapiens
tgtcaatgaatgacttgaggaagctagatcatagctagaaatacagataatccacagcacatctctagcaattatgctattcctattctctagcctattccttaccactgtaatcttgacatataccttggagttgaa

SEQ ID NO: 658939 - DNA, 374 bp, Homo sapiens
  misc_feature (1)..(1): n is a, c, g, or t
  misc_feature (6)..(7): n is a, c, g, or t
  misc_feature (55)..(55): n is a, c, g, or t
  misc_feature (167)..(167): n is a, c, g, or t
  misc_feature (249)..(249): n is a, c, g, or t
  misc_feature (253)..(253): n is a, c, g, or t
  misc_feature (269)..(269): n is a, c, g, or t
  misc_feature (300)..(300): n is a, c, g, or t
  misc_feature (349)..(349): n is a, c, g, or t
  misc_feature (360)..(360): n is a, c, g, or t
nttttnnttttttgaagactccagcctgagcaactgagcaagacttttcacagtngtgaagagagcaagagttgtgcagtggtgccatcacagctcatgcagctttgaactcctgggctcaagcaatcctcctgcctcagcctcctgagtaactaggactacaggtncatgccaccatgcccagttaattttaaaaatattttttggccgggcaagctggctcatgcctgtaatcccaggagttcaagnacancccggacaaaatagtnagacccagggtctacaaaaagagttttaaanatttgccaaacatggtggtatgcacctgtggtcctagctactttggggntaaagtagggnggttgcttttagac

SEQ ID NO: 658940 - DNA, 181 bp, Homo sapiens
cgcttctgtactgcccctcacagacctgccagcccatggatgatcagagtttatcgatgcttcccgtgctggtatatgatggcaacgggacatcaggaaagcagtgctgatgataatggacccctgatggagttggatgactctgactttgagacagaagattttgatggcagaagcagga

SEQ ID NO: 658941 - DNA, 154 bp, Homo sapiens
tgatggctgttggagactgttgagtctaaaatttaggaagaggattggcttttagtggggaaaatactgaaaaagcctagagaaggcaggattacgggaagagcagagcagagctcagtaagtttaagtcaaacatttctttcccagtcgctct

SEQ ID NO: 658942 - DNA, 986 bp, Homo sapiens
gttctagatcgcgagcggccgtcctttattttttcttttatcaagaaagcaaatcccattaatggggaatttcagctgacaacaaatgtgagaggaaggtctatccccctcccctggaaatcatgccagtcttctgttgcccatcagtggcttcatctacagggcataagaacccccatgtcctgacatgtcccctagtagtggcgaagctacatcctagtggtgcgtgtgtggcggaagaggcgtgagtgaggttgcctactaacgcgcagagtcgtggggatgctggagaacaggacgtggcaagacgtgtggcacccatcaccttcgtgtggctcaattcccttcttccccgggaaccgtgggtgcgtgccccacagtcccgtggggtgtgggctggcaagacagggcctcagtgcaaccaatgagttagacaggagggtggcacggaaacggtggccttgtgtgccccttgtggcggggcgcgaggaggactaagagggggccatgctgtgtgccacagcggtttccaatgttggaagtatctgcagtgtacatacgaggagggtttggaaagaggcatccttttcccaaaggctgtcgcctgggcgacaagaagaagagggcgaagtacacgctggcacatgccggtgccaagggcgcagggctccagggcacagccgtgccaccttgacgcgggccacacggagagcttaggagctacgggaaaactccgttgggcgcgggcccaagtgcagggcgcaggactgtacccggaagtatgtgcgacaggaatgtccgtgtggtacagggtttcacacgcaagaacacacagaacgcctatatggggctcaggggaacgagcggctgtgatcccccgagaacgacagctggggatgaccaactggccaaggacacgcagtgaaacgcgcaaagcggccaaaagaggcgaacacgaatcccaggaagtcgggaccgagatgaag

SEQ ID NO: 658943 - DNA, 369 bp, Homo sapiens
ggcgcccgtcgctgacggatacgtggcctctgcgctcagcggggcagccaagctccatggactcatagctctcgaagactggcccaggcagctagccaccaatgcccacacccgcgaggggccaaaatgccaaaggtaacggagataaatgcacagcggcgcaaggcaagtaaaaggcggtggcgaaagggcgcgcgttgaggcctctctgccgcgtgcgctcgcgtttcccagcctcctcgtccgagccggtctctccgccgccgccggggcacgcctgcagacagaggggccgcgagcggacccgggcggcggcggcgcgggcccgggactcggggctctacaggaaagcggtccgcgtcggcccgg

SEQ ID NO: 658944 - DNA, 103 bp, Homo sapiens
cttccttcatagccagggtaacggttagcacacacttcctttgatagacacaactcctctcttcttctgcttggaagtagtagctgtgatgtgagggtcgctc

SEQ ID NO: 658945 - DNA, 1025 bp, Homo sapiens
  misc_feature (101)..(101): n is a, c, g, or t
  misc_feature (106)..(106): n is a, c, g, or t
  misc_feature (108)..(108): n is a, c, g, or t
  misc_feature (964)..(964): n is a, c, g, or t
  misc_feature (1025)..(1025): n is a, c, g, or t
cgccacagagctccaccgctgaggccaacgaggccaggtatttattacaagaaaaagaaaacatattctaaatagcaagggggggtaaatttaactaacanaaatntnagcaacattgcctcactggtaggccaatatgatgaaatgattggagtttcaaaactacctccttcgatctccaagtatgtaacacgagttatatgttaaaacatcctattttgggggggggtataaaagttctaaaagaaatagtacatgcatcacaccaggtttttgaagtccatagagtactggttacttctttatatttcatattacgaggctctagagtaaactcacctttacttagtatctttctttcacttttttttctcggtctcaatctttcttttataaaaatattttaaaaagcatgcaccacaaatacttcagaagccaatgagcgcatagaatctgctgcttttgttcccttctttggagagctaagcttttgtaatacttccgggatacttatgatcgcggtacgcgaaaagagaacacagcgcccaagagagagagagtttaaggtttaaacgctgctgaaaatagaaaaccatgggaggggtcgttaggggtgaagcgattagggatctccacggggaggtcatcttaaagggtcctgctgggggttttgtgaaatctactgtggcgtgagtggggggacaaatttgaggtgaaaccttatgtggggctgtgccaacaataatagagctgggggcagtttggtgtaagagagattttcaatggccaccgagagtcctgggtgggtcggtgagggggtggccttgtctttcgaggctgttgaagaggaacaaagaagcgagagccctgggcttatgaggtgggatctgagcagaagaggcggtacttatggtgtgggactcatgttcgcccatggaggcggaatgatgaggccgtggtgtgntgcggcggcgctttacaataagtgagcgagaatagggcggatggtggagacgacgcgccan

SEQ ID NO: 658946 - DNA, 435 bp, Homo sapiens
tgcgtacgggacagctctagggcgcgtaggaatatatcactggagagcgagtataagatggaacagcgcatatgtagggctgaaagcagtcaccaagttaggagagctgttcgaggcgcaacaggcattacctggaaaatcccaagacatcgtgcgtagaactccatcataccgcgagtataggaccatatctatcaccctaactagaagaatctaatgttagtataagtcacatgaaaacattactcctccgcataagcctgagtcagattaaaacattgaactgacaattaacagcccactatctacgatcaagcaacaagtcattattaccctcactgtcaacccaacacaggcatgctcatcaggcaccggttcaaaaccgtgcacaggacagctcggcgcatcttaccccgcgtgtggttcagacgggtc

SEQ ID NO: 658947 - DNA, 1601 bp, Homo sapiens
tggtggaacgaatggatgaagaatttaccagagttaggatgcagactgacacatcactcaccgaagagtacgtggagcacttgagaggatagaggcccaggatgtgtgccagtcatcgagcgatgtgcaagcgagcaactggaggagaagggcactaccagaggaggtcatgccgcatagtaccataggctgccgcatccatgaacaaccgtacgtaccaagtaagatatacaacggaccacaatgagcgacaagactgaacaccgaacctgagggcatcatcaacagtcatgagcaagaaccagagcagacaaatgacggcgcgaagcgactcggacagtcgttagacaggacgaagactgagacaaagatacactatacgccccaaggacccgcaaagacacaggatacccgcaacccatgcatcgcccatgcacctctgcccagcaatacctaagcagacaaaagacacatgcaacaccggcaagcatgagataaccaaaggcccagcagaaaccacgacaattgcaccaaatgacgcccaactatgccaagagaagaaacaaatagcaaagacaatgaccacaggaaccggacacaagccatggaagaaataccaattcacaaacgaacgacaaccaaacggaagccaagacgtgggagacaaccacaagctgacccatacccagcacagacagaaccatagaaacaccaaaggaggcaaaacgcgacaaaacacaaacggccacacaatggccaggggaaacaagttccccaaagatacgcaacgactgaggacacaaaagaaccaaaaggggaggcacaaccacagtgagacgaaccaacaggcacatgagcatcgacgtgggaaaggacaagcccacgaaaaaggagaaaacccgaaaaccacgaacgggcacgccaggcagcaaaagagggacgagaaaaacagcgacgacaacaaccaaaaaagaaccaccacaaactcaccaaaacgacgatgcgaagaaattcagaaaaaccactaggcagaaagccacagagcacacacgaccaggacggacgcacacaaacccgcggcacagaacacagtagagccacaacggagacacaacacaggcaaaagaactcgcccgcgatacagaacgagagcacaaggacacacaaaccaagaagaaaagcagaaaaagcacacagcacggacaagcaaccacctgacacccaagcaacgccaacgtcagcaacagcaaccacacagcaaagagaaccgaacaggacccacctaaaacgaacaacgaccacacctataccgcacagaagccacacgactgaaaaaacacaacagagccgacaccacaacgacatgacagccaacacagtggacagacaccacaaaggacacgagccgaaaaacaaagcgagcagactacccagaagacacagacacacgacgcacaacacagcagcacacccaagactcaacccacagcgacaagaacacgcacacccacagcagcgccacacacaacgcacacacacagaaccaagaacacgacaataccaagagacaccacgacccaacaaacagagcaagacacaca

SEQ ID NO: 658948 - DNA, 122 bp, Homo sapiens
tatctgcatatctaaacatagaaaagcacaataaaaacacatatcataacctcacgggaccaccatcatacagcaatttgtcatgatcaaaagaaacatcattagtcgtgccataactgtat

SEQ ID NO: 658949 - DNA, 140 bp, Homo sapiens
gagagagagaactatgttctttcctgactttagggaaggtgaatgtgtttccgtctccggagtcagaaagagactcttcccttccttctctctctactctagtgttctaatatctcaccccggtgtgccccttttacaca

SEQ ID NO: 658950 - DNA, 633 bp, Homo sapiens
  misc_feature (633)..(633): n is a, c, g, or t
tgagacggagactcgcccgtgtcacccaggctggagtgcagtggcgcaatctcggctcactgcaacctctgcctctggggttcaagccattctcctgcctcagcctcctgagtggctgggattacaagtgcccgccaccaggcctggctaatttttggtatttttagtagagacggggtttcaccgtgttaaccaggatggtctcgatctcctgacttcgtgatctgcctgcctgtggcctcccaaagtgctgggattacaggcatgagccaccatgcacagccactaattttggtattttttggtagagatggggtttcaccatgtggcccaggtggttttgaactccttagctcaagtgattcacccaccttggcctcccaaagtgctggaattacaggcatgagccactgtgccgggccagtttataggtttcggtcgttggtgtctctcagagacgggggtctgtgctgtgctaaggctggaggagtagtggtgtgatcatatctgtgtgcagcttgaactcctggttcaccttgtttctttcaccttagccttccgggtagtggactgtacgtatgtgccacttcgccagggtaggtttataattaaacgtcctttcattccattgan

SEQ ID NO: 658951 - DNA, 210 bp, Homo sapiens
catttcaaatgtgggtatccaccattctcgaaggcccagtggctgaccatcatcttccccatgtcatctgaccaggcccgatacggtgtcacttggtcccaactgggtcctttacttccaccaccaaaattccatcatagacagaggctgcagacaattctttgtttcccgggccatctggtagtttgtactgtcggggatgcttcttgg

SEQ ID NO: 658952 - DNA, 119 bp, Homo sapiens
tcccataaactttgctttcttatttacagggttatattggaaataactttccgttatacacaaattaaggactgcgcattactgtatgttctctttacatattctttcataatataggg

SEQ ID NO: 658953 - DNA, 788 bp, Homo sapiens
  misc_feature (6)..(6): n is a, c, g, or t
  misc_feature (77)..(77): n is a, c, g, or t
  misc_feature (91)..(91): n is a, c, g, or t
  misc_feature (93)..(95): n is a, c, g, or t
  misc_feature (144)..(144): n is a, c, g, or t
  misc_feature (153)..(153): n is a, c, g, or t
  misc_feature (176)..(176): n is a, c, g, or t
  misc_feature (202)..(202): n is a, c, g, or t
  misc_feature (232)..(232): n is a, c, g, or t
  misc_feature (262)..(262): n is a, c, g, or t
  misc_feature (264)..(264): n is a, c, g, or t
  misc_feature (266)..(266): n is a, c, g, or t
  misc_feature (276)..(276): n is a, c, g, or t
  misc_feature (279)..(279): n is a, c, g, or t
  misc_feature (282)..(282): n is a, c, g, or t
  misc_feature (294)..(294): n is a, c, g, or t
  misc_feature (333)..(333): n is a, c, g, or t
  misc_feature (350)..(350): n is a, c, g, or t
  misc_feature (363)..(363): n is a, c, g, or t
  misc_feature (377)..(377): n is a, c, g, or t
  misc_feature (381)..(381): n is a, c, g, or t
  misc_feature (402)..(402): n is a, c, g, or t
  misc_feature (433)..(433): n is a, c, g, or t
  misc_feature (522)..(522): n is a, c, g, or t
  misc_feature (531)..(531): n is a, c, g, or t
  misc_feature (579)..(579): n is a, c, g, or t
  misc_feature (591)..(591): n is a, c, g, or t
  misc_feature (609)..(609): n is a, c, g, or t
  misc_feature (637)..(637): n is a, c, g, or t
  misc_feature (639)..(639): n is a, c, g, or t
  misc_feature (643)..(643): n is a, c, g, or t
  misc_feature (654)..(654): n is a, c, g, or t
  misc_feature (656)..(657): n is a, c, g, or t
  misc_feature (687)..(687): n is a, c, g, or t
  misc_feature (696)..(696): n is a, c, g, or t
  misc_feature (765)..(765): n is a, c, g, or t
aaagcncatctgcatctgaacctcccgccacaactgggatgaggacagatacagtagtaagccatctgtccaagtgnttaggaggagcatncnnngaccaaaatagggaggcgcacgcaggagcagtgcgtttcaggctgcagntgccgtctncccgtctcacttccggcctctcnactgtgctaggacaccctcatctaancagctttgctggaaagagaggagagcctantgcaaaccaggcaccttgtaggaaggcaangngnaagagtcctnacnagnccttccagaacnaagccagttaaagagggcggccctgcagagtcctatgtncaaacgcagaaaggcgnagaagcagagcanggggaggagccggncagngcctctgccaggttagaagtnaccatcgcgctcccccaggggatgtaccgcntgctgcctggcagcctccaggaaggccagcatccttggctatccttcttctggtttcgcgcctcatactccaacctgttggtgatgatncgctggacnatgaggtctgtggtgaggttgctgccactgtcaatctgacggaagatnccccttctcttnggctcctggtatgggtcngagccatccctgtcagggataatttctntnttgncgtgacacacnanntccaccttgaagtgactaaggagctctgcngtgaacgcntaaggggctccaatcacacttctgacacgtaccggcagccagcacgctcagaatccgttcatacagatncatgatggggtagttcttccctt

SEQ ID NO: 658954 - DNA, 151 bp, Homo sapiens
  misc_feature (17)..(17): n is a, c, g, or t
  misc_feature (69)..(69): n is a, c, g, or t
  misc_feature (80)..(80): n is a, c, g, or t
  misc_feature (106)..(106): n is a, c, g, or t
  misc_feature (113)..(113): n is a, c, g, or t
  misc_feature (133)..(133): n is a, c, g, or t
tttatattcttatcctngcaggcttcgggaataattcatattgtaacttactactccggaaaaaaaganggtttggatanataggtatggtaagagctatgatatnaattggntttagggtttatgtgtgagnaaatatatttaaggggta

SEQ ID NO: 658955 - DNA, 1025 bp, Homo sapiens
ggcagatgcccagtgaccaagaccattggtggaaggggacgactccttcaccaccttcttctgtgaaactggtgctggaaaacacgtaccccgggcagtttttgtggatctggagcctacggtcattgatgagatcctgaaatggcccataccagacgagctcttccacccagagcatgctcatcactgtggaaagaggatgcctgctcaacaactatgcccgtggtcaacctataatccatttggtcatatggagatctattgacccagttgctggaatcggtatcctgtcaagcatgtctgacgcgagtgtcacagtgacattcgagcggctatccatgggttgtttccacagactttgagtgagtgggcacttggctcttggcttcaccctcacgtcctgatggagcggctctctgtctgactatggcaagaaatccaagcctggagagttctccatcttacccatgctcccccaggtgatctacagacccgctggtcagatggcccgtagcaagcgtctagtcctgaccacgcacacaaccaacccctgtgcagtcacgtcagaacgtgtgccgttcattgggttgggacagacgaagcatagtctatgacatcgtgcgcgcccgcgataggcttatgacatcgagcgcccaaggctacaaacgaatgctcaaatctggctctattagccaaaatttgtcgtcctccgatccacgagacttctcttgcgcgtttgacggggccctcaatgtggacctgactaggaagttccagacaaactggtgcccctatccgtcgcatcacgttccctcctgggccaactatgcacccagtcgatctctggcaggaaaaggcatacacgtagcagctgtcggtggcagagatcaccaatggcctgttttgaagccttgcaaccagaggttaaatgtgatccccggcacgggaagtcttgggctgctgctgtgtccggggaattggggccacgttgaagctgcatggcgcataaaaagggactcattgga

SEQ ID NO: 658956 - DNA, 115 bp, Homo sapiens
cgtcaagtcatcgagctgctgttggtcccacttgaggtcaggaatgaggacaaaaccatcagagggatctagggttctcgaaaacaatccggaccgcttcagacctatcttgtcg

SEQ ID NO: 658957 - DNA, 132 bp, Homo sapiens
gcagcagaaacgggggtagttacttgactggacacatcttctctgtatactccacactgacctaagaaaagaacagtaggcattcttaacacatgcttacaatgagctagaagacacatgacacgttccaca

SEQ ID NO: 658958 - DNA, 306 bp, Homo sapiens
atctttagtacaagtatctcaaatcatactagactcctaactggtctttcttcaagtcctgctccctcaaaaatttaatcttccaaaaagcagctgaaatgatttttttttttttggaaacagattttggctctgtcgcccaggcgctcagctcattgcaaccttccgcctccgtgggttacaagttgattctcggtgcctcagccatgtgaagttagctgggatttacaggcgtgcaccaccaggccccttctatttaatttttttaagtaaagacggggtttcaccattacgcccaggttggca

SEQ ID NO: 658959 - DNA, 403 bp, Homo sapiens
aaattgcagtcagggactaaagctctctctaaagcatcggataatactgcacaatgttgacactttgaacagcatagggatcaggaaaggaatactgaggcaagagaagcaggtgaactcccaggttcacctgaagcatcccccatgcgattctaaaagcatatgtaaaggaggcacttaatgtgggtcacaaagcacaagatatgatatacgaactgggtgaggggttatgtgataaaataatcaggagagcaatcaattcatagcccaagtttgatacaagctaaatactaaacagaacacaaaagccataaataatgtagtatggagagcaaaatgtaaggagagatagaatacggtgattgatgtgtggataaagtgtaagttcaggcatactacttgg

SEQ ID NO: 658960 - DNA, 350 bp, Homo sapiens
catgaagaatgtgagaactgtaaataccaatccttgaaagggaccatggtgcggcctgtgagacataagaaaccagtcaattactcacagttggggcatctgacagtgaatgatgatggttctgaactgtacctttaaacacagaaaatccagacacagcaccaaaggagttaaacacaagataaaccaaaacctacacttgaacaatctccggcacaggaagaaatcccagatacaagagaaaacccctaaaaaaagatcactgaaggtactaaagctatccagctagtgcagttgcctgtgtacaaagatggcttaagatgacccagctctaccagagagactcagaa

SEQ ID NO: 658961 - DNA, 819 bp, Homo sapiens
caggcgtgcatctggccgagcatgctgctgtagacagggcatcgtagctctctgacgtcctgagaacggctgcggacactggctccttctcagccgtctcaaccaggcagaccagtctgcctagtgcacccatgtgccgcaggcctggatcataccccaggatcaggaccttgcgggtcttgcctggcccagagactgtgtcagctaagcccgccccagtggactcgttcgtccagagcggatgctccatagcctcgacgaaccccgcggatcgaaacccctacggtggtgccaggctccaagcgcttctcctgcccctcctgtggaatctgtcattcgtgggtgcttcagagtccaccatccaatgagtttctgcagccaaagagataaccagagaacaaattacggcaaaactataagtacaaaatgggggcgagtcgccggtcccaaggaagttgcgcgaaagaaggcacgcgtcaccatcctggccacgccccctttccccgagaggagagcgtccgcccgcaggagctgcagaatctgagcgatgacgatcgacgcagttgtggaaggagatccgcctgcagcctgatggccatagagccctcatgaaggaggaagctgatgagaagcgtagtgacgtaccgtctaagcggcaacgaatgagcaacaagccattatggggtccctgtcccagacaaatacgttggagcttcggtctaaccggtgccacacactgcagtacctgaataccgggagaagaactgtggcgcggattcgtaggctgtgaagattatcaatgcggaaggggttaaaaga

SEQ ID NO: 658962 - DNA, 224 bp, Homo sapiens
gatggcgctgtgacctcccgtttcagcgattaccagggcgaactgctggatgccgcagccgaggcctgcaaaggccgccgcgcacgtagccatatcgtcagctatgccgaggatggtgcgctgctgaccgagctgttcacccgtggtggtggcggtacgctggtgtcgcaggagcagttcgaagtggtgcgcgaggcgagcatcgaggacgttggcggcttgct

SEQ ID NO: 658963 - DNA, 393 bp, Homo sapiens
ggggggctactggagaggagagacagcaagtcccccctaacttgttacccagcacaaaccacaggttttggaattttcattttcgaccctaaagaaataggtgctataaacagggaattaagcaaaatgctggaggctaaagatcttttaattgtcttaattttttttctattattaaaccacaggcgggagattttttagttctcccagaacttctatcattttaaactggcttggatatttaaaaaaaaaattttcaggaggatgttttggactattgctaaccccttttttgtaatgggtaaggggtttgattgtttgaaattttctgtttttaaaaatggagcccttgcctttttgccaaggaaaaaaataaaaattattccagggcca

SEQ ID NO: 658964 - DNA, 349 bp, Homo sapiens
caagcaggctttattcactacttctggtttgctgttatcagagtctgctcgtttgcaggatttttcgaagttcagtgattgaagattttatcatgtaatgaagcttctgcctaatggggtattagatattatctgaagaccctgctgtgtcaaaaactttctgcctactggttggtagtggtaaacgcggctataaatttcatctttgttttgaaggcttgttagcagtgatccctagaaattgagataggacttgctgaaaatttgttttattccggtttcatgtactctttaaagtgattgtactatttgattttaatgtgcacccttcattgtccattttttgcca

SEQ ID NO: 658965 - DNA, 328 bp, Homo sapiens
tttgggacttgattaaagacggaaaagtcatcgaatccttagaaatctcctctgatgagaaattcactagaaatttgtcagtcagaaattatgctattgatgcactttggttatggaaacaaggcggtggggacttccgaaccaagaaatagatagagaaaaaaataatagtacatacaggtgcgccgaccagcgcctattcataaaaacaagaataatgtgtctctttgagtcatgttccttagcttcttttttaaaaaaactgtctcaggtattttcgcttctttgatctcccaatctccatatcccaaccacgttcatatacctc

SEQ ID NO: 658966 - DNA, 143 bp, Homo sapiens
acgagaaaatcagtacatagtgaaaaaaggaacattgataatctatcccatgatacataacgctcagcgaagaatagctagctctttcaagggtacagagctcctatatggctaggacaaaatatctagaagtaggtagggca

SEQ ID NO: 658967 - DNA, 917 bp, Homo sapiens
  misc_feature (123)..(123): n is a, c, g, or t
  misc_feature (143)..(143): n is a, c, g, or t
  misc_feature (154)..(154): n is a, c, g, or t
  misc_feature (157)..(157): n is a, c, g, or t
  misc_feature (159)..(159): n is a, c, g, or t
  misc_feature (170)..(170): n is a, c, g, or t
  misc_feature (176)..(176): n is a, c, g, or t
  misc_feature (179)..(179): n is a, c, g, or t
  misc_feature (183)..(183): n is a, c, g, or t
  misc_feature (185)..(185): n is a, c, g, or t
  misc_feature (188)..(188): n is a, c, g, or t
  misc_feature (192)..(192): n is a, c, g, or t
  misc_feature (203)..(203): n is a, c, g, or t
  misc_feature (207)..(207): n is a, c, g, or t
  misc_feature (215)..(215): n is a, c, g, or t
  misc_feature (222)..(222): n is a, c, g, or t
  misc_feature (224)..(224): n is a, c, g, or t
  misc_feature (228)..(228): n is a, c, g, or t
  misc_feature (231)..(231): n is a, c, g, or t
  misc_feature (237)..(237): n is a, c, g, or t
  misc_feature (245)..(245): n is a, c, g, or t
  misc_feature (247)..(247): n is a, c, g, or t
  misc_feature (254)..(254): n is a, c, g, or t
  misc_feature (256)..(257): n is a, c, g, or t
  misc_feature (261)..(261): n is a, c, g, or t
  misc_feature (267)..(267): n is a, c, g, or t
  misc_feature (271)..(273): n is a, c, g, or t
  misc_feature (275)..(275): n is a, c, g, or t
  misc_feature (281)..(281): n is a, c, g, or t
  misc_feature (285)..(287): n is a, c, g, or t
  misc_feature (304)..(304): n is a, c, g, or t
  misc_feature (314)..(314): n is a, c, g, or t
  misc_feature (319)..(319): n is a, c, g, or t
  misc_feature (340)..(340): n is a, c, g, or t
  misc_feature (344)..(344): n is a, c, g, or t
  misc_feature (379)..(379): n is a, c, g, or t
  misc_feature (381)..(381): n is a, c, g, or t
  misc_feature (385)..(385): n is a, c, g, or t
  misc_feature (637)..(637): n is a, c, g, or t
  misc_feature (704)..(704): n is a, c, g, or t
  misc_feature (710)..(710): n is a, c, g, or t
  misc_feature (794)..(794): n is a, c, g, or t
  misc_feature (815)..(815): n is a, c, g, or t
  misc_feature (828)..(828): n is a, c, g, or t
  misc_feature (836)..(836): n is a, c, g, or t
  misc_feature (848)..(848): n is a, c, g, or t
  misc_feature (869)..(869): n is a, c, g, or t
cttttaaaatgaagatgctttttaaaactaatgaactaagatgtataaatcttagtttttttgtattttaaagataggcatatggcatattgattaacgagtcaaatttcctaactttgctgngcaaaggttgaaagctattnctgattagttnccncngtttgaagatngtcccntcncagngntgntaangtttgccgganttantaaatttnctaaaangnaatnttnaaaaanaaatttgngngtcctgngnncccnaggggnaatnnntnaatganaaannnaaaaaaagcgcccaagnaacacaaacngccantcaacaggaatttcccttacnaccnaaggaattgtaaccattgctcaaacattgtaggantnaacnaagaagaaaactacaggagaggccgggcgcagtggctcacgcctgtaatcccagcactttgggaggccaaggcgggcagatcacgaggtcaggagattgagaccatcctggctaacgtggtgaaacccgcctctactaaaaatacaaaaaattagccaagcgtggtgctgggcgcctgtagtcccagtaactcaggaggctgaggcaggagaatggcgtgaacccgggaggcggaggttgcagtgagccganattgtgccactgcactccagcctgggtgacagagcaagactccatctcaaaaaaaaaaaaaaaaaanacaggngagacaactggtttttgaatgaaatacatgggtactgccttgcttgacatcacatagtccttgatgaaagttcacatttaggtntgcttggtacaatacgcctcntaaaaaggtcctngaagaaantcacatttaggnctgcttggtacacacgcctcngaaagagtctgatagctttcagtagcagtagacacttgcatgtgatgt

SEQ ID NO: 658968 - DNA, 550 bp, Homo sapiens
  misc_feature (493)..(493): n is a, c, g, or t
  misc_feature (508)..(508): n is a, c, g, or t
  misc_feature (513)..(513): n is a, c, g, or t
  misc_feature (520)..(520): n is a, c, g, or t
  misc_feature (522)..(522): n is a, c, g, or t
tgatgttgttgaaagatctaaacagctttgcagctgatgttctaaagaaataaaatataccactgaacccagatcaagcctttgcactaaattaatgtgagtttgaatttctgagtttcagtagtaatattttctatctttggcaatcatttttggactgacgctcattacgttttattctctttgggctttattccatggatttgtaaaggacaccagttcgctttatttctggaagatgtaacacaaattaagtaatgtgcctttgattccaatgtaactgttacaccttaactaaaactgtcatgagcaacatcatttttaaaagcatttctttgacgtgcaaatatatgacagaaaccattgtaaataggactttttgaaaacaatactttgctaaaaggggtgttttatgaaggatattatgttctgaagacctaaaggtagggtctggttatgtaatgtgtatgaacctatataattcatggcttantggcttatagggccntttantcatgancngatttaaattttgggctgcttttctggg

SEQ ID NO: 658969 - DNA, 360 bp, Homo sapiens
  misc_feature (7)..(7): n is a, c, g, or t
  misc_feature (77)..(78): n is a, c, g, or t
  misc_feature (131)..(133): n is a, c, g, or t
  misc_feature (137)..(137): n is a, c, g, or t
  misc_feature (149)..(149): n is a, c, g, or t
  misc_feature (166)..(166): n is a, c, g, or t
  misc_feature (174)..(174): n is a, c, g, or t
  misc_feature (185)..(186): n is a, c, g, or t
  misc_feature (194)..(194): n is a, c, g, or t
  misc_feature (196)..(196): n is a, c, g, or t
  misc_feature (216)..(216): n is a, c, g, or t
  misc_feature (229)..(229): n is a, c, g, or t
  misc_feature (252)..(252): n is a, c, g, or t
  misc_feature (292)..(292): n is a, c, g, or t
  misc_feature (295)..(295): n is a, c, g, or t
  misc_feature (317)..(317): n is a, c, g, or t
gcagcanaactaatacaaaaaaaagcactctcaaacgtatacttgaagactatattttactaccaatttaatttttnnttcttcagcagaatatgtcaatgaaccaagttctcatagaacttaaaaatttnnntgcnctcttcccaggnccagaaattccaaactncccgggcnaccccctggcnnaccacttncnttgcatgacaatggacactnggttcataaagancttctttttaaaatgggatattntggaaggaagaataccatgaaaagaataatcctatgaganttntttttaagggcagttattttgnggccttgggtcttcatgaaggatactacagtttatatagggaa

SEQ ID NO: 658970 - DNA, 135 bp, Homo sapiens
cactccaacctgggcggcagagtgagaatctgtctcaaaagaaaaaacaaaaaaaagtattagttaaattaaaattgaccgtttcgaaatagatactggtttaagaatttcatgtagaacagacaaagggaaaca

SEQ ID NO: 658971 - DNA, 378 bp, Homo sapiens
aggaccccaggcccttgggggacaaacccatgggatggaaaccccgcctttacaaaaaataacaaaaaattagccggctgtggtgttgcacgcctgtagtcccagctactagggaggctgaggtgggtggatcacttgggctcaggaggtcaaggttgcagtgagccgtgatcacacccctgcactccagcctgggcaacagagcaagaccctgcctccaaaaaaaataaaaattaaaaaaaatagcaaggcatggtggcccctacctgtggtcgtcgttttagctattcaggagttttagctattcagtgggaggatcacttgagtccaggagtttgagagcagcctggacaacataacaagaccttttttttgtta

SEQ ID NO: 658972 - DNA, 527 bp, Homo sapiens
aatggcggggaattttaaagacactctcatttgatgcgatagctaatattaagaaatcatctatgcaacaggacatgtaaaaagtactgaggtgtttatcactttaaaagggttccaggctgggtgcagtggctcacgcctgtagtcccagcactttgggaggccaaggtgggcagatcacgaggtcaagagatccagaccatcctggctagcgcggtgaaaccccgtctctactaaaaatacaaaaaaattagccggacgtggtggcgggcgcctgcagtcccagctactagggaggctgaggcaggagaaccacatgaacccaggaggcagaagttgcagtgagccatgatcacaccactacactccagtctgggcaacagagtgagactccctctcttaaaaaaaaaaaaaaaggggtaaaaaaatttaaaagtagagaataccttatttaatatgacggtacctgcttgcacagaaccgtcggtattttgggcgtacagtatagatgggggaccctctagagt

SEQ ID NO: 658973 - DNA, 324 bp, Homo sapiens
  misc_feature (76)..(76): n is a, c, g, or t
  misc_feature (119)..(119): n is a, c, g, or t
  misc_feature (266)..(266): n is a, c, g, or t
  misc_feature (287)..(287): n is a, c, g, or t
  misc_feature (302)..(302): n is a, c, g, or t
  misc_feature (319)..(319): n is a, c, g, or t
ttaatactcccatcacaatcaatttcaagcttaccaatttcaggcagcagcatctggcatctggctcccaggagcncagagagtctctgactcatctccaacctcaaactcttccaccnttcttgctcctgccgttgagccacactggggttgctgtgccgtgaagcatcccaagcaaacccccatcctagagccattccttccacaggaatgctcttccccagctatttattccttcattccattcagatctctgttcaactgtnaccctggcagagagggtttcnctgaccacccgggantaaaatggtccctaagncctca

SEQ ID NO: 658974 - DNA, 335 bp, Homo sapiens
agatggggggtcagcccccccacccggccagccgccccgtccgggagggaggtaggggggtcagacctccgcccggccagccgccccgtctgggaggtgaggggcgcctctgcccagtcggccctactgggaagtgaggagcccctctgcccggccagccgccccgtccgggagggaggtgggggggtcattcccacgccttttcattggacttcgccacattgttcatgctggcgcccggctcggcacatagttgcattttcgtttccctaacaactttgctttggcaccgaaccctgatagtacccctttttccctggccccccccccccccc

SEQ ID NO: 658975 - DNA, 441 bp, Homo sapiens
ggcgacaccgaaccaacccaatctggcgatagatcagccttgacgcgtgagggacgcccagactgtcatttctcttttccgccagttcttaagcgagcaggacaaattacagcgaaccatggcgcttgaaatcattttactgctgatcgaatggcaaatttcccgtccttccggatatgaagacagcgccaatgaagccggtgcggccatggcgtggaaggcgaaacagcttattcgcacacagtttcatttaccgctttcaacgtcgctactggcaaaagaactgcactgcaatgcggattatcttgggcgagtatttcgccggacatttcatttaaccctgacggaggccattcatcgccagggtgtccgggcggcagaaaaattactgctcaacgaggccgcatcattaaccgaagtagcgacacgctgcggttttaa

SEQ ID NO: 658976 - DNA, 265 bp, Homo sapiens
  misc_feature (50)..(50): n is a, c, g, or t
ggatccagcagctatacaatgtttagggtatcagaacttgtattacacantataccatctcagacagccgtaatgtccgaagatcccgggagaacaggcagaatcttacaccggtggtctctgaatgctgagaacaccagtccaattacctttaactttaaaaacaacggctgagaggatccctgggcaaaacatctcccaaggagagaaggtcccccaaaacagggacctggtaacgggggaagggtccacggttgttggagga

SEQ ID NO: 658977 - DNA, 1290 bp, Homo sapiens
ccctcctgaacagcagaggctgatctttgctggcaaaacagcgtggaagatgggcgcacccatgtcatgactacaacatccagaaagagtccaccctgcgacctggtgctgcgtctcagaggtgtggagtgcaaactctctcgtgtacacgaccccgtctacatggctaagactcatcagccctctgacgcgtcggagccccaagtgagcagcgcatcgaccaactgtcaaaaggcaaacagatccaagggcactcgacaagggccacgggcgcaattcgccttcccatggtcagacgaggctccaagcgcagtgcttcggccatccgtgttagaggccacagaggcagcacagactcaagcatagggggaacaggcactcggggcgacagcacaacccgcaataggtatacatggccacgtttcaacgagaactcagttcccccagacaggcaaccaccagcaagcgtcccctgcgacgcccccgtggcacgagacccataggcggctcgcccatgcgccgagcccccatcgccgaaaggtagacgcgcctcgcagcaccacgtcggcgagccagaccattcctacctcgccggggctaggacccacagcgaaccgcagccgtgtccaagcacatgggcggcaaacacagcgcaaaacccaactagcgagccgacacccagtcacaccaaccagacctcgagaccaaaggcgcgcacgacaaaggctgtaagccaaacgcgccaacattcagccacacgcaccaaaagggaaccccaaacgagggccaccaaaaacacgcaaacatcacgccaacgaaggggacccctcaaaaagccaggacaacaaacaaagggaccagaaaatatcaaccccagtggcagaccataggacacacagaccccagagcgacgaacaccaaacacacagacatacacgggcacacacaccccagtcacacacggtacacacagggccacaaagacgcacccacacccaaggaaccacacgctggccacaccacgagcctaacaacatgtgcgggcgacaacacggcaccaacacacaccgcgaaaaaggtgacaacgccgtggggaaacgcaatcaacaccccgacaatcacgaagacactaccaccaacaggcacaaagaacaaggacaacacgcaaccgccaaagccagacaccgacacactggacaacaacagacacgacactggaacacacacaacaagcagaggcgcacgcgagaagacaggaatacgacaccgcgagcgcgcggcaatcacggc

SEQ ID NO: 658978 - DNA, 118 bp, Homo sapiens
tatttgacttagaggatccctgtctagcctgtgcagtggtctagcctcccagtgttcaatgaaaaccaactcactaaacaaaactacaaatgagtccacttcactcccatgctacctc

SEQ ID NO: 658979 - DNA, 272 bp, Homo sapiens
aactagctaataaatatagcactaaagtagagacaaaggaactcagctctctggtgggccagaaacaacgcatagccatagctcgcgccttgtcagacagcctcatatattgcttatggatgaagccacgtcagctctggatacagaaagtgaaaaggttgtccaaagaagccctggacaaagccaaagaaggccccacctgcgttgtgattgctcacctgctgtccatcatccatacttgctacttaatagtgtgtgtttcataatggcag

SEQ ID NO: 658980 - DNA, 975 bp, Homo sapiens
tcaaagggaaaaattttattaacaacgggtttcaacgaaaaagcaaatgaaattaaccccctaataaaattaattaaccactcattcatggacctccccaccccatcacaaaatctcgcgattgatgaactttgggttcactcttgggggcgtggcctgtgaatccttcaaaattcaccacgggattattccttagccagtgcacttattctcaccagaaggctctcaacgcgccttttcatcaatcgcccacattaacttcgagaagttaaattatgtggcgtgaaactcactccgtatacctttcatcgccaagtgggcgcctcaatattctttatcggccttttctatacacatggggccgaggcctaatttagggactcatttctttctactcagaaaaccgtgaaacactggggataattcctccgttggtttggcaattataggcaacgaggcctttcattgagggaagtggtccctccgggggagggcaaatatcatctcgggaggggccaccagtaatttacaactttattatcggccatcccaatatgggggacagaccttagtttcagtgaaatctgaggaggctacctcagtaaaagagttcccaccctcacaggaattttttacctttcagttcatctgggccttcattaagtgagccttagaagaatcccaccctcctatttgttgccgaaggggttcaaaaacccctgtaggaaatacttcccattcgattaaattacctttcatccttattaaaataaagagccccgggatattctctccttccttcttagggtttaacatattgtcccagacctctagggcagaaagttatctaatgacgttataactcccaataagacgaggattttattgccacaattgcacgcgccacaggggggtggtatatatcactcgaagctctctttagacaaaaattgccgcatatgtttgcgccttcta

SEQ ID NO: 658981 - DNA, 642 bp, Homo sapiens
tttataaaaaaaaagtggttctccttcaccagggtaaaggagcgtgacaacttcgtgcccatggctaaactgtatttttaggagggctctgaaaagaataccaattttctctgttcatggaaacagacaaaatcgtatgttgtggggtactgtccaggacatcaatccgttgggtgtatgggtagaagcgaactcagaagggtatagtgtttgagacagcggagttcctgactttctccttggcatcattaaactttcatgccacgtaatacaggggctggaacaccgatctagtgtaattctgaaaggctgtcttctaaggctaagtgaggagaagctttgtcttctctgataatcagaggtgtaatacaccataggatgacatatgcacagctccatatgcctttatggagtgtcagtgtctgcagagagctcactagacagtgaatcagtacagtgtgtcgagcttatcaatgtattcacaaggtgagtgcacaaaggcaagtggaatgtcctggcagaaatgggcacagcttagatatgaaagcatgggtagatgtgctaactgttcatggcaccccccaggttgggggtatgtgtggacctgtatccaggctcgtgccgaattcctgcagaccgggg

SEQ ID NO: 658982 - DNA, 337 bp, Homo sapiens
aagagtaagatataagtacgaggtaattttacccattgaattgcctttccatggcacttgctctgttgaccaattatgtgtaaaagccatgaactcagtgttccacgcagatataaccatgaagaagccacagcctctctccttgaaagtttatagtgtgttggacacaattctcagtggttgtgtacccattaacacacttaataagcatgagaaatagtccaggtctagaaatagctaacttcagagcacacagaaaggctccacaagaaaggggcatccacagtgtctgtgtagagagatatgagatgtgatatgagcacagaggaggcacttc

SEQ ID NO: 658983 - DNA, 244 bp, Homo sapiens
cccccccccgggggggggcccccctttttttttttccccccttttttgccccccccccccccctttaggggggggtttggggggggccccctttttttgaaaaaattttgtggggggccccccaatttcccaaaaggggcccctttttttgggggttccccccaagggggggggcccccaaaaagggtttttttttttaatgggccctttttttttttaaaaaaaggggggttttcccccttta

SEQ ID NO: 658984 - DNA, 409 bp, Homo sapiens
aaggatcgtctcggagagagatttgggaggaggatgaccccacaagacagaagaggtatgcgacggagagactggttgcacccaattcatggtggcgaacaatggacccaaacctgcctcaaaaagagaaaggtcagagaagcaggaaactgggagagaactgtggcttagccaagaggagagggtttagaggaggaggggcccattgcttgacattccagagagcttgaggaagacgggtgctgaggacccaggacttgaaagagggcagtcctggttcaacgacctggaacctgtgggtcctctggtcgttgaaggccaggaccgaggcttgtccaggttttgaggttcccagagggtccagccagggacagggctattgcaggtctctctccctgcagggtaccgg

SEQ ID NO: 658985 - DNA, 338 bp, Homo sapiens
  misc_feature (59)..(59): n is a, c, g, or t
  misc_feature (63)..(63): n is a, c, g, or t
  misc_feature (65)..(65): n is a, c, g, or t
  misc_feature (79)..(79): n is a, c, g, or t
  misc_feature (81)..(81): n is a, c, g, or t
  misc_feature (87)..(87): n is a, c, g, or t
  misc_feature (135)..(135): n is a, c, g, or t
ggatctcttgacctcgtgttccgcccgcctcagcttcccaagtgctgagattgcaggcntgcncncacgcccagctggncncttganattttttaaaaaaaaatgtatttatttggtttgtttcagatgggggtntccctatgttgcccaggctggtctcaagcttgtgggctcaaacgatcctcctgcctcagcctcccaaagtgttgggattacacgtgagagcacctgggccctttttcatttttttagagacaaggtcttgctctgtcacccacactgggagtgcagtgggtgcgttcactacagcctcaatcttctcggggctcaagtgatcc

SEQ ID NO: 658986 - DNA, 782 bp, Homo sapiens
accccactccccccccccaccttacagctaggtacgaggcctgggctgttactcggccgagggtcatccttcatcgatagcgacacaccgacaaccagcgcatctcgagttctttggcctgaacgaaggaagagtgccctgtgccgtgcgcctcatacaccctgtgaggaggagatgaccaacgtacaacgccctgaatctggatgtgatgctgactgtgcagatgatggatcacatgaagttcttgccacctgcttccctggcatgtgtgcaacaatcaatgccccaccatgatgagccagtgagctgcctgcgagtgacttggtgacaatgcatgcctgtcaatggtgcttgtttggtgaacgaacttctgacatgactgtaggctttctcgatatgacgcaaaacaaaacagctctatttgtgtgacgttctacttgccccatgtgtagtcggtacactagcaacacacgtttgtgctccctattttgcggataaacttggcgcagatgactgtacaaaggcaccatgacgaacatctgtcatctgccaacgatgtgactctgactgccaaacgaggtgcgagcgcctgacaacagtgccacagcttacccacacactcaagtatctttccttgccagtgcccgaccgtgcacggtcactcgattacaactgtgggaccgcccgccttgactggctccaccaacatcctggagagcggtggccccggatggcgccggcgctcctgacgatctcgaggacctgcctacgcgacgcccaca

SEQ ID NO: 658987 - DNA, 241 bp, Homo sapiens
atgaccaaagaggctgagatatagacagagatacagaaagagaagcagagagaagagagagacacacacagggacacgaagagacagacagagagacagaggcaaagaaagggacacagcaaagggacaggcacagagggagggatagacgggaagagagacggagggatagagacagacacgggggagagatggatggagaaaggaggcaccgacggagacacacaggggtgtgctttca

SEQ ID NO: 658988 - DNA, 617 bp, Homo sapiens
tggtttcctctttaaaagtccttaatagggttagggtgtgggaaaatgctatattaataaatctctagtgtttggtgttaatatgtccaaaaccaaagtaaactggattgaaaaatggactgggtctaattatcatgactgattagactcgtggtttaagtggtgtagtaaagcatttaggagggtcatcccgtgttcacaaaagtgccactaaaacagcctcaggagaataaatgactggctttctctaaactctcaggtttactctgggcctctatcatatagacaggcttctgatagttggcaactgtaagcagaaacctacttatagttaaaactccgttggtcttctctgggtaaccagatttttaattgtctgatttattaaacatttgccaacaggagaactccggggattggagttcctctgaatagcatatatttgatgctttgggataggtcattatgatttttacccatttggacttacattagtgaaacccatttctttttaaattatcagattatatttggtacagtggtggaaaaagctaatggtagtttccattatgaagtttccccaataacccagggttttctaacaacaaaaaaaaagg

SEQ ID NO: 658989 - DNA, 624 bp, Homo sapiens
actctgttaaaaaaccaaaaaccaaaccaaaacacatatatccacaggaacacaaaatagtacatcaactcttaaggatgtcagttcactgacatccttgctttcaagctcatccacagacttgaaaatagcccataaaatccaaattgacacttcataaattactatataaactgatactatgttaggaagaatgcaggagaaagagaaaagaaggaaaagaataaggagattcttttaaacttgaagatactaaagacagaatacaataaaatgctgtgtgtgaactttggaccctagtgttttaaggaaagctataaaagacattaaggggacaaatgagagaaatctggatatgaataatatatgataatgtctgaaaattactgtttattttcttagatgctacaatggtattgtaccaactttgaggaatatgctgtgatattgaaaataaattgccatgtttacaattgactttattatggatcaatgggaaaaaagaagtagaaaaaacaaacactgcaaatgtcacaactgttaaatcgctgtatttttcattcatactatactttcaacaattaaaaaaatatatatatattttaatagagatggagtcttgct

SEQ ID NO: 658990 - DNA, 859 bp, Homo sapiens
ataggaccccgtctcataaaggcgggatccacgggggtgaaagacaagggccccccgcgtttaagaacaataccgggggcatggcgggggaaaacaacccggcagcgggaattggcaaagggccagacacaacagcgacggcgggtgattactacgcgggagcaccattgcgtctggcgagagctcacaagaagagagaatctccccccccgcgtctactatcggggcctgaaagagttattgaacccccccgccgagatagttccgcgccggcgtgcgccgaaaacagaagaagataattccctagcgcccttttcaagacaggtaaagggcaaaatgtgggggccccgtgcagatcacgccggccatggcgaccgccgaaactaggtcgggagttgcgcctctcccctatcagcgcccagcgcccgggtgttaaggggagcagaagcaaccaagggtagccctccccgcgcaaggtgagtggaagacacacacacagcggagacatagggccacactgcagtacgccccagcccacgcctcaaacaacacccgacgaggcacacacaggtatgcagtgtcctcggcaaccggcgtcgcgcacgataatgaggttctaccgcgcccacctaaggggtgcaaaaacccaaatttccacgcgcacgcattggtgtgtaaagcccgcctacttgtgaggcgagatcataaatataacgggggccaattgggagagattcttcaatgagtctagttttcaaaccgcggttcaagatcccttgaatggcggcctccggcttcatgttatcgcaacccggcccgcatttaacatttcaaagcgacccccttccccgcaaacaag

SEQ ID NO: 658991 - DNA, 257 bp, Homo sapiens
tgggtttatttgagacggaatttcacgcttgtcacccagaatggagtgcagtggttgcaaatcttggatcactccaacctctgcctcccgggttcaagtgagttcttctgcctcagtctcccaaatagttgggattacaggcgcccaccaccagacccagctaatttttttttttttatttggagatggagtcacactttgtggcccaggcgggggtgcaagggtgtgatttgggctcacggtaacctcggccctcc

SEQ ID NO: 658992 - DNA, 414 bp, Homo sapiens
  misc_feature (76)..(76): n is a, c, g, or t
  misc_feature (159)..(159): n is a, c, g, or t
cccattcttcttaaaaacaaaattaacccagcgcggtggtgcatgctgtaatccaactcttgggagggtgaggccnagattccttgaaccaaaggggttgaggctatgttgagctgagatccccccctggttctccacgcctggatgacagagtggagnctctgtttcaaaaaaacagaaaagaaaaaatagtttggttcttcctttttttaaatttgcaaatctcaggataaagtttgctaagtaaattagtaatggcctatagaaataactggccaaaaattgttccccctaaaacaatcgggaattgcttattggtttatgggaaactctttgtctttttaagacccctaaaagccttttggaacttgaggggttaaaaaaacttaataaatttgccctttccaatttcca

SEQ ID NO: 658993 - DNA, 303 bp, Homo sapiens
ttttttttttgagatggagtcacgctctgtcgcccaggctggagtgcagtggcacatctcagctcactgcaagctccgcctcccaggttcacgtcattctcctgcctcagcctcccgagcagctgggactacaggcgccggccaacacgcccggctaatttttcatatttttagtagagacgggtttcaccgtgttagccaggatggtcttgatctcctgacctcatgatccagctgccttggcctcccaaagtgctggtcacctattcttttaatgttcaactatttcttactgcagtcgac

SEQ ID NO: 658994 - DNA, 405 bp, Homo sapiens
  misc_feature (37)..(37): n is a, c, g, or t
  misc_feature (42)..(42): n is a, c, g, or t
  misc_feature (44)..(44): n is a, c, g, or t
  misc_feature (46)..(46): n is a, c, g, or t
  misc_feature (113)..(113): n is a, c, g, or t
  misc_feature (284)..(284): n is a, c, g, or t
  misc_feature (289)..(289): n is a, c, g, or t
  misc_feature (291)..(291): n is a, c, g, or t
  misc_feature (293)..(293): n is a, c, g, or t
  misc_feature (305)..(305): n is a, c, g, or t
  misc_feature (376)..(376): n is a, c, g, or t
  misc_feature (387)..(387): n is a, c, g, or t
cacaatgctctacagagaaagctccggatgccggtgnggctncncnatggccttctctcgacctacggacaaacttgagcgctcaggacttcaagtctcgcggacgtgccggngaggagcgtaactgtacgaggtgagaatccgtgcatttgacccaggttaaccctctgccagaggctcgacacccacaccttcagtccccggcctcgctttggagtccttggaaatacgacacaggaagtcccgcccgaccgggcaaaggccaggggcggggcgacggcgancagananangaactttcccgngtttggggggcgggttgggccactgctgtgctgagtgcaacccccggaagtgagttggctgccaagtagtnaaagctcagcntgggtcccgggaagcctt

SEQ ID NO: 658995 - DNA, 199 bp, Homo sapiens
actttgcagtcctcacatcacaaatagagtaaaagattcccaaaaggaaggggatccttttgactgccagacgcgggaaggaaagaatgaaattaaagaatatccttttaaacacacacctcgacacaattttccactctgctaagggatcacaaagactaagacgcgggcagactccccataagccacgcttataacc

SEQ ID NO: 658996 - DNA, 238 bp, Homo sapiens
tgggggccccgggggcccccttttaccttgaacccctttttttcccccccgggggggggttggggccccccctttttttttttgcccccggggggccctagggggtttggggcttattaaagggggggggggttggggggccgggcccccccccctgacccccccccccgggggttttttttttttattccctttttttttttggggcccctttttaattaaaccttttggggtttta

SEQ ID NO: 658997 - DNA, 227 bp, Homo sapiens
aatgcatgtgaatagctagcaaaaagatgtcaaggatgtcactgggagccctatctgaggggggtcatccatgggggcgagaagggatttgactgtacatgtgctatgtacggtaaatggtctttatgtactatgtactgttaagggtggataggtctgtcggtatcctactgagtgaggggtggctttggagttgcagttaatgtgtggtacttgaaggttgattg

SEQ ID NO: 658998 - DNA, 304 bp, Homo sapiens
gcttagattagcttcatagtccccgggagtaatcacaatgctgtattctattgtaaagtggacataagagtagtatttattttttttaatatagcgcaagtggtcaaaagtggtcaaaatggtcctcattcctcgatggtctctttataaccagtctcttgcccttcaaacagaggaaacctggcctccacataagcccatgtgatgtagccataggctaggtcttggactatgctgggcagctcagagatctctgctctaatctgccgcattgagtcacggtccctcagagtagcagtgtgtg

SEQ ID NO: 658999 - DNA, 343 bp, Homo sapiens
  misc_feature (22)..(22): n is a, c, g, or t
  misc_feature (221)..(221): n is a, c, g, or t
  misc_feature (232)..(232): n is a, c, g, or t
  misc_feature (249)..(250): n is a, c, g, or t
  misc_feature (281)..(281): n is a, c, g, or t
  misc_feature (287)..(287): n is a, c, g, or t
  misc_feature (289)..(289): n is a, c, g, or t
gagacggagtctcgctgcactncagcctgggtgacaagagcaaaacttcgtctcaaaaaaaaaaagaagtttaaatatcagacaggaagacacatacgaacaatggcctttctagaaaagagaaaacttaatgttagtattaggcctaatgagactattgagtagcttgttgagtacatgaaacatacactcacatcaaatatttagaagctaataaacancaattggaaanaaatggttacaaaattnnattgtataacaatgaaaataaaaattctaancatagnangtatgaagaaaactacaaaatttcttgagagaaatataacttcattaaatgagg

SEQ ID NO: 659000 - DNA, 1148 bp, Homo sapiens
gggaacctgtgctcagatgacacccccatggtgcggcgggccgcagcctccaagctgggggagtttgccaatgtgcttggagctggacaacgtcaagagtgagatcatccccatgttctccaacctggactctgacgagcaggactcggatgcggcatgctgtgcgagtggcaggcgtgcagtgaacatcagcccagacattctgcacccaggtaggatcctggaggccctggctgatgccctactcatgcgccaggacgatagaagacaagtcctggcgcgtccgctacgatggtggctgacaagttcacgcgagctccagaaagcagtggggcctagagatcagccaagacagacactggtccactgccattccagaaccattgatgaaagactgtgagtgccgaggatgagggacggcaggactcgccacaaggtcaaagagtactgtgacaacctctacagctgactgtacggagagaatagtgatcatgtaccacatcttgccctgcaatcaaaggagctggtgtccgatgccaaccaacatgtcaagtctgcccatggctcagtcatcatggggtctctctcccatctcagaggcaaagaccaaccccatcgagacacctaattgacacatctaactggatcagcatgaggatgagaagacataaggtacggacgcaccatcatctctaacctggactgagtgaacgacggtgaaatggcaatacaggaaaatggaaacaagaacgcagacaacacgtaacactaagtgaagaatgcatgaagaacagcaaagaatacagatgagagagaccaacacatgaagataaagcaacataccgtgcagtaaacaactaacaaacgaaaacacaatgaaaacgcaacgcatagtgaagtgacgagctggagggaacaagaaaaataacaaacagcaaggcacacacaaaaacaagacaagaaggagaggcaacactagtaacagacgcggaacgagacaacgaacaccagagcaggtacacacaagcaggaccccagaccagaaagcaggaacagcaaaaacacaaacatcgcacaccacgcactaccacacaacctaagctcgaagaagacaacgatctacggatgcgaaaggccagagatcgagc

SEQ ID NO: 659001 - DNA, 1258 bp, Homo sapiens
  misc_feature (12)..(12): n is a, c, g, or t
  misc_feature (72)..(72): n is a, c, g, or t
  misc_feature (235)..(235): n is a, c, g, or t
  misc_feature (381)..(381): n is a, c, g, or t
  misc_feature (396)..(396): n is a, c, g, or t
  misc_feature (423)..(423): n is a, c, g, or t
  misc_feature (653)..(653): n is a, c, g, or t
  misc_feature (741)..(741): n is a, c, g, or t
  misc_feature (1048)..(1048): n is a, c, g, or t
  misc_feature (1085)..(1085): n is a, c, g, or t
  misc_feature (1096)..(1096): n is a, c, g, or t
  misc_feature (1156)..(1156): n is a, c, g, or t
  misc_feature (1172)..(1172): n is a, c, g, or t
  misc_feature (1240)..(1240): n is a, c, g, or t
  misc_feature (1258)..(1258): n is a, c, g, or t
gtcggtgtttgngtggtgaatatgtgagctcgtattggggagtgtgtgtcgttggtaatgtttttttgttgngcgagcatcgaggtcgtgatgaagtggtgtgtcttgtgtgtgtgggagggttatgtgtagaatatggcgtgtatggtggagtactgccctgcgctgcatcctgttggacgtgtgtgctgttgtatagtacgtggatgtctgtatagagtgtgcgtgacgtatngagtcgagtatcgtcggtgaatgctatgttgacgcaagcgtggttgtggagtgtgtatgtgaggtatggatgtgtagatatatgaatggtgagctggggttgtgatgtgttgcgatagaggattgtgcagtgttcgtgttgtggtntgttgttgcgaacgntagtggtgcgcacagattgcggtgtgntacgaggtgtagtgtggtgtggagcgatggtgaagagtatctgagagtgttgagtactagtgtgtgggtcgttgtgtatacatatctgtcagtgagggtgtctgcgtttgtagatcagtatgtagaggtgtcgtcagtatcgaggtagtatcatagtgtctgaatcggtatagttgatgcattggtgtgtgtgagtagggatagtcagctgtgactagattgatacgtgntatatgatgtagtatggattggtgcgttgatatctaggagacgctgtgtgatgcaggatgtgtgagatgtggggatgagcgtgtggtngagtggtctgatgtagtgagttgtatggtgatggtgtgtgactgatgtgtgatgggagttgtgatgatgttgtagtgagtatattgttggatgtttagtgtcgtgtgcgtatgtgtagcgatggatatgtatgttgtatgatggtgatgtgtgtgttgatcggagcgatatagatagtagtgtctggagtgattagggttctggatgattctgttatgatcgcgctcggcgtggcggtgtcgttgtgttgatgtgtgatatgatgtgctggatgatatgatgtagagtagcgtgagatgtgtgacgncggggcgctgtaggtgcgtgcatgatgtgtatgaganagtggatcggntggtcagacgtagtattgcgatgagtgcgggatgatgatgctgagatgctgatgatgagnagtaggtgtgtgtgangtagtgtgatagttattgcgagtaggatgactgtgagcgatgatgtgtgatgtcggtcatgtatgcgngtgcgtattgtgtgggtn

SEQ ID NO: 659002 - DNA, 445 bp, Homo sapiens
ctacaacgccaaggcgttttcttttttaccgaatccgaatcggtcgttagccccggattctaccaacgggacggcttgaaacggtttcatggatgaacgggcgaacgtttgccgatgcggtctcctaattcgtaaagcagccggccggcggtatctacaacggcgacgtgaatctcatgcgtactttctacatattgaccgcgatagacgcgaatcggtttttctttcatcgtcatcatgtccttccctcctgtttgtattgtaccatgaagtttgtcttgctttcctacgattttccggtaaagacgttgtttaacggttttttcttcttcggggttatatttagatgaaaaatatacttgaaggaggttttcctcaattttttcgctagtcatctcatcaaatatatatataaagtttaattgggtgcacgtctatagtttcc

SEQ ID NO: 659003 - DNA, 108 bp, Homo sapiens
ggtccatgatgttgtggcagtgagaattgcttgacacctgggagtgctgtgagtgttgcatgtgagcctgatattgctgccactgacactccatgcctgtgtgtgaca

SEQ ID NO: 659004 - DNA, 552 bp, Homo sapiens
  misc_feature (5)..(5): n is a, c, g, or t
  misc_feature (95)..(95): n is a, c, g, or t
  misc_feature (99)..(99): n is a, c, g, or t
  misc_feature (115)..(115): n is a, c, g, or t
  misc_feature (213)..(213): n is a, c, g, or t
  misc_feature (292)..(292): n is a, c, g, or t
  misc_feature (338)..(338): n is a, c, g, or t
  misc_feature (379)..(379): n is a, c, g, or t
  misc_feature (385)..(385): n is a, c, g, or t
  misc_feature (427)..(427): n is a, c, g, or t
  misc_feature (444)..(444): n is a, c, g, or t
  misc_feature (447)..(448): n is a, c, g, or t
  misc_feature (455)..(455): n is a, c, g, or t
  misc_feature (510)..(510): n is a, c, g, or t
taganaaaaatgggttaaataacaaggtaaccatttgtaatgagtctgtttagaataaaatagttcttcacaaaagttagaaaaggccatgagtnagtntatgactgtataaaanatatcagtgaggtcaaaatatacctgtaccaaaaagtagaacagcaatggtagtggatctaaatgtgtcctaaattaaattaaagcacataaagtttnagtgttccacaataaaaccattgctctgaaggaggaatctgtgggggttggttgggtaggttactgagaggggaaaggnccagggctagttaattttgttattttttattggggtttgttggggngggtttggggtgtggtgtgagggggggcattggtttgtggngggggnggggggggggggggattgtggggtggtgtttggggttggggntggggggaggggttttnttnntaatttntgattcgttttgggtgggggttgttttgggttggttttagggggggtgggtgggngagggggtgtgggtgttcgttgatgagttgtggttgtgttta

SEQ ID NO: 659005 - DNA, 362 bp, Homo sapiens
aaacaccatctctactaaaaatgcaaaaattagctgggcatggtggagggcacctgtaatctcagctactcaggaggctgaggtaggagaattgcttgaacccaggagatggaggttgcagtgagctgagatcacgtcactgcactccagccagggcgacagagcgagactccatctcaaaagagacaaacaaaaaaaacagtttgggccgggtgtggtggctcacgcttgtaatcccagcacttcggaaggcaagcgggcggatcacgaggtcaagagatggagactgtcctcgccacatggtgaaatccttctttactaaaatcaaaattatctggcgtgtggtcatcctctagtccagc

SEQ ID NO: 659006 - DNA, 560 bp, Homo sapiens
  misc_feature (337)..(337): n is a, c, g, or t
cgaactgcccccccccccccccaagtgggaaaaccgcaaaattttttcacaattttgtgagggggtttccccttgttccctgccaggatttaaaacccatgtgaatttctttgtgtgccaaaaaaaaaaaaaaaaaaaaaaaaaaaaaaaaaaaaaaaaaaaaaaaaaaaaaaaaagaaaaaaaaaaataagagggagcgcgcgcgcgccgccacaaatatctccctcccgagagaggccgccaaccccgcgcgacccacccccaccgtatagcatcagacaagacggggcggcccctattgagaggagagagtgcgtctattatatatatagacanagagagagacgaggcgcgcgctcgcgtactttttataatcaacacgcacgtctgctagcgcaggtgcgtgagagcaaaaagcgctgtgcgcacagatggcggaggagaacgaccaatcttgtgagtgcgaaacagcggacccacctacttatctgtgttgtggggtgggagagtgagagaaaaatagaggtgtgggagagaacatacccatcactcgaggaga

SEQ ID NO: 659007 - DNA, 852 bp, Homo sapiens
  misc_feature (339)..(339): n is a, c, g, or t
  misc_feature (644)..(644): n is a, c, g, or t
  misc_feature (845)..(845): n is a, c, g, or t
accagcgcaagagggaagcagagtaaaagcaaccccggccgcggagcggctcacggcacaacccccgcccccttctttcccccagacgccgaagtcgcgggcgcgcatggcgggcctggagggacggtacgcatcggcagcgccggccaacacctgcaggcaggacgcgcccgtctgcttctagcattgggaaggggggacacacggttacatcggcatggggggcggggaccagccggggcccaaagaaaagaagacagaacagcggccagcgggggggaacaacaaaaaagaccagaaaggccaccgggaagagaaaaaggagggggccagaaagcnccctgtgaaagccaacaccggggagagcagcaagaaccccaaagggcaggaaaaaggcacacagcaagaggcagacttgaccctgaacaaggaagaaaaaaacgaagcagaacacctgggggacatccacaggaccaacaagaacagtgaggagcatcgggcacgaaaagggtctggaaacatcacaccaaaccaagagcagtgggaaaaggcgaaagaaagcagtccccaccgggagtacccccctgctaccgccagagaggtggacccactccggattcctccacgccacccacacaccagtnggcagcctccctggtgtgatcccctgggcccgtttgttgtcgggggagaagacttagacccttttgggcctcggagaggtggcatgattgtggatcccctgagatctggcttcccaagagcacttattgacccttcctcaggcctcccgaaccgacttcctccaggcgctgtgcccccaggagctcgctttgacccctttngacccaa

SEQ ID NO: 659008 - DNA, 203 bp, Homo sapiens
ccatagaatgactacataccttccgggggttgatatgatatctatctcattttagttttggtttgcatttctctgatggtcaatgatgttgagcaccttttcaccttttcatatgtgtgtttgacatttgtatatcttcttttgagaaatgcatattcaaatctttcacccattgtttgatcagattgttagattcttttttt

SEQ ID NO: 659009 - DNA, 1237 bp, Homo sapiens
  misc_feature (1237)..(1237): n is a, c, g, or t
taaaacttccattttcagtttattttataaaccagaggggcacgtacccccagaaaagcaggatctgaaaaccatcaggggggcttgcttgaagtgatctgccccagccttctgacttcagaagtgtctcatgatccaagtggccatgtggggacggagctgccccttgataggatgcacttaagcatggtcaattcccctttcccccaaaggaatgtggagaaaaggagccaagaagtcaatgaatcccgggaatattggtcccaaaatccttccagggatgggtatacagattgggccaccatgtccacaattggtgactgggtcacggcggatctagtaacagagggatcggactgttggcggcaagaataataatcctgggatgatatcgcactccacggcggacatagcaaatcaccagcgctgtcacatttaccagtctgcaagacagaccacagcatatagagcgctatagagcaacagagatatcaccaagcggcccgacaaacattctactttagacaaccactatatcctccaataacagaagcgttggggcacattttaaccccaccacaactacattgggttaaaccacacacacctgcggtcacacagcacaacgcaagcaaacgcagcaataacgcggggctatcctacacacacgtcggtaagtttcaagccaaacaaagagctaacgggagaccaccactctgggggacaaacaccaacggggagacagagagcgaacaactaggaacccccaagcacaggagcaaaaacacggcgtgcgaacaacaaacaagtgggcggcccacagtgccatagacaaccagaggcgtcaccctataacattaccacagggaccatacagtgggtaaggaacaacaagacgaggagacggcccagttagagccaccaaacagaaactgtgcaaccaggacaaacaagatacaggccgcacaacacacaaacaacagtcgtcgggaggggaatcggaagcccccaaacgatcgacaacacgcccgccacgaggcttcattggacaagcccaacaacagacaccagctggacgcacgaaggcaacatctagtaggcaacgcgggggaccaccaaccccaaaacatgcagcaaggaaactatacagtcccaaacaccgcactaataaactccccaccacacagagcacaggatagcacagaagacaccacagaaaaacgttagagcggacgan

SEQ ID NO: 659010 - DNA, 288 bp, Homo sapiens
gggcctccttgttttccgccttgttgtccttttccgggtcggggcccgcccccccgcgccccgttaagggccagtttagcggggggaaccgcaacaacagcgccgagcgccttttggaggccgtggccccccccccccccaaggagcccccggaggccgggcccggccgggcgggggccgtggaaaaccagttctcctttttaaaattcccggggccgcccgggtgggcctcccctatctcttccgccaataagccctgttaattgtagcctgttttaggggctgcca

SEQ ID NO: 659011 - DNA, 779 bp, Homo sapiens
ttccctggcccctctggtcattgtcctgggtctcccccggttatgagtgtgcccaccggctaccctacatgcacatttctcgttgctgaaagaaagttgttttcgcgcgctttcttgttaaaactctgacgaccgcgtcccaatttttacaacgcttttgtgtaagcccccaatcgggcatgtaatagtcgtctccggacaacacacaccgcggttgtaggagcaagctttctcagttgcagtcaaccccccagcgagccacctatcaggcccggtcacaatcagcccgaacatgctcccgtggtggtcatacacacaaccacccgaggaccacccaaagtccttgcggcatccgctcgagagtccaccaatagttgcccccagattgttctcaaaggcccacaacggcagaattattctccccgctgaatcccgccccgcccccttcgatacatacacaggtggtagtaaccaagccgtcttgacaaaccttgtttggatcaccattgtgccctttcaatcttcatccttactacaaatgggggttcaatgatacacacaggggtcgatgtacaccgccccacgatagatacatgatatattctttaggtggcccaccttgggttgtatttatctgtgctgccgaggcaccgactatgttgatatgagtcttaaaccacgcccttttgggactgggaccacgtagtgcccccacgagcagctctcgtgcataactgttcgggcagcccccttagacgaaataaaacagcccacataac

SEQ ID NO: 659012 - DNA, 536 bp, Homo sapiens
cacagagtccacctagcctcagccccctaaactagggggataacaggcgtagagccgcatagcctaggccgcctattctaggtcataagtttttttctagagaaattttttttcatagtatagctatgaggcatagtctagtcttataagtccagctatggttagtagagcaagtaggattgtatactagtaatagtattttatagtatagtcgggcttttagtctagccagtttctttggttattttacaaaattgaataatgatttctggatcatcactttgtattatctgtaatttggtctctcccattaacaccattaaatagatgataactgattttatttccttctctttcaaaggaaaaccagtgttctctggacatgaaaagcaaactgaatacaagtaaacaagcagaaaatggacaaccagaaccacaaaacaaggttccggctgaggaccttacattgacattcaggtaaagaaaaggagattgtcgtagccatattaaattacacacaaaagagaaactattat

SEQ ID NO: 659013 - DNA, 149 bp, Homo sapiens
  misc_feature (6)..(6): n is a, c, g, or t
gcttgnatgcctgttgtccctctagaggatccccgacaagcccatcgactggctcctggaccatattctgtgggtgaaagtctgcaaccccgagaaggatgcgaagcactgtgaccggcaggaagccaacctgcagatccgctatccgt

SEQ ID NO: 659014 - DNA, 574 bp, Homo sapiens
acggttaactagcgtagaactaaatctccacagtaaaggaaagtcaagcatatgcttattatacactcctcagattattattaaaaggagttacattttccttatggaaactcaggattctacaagcaatgctctcctcagtttcaccagtactgtgtccagtactatattgctatattcacagtaaaacggacttcaatttctgagtgatcagtctatgttttaagtttctgatgaaactaacatacaccttagtcaaaaaccacaacaattccctcaatctgtttgctgtgttattgttcttgtgtgtttttctgaggcttgggtaatgtaagtacttccccactccattgtaatctgcgattggcatctaaagtaattcattaatgtacaggagtagatgaggcctggcacacatagcagaaggtaatggttctataggtgtatcttctgtaatgcacattgggctagagaaatagaaaaatcacacgtaacaaaaacaaatagctttttggagcacacgggtgtcgcgtgactaggaccggcctacatgtagctatcatccttccccatt

SEQ ID NO: 659015 - DNA, 338 bp, Homo sapiens
  misc_feature (66)..(66): n is a, c, g, or t
caagcagttaatacagactcagtgtcctgagtagctgggacacaggtgtgcgtacatgcctcgtanatttttttggtatttggtagtagagacggggttttaccatgttggccaggctgttctcgaactcctgaccttgttggaccacccgcctcgagctcccaaagtgttgggactacaggcgtgaaccaccgcacttggccttgtattttttagtagaacccgggttttgctgtgttaggcttgtccaaaactcctggcctcaagtgatccacctgccttggtttcccaaagtgctgggattacaggcgtgagtctgtattaaactgcttggggta

SEQ ID NO: 659016 - DNA, 718 bp, Homo sapiens
  misc_feature (718)..(718): n is a, c, g, or t
gtcagcaaagagttcacttaaaattagtgcaggttgccaggcgtggtggctcacgcctgtaatcccagcacattgggaggccgaggcgggcggatcacgaggtcgggagttcgggactagcctggcaatatggtgaaaccccgtctctactaaaaatacaaaaattaggcaggcatggtggtgcatgcctgtactcccagctactcggtaggctgagacaggagaatcgcttgaacctgggaggtggaggttgtggtgagccgagattgcgccactgcactccagcttgggcaacagagtgagactttatatccaaaaaaaacaaaaaggagaaattcgagggcccggtggacgggtgctgtgctgtgctgtgtgctgtgccaattgccggaaattcccatttaccagcgctttgcgatttttccccagaggcttgctctgaacacaaaggggccaacaacaatggggcgggcggaaccgaacacccaggatttggaacgcgtgcccatacaggggcgggcggccgaatacaaggaggtcccgccaggaactagtcctaaagatcaacgcgcagttcgcgtcgaagacaactcggtaatcgggaaactgggcctaagtttaaataaacggtgtggctgtcacccaagattctcatccctggtggggacgttattgtcgcaaaaatctcctttccttctaaaggggcggacataacttn

SEQ ID NO: 659017 - DNA, 151 bp, Homo sapiens
tagaatagaatacaacagaatagaacagaaaagaagagaacagaacagaatataatagaatagaagagaacagaacaaaatgtaacggaatagaatgcaatagaatagaatagaatacaaaacaacagaatagaatagaattgaatagaac

SEQ ID NO: 659018 - DNA, 169 bp, Homo sapiens
cttacggtactctatagatagtgtacgtgtttgatttgttataataacagaatttgtctaggtccacagtcccaggctcctgagatctactaagtccttggaattcctcaagtgacagggatgcctttgttattcattatagagctcctggtgaccgtgcctgacattt

SEQ ID NO: 659019 - DNA, 895 bp, Homo sapiens
gggactcgcgtcgtgtgggatcccggacgtaggtagttgtgggccggttctgaggccttgttctcttaactttcccacctctaggccacgatgccgcagtaaccagacctggaggaatacagccgcgctttgccgagaagctttacctcgttgaccctatgaaggcacgtgtggttctcacatataggcattctgatgggaactggtgtgttaacgtaccagagtgatcacgtagttcggtgtataaaacagaccagctcaagatgtacagcaaccattgggaaattccacagtcaatctatggcgacttatggtaagccaagggaaggcccgcaattgtttacctattggaacctgatgtgagtggtttcgaccatggaaagactttgtgtccgggtacccttagggaaaggtacaatatctttcggaccttacgagaacttgtttgggacacgcacacagtacttttatgtacacctaaaggtgggctggtcccaaaggcctaaagagggctcattttcgtaaataccctcttataactaaccttttaggagacgctagggatgccaacatgtgtttcaggctaagaagagcccttaattctacctttgtggcaattggcccacgaaatggcatcttgtcttagacaccgtggcgaatacttcgctgttacggtcaacacctgtcattgttgtctcttgccacaattggtatcaggcaacttggacactgagattttaggaaaaccatttcttcttaattacgccacttcctttacacgaacataactgtgcccttcgcgcatcctgttttgggccaaacggttcggtgtgcccaaacttaatcggggtggggaccaccatctggcggcatcaccgggcccacgttaccgcgg

SEQ ID NO: 659020 - DNA, 233 bp, Homo sapiens
tagatgacagagttcactgttggacagtctggtctcaaattcctgaggatcaggtgatccatcctccttggtctcccaaagtgctgagattacaggcatgacgcaccacgcccgatctacgtatatcttattagtctttagttgtcgtcgtaagctatacgtcttctgggaacaaaaaaaattcacaagggcttaagaaataacattctggccatttttgcaagcacacttgt

SEQ ID NO: 659021 - DNA, 360 bp, Homo sapiens
  misc_feature (11)..(11): n is a, c, g, or t
  misc_feature (24)..(24): n is a, c, g, or t
  misc_feature (27)..(27): n is a, c, g, or t
  misc_feature (51)..(51): n is a, c, g, or t
  misc_feature (72)..(73): n is a, c, g, or t
  misc_feature (88)..(89): n is a, c, g, or t
  misc_feature (92)..(92): n is a, c, g, or t
  misc_feature (102)..(102): n is a, c, g, or t
  misc_feature (119)..(119): n is a, c, g, or t
  misc_feature (142)..(142): n is a, c, g, or t
  misc_feature (147)..(147): n is a, c, g, or t
  misc_feature (183)..(183): n is a, c, g, or t
  misc_feature (227)..(227): n is a, c, g, or t
  misc_feature (231)..(231): n is a, c, g, or t
  misc_feature (239)..(239): n is a, c, g, or t
  misc_feature (245)..(245): n is a, c, g, or t
  misc_feature (252)..(252): n is a, c, g, or t
  misc_feature (320)..(320): n is a, c, g, or t
tctcatttaanttttttaatgggnctnaaaattctgtgaaaaatttttggncaagttgtttccattaaaaannactgattttaaaaannaanaacttaaaantgccacacgcaaaaaanaaaaccaaagggggccacaaaanattcncctttccttctgaaggttttacgatgcattgttatnattaaccagttttttactactaaacttaaatggccaattgaaanaaanagttctgngaccgntcttccnccactgattaagagggggggggcagggattaggggtaatattcatttagccttctgagctttctgggnagacttggggaccttgccagccccagcagccttcttgtcc

SEQ ID NO: 659022 - DNA, 101 bp, Homo sapiens
tggtgattagaggatcctggtcagtgatctctggctagtgattctctgctcagctgagtcattttctattaaataagtcagcagtcataagtagatgtaaa

SEQ ID NO: 659023 - DNA, 164 bp, Homo sapiens
tgcaggttgaggcttactagaatgtgaaaacgtaggcttgggtgtaagcgacagcgatttctacgatagtcagtagaattagaattgtgaagatgataagcgtagagggaaggttaatggttgatattgctagggtggtgcttccaattaggtgcatgagtagg

SEQ ID NO: 659024 - DNA, 172 bp, Homo sapiens
tagcagccggtgatcatgcgtgccgatcaccaagtgttgggtgtggcagacctgcatgcttaattatgttcgcccgtatccccctgttgttaaatttgttttccctaaaactcttatgcgatggatggacccgtcctctatgcacagtgcgatgacaccacggcactccccg

SEQ ID NO: 659025 - DNA, 409 bp, Homo sapiens
  misc_feature (1)..(1): n is a, c, g, or t
nttgtgcgtgttgccccagcctgtcgcggtacagctcttgccatcccacaggccctgcccgacatctggaaggcacacagcctgaatgtatcctgtaagggccaggggcctgaaaaggtgccacaggccaatatcgttcctgttctcctcgctgttggggtcccgaaaggaaagatagcccccgtggtagaccacagcttgcacccccattcgcagcccgtgggaagaggcttgggccgcggcaccggcaacacactcgccttcggcacagaacgcggttccgctccggaacacagtgggcgcctgtcagcaccgagtccgcgagagaacaggtatcccccacagagtgtgtgctccctcatagcagagtctcacttgccgcggacagcggcccaatctcgctcgtgcc

SEQ ID NO: 659026 - DNA, 513 bp, Homo sapiens
  misc_feature (80)..(80): n is a, c, g, or t
  misc_feature (461)..(461): n is a, c, g, or t
  misc_feature (491)..(491): n is a, c, g, or t
tggaatagttgaagaagtctatatcgtgacccttagtcatttgtctgcagcccatactctcttctgaactgtagaccatntagtctccgtctagtccgagtacagtatttcagcttcgatatagacagatatctcactacacgtgtccaaagtggaactcctgtttaccctccccaatatgttcttccagcattctccccatcccatttatgggactgctgtgcttccagttgcttattgaatacacctctggtcatgtttttttcccgtgtaaaaaaatctggtccttcatccagttcatcagtaagttctgttgactctacctgtaaaatatattccaaatttcatctatcagaactacttccggtggcaacagcttggtccaagccaccatcctctctcatctggttctttattgacccttagaggctgtagtcctccccgcagcgaaaacaatccgngaaagtgttagtcacatcatgctctgctgngctcaaaccgcgcgggggctct

SEQ ID NO: 659027 - DNA, 171 bp, Homo sapiens
attcccgtcccaagttttttttgcccagtttttttagaatgaattttaccagtttatgaatttttgtaaacagaatgtgtcatggaaaaactgaaaaatttttccctaaagtggccttattggctgctggtgtgatgcccctgtaatgtaataaattttttaattgtttca

SEQ ID NO: 659028 - DNA, 911 bp, Homo sapiens
gcccactgctgctctgaaaagccatctttgcattgttcctcatccgcctccttgctcgccgagccgcctccgcggggcgctcctccgccgcggactccggagctttatcgccagagtcctgaatctcgcttttctttttaattcccgtgcatcggatcaccgggtgcccacaccaatgtcagacggcagcggtagaaacacagttcggaatatccaccaccagggactttacgggagaagacggaagtggttgaaacgaggcagacaatggaaagagaaggcccttgtaaaagggaagtggctaattggggaaaaattgggggagcagggaggttgaccatgtggagggtaaggacggaagaaaaggaggaaccgcagggtgggggagaaggaaggagggggggaagaaacgacgggggtgatggggtcgagggacacgcagacatgtgggacgattggaggcattgagcgaaacgctgaggtcaagactcaggggggcaaggccggcaagttgaacgaattgattgagggattgccgattgttggatacccaagaaagcagaagaaccggggaggcattggattaagaacgggcaaaaaggcaaacgtttaaccctacaaaaaaaaaagggggggcggtgacattattcaacccttacaattttccggttctacagattctacaggtgtggtcccccttacgagttaagaggaggccgggccggcacacgtggtgttatgtggcacaccggggaaatatgacaaggtgtttttcaacaagccaaacaaactagtgataaatttggacagtgtgggggaaaaaggacacacattccagggccgtgtattttttaaaggttcttaaaaggacattgtgtgatattcagtaaacattatattttggacagatg

SEQ ID NO: 659029 - DNA, 187 bp, Homo sapiens
  misc_feature (63)..(64): n is a, c, g, or t
  misc_feature (89)..(89): n is a, c, g, or t
  misc_feature (118)..(118): n is a, c, g, or t
atttcggcacagccagggctttttctgggcaccgagttttgttttaaaactggacctgtatanntgtaaagctatttatgggcccctgnactcttgttccacaccccaacacttccancattaagctgccacatgcggagagtttaatttttaacttattgacaaccgagagggttatcccgccgat

SEQ ID NO: 659030 - DNA, 448 bp, Homo sapiens
cccccccgcgctagcgatctctgattcgcgcctggctatttcagtacacaggcgttcattatttcttattgatatgcactgagtacgcttaaaatggaagcctcatgagggaaaaatcagaatggatgcttcttgatgtacgttcgacttgtcttagacagagtgggctgccatgagtcatagtgccctatggtgctggcataggtatcagcgatccaggacatcccccgttcgcacgtgccatgtctgcagcaggcacatcaatgccaggaccaataaagcccttctactgctagctccatggatgaacctccttgctgatcatacccaatgcctatcagtatagtcctcgggatgatcttaacaccagctaagcacccccaaaagaacatccccctacgaaacacaacccaaccaaccaaacaaaccaaccaccacacccacacag

SEQ ID NO: 659031 - DNA, 1414 bp, Homo sapiens
cagccgagccatatcggctcagtatcgccaggggggaatggtgaaggtcggtgtctacaggattgggtcgtatagggcgccgtggatcaccatgggactgcatatatatgagaactctaggtaaagtggtatatttgttgcgcgatcaatgacacccattctatatgaccatcaactacaatggattagacatagttcacaattatgtattccacccagtgtgtccaagagtatccgtgggcgaccgttcgaaggtgctgagaatcggggaagacttgtcgatcaatggtaaatcgcgcatcaccattcttccatggagcgtagaatcctctccaatagagtcaacgatggagcgcgattagcatggtgccgcataggatgatgaagcagtacggatggagaaaggtctcaccgtagggcggttcgttcacgcgacccaattgcggaagaaatggctttgggagcattcgagttttggccacggtggagagcgaatgtccaataaaaagcgggatacaatcatttcctcatagacacacaccatcatagcatagaaatgccacacacaatagtatccagatcatcggggtggtgaaacccaaatggagaaagtcatgaacaagcaagcccctcaaagaatccattcacgcaagttgccctcccttggcaaccaacccagagctggccttaagacagcccccgtgggccacaaggttcaatcccatggacgagacgttttggggtattccgtggggaaagggactcatggacgcaacaagttcccattgcccatcgactggcccaggcgcaagaaaaggatcttggtgtgcagtggggcccccgtccgggggaaacacttggtggggcgttgcacttgagcccgcggggagcctcctcccaaggaaccaatttctattcccctggcctcataactggagcggcctggccaaagggctgtggggcccaggggtcacttaccccttataaggatgacacacggggaacaccttcgccggggcgaacgcgaggcaaataccggggggtcccccacagggcccacacgaggtcagggggggacgacccagccgaacacatacgaccgcgcgcgatggaaaaaaaaaacccggccgccacaacatctagctgggccactcaccaaaaagggacgggggaagacaagaggcgaggcgcagaggggggggccccccacaaggcgggacgcttgggcgctgaaccagcaaagacacacagggagcgggtcgcccccgaaagagtaactacagagaaagcagaccacctatccacctacaagcgacaagaagaccgaggacggccgaccacgacagacacagagagataagcagccatacagcggagcctagcaccacaacagccaacaacggaacaaatctgc

SEQ ID NO: 659032 - DNA, 337 bp, Homo sapiens
ggtgtgtggtgactagaggatccgtgtggtcttgagagtctcaggactctgggctggcacatatgctggtggagtgatgtcgctcagagaaaggcaccaggaagtggattttttagtcttggtgcacagatgcagtgcagtgagatgttctgagctgtttgatcctctcgctgaagtcggacacccactggatgacggtcatgccggcagccaccgtgtagtggtgacagctccgaggcaagatccctttcactagctcgttgatcagcgtgcgcaagtagttggtctgcttcttctttccttcgcacacctggacgacatctgcaaggaacccacg

SEQ ID NO: 659033 - DNA, 694 bp, Homo sapiens
gctctcccggcggctcgctcgcctggtgtctctcccgaccatggagggggtcgcggtggtgacggcgggcagcgtaggcgctgcaaaaccgagggagctgcagccttgccgctccgcctccgctcctgtctaccccgaccgcctcaccctgcaccgcaggggtgagcgggaccgcgcctctgtctgagacgggggcagcccggctgccacacggcatcccgaagaacccctgagctggagaccgagagagcagacagggccggcatcagagagacaggctaccgcaggacggaaggacagaggaagccgcaccgcagaagacgagccgaggaggaggagggaacgaggagcacggaggaggaccagagacgtacacaattcgcggcagagcgcgaggacgggagagcacgaaagagaccacggaggccagaagagcgagcggcatggcatcaaccacctcagggcgcatggacccccagaacacaatgcggataccagtgcggcgcaaggagacacaacaagactgccaactcacaaatcaccacaaactgaactacaaagcgcaaagacgaaaggggccatcggcaggagcgagaacaactaacaggacaccagaccgccccaaagagacacatcgagacccacaccgacgaccacccgcgcacaaacactcacgcaggaccgaccgccccac

SEQ ID NO: 659034 - DNA, 359 bp, Homo sapiens
ccctatagattccatgcctacaccccaatccaaacctcctaaccaagcctttttggtgattattaacaaacctgattataaattataaattaaatatgcccaggtgcagtggctcatgccctgtaatcctcaacactttgggaggtcaaagcaggtagatcacctgaggtcaggagtaagagactagtctggccaacatggcaaaaccccatctctactgaaaatacaaaatttagctgggcgtggtgatgggcgcctgtaatcctagctgctcggaggctgaggaagaagaatagcttgaacatgggaggcagaagttgcagtgaggtgagattggccactgcactcagcttaggcaa

SEQ ID NO: 659035 - DNA, 584 bp, Homo sapiens
  misc_feature (514)..(514): n is a, c, g, or t
  misc_feature (540)..(540): n is a, c, g, or t
  misc_feature (551)..(552): n is a, c, g, or t
  misc_feature (556)..(557): n is a, c, g, or t
aaaaacccccccccgggggggaagaaaaaaaaaaaaaaaacccgccggggtttttttttctttctcccaaaaaaaaaaaaataaaatctccccccccccccggggggggggaggaaaaaaaaaaaaatgagacaaccccctttttttattttaaaagccccccctttttttttttttttttttaaaaaaaaattttttgtgtccaaaaaaaaaacccccccctttttttttttaaaaaaaaaaaaattttttttttttcccccccccggagaaaaaaaaagggggccccaaaaaaggggggcccctttttttttttccgcgcatttataagaaggagttttttttttcacacaaactttttttttcaaaaaaaaaagtgtttttttttctctaaaaaaaagtcacaagaggggggggcccccctttaaaaaaatgggccttttttcccaaaagggggaaaaaaatttaaaaaataaaattcccaaaggttacccagggcccccccaaagtctcngaaaataaaaaaatatggcaaaattnttggccagccnngccnnggcagaaaagtatctcgttgcgaattc

SEQ ID NO: 659036 - DNA, 166 bp, Homo sapiens
tcagctcgtaccgggataaggaaggcacaggaattacatccaaatgagttaataggaagtgaatataggggcaggcacagtggctcacacttgcaatcccagcattttgggaagccaaggtgagtagaacacttgagttcgtaagttcgaggccaggctgggcaac

SEQ ID NO: 659037 - DNA, 83 bp, Homo sapiens
  misc_feature (10)..(10): n is a, c, g, or t
  misc_feature (13)..(13): n is a, c, g, or t
  misc_feature (16)..(16): n is a, c, g, or t
  misc_feature (19)..(20): n is a, c, g, or t
  misc_feature (22)..(23): n is a, c, g, or t
  misc_feature (27)..(27): n is a, c, g, or t
  misc_feature (31)..(32): n is a, c, g, or t
  misc_feature (34)..(34): n is a, c, g, or t
  misc_feature (36)..(36): n is a, c, g, or t
acatctgtgnacntcngtnncnncagngggnngncnggacctacgagcagtacttcgggccgggcaccaggctcacggtcaca

SEQ ID NO: 659038 - DNA, 154 bp, Homo sapiens
  misc_feature (93)..(93): n is a, c, g, or t
cgtcggtttgccggccggacttcagggacagttgcaaatgacaacgagtagtgagcaacctgatctattaccagacgcgtactcgtgatgctncatgatgattcgatgctgggcttcgagtcctcacatgatctggcagaatcgcgtggcatgc

SEQ ID NO: 659039 - DNA, 172 bp, Homo sapiens
cacccagccagcatcatcagcactgcaagcagccagcactggcaaggagggtgacaaataagcggggacagaggtggaacggctcactgtccttgaacagaccttgaaaacacctggtgtaccgcccactgggagacatacacgtggcccctccacttctttctcctgactg

SEQ ID NO: 659040 - DNA, 164 bp, Homo sapiens
gctcctccttcgaccagcttccggtggtatttcgtcttttagccttagtactccagttatactttctcttgcgcttggcagggtatccacatttgccacaggtcgacttctgaaggtggtatgccttagagccatcagcgtgcggcacaacgtgtgcgtcttat

SEQ ID NO: 659041 - DNA, 1172 bp, Homo sapiens
atgtttctgcatacctaggacgatgttagtacgcccaaactgacgctcgtgtctcttgtggtatcgagatccggatttgagagtagaatcgacaatgaacatggctattagtgcactgtgacaatccactcttgcgaggtactacctccttaggatagtcctaggatcgtactgcgcatgctggttggagattcgtccgcataaggatgtcagaaagtatatagaatggacgaatagtgatggacgaattgaggatatgcgcaccgagtggttccatatcccctgtatgctatatgtctggggtatttttggagcttcagctcgatccgatttaaacgaactctcattgatcgtacgtcttatcgtacacataatttgagtcaaatattatgagatacacgggtcatttgtccatcatgtgtttacattattcagataacgtatggtacccttctgagtacatcaattggtatgttatctacccttttcaaatatagcataaaactatggaggcacaggatgcatccattgggcatcaaaccatagtttgcattgatattagaactttgtatgtgcgctagctcgagatatgataatagcgatggaaatagagagttcgccgtacttgtataagttacaattcacagaaggaaaatgtggggaccacgtaacggcgcgggacggcagtgccaggatagatccttcgctatcctgttgtgtctctgtgaccaggcaaagggatgtggggcgtggattggaattatccccaagtcagtataccatatacggacgcaatttgactttttttaccaccacacaacgtgtttggagtctccccccaattatgatgtcagaaagcccgcaataaaaagaataaagggagacggaaaggtaactatgtatgaaggaggagtaccattgtgtgtttataagcaagatggcgctacgagggtaataatcgtgggaggccaaatgataccgtgtaaaaatgagtttggagggcacttagatatacttgctatgctggaaacaacgagaggtatacgcaaatttgtatgtttggacgctgaagtatgacggatggcgatattgatgtctagtgtgttagagtgaacctttgcgtcgagaaatgctcaagtaaagcataaacaagatggccaatgttgataaca

SEQ ID NO: 659042 - DNA, 194 bp, Homo sapiens
gtagaatggtttggaacaatataaaacctgctttctgactgattgtggggtgaaggaaaaaagaacctatttttcgtgcatcatttaccaatcatgccacacaagcatttatttttatgacattttattttttcataaaattgctattgccaaagctttgtattaaaagaaataaataataaaataaaagaaga

SEQ ID NO: 659043 - DNA, 391 bp, Homo sapiens
  misc_feature (86)..(86): n is a, c, g, or t
  misc_feature (96)..(96): n is a, c, g, or t
  misc_feature (281)..(281): n is a, c, g, or t
  misc_feature (297)..(299): n is a, c, g, or t
  misc_feature (311)..(312): n is a, c, g, or t
taaagctttgccgcagaagattctggtctgtggtgttcttcctggccggtcgtgagaacgcgtctaataacaattggtgccgaatnccgggacganaaaatccgggacgagaaaaaactccggactggcgcaggagggatacctcattccagaaccagaactgcgaatcaaggttataaggttcccgtaacacagactgttgagaaggattcaactgccgaattcagaactcatcagctggggaacgacggtgataaaggttcccgtaaagcagactgttnagaaggattcaactgnnnaattcagaactnntcagctggggaacgagaatgaagacaacccattttgggtaccggaaagactcacccgaaaaatccagactggaccaagg

SEQ ID NO: 659044 - DNA, 161 bp, Homo sapiens
  misc_feature (124)..(124): n is a, c, g, or t
acgtaattggttgcaggaaggggtaggttggaggattgaatgtgctggtcaagaaccatgatacgggtaattaagggtcaccttgtaccactgtcttggcaaatacatgctttgacgacaccanagataagcatgtcagacagccatcaagtgtcgttggc

SEQ ID NO: 659045 - DNA, 761 bp, Homo sapiens
  misc_feature (173)..(173): n is a, c, g, or t
  misc_feature (175)..(175): n is a, c, g, or t
  misc_feature (259)..(259): n is a, c, g, or t
  misc_feature (275)..(275): n is a, c, g, or t
  misc_feature (277)..(277): n is a, c, g, or t
  misc_feature (279)..(279): n is a, c, g, or t
  misc_feature (288)..(288): n is a, c, g, or t
  misc_feature (290)..(290): n is a, c, g, or t
  misc_feature (313)..(314): n is a, c, g, or t
  misc_feature (318)..(318): n is a, c, g, or t
  misc_feature (321)..(321): n is a, c, g, or t
  misc_feature (330)..(330): n is a, c, g, or t
  misc_feature (334)..(334): n is a, c, g, or t
  misc_feature (339)..(339): n is a, c, g, or t
  misc_feature (347)..(347): n is a, c, g, or t
  misc_feature (349)..(349): n is a, c, g, or t
  misc_feature (352)..(352): n is a, c, g, or t
  misc_feature (354)..(354): n is a, c, g, or t
  misc_feature (362)..(362): n is a, c, g, or t
  misc_feature (367)..(367): n is a, c, g, or t
  misc_feature (369)..(369): n is a, c, g, or t
  misc_feature (380)..(380): n is a, c, g, or t
  misc_feature (391)..(391): n is a, c, g, or t
  misc_feature (397)..(397): n is a, c, g, or t
  misc_feature (399)..(399): n is a, c, g, or t
  misc_feature (406)..(406): n is a, c, g, or t
  misc_feature (411)..(411): n is a, c, g, or t
  misc_feature (621)..(621): n is a, c, g, or t
  misc_feature (629)..(629): n is a, c, g, or t
  misc_feature (632)..(633): n is a, c, g, or t
  misc_feature (638)..(638): n is a, c, g, or t
  misc_feature (675)..(676): n is a, c, g, or t
  misc_feature (680)..(680): n is a, c, g, or t
  misc_feature (683)..(683): n is a, c, g, or t
  misc_feature (686)..(686): n is a, c, g, or t
  misc_feature (692)..(692): n is a, c, g, or t
  misc_feature (698)..(698): n is a, c, g, or t
  misc_feature (700)..(700): n is a, c, g, or t
  misc_feature (743)..(743): n is a, c, g, or t
ggattttcatttctcgcgtctgccgtacttggtttcgcttcgctagtcccagaggcccagagtggctcgcctggagtctctgtggcgcggtttcctgtacctgccttgggatccggagggaggaagctgggacacccgggagtcaggaaatggactcggtggcttttgaggangnagatgtgaacttcacccaggaggagtgggctttgctagatccttcccagaagaatctctacagagatgtgatgtgggaaaccangaggaatctcgcgccncnanagggcaaananggaaggaccagcaacattaaagnncacnacnaacaccgcngggngaaanccacagangncanangcccaganagacncnaccaaaccaancgaccggccantcagcncngaggcancttcncgccagtttcgcaaatcagaatcgtgagcaagaaaatccctgcgagtgaaactcttgtgaaagcattgtatatggagaagtcagcatgggtcagtcatcccttaatagacacatcaaagatcacagtggacatgaaccaaaggaatatcaggaatatggagagaagccagatacacgtaaccagtgttggaaacccttcagttctcaccnctcctctncgnncacangagataattcacactggagagaaactctatgattgtnnggantgnggnaaaccntctttncnctcaaaagaattagaagacacatcatcacacacagtggatatncaccatataaatgtaagg

SEQ ID NO: 659046 - DNA, 105 bp, Homo sapiens
tacaagtctcctttgtctccaagaaaaattactgtaacactacaggttaccaaacgtgacccaggtagatggaaacagccgcgtgcaggttctccactagagacc

SEQ ID NO: 659047 - DNA, 131 bp, Homo sapiens
tatccatttgaatgtttgagaataggttgatcatcgtgtcggccccacgcacctctaatcattcgctttcaggcggaataaaactgcgtggggggtggtgcgtcgtcgtctgacgacagcaccagcttatc

SEQ ID NO: 659048 - DNA, 755 bp, Homo sapiens
gatgcccacgagggcccctgccagagagtcaccagctggagcgctgtatcgtaagaccagccagctgctaggagacatcgaatcaactggagcacacacacgcacgtagtagacatcactcgcaccagccctgcggccaagagcccgtcggcccaacttgatggagcaagtcggctcagcttaagttcctgagtgacaccgtcgagaagctcaaggacgaggtcctcaaggagacagtatactcagcgtccactggagtccacagtacccactgactttgccacattcccgtcatcagccttcctgagggaccaaggaggagcagcaggatgacacagtctacatgggcaaagagaccttctcatgcgcggctggtgtgtggacagcgacaccggctggtgctgacccaggagcagctgcacaagcttcacagtcgcctcatctcctaagcactcctgttcccctgctgtccccgttcgaccctgcagccctctaggtgccgcgtctgcccgatgcacagccacctcagccagcccccaggtagaaacgtgggttaagcatcttcgctgccccagttcagcttcactcgcaccctgtacagcagtcctgccccttcaccttgacccgggttcccccactcaccattcctggcatctgccataatttgttgttcaactgctccctccttcctgaggggcgtacagggcttgtggggggtaggctgagaccccataccaaaggggaagtgagtcccc

SEQ ID NO: 659049 - DNA, 477 bp, Homo sapiens
ggctcctgagtagctgagacataggtatagcctcgcgccacacacccagctaattttttaaaaacatttgtacacttgggaggctaaggcgggaggatcacgaggtcaggagctcgagaccatccgggctaacacggtgaaaccctgtctctactaaaaaatacaaaaaaattagctgggcgtggtggcgggcgcctgtagtcccagctacttgggaggctgaggtgggaagatggcttgatcctggcaggttgaggctgccgtgagccctgatcatgccactgtactccagcctgggtgacagagtcagagcctgtctcaaaaaacaaagaaataggcaaatacaagagatggaaaaaggaatcgaaagaatggccatgggattgcgcattagacaattggctttttaaaatggcatgtggttttgaaggacaggttgaattgggatgtttaaaatgcttagtgaaactaagactg

SEQ ID NO: 659050 - DNA, 113 bp, Homo sapiens
cagtgcattgagagcatgttagccgtgccaaccaacacaaggagcagcagctgggcctgaagcagcagattgagagtgaggttgccaacctttaaaaaaccattaaagttacc

SEQ ID NO: 659051 - DNA, 137 bp, Homo sapiens
tccctcccgacttcctcataacaaacaagagatggcaatagcagcagttctaccatgcccattggaattatcctttaattttacgagatccacttgtctgtaggcttacggaccaagatgtccaaaattattcgggc

SEQ ID NO: 659052 - DNA, 1182 bp, Homo sapiens
  misc_feature (564)..(564): n is a, c, g, or t
  misc_feature (787)..(787): n is a, c, g, or t
cgccctcgatgagaagaagaaaaagaagataggaaaagaaaggaaacaaaagaagtactcaccatctctgttgtgactcccgtcttttgtctgtgagattcatatggtaatgcacatccgtggtgttgtgctatcactgcgttggaaaggactgcgtcctcctgctagattacaaggtggtgttggtctttttgtggcgatgaaacgtggtgttcccacccgcgtatggggcacccctgtccacgacgagttcaccggagtaaatcggcgaagcgccccggactttgggagaagcttctccggcggcaaaatgggcatacaaagacagagaagggtcttccaaaggaatttctcggggccaacatttgctggggacacaccagaatggtcccccccctggaagcccgcttggcttcactgctcaggtggattatcctggaccatccacggccacattagcccccggttatgcccccgtattggattgccaccccggctcacatgcaagcaagatttgctgagcttgaaggaaaggattgagtccccctttctggtaacaaacgnctggaaagactggccctaaatttcttgagaagttctggtgaatgctgccccattgttgaataatggttcctggcaagcccacatgtgtgcttgaggagctttctccaggacttatacccacctcttgggtccctttgcctgtttcgtgatatataggagcaccagcaccagattgcgcgtgggctgtccataccaaagaccagtggcaccagaaagagctcgnctggggagactggccaagagtcacacccagttctgccccgagaaggctcacgaagggctataatgagatatttatccctctatacctgccacccccaccttcttaatcacgctggtggaagaaccggttctcacgaaactgtttgtttcacaattggccacatttaaagtttagtagctaaaaaagactggttaaatgataacacaatgcactcgtaaaacccttcacgaaggagaaaggagaaatgttttgtggagccacctttggttttcttttttgcgctgtggcacgttttaagttattagtttttataaatcagtactttttaatgggaaccacttgacccaaaatcttgtcacagaattttgagaccccctttaaaaagtttaatgaga

SEQ ID NO: 659053 - DNA, 149 bp, Homo sapiens
gatctctattcatggcaacctcggcctcccgggttcaagcaattctcagtatagcatccctggcagcttctgtgttcttttcgtacccggtgatggtaattgggtccgggggctggttcccatcgtccttatcaggaaactggatgttc

SEQ ID NO: 659054 - DNA, 518 bp, Homo sapiens
ataacctagaaaaatacattacctactttccatatatctacatccgtacatatcacactgtgacaacaagccttcattttcatgtcagtacacaactgcactctatcataaatgccacagatgcataatcactgttttcttgctctatatacacagctgatatacctattctaacgaatgagggagaggagtaatgcacaagaaactcaggccaatgggggagcaagaagaaaacgaagaagtgcagtgcatgcgtcatcggtgtttaacagtcagaagcgaaacagttcagaacaaggcctgccctgtcaaaagaagagctaaagacagttatataaaaattaaggtgggctttcagactggctaacacaacaacattccatgagtagatggtaatttatttttgtttatccatatcgttgggagcaaggacaaaaatgtaaatctacaccttgcttatcaaaattgccgaaaaaagaatgctctgccttttaaaaaagtatcatgatttagtagac

SEQ ID NO: 659055 - DNA, 398 bp, Homo sapiens
  misc_feature (147)..(147): n is a, c, g, or t
tgagacggagtcttgctctgtcacccaggctggagtgcagtggcgtgatcttagctcactgcaacctccacctcctgggttcacgccattctcctggctcagcctcccaagtagctgggactacaggcgcccgccaccacgcccggntaatttttaatatttttagtagagacggggtttcactgggttagccaggatggtctcgatctcctgacctcgtgatccgcccgccttggcctcccaaagtgctgggattacaggcttgagccactgggcccggccttcagttttcatatctggtaaagggaaggatcttaaggggatgaatttatggttatttattttattttatacattttcgtgagggcctaccatgggatggaccctttgctcaattt

SEQ ID NO: 659056 - DNA, 156 bp, Homo sapiens
gacatatacgaatcgagcctgtaccagtaccctagggatacagcgcaatcctatctagagtccatatcaacaatagggtttacgacctctatgttggatcaggacatcccgatggtgcagccgctattaataggttcgtttgttcaacgatttaaa

SEQ ID NO: 659057 - DNA, 108 bp, Homo sapiens
tctcttgttcttaaaaatgctgcagtgctccctatttcttaagagacaggctctctgtcacccaggtttgaagtgcagtggtgtgaccatatgctcactgcaaccttg

SEQ ID NO: 659058 - DNA, 940 bp, Homo sapiens
  misc_feature (37)..(37): n is a, c, g, or t
  misc_feature (91)..(91): n is a, c, g, or t
  misc_feature (107)..(107): n is a, c, g, or t
  misc_feature (111)..(111): n is a, c, g, or t
  misc_feature (115)..(115): n is a, c, g, or t
  misc_feature (119)..(122): n is a, c, g, or t
  misc_feature (150)..(150): n is a, c, g, or t
  misc_feature (185)..(185): n is a, c, g, or t
  misc_feature (188)..(188): n is a, c, g, or t
  misc_feature (194)..(194): n is a, c, g, or t
  misc_feature (201)..(201): n is a, c, g, or t
  misc_feature (223)..(224): n is a, c, g, or t
  misc_feature (227)..(228): n is a, c, g, or t
  misc_feature (238)..(239): n is a, c, g, or t
  misc_feature (247)..(247): n is a, c, g, or t
  misc_feature (270)..(270): n is a, c, g, or t
  misc_feature (293)..(293): n is a, c, g, or t
  misc_feature (297)..(297): n is a, c, g, or t
  misc_feature (307)..(307): n is a, c, g, or t
  misc_feature (319)..(320): n is a, c, g, or t
  misc_feature (323)..(323): n is a, c, g, or t
  misc_feature (328)..(328): n is a, c, g, or t
  misc_feature (331)..(331): n is a, c, g, or t
  misc_feature (391)..(391): n is a, c, g, or t
  misc_feature (402)..(402): n is a, c, g, or t
  misc_feature (445)..(445): n is a, c, g, or t
  misc_feature (456)..(456): n is a, c, g, or t
  misc_feature (465)..(465): n is a, c, g, or t
  misc_feature (487)..(487): n is a, c, g, or t
  misc_feature (516)..(516): n is a, c, g, or t
  misc_feature (566)..(566): n is a, c, g, or t
  misc_feature (618)..(618): n is a, c, g, or t
  misc_feature (621)..(621): n is a, c, g, or t
  misc_feature (639)..(639): n is a, c, g, or t
  misc_feature (643)..(643): n is a, c, g, or t
  misc_feature (665)..(665): n is a, c, g, or t
  misc_feature (693)..(693): n is a, c, g, or t
  misc_feature (766)..(766): n is a, c, g, or t
  misc_feature (771)..(771): n is a, c, g, or t
  misc_feature (784)..(784): n is a, c, g, or t
  misc_feature (811)..(811): n is a, c, g, or t
  misc_feature (813)..(813): n is a, c, g, or t
  misc_feature (815)..(815): n is a, c, g, or t
  misc_feature (819)..(819): n is a, c, g, or t
  misc_feature (832)..(832): n is a, c, g, or t
  misc_feature (905)..(905): n is a, c, g, or t
gcctatgacagaatcttatccttgtattcctaaactngacttagaggacaggccaggccccaataaacctggtctcaggctcctcgccgcntccgggtcctctgtcngtcnctgnggtnnnngaggggactgatgtggcacccttctgangtcacccacaccatgtccactgaggaccctgagtnttnccagcngttgganactgagcctcctagtccctgtnnggnnggtggctggnnaggaaggnctgctgctgtgtcagccaaacanacaatcctccctgtgcggatgtnagtncttgctcgtnccacccacaggnngcnggggngcngacatggttggcgcttttgatatgcaaagccgcaccttgttttactgagggtagacaatnggccgtccgcnccctgcctcacccctcttaagcatcaaagctcagacgtcagcngggcttggagngtcttggcntgggcggtgccagtgacaacanctgggtttccagccgccggggttccttgnccacaagatcaatgttaataattgggttagggtgcagggcccagtggaanggacggttgcggacggactggggggtggggggccagggcatggccacggagngcncctgcgttggtactttcnaganatggctccacatcctctgtggnacggtcttcagttcacttctcgaccagnttctccaaaaggagaataattccagaactgagagttacatagcattgatgatgagaaaccgtgatgtccagtnatggncctccaaccagtnccaagcaaactcagcaatcagctggtntngnaggnaggagtatttgancaggaactctctccactgcttccacgtaggctccttaagatccagaagcttggtgacgatgtcctccccaganctgtcttcttgcagagggcagatggtgtggatgat

SEQ ID NO: 659059 - DNA, 159 bp, Homo sapiens
  misc_feature (35)..(35): n is a, c, g, or t
  misc_feature (63)..(63): n is a, c, g, or t
  misc_feature (67)..(67): n is a, c, g, or t
  misc_feature (69)..(69): n is a, c, g, or t
ggatccggttgcagtgagccgagatcacactattncactccagcctgggcggcagggcaagantctntntcaaaaaaaataaaaaactgaccatctagtccttgtaatctgggcaccctcacacatctccttaaccacgcttaatctccaaataagtac

SEQ ID NO: 659060 - DNA, 354 bp, Homo sapiens
taagagtaatcaaagacattgtatttttttttcagtaagatcaagtaagtcattccaaactgtctggcgtcctgtcccaaaacatctctgaacttctcagttcaagaagtaagttccagaatttatttggcaaaggtagcttatgttcacagtactgtctctggttttccagtctgtctcctagtcataggcccctaaagtccaccagcccttacacttccggctgcatgcttgcaaaatctactatgtagttctgattttgtaattttcatttcaatgagcatgaaaacttttaatactgaacgtccagaaaagatcttgttttcttttattccctttcctttaggtcgacgc

SEQ ID NO: 659061 - DNA, 1131 bp, Homo sapiens
ggtcaaccggccctcagtcccagctctcacccaatgccaaggagttcgtgtacaacggtggtggctcacccagcctcttctttgatgcggccgatggccagggcagcggcaccccaggcccgttatggaggcagtgggtgctggcacctgcaaccagccagccagctttgcaccatggcccaggtattttggcaggttggttgccaaacagcactcttccatggcagaagacgacccttatgtggcaggcctcaagctcacaacctgcaacaccatgcagtcatcccagccagccagttccagcaccgtgagtgcatggccaacatgacccatcatacctgcccagtggggccatggagcacaccaagcaacacagcaacacagcagcaaaggcacacaggccaaacaaaacagcaggcacaccagcaaacaatgtacaaacaagattttcgcatctatctcactcttacttctagaacaacaagatccagcccaggcacaggaatgggagggccctgcaaaccgcacccaagtgctgttccactcaccacacttaccgcatcgcccaccggggccatgatgaaatatccatcacccgggatacgggaaccaggggcaacacaactactcacacatctcaacacatcacaccccacacactagacctacaaacgggacccgctacccccatactatacacacacatacgcaaaaactagcagctggcacccccccatgagcgcccaccgacacagtgggcaccacaaatattgacaaacaccttgaactgacccccgccagggactccacacacacaaaaccacacacacacgaccaacgacacgccaaccaacccagacaccaagaaactaacggcccaccacacacgcatccaatataggcgcacagacccacgaccccccgcccccactcagaaacgcacatcaaccacccatcacccccgcgacacaacaagagggaacaacaggacgcggcccacaggggtcacacatcgccccccctgagtcaaccaccaagcagtataactcagcacgaacctacagaacagacaatccacagaccatcgcgccacgagcgccacaacaacaccactcgagcccacccttgaag

SEQ ID NO: 659062 - DNA, 429 bp, Homo sapiens
aagccttccccttatcctccctgtaacttgatccatttctaattatgtagctctttgtcagggagtgttccctatccaatcaatcttgcatgtaacgcaagttcccagttggagctccagcctgacatcaaaaaaggcagttaccattaaaccatctccctggtgcttatgcttttaattgccacctctaacagcaccaaattaaaatctctccactttcagctgtcttttggaggaacgtccgtataaggttttaatttagtaaaccaaacctatgcatggtttaaggactagtcaaaccttaccaacttcttatttttagaaaaaccagcacttggcagccttgtggatgtcaaacaaagaaagtcacagggccaaaccctggggtctttgaggttgcacactttttggaccaaataaacttttttt

SEQ ID NO: 659063 - DNA, 420 bp, Homo sapiens
  misc_feature (151)..(151): n is a, c, g, or t
  misc_feature (157)..(157): n is a, c, g, or t
tgggactgcaggtgcccgccaccacgctggctaattttttgtatttttggtagagacggggtttcgccgtgttggccaggatggtctcgatctcctgaccttgtaatccgccagcctcggcctcccaaagtgctgggattacaggtgtganccaccncacctggcaaaatgctgttctttaagtcagcgaactgaaaaagtaaaagactgctgggtgtggtggctcacacctgtgatcccaacactttgagaggctgagggggaaggatcacccgaggtcaggagtttgagaccatccttggtcggatggcgaaaccctgtctttactaaaaatacaataatttatctggggcgtgttggtggtcacccctgctggtcttcagttgcttaggggaggcctgatgtcaattaaaaaataat

SEQ ID NO: 659064 - DNA, 242 bp, Homo sapiens
gacgatgcttatactgtggtgtaccgtactccaatagcataagccaagtgaataatggaactttggcgtttaaccagaacctgcggggttgtgttcttttgtcttctatcaccaaccactcgtttctgctaccaaacgttctgctactgagcatggctcagtgttccaaaggagtgctgagttcaagatgtgccatgccagtataatgctacaacaccttagtaacctacaagaaggaacac

SEQ ID NO: 659065 - DNA, 543 bp, Homo sapiens
ccactaaaagggatagacgatggtatgtggggtggaggttatacatacatacataatgccatgaaacaaaaggagaccacctctaacttcttcatgataaaggaaaaccaagcccacactcctgaaactcactgtcatctcaacgtgatagggagcactacaggagagaagggagctcttcaaagggtgagtcagcatatgccaggctggtggggatgcacagcaatgcctatgaaccccctaggatatagttagtgccctacactctcaggaatttcctagatctcctctatggctagatgcctccttttactcagaatgtgttacctacatccaactccccttggataatgccagtcccagataccctgtgtcattgaatacacacttattgattatcttctgttccaagaaactccaactgctaagaacttaaagatgaatcacactttccctcttgctagactattcatttgctaggacagccgtaacaacacactgtagactgtgtgacttagacaaagggacaacccggtgtaccct

SEQ ID NO: 659066 - DNA, 114 bp, Homo sapiens
atgatgaatcatgctaacaggataggatcaccaagaagcagcaatactaaaagtaggagtctccagtggggagtgcaggctcttgttggttagaagaggctatatcgtgccggg

SEQ ID NO: 659067 - DNA, 329 bp, Homo sapiens
cagtgcgggaagccttcaaaccacttcctttccaaagcaaacactgggtgtttacagtttaagcaggaaccatatccttttcaatggttccttttgctttgctttgtgttgtgagtccagtccctacatgcaaaatgattaagttaggccagttttaagagggcaaaaaactggggtaggttgaaaaatggtaacttaatgttcagatggtatcaaaccacatagaaacccaggctgccaaggcacaggactttttagcgcaacatcaacgcagagtttactagagtcttccctttctcctgacacagagaacagttgattgtcaggtc

SEQ ID NO: 659068 - DNA, 191 bp, Homo sapiens
tgaaatgtaagctcatattaattattttagaatgtgacataaatgcgcagcccactcgggaccaggggaaggttggtaggtcagctgtaacagattgctccagttgccttaaactatgcacatagctaagatacccaatcttcttgtacagctttgaacaaacgtgcacttgttttcttgatccccaccct

SEQ ID NO: 659069 - DNA, 324 bp, Homo sapiens
tgcccttagctgattagtttacaacagacggccagatgcaatgccgtacgttctcctacaccgaccccgcccgagggctcggtcgtaggctgctgttatttcatggctgccgaacgcgtgactgtgacctagtcatcatagccgaagaggcacgtagcgattaggcccagtacccctgcgacgatctaggagtggtttcctctctcaacaaggacaccaatggaggtgatcaggtagagcattgccgctatgagggttcggaagaaatcactccagggccagttgatgaatggtatcttggtgtgcaggtcacacatgttgacc

SEQ ID NO: 659070 - DNA, 821 bp, Homo sapiens
ccgggtgtgatccgtcctgcgcggttgtctctggagcagcgtcttttatctccgtccgccttctctcctacctaagtgcgtgcgcacccgatggaagatcgatggacatggacatgagcccccatgaggcccctaggaactatctttacggttgtgaaccgtaaaggccgacaaagattatcactttaaggtggataatgatgaaaatgagcaccgagttatctttaagaacggtcagtttaggggctggtgcaaaggatgagttgcacatgttgaagcagaggcaattgatttacgagggcagtccagattaaatgtaacactggcaatctcttgaaaatgtctgtacagccaacggttttccctttgggggctttgatataacgccagccagtggtcttagaggttgaagtgtggttcagggccagtgcctattagtgacagcacttagtagctgtggaggaagatgctgagtcagacagatgacgaggaggaggcttgtgaaaagtcttaagttatatccttggaaaggcggttctgcccctggagcgtgggtagcaaggttccacagaaatgaggtaaaactttgtctgctgatgaagaatgatgacgactgatgattgacgaggattgatgtttgcagatgcttgatgtgaatgagtttgatgacttggggacgctggtgaaaaagctcctgtgaaaaatctataggaggggtttcggcccaaagggcaatagtaagtctttgtggggagattaggcttttatgccgaagtaagggagaattttttaaaggggatgttaagcaaggcggctttggc

SEQ ID NO: 659071 - DNA, 677 bp, Homo sapiens
ataactacgaaatgcctaatccgaaggattcccaatatcagcccgcacatcctaacggctaaagggtgcctaagacgtacgcgtatgtaggggtcgcagatgtagttcttttttcgggaaggctgataagggaggtggggaaaaggtttgggcgccgttatctggcttttagtgccggtggttaggatctggagggcgtttttaaaccttacttgcctcctttaattcttcgtgataagggtgggccgctgcccgcgccgcgctacgtacctatatacctttacgatacttatctaccgtccctctattcatttcgttcctctttagattatgtataggttggccttatcgaggaataaggactgcttgggattttcttagggggattaaagactttctcgtcgcgggttactgaacgtactcggataagcgtcgtgattctccttaaggctaccgtccgtgggccgggcgatgctttactaatcggctagagaatgtttgtgaaacgttatccggaatagcggttgggtacgaggaattctcctgcgattccgggatcgatccggaaagggggagaactccctgtgtatagaggtctcttccttacgtcctctaatggcggagtccgatgtgggccgtttctttttcggtgaaagtctcttttaaacgctatcctc

SEQ ID NO: 659072 - DNA, 344 bp, Homo sapiens
agcggtctccagaatgagggtcagggacatctttttagaggtgcaacaggagcgattatgattcaggatgcacagcactgctaactgcagcgctcaagtagcgccacatggcgattcatacagcacgaatggtagtagtggtgttcagatatccagctggtccagctccttcaaggtgcattgcttgtggaccacatttacttcttgcttggtcttctcgctgggcctgtttgctggcagtgacctgttgaatgggcatgggcctcaggctccattgtgcgcttgccttgggctcttggtaatcttgatgcttggctagaggcctcaatgccacttatgagcgc

SEQ ID NO: 659073 - DNA, 170 bp, Homo sapiens
ggggggtttttttttttcgggggggggggggggcccgggatttttttttttccccccccccccccccagggtttaaaattttttgggccccgtttttttttggggggggggcccggggaaacccccggggggttgttggctcaaataaaaaccccccggggcccccggga

SEQ ID NO: 659074 - DNA, 116 bp, Homo sapiens
gtgtcgttatatggtcgcgacaacagctgcattatgtcaacaagatacgcacgaaggtggacgaactgacccagattatccgcgacgcttccaaggcacgggcccctctctcgggg

SEQ ID NO: 659075 - DNA, 204 bp, Homo sapiens
gggtgaggcggccgatgcacacgtcgaggctgcgcaggccgagtgcgtggccgactttcttggtgtatttgtattcttcggtattgatggagtggccgccccagcacaccacgatcttcggctcgatgcccgggcgcagggtgcgggcgttgcgcagcaggtggaacacgtagtcggtgatgccctgggaactgctcaggtcga

SEQ ID NO: 659076 - DNA, 104 bp, Homo sapiens
tttcaggcatgatcctttgttgtgtatttatccagagtgaaagatgtttttgtcgtaaccatcttgcatcgtcttagactccccattaaataaagtttccgaca

SEQ ID NO: 659077 - DNA, 904 bp, Homo sapiens
  misc_feature (904)..(904): n is a, c, g, or t
aagtattgatggtcatcttggtctgctattaggtgccagacacctggctgctgaattgttttttccctcaccaaagtgtcattggaacgccagctgggaggacttgagggaaaagaaaatatatgacaataggcagtattgacacatgtttaaaatctttttcacaataaaacaagaacacccaagtgtcatattgttaaagttggaaatctataggtttttcttttttttttttttttcttttttggatctctagatttcagggccagaacacaaattcacgtttctggtcctaggacagggaatgggtgacaaaagggattatactattttaataacggggaacacttctcaaactacttgtgtttaccccaaattctgggcttctcaaagcacacatgaattaaagcacagtatcaagggtgatgccctatgacaatgtttcaacacacactgtgaaatttaacgagaaatttcagttcttcactcaggaaatgtgcggtattctctaatgtactttcatgcggcagagatggagcctctttaaacagcttggggataattatagcagcccaagaagtttatctgcaaaatatatcatcattgggtccaatagatgacttttacatcaggtatattagaccttatgtgatataagctggtttaccttagaaaatattcttaaggaattatttctattaaaaaaagaagacatatacaaattagaaggaatagaaaaatataacaaaaaaaaaagggggggtacaatacaaccggagggagaaaaaccatttttgaaaagggccaagagaaataaaaacgggagaaaatagggaaaagcaggtttgtgaaacttggtggtggaaccaataatagaaatggtgacatgggcgtgatagaaagn

SEQ ID NO: 659078 - DNA, 612 bp, Homo sapiens
actgcgtgctgcagtgtgtgctggagtgccatgctggtgctgccgtcggtggctggccctgtcggcctgtgggatgatggaagctggacctgagccctgtcgccttgtgagcatgagctgctgctgcctgcctgcggtgctcgtcctcctccgtgctctgtgcctgcctgctgtgtgcttggactgcctgactgcctgcctgaagcatgaacctactgcctgactgtgccctgtgctggctggcttgagcctgcgctgctgcagcctgactgcgggaatgaagcgggcgctgggcaggcgaatggtgtgtgtggttgcgcctgaggaagatactttatcttgtgtttatggggttgtacattgccattccatttctcatcaaactatgtcctggaatacagtgccaaactgattttcttgaatttcgtaagagttccctatttcattgatttgaaaaaaccacaggatcaaggtttgaatcacacgtgtaactactacctgcagccagaggaagacgtgaccatttggagtctggcacacctgtccctgcagtctggtggaagaacgcccaaggcaaagaccagatgtggtatgaggatgccttggcttcag

SEQ ID NO: 659079 - DNA, 1287 bp, Homo sapiens
  misc_feature (422)..(422): n is a, c, g, or t
  misc_feature (621)..(621): n is a, c, g, or t
ggtctgcctcttggtcgggacccgatgggcacagtcagaagacatgagtccctgaaacgtgactggacgatggattcgttaattgcaaaaagctgttcaacgacggtactggccaggggcccgacgttggcgtggggctcggtgtaacagatgaagcccagaggtggctgaaggagtacccggcggatcgctaaggggccgcagaggcattggtcgccatcgaggcggcgccgggcatgcgacgccaggagcccacgaaggcttggtcgctccacgaatgcgcaggcacgcagtgccgtcgcctgcgtagacacgcgaacggttgtaccagagatagcgaaacagcgaaaggagataggcagcgacgcaggggccacgcggtctgccaggggcaatggcaaaggcccttgaatgggctgagncggccgttcatgaacgagacgctggcgcgcgggaccgatcgtggacctctgtgatcgtgaaattcgtgagcgagagagtgcggggacaccaaaagattgccaacgagaggagataacctggcgtgaagcagattgtttcccaagaacatgagtggaccgagagcgtgccattggacaggattggggagttcacctcgancattgtccaaagattgttccaatgcaatcccgttttgccaacccaaggggtaataacgccccggattcggagggcaacctctacttaacacaaggcggcggacttagacattggtgtcccttagactctgagagaaaacaaggtcgttgcgataagacactgggggcccccagggcgccacggcagtaagaaacggcctggggaacccgggtgttgccattagaccgcggtgttgcgacaggggacacccctgtgacttaagtctggaggagaaagagcggaagggaaaattacaaccgttgcacggagggggtcactacctttcggaactttcgccacgcggcacacttaagcgcaacagggcaaggagtatgttgcgaggcacaccagaaccccttgtcccaggtcctccaggattccattgccgctgggtcatttgggagacgcccctgggtggccccattacaccattaactttcggaaggggatttcctaatgccaggggccgagttaccccggggggggcgacaccaggctattggacccccccaaaactgggacaaaggcggcctcgttggacacaaatccaagggaggacttagcttacgaacatacgcatttgaacaacgggaccatcttccatttaccccggcccctgcgccttgg

SEQ ID NO: 659080 - DNA, 456 bp, Homo sapiens
ttatgtctgacccaccagcaagaccttacttcccgtcacttcgacctgtagacacggtctctgcccaggttaagggccactggcaataaggtggcctgagcgcgctgatcaacgccgtggcgcacgtggacgacatgctcaacgcgctgtccgccctggagcgagctgcacgcgcacaagcttcgggtggacccggtcaacttcaagctcctaagccactgcctgctggttgaccctggccgcccagctccccgccgagttcacccctgcggtgcatcgcctccctggacatgttcctggcttctgtgagcgctcgtgctgacctccaaataccgttaagctggagcctcggtagccgttcctcctgcccgctgggcctcccaacgggccctcctcccctccttgcaccggcccttcctggtctttgaataaagtctgggtgggtcagaacataag

SEQ ID NO: 659081 - DNA, 298 bp, Homo sapiens
  misc_feature (68)..(68): n is a, c, g, or t
  misc_feature (97)..(97): n is a, c, g, or t
cgactctaagatcccacattgcggacttacaacagaagcatgttctagcagcactaatgcggcctcancctcccaaagtacctttatatacagcatntttggcaaacgtgtagctagtcatatctcagactttctgtgaacaccctgaacactggggaggttagataagcatctttatgaggggttatcttgtactaccggcactgtttaaagacattgctgcagaatatcttggtatgcaggagtcaaacagcagtcatcatgccagctgctcttcaagatgacatcactcttacaa

SEQ ID NO: 659082 - DNA, 220 bp, Homo sapiens
cacggtgcatggatggtatgacagtaagccactcaattaccttaatttcaaaatcaattcactattactctaaagggctgctaggcctaggactgtccctaggtgtaaggtgacttctcttctagccctgtggcttctaaagatttctttttttttttctttttttggagacggagtctcgctctgtggcccaggcgggagtgcagtggcgcaatctcgg

SEQ ID NO: 659083 - DNA, 165 bp, Homo sapiens
tgtggaggcgacataaatggctgcgcaggctgctggatgagctgaccctgggcagagccgatctggagatgcagattgagaacctcaaggatgagctggcctacctgaatgaagaaccacgaggaggtagatgaatcgcctctgcgcaggcctaggtggggtggt

SEQ ID NO: 659084 - DNA, 937 bp, Homo sapiens
tttttttctattactttcccccccccctaactaagggactatgatggtggtggtttaaatttagctcttagggctatagctattggggtttactgtgcggggtccggctcccgtctcccgtggctccccgcggcccgcccgtggcggccccaggaccccctacgctactcataccagacccggcgagaaagatgggggctggccggagcgcagtgcttgtaaacgcggaggcacagggaagcgaggaaggtgagccggccgaaatcgcggcgcactgcgacgctgcctcccatcgggggcggactagggaactccgcgagacccttcatctatcctacacggtggcgggggcgagaaagaaaggacagacacaagtgcgagattagcgataccagcgagaagtgcgcggcacgtcgctttacgtcgcggatacgcatcgagcgacgaccacacataccacgcgaaagccaggacacacagccacaaagcccacagagtacgcggaccgtgaggacacgttggaaggaactgcgaacgggaacgcaagtgagaatacaaccacgcgggaccaggagaaatgatacgaggaagaagaacgggagcatggagcaatcacgcatatagataagcaggcccttaaacaaaagataatactcaaagaccaatcagggaagatcaagggccacgggagtataccatggatctcactatcgggagaccgtgcgcacccaaaagagacggagaagaagcacacacgataagccccgctgtgagtgtagcccccgggacagacaggagcagaaaagacaagccccgatacaataacaggagcaaatcagcaagaaacgaattgcagtgcaagccccagagctgaagaggggaaacaaggagagggcagggacccaaggaggggggccagggacaggggaggcactag

SEQ ID NO: 659085 - DNA, 113 bp, Homo sapiens
gggacgagctacctaagaacagctaaaagagcacaaccgtctatgtagcaaaatagttgggaagattttataggtaggaggcgacaaaacctacccgagccttgtgtatagct

SEQ ID NO: 659086 - DNA, 328 bp, Homo sapiens
  misc_feature (328)..(328): n is a, c, g, or t
ggcctgtggtggagtgaccagaacgcgaagtgtttatgtagcacattacactctcagatgaagagagagagatttatcagtctgtgacacattatgcacatgtgccggggcttttgctttgaccgcggcaaatttggtgccatacttaccttcttacaaatgcagggtgctccaatgggccctcacgaaatgatacacctggagaaccgtgaaagaaggttataagggagaagaagtcaaatctgtgctcaaggtcagatgaggaatgtgcgacttggccggattctttaacaggtcctgtgataacactgtgcacatgtttttgtgn

SEQ ID NO: 659087 - DNA, 1088 bp, Homo sapiens
tggcagccgacgggaaatcctatcaagtgccaatgcgtggcccagctctccgtgttccggtgtgagtcgacaagtgcccccaagtgatttatggtacaacttcattgaactgccctaccacggggaagagcatcagcgatgctgatggcactgccgactgagagctccagctccggctgtctggccatcatcgccaacaacatcagcaccaagaccatagacagctggatgagcgatcatggtgcccaagagggtgcaggtgatcctgcccaagtacacagctgtagcacaaacagattggaaggagccgctgacacgttctatggcattcacggacatgtgagattcatcaagaggcaaatttggcaagaaataacaaggtcagacaaacctccatgtttctcatatctgtgcaaaagaggaaaaatggaagtcagtgaagatggaaccaaagcttcagcagcaaccaactgcaattctcatgtgcaagatcatcgccgtccctggtagatagtagacaggaccttaactgttgttcatccgagcataatcctacaaggtgcagtgtattcatggggcacaataaaccaacaccctgacacgagtaatccacaagaaaccatgcaaaggacacgacgtactttggcaacgcagaaagactacctttcccggacatatttcacaacacctggttaagatactcgtgggtccgttggctcattataaaaactcgttcttgggcgaccagcacatgatgcgcaccggtacctcgcatgcaaggaccatcgcggggcgcacacacagccgcatcgcgtgaacacacgggcactcgcgacatgtaaacacaagggttccaagaggcccagaagcctctacacaccagagcggggccaacgtaaacaaccggggagaacctcagggcgacccaccacacaaaagctcacggagccaaaatgtggcgtgcccaaaaaccatacagacggagacatacaccgatagtagcccctttcaacaacagacgatgcacacccaccacagcgcacacaggagcaagccaaaccagtcgatggtagctagcacccaatcta

SEQ ID NO: 659088 - DNA, 1081 bp, Homo sapiens
  misc_feature (310)..(310): n is a, c, g, or t
  misc_feature (1043)..(1043): n is a, c, g, or t
  misc_feature (1046)..(1046): n is a, c, g, or t
gatttggcgggatctgtgtctctcgctgggctggcacaggagcttgggatctgtctcctctttcgcctcctgcaccttgggagccctgggctactctgtcacagcccctgttgccctgtgatctgtaggtccttggggacgcatagttaaggtgccaggacatcctggaagctgggaaatgatatgtattcatttcctaccaccgtagtggaagagatactatccctatctttacaactgatagcatttccaacagtaagctgtgagattctgcttgaaatcacctctcaaacaaataaaaaacagaccngggagacatgctacgctcattctgctcaagaaatagggcaagaaagctttctaagaccccgaactccagatatgcgatggggcaaatcctgaagcgtacatggctatctctcacagctaaagcatccctcacccctatccagcgcttcttacccctggcgcaagagaatcacctgcggggaggaaaactttcaaaatcccttaaacccaagttgtaaccgcacaactaaatcagaatccttggagctggatctgaaaaaaatacggttgaaagtcgtgcaggtgattacaatgtgtaggcaaaccagaaaaccatggctttaaccagcagcttttgttagaaatgatttctccaatgaatgtagaaacgtttgctgctgaattgtgacctttccattttacctgcttttcctgcaaagtatattttgcagacccaggcagtgctgctcgctctgttcctggttcacccagtgccgtgtgtgctcagtgcatcctgtgcacgggtcactgtgtgccctggcctgggtgagcatcattcttcggggagaaccttgatgaaaacaaagctgcattccaaaaagttaaaaccgtgctacttactgtactgaggtaaaaattaaaagacctaggggaactcttccaaaagttaaaacgtaaatacaatatcttgtaacattaatatacacctgacgatgtcctgagtgaacccgccccactttagaaccaaacaaacnttnctattattctacaatatcagttacggatggaatgc

SEQ ID NO: 659089 - DNA, 350 bp, Homo sapiens
  misc_feature (341)..(341): n is a, c, g, or t
gatcctaccacctcagcctccggagtcactgggactacaagcgtgcaccaccaccatgcctggctgattttcgtgttttttgtagagatgggggggtctcgccatgttgcctaggctggtctcgaaatcctgagctcaagtgatccacctgtcttggcctcccaaagtcctggggttactggcgtgcacggcaccctcataatttttaatgtgtattttgagggactgttgtgatcttccctttgaattctcatctccttagacgggatggaggatcaggaggatagtggttctcccacactctgtggaagggtagaggaccatctaacccttcctgttantcttgttta

SEQ ID NO: 659090 - DNA, 1050 bp, Homo sapiens
  misc_feature (310)..(310): n is a, c, g, or t
  misc_feature (792)..(792): n is a, c, g, or t
  misc_feature (801)..(801): n is a, c, g, or t
  misc_feature (804)..(804): n is a, c, g, or t
  misc_feature (880)..(880): n is a, c, g, or t
  misc_feature (888)..(888): n is a, c, g, or t
  misc_feature (899)..(899): n is a, c, g, or t
gatttggcgggatctgtgtctctcgctgggctggcacaggagcttgggatctgtctcctctttcgcctcctgcaccttgggagccctgggctactctgtcacagcccctgttgccctgtgatctgtaggtccttggggacgcatagttaaggtgccaggacatcctggaagctgggaaatgatatgtattcatttcctaccaccgtagtggaagagatactatccctatctttacaactgatagcatttccaacagtaagctgtgagattctgcttgaaatcacctctcaaacaaataaaaaacagaccngggagacatgctacgctcattctgctgaagaaataggcatcatagctgggaaacggattcacaagacccaggctgttccctacatatgtttcctcctccgacatcagttcatcagtcaatcaagccatgtgagagtggaggccttgtattccctattattcttgggcactctactccaagtaggaaaaggccaggaggtcctgttaaaggatgcactcagagcccgggctccctaacatatgagagtgctaaccagcaggtgtagacttttcaggagtgaagaatgaggcaggcattccaaacctggaccttcatcaccttttgtttcatctcaagacaattctgagggactgttttggagcgtgtctggaaggtgaaccttgaagaagagtgtgggctttgatgtgactcagttgagatctttcatggggaggcaggaattcaatgcccagaatctgggctggtgtctttgaggtcagtangttgcgtcnttngtatccaagtccattgttactaggttggaggctggagattctaaatggttccagaacatctctctgattcttttgngagatggngtctgaagacnatgttcgtctttgggaatcttagaaagtttccttggaactggaaaagctggctaagccaaaggtccattgggcttaccacgtgatattgggagataaccgttggggatttaaccctttcgtggaatgaacttgccggcggaataaaacttc

SEQ ID NO: 659091 - DNA, 1291 bp, Homo sapiens
tgatactaatctccctacaaatctccttaattataacattcacagtcattagaactaatcatatatcagtcatcattcttcgaaaccacacttaatcatgcatcatatggcgtaatcaatcaatcatgatgaggcaatcaagtgcagaaacgccatgaaacgctagagcaacatacttccctattcatgaccacccataggtagggctctcgttcaccactaagtacattctgcaccgcaatgtctaacagatcgacgaatcgagccttaaggcttctacattaaagtattcctactactacaaatttctataatggctccaagtaacttatcaaaagctcctagagccaaatacactttgactatgaacttagctcggaacgacgaaagtaagcgttatacattaccgttacacacgcattgacccatcggatacatcgggcaccttcacgagcattagttgtaacttgcgcggctaatacaggcgccacaattgtgtccagaacacgaccacgcgcaattcacgcatggcgggatccaaagttcagctacacccttaggccacgccaaaggtaacgtcattggacaacacttaaggtgccgcgcatcactgcggagtacttaaaacgtatcgggccacgtcccaacaaagctccgattttcctatctaaaagcacaccccatggatccacagacacagcgacccgctacgagcacttaagactcacattataccgctttggtaacggaaattcccccttaattcgcacggggccaactacacatctaattagagccaaagggcatacccagtccgtgagctccataaaccggaacgcagcacgaacaaagggaagccgtaatagcagaaattgcaggcatccacatttgcactattaaccttcctttcccacatgttccattgcgacaaccacattaggacccgatacggtaatgattagaccaccgggccgcacattgcatcgtaattccccaaaaagcaccccactcgatgagcaacggacttaccaacacaccggggcagtgcccaaggagcgaaattcgtacaccgcacgtagacagtctaggcccccatgacgtgtgaccctttacaccaatttccgatccaactataacgcttaaattgcctgggggacgtaatggcgacagaaaagccatgcacaacagaggtacccgggaactggggcagttctcaggacggatccgggatagttaataacaatctcgtccatgctaccacggggaccttgtgcgaaaacatctttaacca

SEQ ID NO: 659092 - DNA, 1022 bp, Homo sapiens
  misc_feature (217)..(217): n is a, c, g, or t
  misc_feature (590)..(590): n is a, c, g, or t
gatttggcgggatctgtgtctctcgctgggctggcacaggagcttgggatctgtctcctctttcgcctcctgcaccttgggagccctgggctactctgtcacagcccctgttgccctgtgatctgtaggtccttggggacgcatagttaaggtgccaggacatcctggaagctgggaaatgatttcttccagaccatggctggagaaggaaagaagnttgttgcagtggcaggaccaaggtcaaatgagttatagccaagtctacagtaagatgtggcagtattctgttttgaagccgggaccatgattggcaagcttgccacttggtcaagtgctcaccctctgaaaatgtcttccttggtctttgcctccagctgggtgccacaaactctgaactggattccaaggctttcatgaatgcacttatgtttgctgtggcagctgcattatgtcgtgggggatgtggatgcagaacctcacattctgtcgtcttgcttatgttactctcctttatgtttcactttctcaaatgaatgtcaagcaggtgattttcagattcaaaagttctaaaataaattgctcaaatttanacattatgtaagctgttaataaaatttctggtaggtgctacatatttgttaaaattttggttgtaattttaagctcactgtaggcagaaaggaatcattaagattctattctttttagtctgtatctaaatgaccatattttttattccaaatatttactttatactcagtaatgctcatggtatttgcgaaaattatattgtgcttttattgaaaatataaggcttgttttagctctgaaagctatattatagtcatatagtttatgatagtaatgataagagaggcgcacttattgggaacggtaatttggtggctttaagatattaattaatttttcatagagcaatattaaggtggaggttccggaaattggcttttaagcgggttcaggggggtaggaggccagaaggggaaataaaggatagcggg

SEQ ID NO: 659093 - DNA, 996 bp, Homo sapiens
  misc_feature (310)..(310): n is a, c, g, or t
  misc_feature (738)..(738): n is a, c, g, or t
  misc_feature (747)..(747): n is a, c, g, or t
  misc_feature (750)..(750): n is a, c, g, or t
  misc_feature (826)..(826): n is a, c, g, or t
  misc_feature (834)..(834): n is a, c, g, or t
  misc_feature (845)..(845): n is a, c, g, or t
gatttggcgggatctgtgtctctcgctgggctggcacaggagcttgggatctgtctcctctttcgcctcctgcaccttgggagccctgggctactctgtcacagcccctgttgccctgtgatctgtaggtccttggggacgcatagttaaggtgccaggacatcctggaagctgggaaatgatatgtattcatttcctaccaccgtagtggaagagatactatccctatctttacaactgatagcatttccaacagtaagctgtgagattctgcttgaaatcacctctcaaacaaataaaaaacagaccngggagacatgctacgctcattctgctgaagaaataggcatcatagctgggaaacggattcacaagacccaggctgttccctacatatgtttcctcctccgacatcagttcatcagtcaatcaagccatgtgagagtggaggccttgtattccctattattcttgggcactctactccaagtaggtatgagagtgctaaccagcaggtgtagacttttcaggagtgaagaatgaggcaggcattccaaacctggaccttcatcaccttttgtttcatctcaagacaattctgagggactgttttggagcgtgtctggaaggtgaaccttgaagaagagtgtgggctttgatgtgactcagttgagatctttcatggggaggcaggaattcaatgcccagaatctgggctggtgtctttgaggtcagtangttgcgtcnttngtatccaagtccattgttactaggttggaggctggagattctaaatggttccagaacatctctctgattcttttgngagatggngtctgaagacnatgttcgtctttgggaatcttagaaagtttccttggaactggaaaagctggctaagccaaaggtccattgggcttaccacgtgatattgggagataaccgttggggatttaaccctttcgtggaatgaacttgccggcggaataaaacttc

SEQ ID NO: 659094 - DNA, 842 bp, Homo sapiens
gggctgtacggccggaattttgggatctttgtcatcggcaaaggcagcctttttctggcctgacttatggctcgcgtttatttctaggaaaaaaaaaaaaaaaatgaaggaaagaaaaaaagcaacgaaacataaaacacagcaagcgccccggtgccccgcagtgacgtctgggcctcgacagagcccccgacacggcaccgcatggggccccagcactgcgagacaggtaacagcgcgcgcgccaacgaagctgaaagactctgcgaggagaacggagcggtataaaacatacgaagggtgcatgaccctttaacaacacaggcacagaatacataacgctgcagatcagcaagaaaaaaagggcgtgtggagacaacgctcggaaaacaacgagcagcgctattggccccacgtatagtggcaaaaggtaaactgagagacgccacaagacaggcgaccaatcgggcacgtcactacacagaccccaaggtacaaaaccgtcgtggcggtgaaccaatgtggcacaccaaccgtgggaaccactcacgtaggaaagagcaagagagggcgctcggagagaggagcaatgccccgacatcacgaggaaagcggacccgcaagacccacctgtggggagccaacgaagggacacaataaacgcgcgttgatggtaagagagcagtaaaatacgcgaacagctgctgaatgcatcgcaaacgcgcacacccgaacggaacaccagccacaggggaagaggtccaacaacacggtatttggaagagacacaaaaacacacgcacacgtggggagcccactccgacctacgtcaacatttgggt

SEQ ID NO: 659095 - DNA, 140 bp, Homo sapiens
atatgaaagacggataacaactctccaggcgggccccttacctcgagaacagactctttttggagattcagggtaacgcgtgtgtgtgtgtgtgtgtgtgtgtgtgtgtgtgtgcagtagaggaatggcggcgcagtggc

SEQ ID NO: 659096 - DNA, 987 bp, Homo sapiens
  misc_feature (555)..(555): n is a, c, g, or t
gatttggcgggatctgtgtctctcgctgggctggcacaggagcttgggatctgtctcctctttcgcctcctgcaccttgggagccctgggctactctgtcacagcccctgttgccctgtgatctgtaggtccttggggacgcatagttaaggtgccaggacatcctggaagctgggaaatgattgttgcagtggcaggaccaaggtcaaatgagttatagccaagtctacagtaagatgtggcagtattctgttttgaagccgggaccatgattggcaagcttgccacttggtcaagtgctcaccctctgaaaatgtcttccttggtctttgcctccagctgggtgccacaaactctgaactggattccaaggctttcatgaatgcacttatgtttgctgtggcagctgcattatgtcgtgggggatgtggatgcagaacctcacattctgtcgtcttgcttatgttactctcctttatgtttcactttctcaaatgaatgtcaagcaggtgattttcagattcaaaagttctaaaataaattgctcaaatttanacattatgtaagctgttaataaaatttctggtaggtgctacatatttgttaaaattttggttgtaattttaagctcactgtaggcagaaaggaatcattaagattctattctttttagtctgtatctaaatgaccatattttttattccaaatatttactttatactcagtaatgctcatggtatttgcgaaaattatattgtgcttttattgaaaatataaggcttgttttagctctgaaagctatattatagtcatatagtttatgatagtaatgataagagaggcgcacttattgggaacggtaatttggtggctttaagatattaattaatttttcatagagcaatattaaggtggaggttccggaaattggcttttaagcgggttcaggggggtaggaggccagaaggggaaataaaggatagcggg

SEQ ID NO: 659097 - DNA, 1040 bp, Homo sapiens
caccatgttgttagaccaggctagtcttgaattcctgacctcaggtgatccacccgcctcggcgtccaaaggtgctgggattacaggcgtgagcaactgcgcccaggctcgaaatgccaattcttgaataatacatttatcttcgtccaagtttaagatagtatctgtatcatagagctaaagtagcccatagtatagttctggcgttttcttcgactgaggttttctatttcgcttcactgatcattctagttttattttgggaaccatactgttttaattatttagagtttatgatgtgtcttaacatctaatagaatattcatggtgggtgcggtggctcacacctgtaatcctagcactttgtgaggctgaggcgggcagatcgcctgaggtcaggagttcgagaccaggctggtcaacatcatggagacgcccgcgcgagtcgacagatctccagggcaatcaccggaccgggcccagcgcgcatcaatcgcacaaactcgcgcaccagcgccacacaaatcgcgcgaaccgcgggaaaggcgaggaccgcccgcgaacccaagaatccgaccaaagccaacccccaggcctgacacacaccaaggacaccaccacacacacaccccaacacaccacccaagcacacaacacacaaaatgcacacacaccccaaggaccggccaaagggcgaaaacacgcaacccaaccaaccaaacacgacacacgcaccacgaacaaaacacacaagccgagaacaacacaaacacacgcgggacacacagggacacacacccacgaacacacgcccaaaccagaagcacccgccagaacgcaaaaccaccagcccgacgccacgaccaaacaacagcacagccacaccggcgcaagcaagcaaaaacgaagcacaatagaaaacaaaccaacaaacaaaaaatcacaaaccggccgacgagaccaagaacaaaaaaagaacgacaccgacagcgaccacaaagcgacaaaacacacaacaaaaaacaaagagagacaccagc

SEQ ID NO: 659098 - DNA, 156 bp, Homo sapiens
  misc_feature (25)..(25): n is a, c, g, or t
  misc_feature (101)..(101): n is a, c, g, or t
tcagaatcgagctcggtaccagcgngcgccttttttgggccctacgtctggatgccggggcttcacacaagaaccacctctcccgcagttcccaaggactngtcatttcatgttcttattttagaccggtttggtaaataaagctgtttcccaagg

SEQ ID NO: 659099 - DNA, 1024 bp, Homo sapiens
  misc_feature (185)..(186): n is a, c, g, or t
  misc_feature (189)..(189): n is a, c, g, or t
  misc_feature (193)..(195): n is a, c, g, or t
  misc_feature (209)..(210): n is a, c, g, or t
  misc_feature (218)..(218): n is a, c, g, or t
  misc_feature (231)..(232): n is a, c, g, or t
  misc_feature (242)..(242): n is a, c, g, or t
  misc_feature (248)..(249): n is a, c, g, or t
  misc_feature (256)..(257): n is a, c, g, or t
  misc_feature (260)..(260): n is a, c, g, or t
  misc_feature (262)..(265): n is a, c, g, or t
  misc_feature (267)..(267): n is a, c, g, or t
  misc_feature (269)..(269): n is a, c, g, or t
  misc_feature (271)..(275): n is a, c, g, or t
  misc_feature (277)..(277): n is a, c, g, or t
  misc_feature (281)..(282): n is a, c, g, or t
  misc_feature (285)..(289): n is a, c, g, or t
  misc_feature (293)..(293): n is a, c, g, or t
  misc_feature (297)..(297): n is a, c, g, or t
  misc_feature (304)..(304): n is a, c, g, or t
  misc_feature (306)..(306): n is a, c, g, or t
  misc_feature (308)..(313): n is a, c, g, or t
  misc_feature (315)..(315): n is a, c, g, or t
  misc_feature (317)..(317): n is a, c, g, or t
  misc_feature (320)..(320): n is a, c, g, or t
  misc_feature (322)..(322): n is a, c, g, or t
  misc_feature (326)..(326): n is a, c, g, or t
  misc_feature (328)..(328): n is a, c, g, or t
  misc_feature (332)..(332): n is a, c, g, or t
  misc_feature (334)..(337): n is a, c, g, or t
  misc_feature (347)..(349): n is a, c, g, or t
  misc_feature (356)..(356): n is a, c, g, or t
  misc_feature (361)..(362): n is a, c, g, or t
  misc_feature (365)..(365): n is a, c, g, or t
  misc_feature (367)..(368): n is a, c, g, or t
  misc_feature (370)..(371): n is a, c, g, or t
  misc_feature (374)..(374): n is a, c, g, or t
  misc_feature (376)..(377): n is a, c, g, or t
  misc_feature (379)..(379): n is a, c, g, or t
  misc_feature (381)..(381): n is a, c, g, or t
  misc_feature (384)..(384): n is a, c, g, or t
  misc_feature (386)..(386): n is a, c, g, or t
  misc_feature (397)..(400): n is a, c, g, or t
  misc_feature (404)..(407): n is a, c, g, or t
  misc_feature (411)..(413): n is a, c, g, or t
  misc_feature (415)..(415): n is a, c, g, or t
  misc_feature (417)..(417): n is a, c, g, or t
  misc_feature (419)..(419): n is a, c, g, or t
  misc_feature (421)..(421): n is a, c, g, or t
  misc_feature (435)..(435): n is a, c, g, or t
  misc_feature (439)..(439): n is a, c, g, or t
  misc_feature (446)..(446): n is a, c, g, or t
  misc_feature (448)..(448): n is a, c, g, or t
  misc_feature (454)..(455): n is a, c, g, or t
  misc_feature (457)..(457): n is a, c, g, or t
  misc_feature (464)..(464): n is a, c, g, or t
  misc_feature (474)..(474): n is a, c, g, or t
  misc_feature (545)..(545): n is a, c, g, or t
  misc_feature (593)..(593): n is a, c, g, or t
  misc_feature (599)..(599): n is a, c, g, or t
  misc_feature (605)..(605): n is a, c, g, or t
  misc_feature (611)..(611): n is a, c, g, or t
  misc_feature (652)..(652): n is a, c, g, or t
  misc_feature (657)..(657): n is a, c, g, or t
  misc_feature (666)..(666): n is a, c, g, or t
  misc_feature (668)..(668): n is a, c, g, or t
  misc_feature (671)..(671): n is a, c, g, or t
  misc_feature (688)..(689): n is a, c, g, or t
  misc_feature (695)..(696): n is a, c, g, or t
  misc_feature (698)..(698): n is a, c, g, or t
  misc_feature (737)..(737): n is a, c, g, or t
  misc_feature (743)..(743): n is a, c, g, or t
  misc_feature (749)..(749): n is a, c, g, or t
  misc_feature (752)..(753): n is a, c, g, or t
  misc_feature (759)..(759): n is a, c, g, or t
  misc_feature (767)..(767): n is a, c, g, or t
  misc_feature (771)..(771): n is a, c, g, or t
  misc_feature (773)..(773): n is a, c, g, or t
  misc_feature (779)..(779): n is a, c, g, or t
  misc_feature (784)..(784): n is a, c, g, or t
  misc_feature (786)..(786): n is a, c, g, or t
  misc_feature (788)..(788): n is a, c, g, or t
  misc_feature (791)..(791): n is a, c, g, or t
  misc_feature (804)..(804): n is a, c, g, or t
  misc_feature (807)..(807): n is a, c, g, or t
  misc_feature (811)..(811): n is a, c, g, or t
  misc_feature (834)..(834): n is a, c, g, or t
  misc_feature (919)..(919): n is a, c, g, or t
  misc_feature (1018)..(1018): n is a, c, g, or t
gatttggcgggatctgtgtctctcgctgggctggcacaggagcttgggatctgtctcctctttcgcctcctgcaccttgggagccctgggctactctgtcacagcccctgttgccctgtgatctgtaggtccttggggacgcatagttaaggtgccaggacatcctggaagctgggaaatgatanngangaannnaagaaaaaacgacnncaacacanaatagaaatatanntaaaaatttntcaatnnaaaaaannaanannnnanantnnnnntnaaannaannnnnaaanaaanaaaaaananannnnnnananatnanaaantnattntnnnnaagaaatagnnnaagaaanatttnnaanannannaantnnananatnanatccccaaaannnncaannnnaaannnananananaaaacagaaacaanaaanaaaaaananaaacannangaaaaanccacaaacanaagaaaagcacccccccaaaaagggaaaatgaaaggaaaaaaaacggcggtaacataaaagaaagatcttnaaggccccagcccgagccaaaaaagtaccggccaacgacgcaaccgcnggaaangcgcgnccaatnaaaccatcaaagccaggggtaatcaacaggggcggtctttncaggnagaaatgcntncgnctatacgggcatcagcnnggcgcnnantgaatgggggaagcaggggaagcataacgtgttttttancaaaanccatcntannagacanagcgtaancctnanaaaacncaacncncncanaactcaataatcncantccntttttttcgcaaatccaagcccncacaagaaggaggaccccacaaaggcagcaaaaaaacagcaaggaaaaaacggaaaaacgcagaaggagcgaagcaccgaaaagnaaacaagaccccagaggaaaaacggaaaacgaagaagagagcgaaaggagagaaagcaacgcgagcacgcaaacaaaaagggaaaaaaaaaaaaggagnggggag

SEQ ID NO: 659100 - DNA, 1586 bp, Homo sapiens
  misc_feature (1376)..(1377): n is a, c, g, or t
  misc_feature (1470)..(1470): n is a, c, g, or t
  misc_feature (1494)..(1494): n is a, c, g, or t
  misc_feature (1586)..(1586): n is a, c, g, or t
ggcacgagcggcacgagggcagcggccccggcccgcgtctgcgcccctcgctgtcccgcgaccccggcgcgggtgcctcgggcccccctcgcgcgccgccatggtgggccggctgagcctacaggatgtgcccgagctcgtggacgcgaagaagaagggcgacggcgtcctggacagcccggactcggggctgccccccagccccagccccagccactgggggctcgcggcgggcggaggcggcggagagcgcgcggcggcaccggggacgctggagcccgacgcggcggcggcgacccccgcggctccgagtccagcgtctctccccctggctcccggctgtgcgctgaggctttgtcccctgtcctttggcgaaggagtggagtttgaccccttaccaccaaaggaagtaaggtacacctccttggtcaagtacgactccgagaggcacttcatcgacgacgtgcagctgcccctgggcctggcggtggcctcctgcagccagacggtcacctgtgtccccaatggcacgtggcgcaactacaaggccgaggtgcgcttcgagccacgccacaggcccacccgcttcctcagtaccaccatcgtgtaccccaagtaccccaaggccgtctacaccaccaccctggattacaactgccgcaagacgctgaggaggtttctgtccagcgtggagctcgaagccgcggagctcccgggcagcgacgacctctctgatgaatgctgacccagcaggctgggctggggtcggaccggctctcccgctgtcctgcccccgactgccctggccaagctgggcgaccttacccttcacgtcattccagccccagaggagtctaacctagagatacctccaagcgcggccgggggaagagaaaaaaaagaaaaaatcactgcatctcataattattgagatctttgtgttgtaattttcaagctgtttttagagggaatatatgtcctggtttgctgctgtgttgtttccccaaagtctcaatcagatgaggcaacaaaaagaccaccagaattgcaggaaagcagcagcagtctgggatagggaggggggaggagagctctccctccgtggtcagtttgtcagaagaaaagcatggaaaaagtgagatttaagaaatctcagccacgggtgtcttcactgcacaaaagtggtgctaattcagtaaacagtgacacctgtgtgggttcaatctgtggagagttgagttccattcctttgtttttaaatttccacctccatttgtgtttcctattaacctaaactcttgtaattctctaaatcttttttcatgatataaaaaaaaaagaaaatcccaaaccacaatttaagatgcctttttttnnaaaaaaaaggttctccgtgttgccacctgctccgggaaggccaggccgatgggcggccaggtttgggagcagcggcttcggctccgattgcgntccgtgacgggtcaggttccaagnacaaggccctgagaacggcgccgaccccttggaacctgggagccggcgccgcgcggctccgggagggtcccagaggggggtttggggttttn

SEQ ID NO: 659101 - DNA, 601 bp, Homo sapiens
  misc_feature (323)..(323): n is a, c, g, or t
  misc_feature (326)..(327): n is a, c, g, or t
  misc_feature (363)..(363): n is a, c, g, or t
taaaaaaattggttcaggatgaacttgcagagcactcttccacagaacatggttaggttagccctgcctgacttctagcaattgctaactatacaccttgcctgcctctaggacccctacctgagtggcaaccataccctccataggctgtgttccatggcagtccctgccatcccccaccagcggactctggctccctccctgtacccatttctagcaacagctccttgcctggctgctaagacggaggcgcctccttgtttgttcctgggctctgttctgctccctctctcactccatggagtcacttatagtcttccttnctnnacgcctgaattgagcctttgctccttctggatcacnccttcctgggcttcttctccgtccctcagtactgctaaaattgccctgctcctttagtccatttccatgacctcagccctctctctccacaccttgtcttttaactttctcctggacttcttcctctccgcagcatgaacccagagcctatcacacactgatgtttttgtcagcatcctgaactttctcatgcccttcaactttatttatttatttatttatttatttattatttttt

SEQ ID NO: 659102 - DNA, 958 bp, Homo sapiens
  misc_feature (244)..(244): n is a, c, g, or t
  misc_feature (526)..(526): n is a, c, g, or t
gatttggcgggatctgtgtctctcgctgggctggcacaggagcttgggatctgtctcctctttcgcctcctgcaccttgggagccctgggctactctgtcacagcccctgttgccctgtgatctgtaggtccttggggacgcatagttaaggtgccaggacatcctggaagctgggaaatgatagcatttcatcatatcaatgtgaagatttcttccagaccatggctggagaaggaaagaagntgtgtttgcctgactcagtgactatagagagaaccaagttctgcaggcctgtcacctaagtctcagctgggtgccacaaactctgaactggattccaaggctttcatgaatgcacttatgtttgctgtggcagctgcattatgtcgtgggggatgtggatgcagaacctcacattctgtcgtcttgcttatgttactctcctttatgtttcactttctcaaatgaatgtcaagcaggtgattttcagattcaaaagttctaaaataaattgctcaaatttanacattatgtaagctgttaataaaatttctggtaggtgctacatatttgttaaaattttggttgtaattttaagctcactgtaggcagaaaggaatcattaagattctattctttttagtctgtatctaaatgaccatattttttattccaaatatttactttatactcagtaatgctcatggtatttgcgaaaattatattgtgcttttattgaaaatataaggcttgttttagctctgaaagctatattatagtcatatagtttatgatagtaatgataagagaggcgcacttattgggaacggtaatttggtggctttaagatattaattaatttttcatagagcaatattaaggtggaggttccggaaattggcttttaagcgggttcaggggggtaggaggccagaaggggaaataaaggatagcggg

SEQ ID NO: 659103 - DNA, 1502 bp, Homo sapiens
  misc_feature (1292)..(1293): n is a, c, g, or t
  misc_feature (1386)..(1386): n is a, c, g, or t
  misc_feature (1410)..(1410): n is a, c, g, or t
  misc_feature (1502)..(1502): n is a, c, g, or t
ggcacgagcggcacgagggcagcggccccggcccgcgtctgcgcccctcgctgtcccgcgaccccggcgcgggtgcctcgggcccccctcgcgcgccgccatggtgggccggctgagcctacaggatgtgcccgagctcgtggacgcgaagaagaagggcgacggcgtcctggacagcccggactcggggctgccccccagccccagccccagccactgggggctcgcggcgggcggaggcggcggagagcgcgcggcggcaccggggacgctggagcccgacgcggcggcggcgacccccgcggctccgagtccagcgtctctccccctggctcccggctgtgcgctgaggctttgtcccctgtcctttggcgaaggagtggagtttgaccccttaccaccaaaggaagtaaggtacacctccttggtcaagtacgactccgagaggcacttcatcgacgacgtgcagctgcccctgggcctggcggtggcctcctgcagccagacggtcacctgtgtccccaatggcacgtggcgcaactacaaggccgaggtgcgcttcgagccacgccacaggcccacccgcttcctcagtaccaccatcgtgtaccccaagtaccccaaggccgtctacagcgacgacctctctgatgaatgctgacccagcaggctgggctggggtcggaccggctctcccgctgtcctgcccccgactgccctggccaagctgggcgaccttacccttcacgtcattccagccccagaggagtctaacctagagatacctccaagcgcggccgggggaagagaaaaaaaagaaaaaatcactgcatctcataattattgagatctttgtgttgtaattttcaagctgtttttagagggaatatatgtcctggtttgctgctgtgttgtttccccaaagtctcaatcagatgaggcaacaaaaagaccaccagaattgcaggaaagcagcagcagtctgggatagggaggggggaggagagctctccctccgtggtcagtttgtcagaagaaaagcatggaaaaagtgagatttaagaaatctcagccacgggtgtcttcactgcacaaaagtggtgctaattcagtaaacagtgacacctgtgtgggttcaatctgtggagagttgagttccattcctttgtttttaaatttccacctccatttgtgtttcctattaacctaaactcttgtaattctctaaatcttttttcatgatataaaaaaaaaagaaaatcccaaaccacaatttaagatgcctttttttnnaaaaaaaaggttctccgtgttgccacctgctccgggaaggccaggccgatgggcggccaggtttgggagcagcggcttcggctccgattgcgntccgtgacgggtcaggttccaagnacaaggccctgagaacggcgccgaccccttggaacctgggagccggcgccgcgcggctccgggagggtcccagaggggggtttggggttttn

SEQ ID NO: 659104 - DNA, 1120 bp, Homo sapiens
  misc_feature (217)..(217): n is a, c, g, or t
  misc_feature (688)..(688): n is a, c, g, or t
gatttggcgggatctgtgtctctcgctgggctggcacaggagcttgggatctgtctcctctttcgcctcctgcaccttgggagccctgggctactctgtcacagcccctgttgccctgtgatctgtaggtccttggggacgcatagttaaggtgccaggacatcctggaagctgggaaatgatttcttccagaccatggctggagaaggaaagaagntgtgtttgcctgactcagtgactatagagagaaccaagttctgcaggcctgtcacctaagtctcaggtgagtatgaattctcttgtgtttttcacagattgttgcagtggcaggaccaaggtcaaatgagttatagccaagtctacagtaagatgtggcagtattctgttttgaagccgggaccatgattggcaagcttgccacttggtcaagtgctcaccctctgaaaatgtcttccttggtctttgcctccagctgggtgccacaaactctgaactggattccaaggctttcatgaatgcacttatgtttgctgtggcagctgcattatgtcgtgggggatgtggatgcagaacctcacattctgtcgtcttgcttatgttactctcctttatgtttcactttctcaaatgaatgtcaagcaggtgattttcagattcaaaagttctaaaataaattgctcaaatttanacattatgtaagctgttaataaaatttctggtaggtgctacatatttgttaaaattttggttgtaattttaagctcactgtaggcagaaaggaatcattaagattctattctttttagtctgtatctaaatgaccatattttttattccaaatatttactttatactcagtaatgctcatggtatttgcgaaaattatattgtgcttttattgaaaatataaggcttgttttagctctgaaagctatattatagtcatatagtttatgatagtaatgataagagaggcgcacttattgggaacggtaatttggtggctttaagatattaattaatttttcatagagcaatattaaggtggaggttccggaaattggcttttaagcgggttcaggggggtaggaggccagaaggggaaataaaggatagcggg

SEQ ID NO: 659105 - DNA, 274 bp, Homo sapiens
cttagccgacggaactggacactggaccgcagcccatgagactcctcccccgcttgcttcttgcttttccttaactcgtgttccctgccactgtcttgttccaagggggcccaagaggcttgtaagcaggtggcacaaggtcttacagagggttaggacacagtagggggttccatacttaagggttgaaggtgagttacggccggggtagacgaggttaccccacaaattttggacagggtaaaagggaggaagttttctttggtagcctttc

SEQ ID NO: 659106 - DNA, 1144 bp, Homo sapiens
gggagagggcatataggataaagatgagcaaattctaccctaaaaatgttctcagtcagttcaccaggaagaagatgaggtttaataactttcaaggtaattctcagattgacattttgcaggggcacaacatgggctcttgttctagttgaagtgagcagagcaaggctatcaaattcaatatgtaacttacagcattcccagaggttcaaacaataactgatgcagatgtacttcttcagtgtgattcttcagatcaaacttttacttttggcatagttaatcttcagaaacatgtgctgtcatgctgtgtgtgtcactgagggcttggtcttgctgactccttcagcttcagctctacacttctggcaccctccttgctaattcccactgtctctcgcatacactgaacaactcatgcttgcaatgcactcttgctgatctgggcagacttcctcgatcttccagggcaacggcacggatgtgcagcccctgaacggccatgacactcccagctgctgtacggagccagtggcacatatggccatacccactaccttaccaggcgctggtcccttctgctcacaataacatctgcccaccagagggagctgggaagcaacgctctcaactctaacacctagccactgcgcatccgcacctccacgcagccacccataacaacccaacctgccccagcccaacccacccaccccgcagcagcacactagcccggcagcgcaccctaccacgacaccacaacactccatcatcccgcaagacccacacgcctcaactgcggagcacgccatactggccctaagcccactggccagcgaacaaccacgaaccaaccacgcacgaggccatcaaccagcacagcagcccacaatacgacagagccacaccacaccgaaaatacacagtagagaaactaccgcgaaaacagaaagacagaacacacaagaaacaccaactaagcgccccaactacacgaaaacaacaaaacaccccccaggcaacaacacacgcaagcaaacaggcagaacaaccatacaaccccgacaaccacacacataaagacagagcacctagaaaccacccacaaacacagacgcaacctcaccacccaaaacacacacat

SEQ ID NO: 659107 - DNA, 740 bp, Homo sapiens
ctgagccactggacatggtttaggctttccttatgctcttttgttgttgtcccgaggtttttttagtggagggtgttctgggtcccatatgtcctgtcctgtaggggattgttgcttccttgtaatcccctcgcaggtgcctttggctgaggtgccaggtgtccaagtctatcagattgccttgtcccttgatgtggatcttctgcggtccaggtccttggtgccctcgttggccctgctgcgtccagtgtagggctcctacggtgtggtgttcattgtgcctgtggtccctgtcaagcacacaccactttgcatctgaccgttaggcctctatagatgagtggcctgtcgccgtgtgcatgccctcagcctaggatcatggtcgctgccccagaggggactagactggagcagagttcgcaccacatgtggcgtaggaactgtaggccatcaccatgaatggcggccatgacgcgcgggagcatgacggaagacgccagcatccacacgtcttcgccctgccgcaacggacaccagcataggacggcagtaggagactggcagcatatcctcgctgctccatgctcagatgtcaaagcacaaatcctcaggacgggcttaagggccagggcagccgagggaagctccaggtgcgggaccacgtcttccagacggttggtgcccactggctgggaccctttgcagtggggtgcctcccctttaccgcctggggaggagca

SEQ ID NO: 659108 - DNA, 1795 bp, Homo sapiens
  misc_feature (1420)..(1420): n is a, c, g, or t
ctctctagctcttacctgttgatccgtctctacttcctgttcgtgtggtggcctatagttgtgtggttgccgcctctgctaggtggtgtggcgcccgattcgtggccccctcgttgtttgtgccactacttgttgtttgtgttggatgaccctctctcgtgtcgggatagtttcgtgggtcgcgcgctacgctacacctgtctacgccatgtgtctccctgttgtttcgctccggccttgtgtgtgttcgcccccagcgaagttgttggtgtgtgtctcctccgatcgaatacccacgagcgctgtgtttgcccgccctgtgtagaaggtttgtgttgttgtgcggtcccccgctgtggtgatgggtggttgtgtggcaccaccttggtcgctccggaggaagttttccgccctgggcatcgcaccacaacacctcttggtggttggcccccccttagagtctccgctcctgccgttagtgtcccgagatgtgttgcgcgccgttgtgggcctccccaatcaatgatagtggtcgcgcccccggtggctgattgacttgtgttgttgccgtgggtaggagagtaagccccctgtctcccctgtgtggcgccccgggccgttgtgtgctgtgtgttgatcgcctcacggagggtgttccccgccccctagtggcggctttgggccgttgttttttgaagtcccctcatgcttccctcactccccaaggattttgtcgttggaaaacaaattgtgtttgatccctccccttctcgccgccacattggtggtgttaaaaattatccaccttgggccgctttttcggtgcggcacccttgtgtgttgtgtggcgtccccccttggtgtgtgtgtgacacgcgttgggtgtttcttcccccctcattaggatgatgtgtgctctccaatgagcggtgcgccacaccaatgtgtgcgccccccccaggtctctgcatagccccacagctggtcggccctcaggctacttctccccactgtttttttttgtgtgggagtatgtggggtgtgtcgccccgccccacttgggggcgtctcttcaccagcagagttttggtggggcgactttccactacactgtgtgcccacacgctctcttctccccctcctcttgtgtgggtgtgccctctctgttgttgttgtgaaggaccctctctggggcccccccacagggtactcacagagagagagactctgtgtgtgtgtcacacttcctgtgagagcacacacacgcgcacacacagcgcacactttgtccgagagagctcctgtggctttctcccgctgtgagccacacacacagggtgtgtacgacctctgaatggtgatattgtccccacagcgtgccctcttgtttccacctgggtatacgctgtggtgagagggngaatgtgaaggagaagggcgagagttttttccagaaggccccgctgagaaaatatatggctcgcccctctgagagaaaggagattatatgagggagagggttgggtttggagattctgttgaaaggaagaagggtgagaggaaagaaaggaagaaggagaatatctaaattaatccacattccctttggccccgcacgcacatgtcacatgctcccaccgaaatttcacgcttcacgcgttaaactgaccacagagcctttaagactttctggttagaattgttttccccttggtgatcccagtcttttcccaagggtaccctgtaataatttttcccatccatatctcccaagtaaagtccatttaccactcca

SEQ ID NO: 659109 - DNA, 1073 bp, Homo sapiens
gcccggtccagcccggcacagccatgatcaatggcgatcctaatcttcaacaaaccacgggaaagccgcggctctccaagttctaccagccctacagtgaagatacacaacagcgaaatcatcagggagactttccaattgtggtcatctaagcagcagcatgaaacatgtcggtcaatttccctagacacaggcaggcatcattcaattgggaggcatctgacgaacaaactggatttatagcacattatgcaacgttcatcatttaagtactactagtgtggattcttcagaaagtgaacttggcattttagatctaattcaagtcatttgtggaaacatttagacaaatgtatggaaaatgtctgtgagctggatttgattttccatgtagcacaaggttcacaatattcttgcagaaaatggtgatggggggaatggtcattggagacaaatcatgcatgcagattgtaacacaaattgatgcacaaaataagctggaaaaatctgaggctggcttaagcaggagctccaagccctgtgcttgtatcagctagtaaagaatatgaatcttcctgagatcccaagacatattaccattgggtgacatcagtataaaagtgccaaaaccttgacctcatttacattaacaatgtaaacaagggccaatccccagggtaaaatccagtgggaagagtcatctaagttaaccaatgcagatgttaccaacaatagaggagaaagcttaccttgggcacatgggattcaagctcaaggctcgtgtctccaaagtttgtgtaaacacccgatatgaaagttccacggatggccgagaatgtgccaacagtaaattacaacgaaaattaaagaaaccccatagtagacaataatacgacaacaaaaggagactcctgtagcaccaataagagaccctaatatatggagcacaacaggtaataaaggtagtacaaatcaccagatgtttacccccagcattgttgtaaaaacacaaaagaaacacactcacattgcaagcattagcaccatataacacaataccttacaacgcagca

SEQ ID NO: 659110 - DNA, 949 bp, Homo sapiens
  misc_feature (496)..(496): n is a, c, g, or t
tttggccgagacgagactataacaaacaaggtgaagtagaaatacaaaaagaggagacaagacacgacatttaacaggcctgtgttagaagagtgtatggcacttgccgttttatcgtgcgacgagtatctctcctcgcgacctagtgttcaagggaccccatggtccgggctgtgaccacgctcgggaacaatgtgttggacgccagaacatttgtggcgaatattttcggctgccgccctgtcatttggtgcggaatattaacacgtctcttcaggtaaggcggacagtccttaatattgtcttcgtcataatgtcgttggcgcggtgcgcgacattgtttttgtttcgcagtcggggtttggtttacaaaagaacggtagcccgtgacaggtcctgagcgatcacagggttcccgggtcccccttggtaggttgggaagacagtacacagttttgttgataaccccgtagtctagggacactatatcagattnaagtagcgcgattctccacagaagaccgcgagtatttttcagagacgattcctcgataaataataccactagatgcgtcaataagtgcgcgcccaccgctctcgatatacttgagtagttttcaggctgtcgcctgttcacctaagttgcgtcgcgcatgttgggccgcgacccgcattactttccctctgtaattcaagaagggacgcacattatctacaggatccaagaaataagatactcatattttgagaggaaaggagttccccccgctatgtctttgaacaatctcgcttggcacgtattcggcgtagtaatacaaatatcttaatgagaacaatgtctagtgagagatgattaagaaacaaacactcttggttcagtcaagagatatttacaccacaatcttcgcccgggggaaaaaaaaacccccaagctttctaccacaaaaca

SEQ ID NO: 659111 - DNA, 401 bp, Homo sapiens
  misc_feature (4)..(4): n is a, c, g, or t
  misc_feature (66)..(66): n is a, c, g, or t
  misc_feature (70)..(70): n is a, c, g, or t
  misc_feature (91)..(91): n is a, c, g, or t
  misc_feature (122)..(122): n is a, c, g, or t
  misc_feature (132)..(132): n is a, c, g, or t
  misc_feature (202)..(202): n is a, c, g, or t
  misc_feature (227)..(227): n is a, c, g, or t
  misc_feature (237)..(237): n is a, c, g, or t
  misc_feature (245)..(245): n is a, c, g, or t
  misc_feature (279)..(279): n is a, c, g, or t
  misc_feature (301)..(301): n is a, c, g, or t
  misc_feature (306)..(306): n is a, c, g, or t
  misc_feature (330)..(330): n is a, c, g, or t
  misc_feature (337)..(337): n is a, c, g, or t
gcanccaccagagaaacgaggcgaaaacggagaggcacacaggggggagaagaagaagaagatgtnaganacatacagtgtggcatttagnatatacactcccttgcgcgcaagcgaaaaancctaatcgcntctgtataacatgcgggaggggaaagccgaaccgggaaaaacacgggggggagaggacgaacaacggcgngtagaaaaggaaggggacagggcgngagagagacngccgggcnggcagggaaaggggaacaaggcgaaacggaaaanagaacaagcggagaggaatgtnaaaanggcatatccagtcaaacatttgtntgtgganggggccgtgcaactgtgagaaatacgtggagggaaagaggtcagacactgaggacatccctggg

SEQ ID NO: 659112 - DNA, 123 bp, Homo sapiens
gcccagaatactgaacttgtgagcgggcaggtaggactattgttccgttgttacttggctgctgtgggatgctgttgattcctcactacggcctgaggttgtggagccgtcgtatgcagtaga

SEQ ID NO: 659113 - DNA, 526 bp, Homo sapiens
acggcaagaaaggctcatagagcaaaatgaagtattacataataaaaagttataaatccaaataagaggtgtgtgtgtgtgcctgtgtgtacaaaacacagcctcaaaaaaaggaacacacaaaaattaaaaaaaaaaaaaagggggggacaaaattctaaggagaacgggatgcaagccaccaccagagctctcacaaatccagttaaaagcaggcagtccaataactatgtgcagatggaccttgatgagacagcatttcctaactataaaatccaaccactcagggggccatgtaggtctcaaacacatgcttgaccacagagccaggcagttggcacaacatgcccaaaagataaccagacaaaacgtcacagcattgaacaattaaaagaaaaacattctaaatctgcatgccaaagaagccatgatattggatatattactacttaaaatacaatacagtatgatactgcaatacttggggatgtgacaggcattccaacataaaacactgtaaagaaac

SEQ ID NO: 659114 - DNA, 994 bp, Homo sapiens
gatacaggcagcagagttgataaaatgaccatagaaaatgcagaagaccctagacgaacaccaagttccgaggtgcacctgattataccgcgtggtgggccaagccggggtggaccagtaggcccccgtaagctgaagctccatcgaggggcattccgagagctcattgagcgtccatgagcgtcccaagatttccagtcccaagctgagagacccctcgggaccgttcctcatggttctgtggaccactgtttctccatcaaaggcctaagggcactgtgagtgacaggggaccagtcctttgcagggctccatcgagcctcggtgacagtgtggagatccctgccctcaaggtggtgaagacaggtgaagtccatgcatgatgttccacatgcccatcacgttcagccatgcataggagaccgggctgggcatcgtgcgatcaccgcagtttgacccgtaagcgtgctggagcgcgggttggtgtgtgcccccgagtccctgcgacactggtccgatgcgggcctctatctctgtggcagagatgccgtatttccgggggccccatgtagaaccaaggcctaagttccacattactagtgggccatgcaaacagtcatgggccggtggatgttcttcagtcctgctccagataactttgatgcaggagcctatactgggactctttcaatcttctctcaagaataccgttgaccaggagcagtaactgtcccaaggatttgaccaccagggagtgacagacactgatgaggccgagagaaagccggccaggcccagaggccatggcctcgggagcagttggcctggtgggtttgacaagccagtacatgaccccggttggccggggactcgcgccagctaaaatccggcattacacaacctgccagagctccagggccggccagggtaaggccgacacacgaaactgccagaggaaggtcaagagcaacagcctgacagaaaacacacacgc

SEQ ID NO: 659115 - DNA, 371 bp, Homo sapiens
ccccgggttttttgggggggggggccctttgggggtaaacccccccaaaacctttttggggtgggaaccctttgccccgggggtgtggggggggaaaaaaacctacccgggtggttttttttcccccgccccctttttatgggtcccaaaatgggggtttgttttttaggggtttaaaaccccctttttttttccccgggggggggccaccccttttcccgggtttggggggttttccccccccctttttttttttttggggggccaaaaaaaccccccctcttttttttcggtttttttttcccgggggggggtttttttttccaaatttttttttttaaaaattccccaaaaaatttttttttttttta

SEQ ID NO: 659116 - DNA, 236 bp, Homo sapiens
ttatctttgacgaggtgatagtactccccatgtctgctatagataatatatcagtatcttcaatatgaacatccctaaggcgcaaggtagcacttgccatcctgtcccagttactgtttgtgtaacaggttgacaggtttacggagagtcatgaacttatgtccggtcaccagggaactgtcaatgatttactggtagagatacgagatatgagttagacattagggagaacacca

SEQ ID NO: 659117 - DNA, 700 bp, Homo sapiens
cgtgtgggacgacgtgtactcagtgctcaggcagccacggacagttgagctagtgagtggtgatggggagccagtgacctgcccctgaccaatgatacccacacctcctcccagtgaatgactgcccagtgccatttgtatagtgaaaacccatgtgtgcctgccgccacactcaggatgccatgtgggaagctgggctgtctccacccaccatgactccaccaggctggtgtagaggtgcatgcagtgcatgcaactgatggacctgtgagctccaagtgcccctgttgtcaagatggcacatattcaaaaaccatcccatcacacacatattatacatcatgaggggaacacaagggagaggagcaccaatgcacaatgacatgacatcccacgttaattttcgtgatccattcttggttcacatattgcctagacaaatggataacattcgattgacattgcacaagaaacatatgggaggccccacgttggagacaccccaattcactgggattcattggcaatttcccaatgagagtgatgccaagagggtcatcccattggcactatttgggaaccaccacaatgatccttgctgcggataacctgtggctgggaacactacaagcgatggccttttgccagataagaaaggacccccacgcatcaatacccccacggcccaccaagagccaat

SEQ ID NO: 659118 - DNA, 843 bp, Homo sapiens
attatattaagtatttggtttgcttagggaagaaagagctaattttttaaataaatcaaggttattacatccatgtatcttgcctggtgtatgcttttacaagtccttgtaacattgagttacagtgactttaactcctgtgtctgaaaaatcacaaacactgatgacaatcaaagcctcatcttaaggccccgtagaagatgccaatcgaaaataaactgcattccttagaggcactatgcgcgaatagaaatgtaatagctcattcaactcctcaaggcccaggaaactatagcggaagatggtgggcgcgtaagatagtaagggccgattttgaaagatccagtaagttcagtatatctctagtgaactaatcattcaagtaaaaggcacaactgatgcaaaatcagtatatggaccactgtgtctgattagcaaggtgttcttgaagcattaaccaactccttcataaaggttataaaaggcttatggaagttatattttataatgcaagattaaatcttatagttctgtttacgaaattttgatgatcaaatgtgattggcttcaggcagtattaatgagggcttctatgtttagaaagttaagtcacgttctctcaaagaatgaaggtttttgctctgtttgaaatccttgaagttatccacttggatttaattatatgacttttacgatgacctgtaatttgtattttggtatgtcaagtggttttagaaccttttggtatttgacaaggttttcaaaatcaattttaaattatgttttttttctaacctaaataaactttaagaacttagtttccttaagacctaaaaggaatat

SEQ ID NO: 659119 - DNA, 568 bp, Homo sapiens
  misc_feature (36)..(36): n is a, c, g, or t
  misc_feature (61)..(61): n is a, c, g, or t
  misc_feature (74)..(75): n is a, c, g, or t
  misc_feature (84)..(85): n is a, c, g, or t
  misc_feature (88)..(88): n is a, c, g, or t
  misc_feature (93)..(93): n is a, c, g, or t
  misc_feature (212)..(212): n is a, c, g, or t
  misc_feature (233)..(233): n is a, c, g, or t
  misc_feature (253)..(253): n is a, c, g, or t
  misc_feature (260)..(260): n is a, c, g, or t
  misc_feature (265)..(265): n is a, c, g, or t
  misc_feature (267)..(267): n is a, c, g, or t
  misc_feature (271)..(271): n is a, c, g, or t
  misc_feature (276)..(276): n is a, c, g, or t
  misc_feature (287)..(287): n is a, c, g, or t
  misc_feature (289)..(290): n is a, c, g, or t
  misc_feature (299)..(300): n is a, c, g, or t
  misc_feature (302)..(302): n is a, c, g, or t
  misc_feature (316)..(316): n is a, c, g, or t
  misc_feature (328)..(328): n is a, c, g, or t
  misc_feature (344)..(344): n is a, c, g, or t
  misc_feature (350)..(350): n is a, c, g, or t
  misc_feature (354)..(354): n is a, c, g, or t
  misc_feature (360)..(360): n is a, c, g, or t
  misc_feature (396)..(396): n is a, c, g, or t
  misc_feature (401)..(401): n is a, c, g, or t
  misc_feature (407)..(407): n is a, c, g, or t
  misc_feature (409)..(409): n is a, c, g, or t
  misc_feature (418)..(418): n is a, c, g, or t
  misc_feature (423)..(423): n is a, c, g, or t
  misc_feature (439)..(439): n is a, c, g, or t
  misc_feature (445)..(445): n is a, c, g, or t
  misc_feature (452)..(452): n is a, c, g, or t
  misc_feature (472)..(472): n is a, c, g, or t
  misc_feature (480)..(480): n is a, c, g, or t
  misc_feature (490)..(490): n is a, c, g, or t
  misc_feature (498)..(498): n is a, c, g, or t
  misc_feature (502)..(502): n is a, c, g, or t
  misc_feature (506)..(506): n is a, c, g, or t
  misc_feature (521)..(521): n is a, c, g, or t
  misc_feature (528)..(528): n is a, c, g, or t
  misc_feature (532)..(532): n is a, c, g, or t
  misc_feature (550)..(550): n is a, c, g, or t
  misc_feature (561)..(561): n is a, c, g, or t
  misc_feature (563)..(564): n is a, c, g, or t
caagaaaaatacgaagcttcaaaagtactgtgcgtngtatctcttcattctctggcaggcngggagtccaaggnnagtctaggnnggngggcngcttggcctaagcagtcacacaattttcaccgtcttgagcatatctgacaagacatacgtgtcatcccaacccctcccaggcttcctcagggtccgctccaaagcctgggctgtttctnggggctctggtgtggcaggtntttgctcggggtgcggctgncagaacnggttntnattnacttnaccctcaattngnngggcatatnngngggggggcactgcnttgggcccagcnggcgctgggtcttttngccccnggtntcggcncacaaggttgggaataaaaacaccttcgggggtganggtgnttttgncnttctgtggnaaagnttgctccacaaatgcngggggngggcggntcattcccggtgttgggtcnttggtgtnaacgtcgggnattatggnttcnttgnggggcggtgcttctnctcctcntgcnaagctggcggtatggtgnggcgtctgcgngnngggt

SEQ ID NO: 659120 - DNA, 359 bp, Homo sapiens
ccgttttacaggttccccttacaccttatccgcatcatccatcaccacaattccacgtggcccccgcggactcgatcattgcgcctcatatccctgccgatcatcaccaccacctctggtttctcgctctctagcatctctgctttctttctcttccacatttaaacgtacttcccctcgaaacataatcggttttgccattaagattctctgaactggtttcagagtcatcaatataaccacacaaaccaaatattggaagctttcccccaacacccttggtattgatgcgaagttccactacgtttccataactcatgaagaattcctttaggtcgttttcatcaatatcttgtggc

SEQ ID NO: 659121 - DNA, 106 bp, Homo sapiens
ggcgagacgcaggacttagcccgctgctctgagcagtgatagagccttgacggccctccagttttcaggatacatgtacatgggtcccagccgccaatggtgattc

SEQ ID NO: 659122 - DNA, 307 bp, Homo sapiens
cccaacattgatagtccttttgaaaaacaaaaggttgccgagttttgggaaaaccccccccagcttttaagaagtaccggcaagaaacctactcaaagcaggtcaccagccaggagccttgacccaggttgcccagcctgtccttgggtggtttttttaatttttcctaaaagggtctgtcctttttgtgatttttgaaaaggactttttattttgagctggggaatttttgttttgtttttgttttttaaattaagcctgggttgagcccttgtaaattaaaaaaaggcatttttgtcctttttta

SEQ ID NO: 659123 - DNA, 512 bp, Homo sapiens
cttctgcggagagttaagttcatccatttcaccactgacaggtggctctgggtttcctcggcccagtgtccattccagaaacacagtgcccttgcgcatatgcggaagtaaccatggtggacagccacacagtgtcaccgccctcgtgtattggaacagtcatagctgctggcgggctgcgcagagccacattcattgatgtcttggcatcctccactgaactgttcatactggaagccggcgggacacatgcacttgtagctccccagggtgttgtgacaggaggctcctccgcagatgtgagcgctgaggcattcgttttcatcaacacactggttccactggtagtgctggaggtagccctgggggcagctgcacctgtagcccccaatgatgttctggcagtcatgctggcagcggtggttaacctcacactcgtccacgtcttcacagctggagccgggtctgatcaagtgagaatccccgttggcattcacaggtgaagcttccag

SEQ ID NO: 659124 - DNA, 350 bp, Homo sapiens
ggatttcaagcttacgaggacatgatgagctctgacagcagagcgcagaaactctggaagctgtttccagagggcctgcactgcattggaccacggccaccaccttctccttcaccgcatggccagatagctcccgtgccaccaggtctgcagccgctgcagcatggcctggaaccttctcatgcccttgtcacagaagctctccccaggctcctcgatagcgggatcctcaacatccgggacaggggatctgttgcctcggcaccgtaatccatctctttctttttcaagtagaggagtgagctctgggtgctgctcctcataataagccgccaccctcgttaagcttg

SEQ ID NO: 659125 - DNA, 295 bp, Homo sapiens
cgcggtccgggagatagcaggagctcattgaacctgggaggaggaggtgcaggagcaagatcaagccacgcacgtagccgtgtcatagagtgagattctgtctttaaaaaaaaaaaaaaagggagttcggcattatctccagtaatactctatatcttacagtctatctactcttggatattaaaatagtccctccgggcttcttatgcttaacggtgggcttccaacttatgggggtcctggtttccaatatttatctcttctaggcaacatataatgggggcttcctcttatg

SEQ ID NO: 659126 - DNA, 274 bp, Homo sapiens
tttttttttcccccttttgggtccccccccccgggtttccaaagggaaaaccaattttttgcccaattaaaaggccaaaatttttttttcccccaggccccgtttaaaaggggggcctccgggggtttaaaaattttttttttgttttttaccctcccttcccaaaggattaatggggggttacccctaaggttgattttttgggggtcccccaatttgtttccttttttttttttttaggtattaaataacccattttttttaagggccccta

SEQ ID NO: 659127 - DNA, 354 bp, Homo sapiens
  misc_feature (271)..(271): n is a, c, g, or t
  misc_feature (281)..(281): n is a, c, g, or t
  misc_feature (296)..(296): n is a, c, g, or t
  misc_feature (341)..(341): n is a, c, g, or t
cgcattgcgtcaactggaggtgcagccctgattgcggattacggtcacgatggcacaaagacagacaccttgagagggttttatggacaccagcttcacgatgtcttaatcgctccctggaacagcagaccctgacagcctgatgtggacttcagttaccctgcgcagaatggcacaaggaaaagtagcctctctggggtccagtggaacagcgaacatttttaaaaaacatgggcattgatgtccggctgaaggttctccttggataaangcaaggtgangccatcttgcggaanacaagcctactttgggaggggtatggatatggttaatggaatccnccagaaagattgg

SEQ ID NO: 659128 - DNA, 114 bp, Homo sapiens
tgaaaatttcttctcaaaggccttttgctcctgacactggggtaggtgtcgacatagtacttggaaaaaagtcgatctccatcattgtccagaatcaggcccggtacatgcaag

SEQ ID NO: 659129 - DNA, 214 bp, Homo sapiens
cgaaaagttattattagggttaacgtataagattatacatcatatttaagagtagctcagaattcattttctggcatagtgtacatgtagactttttaaaataaaactgttacattgttttttgaaatgtatcaagtggtatgtaaataccttaatgaattgataattaccacgcccaggtaattctttggatgttgtttttttttagattgat

SEQ ID NO: 659130 - DNA, 1071 bp, Homo sapiens
ggatcctctgtgacccagcgtgaccaacgccccgcagggggggctggcggaattcaatccccgttttcagagacaaatgcagcggaacagtactgtaagccaagctccctgggtcctcacagtccaggggttctccagccagtcagggaataaggagccgacgcgccaggccgtggtgttgcaggccaggaggctgctccggagaggaagaactggacaggaatagctgccgagctggtaacgcgaaggagcgggagctggagaacactgtagccaagttgcatgtgagacagaagcaactggacccctctgacctcgtggtgccctgtgtaaggccctgcctatcgtatcgaggatttctccacagagatccctgtcgcgactagccagcggatatgcaagatgctctactatctgtggatgtggcattcagtgactctgtgtctgaacctgcttgcctgcctggcctggtgctcgggcgaacagcctccaagggagtggacttagtgcctctccatcctgaggttatctgatctgcactccctgtgccttcctatggtcggtaccggatccatcgtataagggccttagggtccgagaactctgtacagcgtactaggggtccgacttggtatcgagaggcaaatcgggatctacgatcatccgagttgggatggcattccgtgggctggggggcaagcgcgctggcttggcgccgtgtgtaacagaggataattatttccgtggcatatcagcatcattgatggaggatggatggaactcaaccatttgtgcgagaaagtcagaattactacaggcacacggagggagcagacacaccaaaggcgacggggacaaaggggcacaacgttcacaatgcaaggcccacgcgaggaagttttcccacgggcaaccttacggtacgcaagagacattacagcaaacaggtggtacacatgcagagacacacgagaggaacacggaggaaaataagccgccccaccaagaagtacccagaccagaaacaatcggacgcagcagaagagcacaaccgagagagccacatcacgc

SEQ ID NO: 659131 - DNA, 179 bp, Homo sapiens
cacgagcatcctgtacacagaaaaaaacaaaactcctgatccctcctggtggcttggcaggttagggtttttccaaggcatagttgtggtgcaaccagggtgactcagggcaatcaggtgcttgcttgatgtggtttggggcatgcccatgctggggtggtcatcaacacaatggttct

SEQ ID NO: 659132 - DNA, 283 bp, Homo sapiens
ctcccgggctcaagcgattctcatgcctcagcctcccgagtagctgggattacaggcgcctgccaccacgcccagctaattttttggtattttttagtagagacggggtttcaccgtgttagccaggagggtctagatatgacctcgtgatccgaccgcctcggcctcccaaagggcggggattacatgcgtgagccaccgcacccggcgtttcctaggttattattgtagaacaaagattcttataatattagaataacgagtacggctacaaactaatgat

SEQ ID NO: 659133 - DNA, 132 bp, Homo sapiens
tacgccgggttaggagctggtctctcccaactcttaaccactttcttgacttggattgagaaaaaccgcacatttctctcattttttccttgtacatcagctcctcagtctccattattccttaaccccgag

SEQ ID NO: 659134 - DNA, 284 bp, Homo sapiens
  misc_feature (19)..(19): n is a, c, g, or t
tgtgcgtgtacttacatanttgctgcagcagcagagcggcagcagaatacttggcggagtaggcttgtctgtgcggggtggacagttgcagcaaagcagccccccgcaaggagcagcaggcggaggcgccagccgacgtagagcgaggcacccatctcccgcttctgcccggaggccaccagcgcattgtagaagttctgaatgatgtcgtgggccgaccaggacaccggcactattcacaatagggccggccaacaggaaacaccacccccgccaggatcatg

SEQ ID NO: 659135 - DNA, 998 bp, Homo sapiens
tttgcaggcacactcagtcacagcgctaagctcgcactgattttttacctgagcaggcctagaaataaacatgctagctttgtagttccaggttctaaccaaagaaaatagaacccatcgttccacagaagctgccatcaagtatttccatcacgcaagcaaccgcatccataatccttcataatagctatccgtcttcaagcaatatacgtctccgagacaagtgaagccataaccacatactacgcaatcaagtactcagtcattaagtaatcactaatggctatagcaagtaacaactaggaaatagcccccttatcacttcatgagatcccagaaggcttacccaaggcaaccccatcgtgacatcacggcactgcattcattctcaacagtgacaaaaatctagacccacgcagtctcaatcactataccaacatctcgtcccgtcacataacacgtaagccttcatacctcactctctcacgtcgttatccaatcagtagacacaggcagttgcaggtggataaaaccgaagacccagctacagcaaacatcttagcaataatcactcacattacccaacatcaggcatgcaataatagcaggatactacccgtacaacccatagccagtgaccacagtactactcaaacttgtcaactcattcgcatataaaataactaagcttactagccgacactgccgtactaactcaaagctgtaagactcccaagcaccaacgagccataactaggtagtatacgccaccatgaacaagcaaaggacttacacgaaatggccatcaaaaaaccaccgttaaaacttacccatttccaccgaaccttcccgtcataccattagggaagtgtcatatacacaccatggagtaaacaggagccattgtagaggcacaacaaactgggtacacaatacaaacacaaacaacaatatcccaaaaaaaaaacatagtcaaccccctaagcacacagcgcaaa

SEQ ID NO: 659136 - DNA, 1330 bp, Homo sapiens
cttctatcaatggaaaagaactgaataagagcatcaaccctgatagaacgctgttgcttataggtgcagactagtccaggacagccatacttgtactaggagacaagtactagagaatagttcaagatatatcgctagctactatggatagtacactacctactataaccctatgcgtaatacgacaactagctaggataggagtacatagactagtacctacatcaacgacgctaataccaccactaacctaccacaacagcacacagcacctctcacataccctacttcatcgacaaccgagaccatggctgctgctctacttcaggcttcaatagaagcgcagaaacgctaccactcgacaacaggaataacacaaacccatagactatgaacacaagacactgaaactacacacacagccataaacactaaccatgaaaacccaccgccacagctcgctacccatccacacatctccacacctcacctatattaaccactaacatagacccaacaacgtaactactacacacatggtccctactgccctgcacgcgaacacaaaaagctaaccggcggacccacgcagcaaccagcacgaataaacccacatcccacataccgtagaccacacccggacccgcacaccgaccaccaccaagcacacagcaccactcagccacaccgatcatcggccccacccgccacccctacaccaaacgactacacacacagcctcccaccccatcgcccacacacaccccaccgcaccctacgaacacgtgcactacaccacagccactctcccaccccccacctccctaccccacctaccaccaaaatcgaccaccaaacacctccaccacaccactcccccacacactacccaaccgccccccctctaccccccactaaaacacaccatccacacccccctacccccactccacccaaactactcaccaaaacaatcaaccccaccctccaaccctcctctccacctcctccccactcctcccccacaacaagacaccacacaacccacaaccacaactaccccatcctccccatctagaatacaacaatcacacaacacacacatatcaccaccaaactcagactaccacccctcccacacaaaaccaacaacatcaaccacaacaacacctccacaccccacacacccaatcccatcccaattcacctatcaccaccacaacaccaacaaaataatcaccactacaccactaatccaccaccacacacccccaccctccacacatccatccatcactacccaacataatactgcaagacaataaaacaa

SEQ ID NO: 659137 - DNA, 121 bp, Homo sapiens
ccacgcgtcgccttgaatatgtgtggttagtatacagagccattagtattgtatttgggccactatcttgtaattcaaaataaataacataattattctgtaaaacgaagaacagaaacaa

SEQ ID NO: 659138 - DNA, 1031 bp, Homo sapiens
tctggtcctctggtactcagagttggtcttcagctcgctataggtcccagcagccgcgatgctcgcggctagccgcactcctggtcctgctcaggagacatctgaacacacagtggactccagaacgcagtgaaacatggcatcaccatacaccatcttgagaagccaagtgaagcaaagaacacaaaacacatacgcatgcacaagagtagaagagagatggagaggcaccaccgagagacacaaccctaaacccagatgagaggcatcgcatacacagaaagggggaagaaacgagaaacatagacacacagcggaaagacccacggacatgagagaggacaaagccacacgacaatagagggctacacaacgacacccaaaggggacagacatgagagggacagacgagcgaagaatcaaacgcaccaagtgagcacagccaacaagcgttacaaacagatggacacaagcaacactagaacaccatggacaacccacatgcagagaacaccacccaacagagacgaacagtgagcaccacaaagggtacagagcaaaagacaaacaagcaacataccagaacaacacgcgagcacaataccccaaacgccacatcccaaacgaacaccacgtattaggggataaccatagcccacagagccacgaaacaacacaagcccacgcaacgaaaaacacacaaaggacatcaagagggacacaacactacagagaagcgattcaccagtaacagccaaacgagagaactgggataacaaatcagacaactagacagaaggacaacccacaagaggacagccacatggccacagccacaccagaggaaaaatcagagggacacgagcgacacacacacccaaaagagcacagacacgacacaagagggcaaaacaacagaggactaccaaaacaacaagtggcgaacaaccgaggacagcagagaaacacacagaaacgagcgtagatcggcaaaccacacccagaaacaaggccacacccaactaacactc

SEQ ID NO: 659139 - DNA, 172 bp, Homo sapiens
ttatggaacacagctatcccattcattccaatatgtctatggctgcttaacacgcacagcaaagctgaatagatatgacagaaactctatggccgataatactagctggaccattacagatatactcttcatcactgacctatcttctgagctctttatttacttatcaacc

SEQ ID NO: 659140 - DNA, 81 bp, Homo sapiens
aacctggagtgactatatggatggaatcgaaccccccaaagctggtttcaagccaaccccatggcctccatgactttatca

SEQ ID NO: 659141 - DNA, 550 bp, Homo sapiens
cctcagcataacgctgttggctcatctcaacctctccttccagctcccggtacccgggcctccaggtttctgggatctggctgcttcccacccttcagggccagcggctcagcctcatccagagggagcggcagatccttcagggtctggctccaggttcttcttcatccgctccaggggggcgcgggtgtccggctccttcttcagctcctcagccatcagggcggcatcagtgagggccttctgggccttttcttctggcatggcgggcttccgggagaaggtcctccatctctcctggcattggggaaatatctgtctccagcttcttctgggtgtggatcaggcgggggtcctggggtgtgcagtagctgaacacgctcactgggcatccaggagctccggttctggcgatttttctggctcctctctggtctgttccagaggggcccgcagttcctcgatctcagccggcagcaggttggctctgcgctccaccatagccagctgttccttcaggtcctcctggctccggagagcatcatccagg

SEQ ID NO: 659142 - DNA, 422 bp, Homo sapiens
  misc_feature (36)..(36): n is a, c, g, or t
  misc_feature (133)..(133): n is a, c, g, or t
  misc_feature (159)..(159): n is a, c, g, or t
  misc_feature (197)..(197): n is a, c, g, or t
  misc_feature (282)..(282): n is a, c, g, or t
  misc_feature (292)..(292): n is a, c, g, or t
  misc_feature (303)..(303): n is a, c, g, or t
  misc_feature (320)..(320): n is a, c, g, or t
  misc_feature (336)..(336): n is a, c, g, or t
  misc_feature (362)..(362): n is a, c, g, or t
  misc_feature (376)..(376): n is a, c, g, or t
cccgactcctagtccttcggccgccaccatgtccgnctggctgtcttcattctggacgttaagggcaagccattgatcagccgcaactacagggcgatgtggccatgagcaagattgagcattcatgcctttnctggtacagggaggaggaaggcgccnggcccgctgctgagccacggccaggtccattccttggntcaaacacagcacctctacttggtggccacacatcgagatgccatgctcctggtgtactccttccgtatagacatagaggttttngatattcagngtgaggggganatcgggcacttgtatgntcggttctgcggtcangcttggttcgagacacgcacagtctnaggtcatatagagnacagtggaggagtaggtgcacattacagtttcgggtcgggttagtt

SEQ ID NO: 659143 - DNA, 716 bp, Homo sapiens
  misc_feature (632)..(632): n is a, c, g, or t
  misc_feature (643)..(643): n is a, c, g, or t
cagacacacttgctgatgtagttctagcaccagctctagagcttgaaccggctccaaaatgattacagaattagagtcaatgccaggctcatactatggccagcaccagattcagaggaagtcaggtccagagccaactctagcactagctccaagctagagcctgtgctgcctccagagcctaaacaagagctctagctccaacaccaaagcaactccagagatagaggcagctctctcaactcggataccatctctagagctaaccccagctgcaacaagagctctagctccaacaccaatccagaaatcgctcaagcaccaccactcccagcaactccagggatagaggcagctctaacgccaactctggtgccatctctagagctatgacctgccccagcaccaattcaaggagacagccagtgagagttttcatttcggatacaggtccagaacctcctgtagtatcacctcctgacctagagccactccagcatccacctcacagctaaggctagtgccggctgcacgtcaaacccgactctgccatcacctccagagggagagccagtcgctggcccagaaccacagctagaatcagctctggcaccagctccagtcccagctcncaagatacagncagtgccagccccaggaccagaaccttatggcctcacctgtcaggcatctttttttctgcctggtacctttta

SEQ ID NO: 659144 - DNA, 786 bp, Homo sapiens
  misc_feature (1)..(1): n is a, c, g, or t
  misc_feature (551)..(551): n is a, c, g, or t
  misc_feature (556)..(556): n is a, c, g, or t
  misc_feature (558)..(558): n is a, c, g, or t
  misc_feature (561)..(561): n is a, c, g, or t
ncagacagggtactccttctggctctgatgatgaacgaagactgtctcactacctaaatacataactatatatgactattacaatctcacaaggcatgacacctctaggacccattctcatcctacatcctgctctttctggtgctgatataaaaaagaaaggaagaagaaaagtcacaagaagagggaaggaactggtggtgactgactagcacactgtctgaaatcagggggaacccgtatggctgactgcaatccgcacagaacgagcttgctgatgtcacagcctgaatttccacctgctgtctcatactaacgccaccagatttagcacatgcaacccacgaagaaccttggagatcaccggacatgattaaggactttctagacttctcctttctttccaccaatcacccgctaatcccagaatcctccccctaaaccttttctaatacaagtactgccttaagaccagcgaagagagacagatttgagctggattcccgtatcctcgtgggtcagctcactataaagctttccttttctcacancctangnagntcctcattgaacatgtgataatctaatacctgtgaaaactgactaatcagctgccaataatatctaatatttttcatcatgcacgaattaataatcatcatactctaaaatcttggctgccactcactacatgggtaagccttgttggccttcttcctatggcgcgggacccacattaacatcgcctattatttcgaaggaccagatatactagaagaagggggg

SEQ ID NO: 659145 - DNA, 799 bp, Homo sapiens
tgatctcatcaatctagcgggagagacagcgcataacctgtcctgacgcagtatagctgccactatgactccgctcggatgaattccactttcattataaattcagcgccaaaaaagatgttaagcttgggagtcagacaacggggcaggtgcggcggaagcgttgccgcctaacggtctgtggcgctagatcaggtggtgttgacctggtagcatgaggagaccgaattgctgtgtacgcaacagacctccacttcttctgattgagttactctacatatatgcattggacacatgacatgtagcattaaggtttatactaagtgactagattgaagagcacaatagaagagacctctacttagctcagcgattcttgaaccttggcttacctatttgttgaagatgtctttgtgaaaggtgtactgcaaggaacaaggatgttggtgattgtctccttttacccaaggtggcaccttaattactgtaccttcctcatggacaaagagtttgattctaaagggtgatttctcattgacatactatcaacaagaggtgagaaagctaaatgacctaaaactttgggagatagatcttggctctagtaagtatgtacggctatatcacttgcatagtctgggacgaagaaataagagactattcatcagtacatgcccatctactaccagatgtttttgcacacatgtcaaggggacttaccttattacttccattttatgactagtcggcttgatcctttttgatgaagaactaatcttcaacagaattaaggttacgc

SEQ ID NO: 659146 - DNA, 393 bp, Homo sapiens
aaaaaaaaggaaatcagtatactgaagagataactgcacgcctgtgtttattacaacactatttaaaatggccaagatttggaagcaacctcagtgtccatcaacagatgagttgataaagaacatgtggcacttatacaccatggagtactattcagccataaagagagaatgagatcctgtcatttgcaacatggatggaactggcaattattaggttaagtgaaataaggcaggcgcaaaaagacaagcttcacattttctcacatatttctgggacctaaacattttaacaattgaactcacggaggtagaaagtagaaggctggtttaccagaaactagagagagtagtgggttggggggtagggggatgagaatggaaaatgggtac

SEQ ID NO: 659147 - DNA, 1704 bp, Homo sapiens
ctgtctctcctgctctcgtgcttctgctgctctgtctctcctatccttcgtgtcctttcgcttcttcgtccttcttcgcgcgtggcttcagtgctctctcgcgttctgcgtgtgtttcctcttctcctgttcttgtgtcgccttgcgcgttgacggctcctcgtcggccgtcgcctactgcggtggccggcttgcgctgctgctgggtcgctcgcatgcttgtgttcttgtgtctctcttgtcgtggtgggggctcgcgttcgtctgttcgttctctcttctgctctctcgttctttctctttgtttgacttttgtcattctcttctttctccctctcttgttttcttgtcgcttttctctcttgttcctttgttctttcttgtctgtctttctgttgtgttgtttcgccctcttttgcgtctttcctgtttgctctgtgttcgtgatgctgcttgtcgctgcgctctgcgtcacgtgtactgctctcgctgttcgttgtgttgttgtgttgctctctgcttttcctgaccgtcactgctgccgtctgcgtcctggccgccgcgtgccggcgtgggtgaggtttccctataatatttaaacctcccgggaggtcctgcctcgtcttctttatagtggtgtggaaactccccgttcccaccggtctttccgccctccctgtgggatggatgccgcgccccacattctcctcaccaccccctggtgtttgttgttgagcccccctgccccccttaatggagtaggtgtgccccccccggcgggggccccccgagtctgcccccagtcgtcttccccggggagacgtttcttatgcgccctttaggggcccccgcccgcggggtagccgcggaaggtgatacccgcaacgtttggttcacgaccacccccactgagggtatatccacgtgcctctatgttggagcccccaccgcttataggcgccccatagacttttttttcggggtgggaacccccactctatttagggagaaccccaccatttttgtgtagacacaccccagagatatagcgcacgcgggctcggggtgtaagaccccgcgttttccccgccgagatttttcccccgcgcgaatttattttcgcttccggataccccacccgggcgcttccgcgcgacccacgcattgtgtctcgtgcccctctggtgcaacccccgcgggacacacagaaaaatactccacgtgtctttgttttcaccccgctctcacttttcacagaattgaaataggggagactctcacgggacacacagggctctctcgtggagacttgacacacggggagcccaccactccacacttttcaccacacttgagagagaagtttaaccggccccgggcgctggtggaactcacacgcttctgtaaattcccacgccacctcttgtggaagggcccaaggcccacgaggctctgagggcttgagggcctatgagcgcttataagagccacgccctcgggcacaacaccacgcccagagcccactcttctacccaaggaaattttaaaactatgccacggcgctggtggtgcgcccccgtaagtcccacgctaacttgggaaggctgaagccctcgaaggttcaaggctacccgtgaggctatgagtcaccaccccttgcaccttcagcctgggcgaccccgcgagaccccgtctccagaaaga

SEQ ID NO: 659148 - DNA, 1087 bp, Homo sapiens
gtgggccttttcatcatacatgcgcatgagtggaaatcgttagcccccatggatgccatgctggtaccttgttggcatctcatgtgggctaacgattccactcatgggtgcccaaggtaccagcatggtagcgtcattggaaattctctatgtggtggcggacagagtaattatgataaaagaaacacacgtgacagttgatgcagttctctccacattgcatcctcgatacgataaatgaggatgacaagatggcaatctaaaaacactgacgaagaagacaacttcttcgcgacactaagctgaaccttcaaaggcctatctgcacatgccagattgcgatggcgtcggaacatcgaccagacagcgctgcaactgcccagcagggtgaaaatgtaaaccactaccaatgaagaagatgaaaatggacaccatatgataggacacaaacacgaagttgagtaacaaccatctaattgagtcgcaatgcatggccaaaacttgtgttatggaaagaagagaatagattttaatcgaaaagaatgacgcaaaatatgggagcatagcggtagatataacaataagcagacagagccaacagttagccacgacaccacgactcaccaagtaacaagagacaacaagagatgacggcaaacaatcaagaagatcagaaacgtcgaggaaatacacatgacacacatcccaagagaatatggcaaaaaaagacaattggagatgacaaacgactacaaagagaaaaagataagcatgccagaccgactacagacaaacaaaacaaataagcgaagagatggacaacacaggcaaaacagcacgaacaatggtatgaatggaacatctatacccgagcgccacccaaacacacacatcagcacaacagaatacgcagacaactattgacatacagcaagagcaaagagtgcaatacaaatcaccacaagaaaaaaaagtagaacagaaaaccaccacccaacaaccgacaacaaaaacaacaaaacgaacacagagacacacaaaccaaactgaagccaacaacatcctccacagccagaccaacgccctt

SEQ ID NO: 659149 - DNA, 322 bp, Homo sapiens
ccgtatcggagtgcaatggctaagacgagcagatgtgttgaggtcaggagttcaagaccagtctgggtaacatggcgaaaccccgtctctacaaaacataaaaaaaaatcggccggagtgcaatggctcacgcctgtaatcccagcactttggggaggccgaggcgggcaaatcacaaggtcaggatttcaagacgagcctggccaacatggtgaaacgccgtctctactaaaaatacaaaaagttagctgggcgtggtggcgggcgcctataatcccagctactcgggatgctgaggcagaagaatcgcttgaacctggaa

SEQ ID NO: 659150 - DNA, 110 bp, Homo sapiens
tctgtgcccatagtctcagtgcactcaacggcgtcttaaaaccacaactacgtttgccttaaaactatgccctgggctgggcacggtggctcacgcttgtaatccgagca

SEQ ID NO: 659151 - DNA, 309 bp, Homo sapiens
ggtgactctacaggatctgcgagttagcggggtttttagcaatggcggtccggcgtgggctcttgaccgtttgaacctgtgtgcccggagaagaactcgagtcagcggctatcgtcaggcttttgagttgccatggaactgtgggcaagaccttaggagagacgagcagcctttcaggggaagcgtggagacaggtgatggcgccgtgtttggccttgtagttcccgtcccacagcggggcgagtgagtctcgggatcacgtggggaaaacacgttggcccttgtggaaacccgggcttgtgtggaccc

SEQ ID NO: 659152 - DNA, 549 bp, Homo sapiens
ttagtcatggagggacagcagtcagacccctcccccatgtcttatccgtagacttgaccacatcgtgatgacggtgaagagcatcaaagacaccaccatgttttattccaagatcctgggcatggaggtcatgacttttaaggtaagcacttccccaaatgccaaaattcaggtgggctaaaatttgttgataacactttaacatataacttaactctaaaaaaaaaaccacaggaaatctgagagaaaatataaagagatcaatagaggagattccaaactgaatatttggacttccagagagagaatggagaaaaaagagaggaggaaattatcatagaaacaatgcaagataactttgcagtctctacatggaaaaggttaaccaagtatccagcatgttgacacttaacatggatccttctaaaattatagaacatcaaactgaaaaagtagatcctaagagctttcatagagattaaaaagtagattatctacaaaggaaaaaaaaacaaatatcagattttccaagagaccaaagaccaaaaa

SEQ ID NO: 659153 - DNA, 1479 bp, Homo sapiens
cgaggatttttaccactgggggggcagaacaaagagatagagaggttatggtcaccccacccaacgaaaagaaatgaagaacaaagatacgcctagtatgaggagcggcgatgatgtgaattaaaacaaccgcctgcttgttctagaccgtgggatggaaccactccctcaaccaaggagagttgtgtgggatgacaacacctcttttttgatgagcgacaagacgaagcactcctaaggggtgcccaccaacaattattaattgtgttcgctgcgacgacacaccaattcttttgggctggttggtggatgggagcgcgacacaccctgtctgttgtggaggaggatagaggctgaccacacccgcgcagatagttgattacatcgtgggggggggggcgaaaaacaaaagatgtatggcgacagacacggtgtggttgggcaccctccataggagaccgcctctctcgtggtttaggaaatggatttcttctctcccgcagatgaaggataactattattatgattgtgccctccgcgcggcagtttactcttaccgcggcgggggttgtttctttaaagagagagagcaaccattcccgtcgttgaggagggagccgacatcaacagtattatttgttacatcacacagcgcttctgcgcacgggggaggtggttactcgcacacaccactcatcttgagtggaggcactacacacagtgtttctctcccttctgagagagtactgttgctaaaacattgattagtatggatgagctcggcttccccccctataacaagtagtgttctcactctgctctcgttgaggtgagtgaaggccactcactccaacaacaaggaggggtgctcttgggatgagacacctctcccaccgcgcgtgagcataacttctttgggtaaaccccccgactcttatatcacacacgcgtgtctctctctctctaaatatataaagggggcgaactagagggccctcataggtgtatttgttctctcaagcacggcggcgggagaggggggggagagagaatttacgtgcgagatataagaggggagtttcccccccccagcacagttgagaaagagtcggtatgacgaagcgcagtggtgggcctcatttcaatgatgcgtgtggtgccgcgagagaaggttctcaccaacgcactcctcctccacagacaggcctgggttaggccgacacaatccgcttttcaacggagaaccatccttttatgacgccacaaggagacgacactcactcccgaggaccaccctcggtaagaagagagggaagcacacaacacgggttttggcccctagcagcagccacataaaatagtgagagggagaaaaacgggggcccccataaaaactccgcgcccccccccccccccccccccggtggggccaagggggggtgttgttgtttccacacagaaacccctttttttttttta

SEQ ID NO: 659154 - DNA, 157 bp, Homo sapiens
catagtgtcccagtgtgcgctcaccttgcgtcatcatagtgtcccaatgtgcgctcacccggcctcatcatagtgtcccagtgtgcgctcacctagcctcatcatagtgtcccagtgtgcgctcacctggcctcattccgaatggtgtgctgataca

SEQ ID NO: 659155 - DNA, 184 bp, Homo sapiens
  misc_feature (135)..(135): n is a, c, g, or t
atcggtcggcttctggcagtcaatacatgtgtggtttttgaatcagaatttctctataaagttttttaatgattccaagaaaaattgatgaataaaatatccttcacacatatctaattaagtcagttttacttnataaactatgatgcaattatatgatgtacgacgatgaccgatcatggtc

SEQ ID NO: 659156 - DNA, 557 bp, Homo sapiens
  misc_feature (1)..(1): n is a, c, g, or t
naaaataacaacacatattcacgttttttttttattgaacaaaggactctttttctttggggggccaagttttttgttattaatgaagcccctaaccccctgggccaaagggatcctcccacctaacccttatgagaagttggtaccctaggaatgccccacctggggctttaaaaaaaaattttatttttatttttttggaaaaaacagggtctctttttgttgcccaggctgagcgggaatttttgggctaaagtgatccaaagtgaaactttggcctccaaaagtgctgatgtcaaaggtatgggccactatgcctgggcttttttcttaaaaagggactcctttaataaaaacacctgaaacaaattctgaaagcatttggttttagggggataggggaatgtgaaggtttaagggggaataagcaaaaacattataaccaaattggacccgggaattttagtttaaaagaaatggtgattccaggccccaaattttggttggttaaagcccttgtttttttatttgtagaaggggaataatgaatttacaag

SEQ ID NO: 659157 - DNA, 239 bp, Homo sapiens
attagtcagtgtaagtggcatcaatagccttcagatacaccacaccacaatccatcgacagtcgatcaaacccaacagcagtccatcctggcacaatccatgagtaagggcaaaactcccttcaacatacagtaagatcctacttagctctggcgggcgggggttggggaattacaccttcatttctgatcacaaaaggtgcgtgatcagcacatttagttcaagagactcagttagca

SEQ ID NO: 659158 - DNA, 483 bp, Homo sapiens
  misc_feature (456)..(456): n is a, c, g, or t
acccgaccatgcctgcaccagcacggccactcgaggcccttcgagaatatgtttaagaaggagccggccttgactgcaggggcgaagatcagcaaggaaaaggaagccctctccagaaccagaaggtgaagtcgggccccctaagatcaacggagaggcccagccgtggctgtccgcatccacagaggggctcaagatccccatgactcctacatcctcttttgtgtctccgccaccacccactgcctcacctcattccaaccggaccacaccgcctgaagcggcccagaatggccagtcccccatggcagccctgatcttagtagcagacaatgcagggggcagtcatgcctcaaaagatgccaaccaggttcactccactaccaggaggaatagcaacagtccgccctctccgtcctctatgaaccaaagaaggctgggccccagagaggtggngggccagggagcaggcaacacaggagg

SEQ ID NO: 659159 - DNA, 341 bp, Homo sapiens
gagcttttgcgacccggtacttgcctgctgccaggtgctgaattggatacaggatattgatacatctgagtgtgctgcacgtgctggtcccatgtgtcctctgaggtatgtaggagatatactgggggctgtatagcccactctggactggtgtcagcaccgggatggagtgagttgaatgagtccggggccccggcagaagtaggagtactgtatggatttattcacacgacagcagaggctttgtaggattgaagtccttagcataagggttcaccgttgatatctttacttgttcaggaacagggccctcatctttgtcttctcccttgatgaggccc

SEQ ID NO: 659160 - DNA, 211 bp, Homo sapiens
gtagcgtctgggctgtcagtcgctctgggctgtcagtcgctctggcctgtcagtcgctcgtgggttgggagtaaatccaaacggaatttggctttcctacatgccttaaagtgcattcctatggaattccggctcgaagcatggtgaggcattttaattattcccagtcacacacttccaccctcaggtggtgggcttaggatttccttcc

SEQ ID NO: 659161 - DNA, 626 bp, Homo sapiens
cgacgaagcctgagcgcaagagccaagccgcgccgcgcttggatgtggtgccacgctgctgctgcatctgagcgctaggccctggttcctgggagtcctcgtctgcggtgccgtcgaactgtgcgtgatagctccttagcagaagtttcattatcaagtcatggcatgtctaagcaccgtaatcaactacagtactgcgaggagtacgcaccatacggctgcagtacagtttggccggcatgctgggattggagacgataaaggtctccacaagaatgggaagcatgcatttacgtagtggcactgagaccaattttcatgacatgagctttgctgaaagtaaaacacaagtatctctgtgtcagagcctcagaattgctcagtcccaccaaaaagtaagctaccttcgaggtactggtccctacccagccttccgtggcacttgtgcggtaatagaataggaaattttgtctcacctgtgaatagatcagggtgcctgcggcagttgctggactttctccaccactgtgggccctggagtctgcgatcgccatcgcaaccggaacagatgctgtccttggcggaacagcagcttggtggacttgcgcccaggatttcaataatca

SEQ ID NO: 659162 - DNA, 81 bp, Homo sapiens
acatctgtgtacttctgtgccagcaagcttgaggttagggagacccagtacttcgggccaggcacgcggctcctggtgctc

SEQ ID NO: 659163 - DNA, 253 bp, Homo sapiens
agatagaatcgagctggtaccctatgtctcgatcgttaatagcagcaggcgcggtggatcacgcctgtaatcccggcactttgggaggcaatgtgggcagataacctgaggtcaggagttcgagaccagcgtgaccaacatggagaaactccgtctctactaaaaatacaaaatcagctgggtgtagtggcgcatgcctgtaatcccagctactcaggaggctcaggcaagagaatcacttgaaccctggaag

SEQ ID NO: 659164 - DNA, 352 bp, Homo sapiens
ggcggtggcagcggcagcagagaaggtgaattagttagccactcgatctctaaattgatccatcacacaactgcctcgaaatggattgacggcagctagccgactattatttctactttcataccttgtgttttcaagtgccattgtctgctcgctctcagggtctaaccccttcgcctcccatctctatagccccagctccctcacaggccacccacacccacacacaagagctcagttcccctccatctgcctacacctccttctcctcaaccaatgagatgcaactaatttgtcttacctcacctgatcttcgggaaacaaacggcaatacacgccacttcccggatga

SEQ ID NO: 659165 - DNA, 599 bp, Homo sapiens
ggaagggcatcaactgccatatcaacgtcaacgactgtcgctggtgcagtgtcagcatgtggggcacctgcaaggacctggtgaactgggtaccagatgtgtgttgcccacgtgtggcttctgtgaggcctggcattgctgagctgtgaactgatgactgagtgtgccagcagcccctgccacatgctggctggcctctgctgaggacctggccgactggcttccactgccactgcccccagtggcttctccgtggcctctctgtgaggtggatgtctgacctttgtgagccaatgcccctgccggaacggcgctcgctgctataacctggagggtgactattactgcgcctgcctgatgactttggtggcaagaacttgctccgtgccccgcgagccgtgccctggctggggcctgcagagtgatctgatggctgcgggtcatgacgcggtggcctggtgatgcctggcacagcagcctcctggcgtgtgtggcccccatggacgctgcgtcatgccagccaggtggcaacttttcctgcatctgtgacagtggctttactggcacctactgcatgagaacattgacgacttgcctgg

SEQ ID NO: 659166 - DNA, 703 bp, Homo sapiens
tatcacagcggaatttatggttttaaaaaagactacaaaaaggtagaaaacagctcggcacacttagagactaccacacgtgtgtgtggcaccacttttcaccaccgggagaagggagccccggtgggcacggggactgggcagggccgccccaaaagctatagcacgcggagcacacaaaatagtgatttttatacaaataggctcagatttccccattttatttccctttttctctgtgcccattaaacattttattctctcacaggctgaaaacacgtgagaaaacgggaaagaaagagaaaggacataggaaggacgggaaacaaaaaaccagagaaaagtagaaccaaaagacagacgacaatcgaaagcagcgagaacaaaagagatcacacacacgcaaaacagggaagataagaaggacacacaaagagaacagagcagaaaagcacaagacatgccaagcaaaaagaagggaaagaaacacacggggaaaacgaagagaaaaaaaacaaaagaaagagagaagccagagcagggacaacataacacggaaaaaaagagaagacaaaaaaaaagagaaaacgaaagaaagaaaaaagaaaaagagaaatagacagaacgagaagaaaaaggagagaagaaaaagagaaaggaacaaggaggactacggaacaagaaaagaagaaaacacaaaaca

SEQ ID NO: 659167 - DNA, 225 bp, Homo sapiens
tcagtgctcacttttgagtcagcattttaatcctgttgtgcatactctcataatttttcctttaccttttgcttctttcttcttgaggcagagtcttgctctgttgcccaggctggagtgcagtggcatgatctcggctcactgcaacctctgccttactgaggcaggagcatcacttgaacctgggagagtgaggttgcagtcagtcgcatcgccccactacag

SEQ ID NO: 659168 - DNA, 999 bp, Homo sapiens
gggaacatggggctgtatgctgcagctgcagtgcgtgttggacggcgtggagagccgccagggctctatcaaggggttggttgtactccagcaacttccagaacgtgaagcagctgtacgcgctggtgtgcgaaacgcagcgctactccgccgtgctggatgctgtgatcgccagcgccggcctcctccgtgcgtgagaagaagctgcgtgcctgcacctggccaaggtgctcagttgtatgagttgtttgtttggggaaagggctttctgagtgggtgtggggggccgatggaaagggctctgtttgggcctggcacctagtgcggatgctcaaggctgagttggactctggctcaatggttcatcgggggtgtgagcctgggaatgagtgacctgttgggaagttgggctccagtgcctggtccagcctcccagctgcctcgatttgtgcgtgtgaaccaactctcaagacctgctccgatgatgtcgttgatttatttcacggagaaaaggtttctcctatcactggtcgggcttccagcctcgatgacttaacgagccctcaaggggaacgcacattttctcctggacccccttgatgccggagctgctggtgttcccgcccaagaatgatctgaatgaacacccactgtaccgggcggacacctcatttcttggagggagcagtgcaggctgtctcccagcatgtggtggagcccccgcaaggtcccatgtcatcatgctgttgctgcccaggattaagaacagcagttgggttggtctctgaagaccacagactgtgctttgactgagcaagcggggctccatggcagtgtggcggcggttctgtggacggccagaggacgggggccactgtcggtacgggcaaagatgggcacagagctgatccgaaagtggacggggaccacgcgtatggtagagagactagctctcgggtccactggaggtgggcgtacgctttgtgcgttggtagggcg

SEQ ID NO: 659169 - DNA, 199 bp, Homo sapiens
ctgactcatagaggatcccctcgaatcgacggtttctctagtgtatccggttgaaaggactgagttcgagaggtgcaacagagcaggatggcagaatagaaagctgcacccatcatacccttaacagaacaccttttttttttactttttttttttaaaaaaaaaagtttcgctttgaccccggggtggggttccagta

SEQ ID NO: 659170 - DNA, 484 bp, Homo sapiens
ccagagatcaggcgcggacggatcgcccacggcacaccaggcgagcaaagatcaagactctgtataaacaagaaaaaaaaaattaaaaaaatataaatatagattaacaaagtaacagggaatataatattctcaggtgggtcatatcagcaggaacatcactcatatggtgttcatcagctcaataaaatcatcaaacacaaaacaaattattcaacggtttgaacaatggtagtcagatatccgcttaggggtcaggtcctgattgggatgaatttgcatcacattcgactaaatatggtgcttctaaatcctcactttcacacaaacaaacatcaatggggcaactgtccatatccatttccaaaaaaactatcctcttcaaaactagatggatagtagacatccataggctggatgttgtttatccatattcggctatatatcaagcagctgctttggtatatatccggtttcagtgcag

SEQ ID NO: 659171 - DNA, 845 bp, Homo sapiens
ggcggggccaccgccagcggcgtactgactcaactgcgtcgggcacctcatggagagaatggtacattctaagctccaatgagtaataagcacctcggcgtaggcggactccttaccgcgtggcccgctgtccatcgtgggtgcttgcttccttttgcgaccaccatggtactttatgtagagatactgcggatataactggactgatgcctacgggacatctgctgggggtcatgtcctctgcagcaactcgtaggggatgaccattgggaccaccagacagcacctctcagcgaagcacgagattcatggagatgcgctggactgcctggagatacaatgtggttcaacaacgggatcacgcatgccctcataaagcccccaggttcgtacacatcatagtcccctactcaagcgcctagaaacagcagacaagactggagacaataactgttgctagctgtcgtgccccatccgctgagccatgcgctgagccattcccgctgtgcttcagggaggcaggtgcacaggtgcaccactggggaattactagcccccacctggggggatgttacaacagccatatcgggttattgttaggcggactgtaagtggtaggggggatgtgtgtgtgcacgtgtgtgtgtgtgtgtgtgtgtgctgtgtgtgtgttctgtgacctcctgtccccatggtacgtcccacctgtccccagatcccctattccctccacaataacagatacactccaggactctggggagaggttgaggacaaatacctgctgtcagtccagatactctttttagcataatgagttgggcgtgttgtgtgtgtgggggggg

SEQ ID NO: 659172 - DNA, 1061 bp, Homo sapiens
ggcggctggctggggacagagcaccggccatgagcgcggagccggcaccggatggtggcgcgggggccagccgctgcgggcactgctcgccctgcactgtagcaagatgccttaaataaagtgtggagcctgaagcagaagttttgggagatgctttgccttcctttagaccacattccatcgcctttctcaagatttgctcgctgtgaccacaacgatgtagtgaagtttcctgcaagaaacgggacgattatttggaatggccagacgtattttatggctgtggccttcttatcagcacacgagaagcaaagatccaaattcccaggtcggtgcctgcatcgtgaacttcatgaaaacaagattgtcgcggcattcgggtaccaatgaggactgcctaaagtgggatgcaggtgcatgaacgtagttgaccttggcagaatggacacgcagacgaataagctggacaccagatacccgtacgtgtgccatgcggacgctgaatgccatcatgaacaaaaattcgaacgatgtgaaaggctgtagtatgtatgtcgccttgtacccttgtaatgaatgcgctaagctcatcatccaggcaggtatacaagaagtgattcccatgtctgataattaccttgatagtgacgaggcaactgctgccaggctcctgtataatatggccggggatgacattccgggaaaatacaatacccgaagtgcagcacagcattgtccattgacctttgatcacttacagcagaccgagtacaagagcttcggagttcatcatattcagtctccagaagatcgggatcatggctcataaaacgttgatcatgcccttaatctctgaacgtcaccaatactcctgataacaccaacttcaaaactattgcactcaaaaactttatcaaacaacatcctcaacagcccctagaaaaagagaccacccatttttatcctataaccaccgctataacacatagattaaaccacaccaacaatcaaagactcacaatacaaccaacacaaccaacactcatgaacatctaacaacc

SEQ ID NO: 659173 - DNA, 678 bp, Homo sapiens
ggttatgtagaaggtacaccagatcgcgcttgctctcaggccgagatcgtaatcctcctctgtggcctgtgaaccaccatgtgcacctctatcctgtggtctgtctcctatgatggagctggaaggtcagctttgacatcaatgcttcctggaaaccaaatggctgccagcatcatggccacggcacacactcaatgaggtacactctggcaccatgcctgttttgtggcctgtgaaactggctgatccatttgctatgatgatccagatgaacgaagccattccacagaaagttcaatgagattgtggctcccggcagcgtgcagtgcctggcggtgctcagggacaggctctgtgtgggctactcttctgggttctgcctgctgagcatccagggggacgggcagcctctaaagctggtaaatcccaatgacccctcgcttgcgttcctctcacaacagtcttttgatgccctttgtgcttgtggagctcgaaagcgaggagtacctgctttgcgttcagccacatgggactgtacgtggaccccgcaatgccggagggcacgcgcgcaggagctcatgtggcctgcggctcctgtcgcctgtagtatgtatatgtttactgtggcatatccctgttgctgatttaccacacgaagacaggagttgatgggatctc

SEQ ID NO: 659174 - DNA, 426 bp, Homo sapiens
  misc_feature (67)..(67): n is a, c, g, or t
  misc_feature (83)..(83): n is a, c, g, or t
  misc_feature (125)..(125): n is a, c, g, or t
aaacctatgcccttcaactccctttgtccccctgcccttccctcccttccctgtaccccccagctanagccccgttgggaaanaatgtgtccgttagtcacaaagcattgcagatgtgtcctaanaaatgcccacgctggggcccgggccgtggtgctcacacctgtaatccccagcacttcgagaggctgaggcaggcggattgcctgagctcaggatttcaagaccaccctgggtaacatggtgaaaccctgtctctactaaaaatacaaaaaaattagctgggtgtggtggtacacgcctatagtcccagctacatgggaggctgagcaggagaattgcttgaacctgggaggcagaggttgcagtgagccgagatcacaccactgcactctagcctgggtgactgagcaagactctgtctcc

SEQ ID NO: 659175 - DNA, 167 bp, Homo sapiens
agcaggctgaagcgcaaaagaagaaagtggaggcagaggtccaagttaaaccgctagtcttgttgcaccggtggaggccacaggtgcacacagcatgtaatgccaaaggctgcggggatcgcaggtacagggaccacgaaggatgcgagagatggcggagtcaccga

SEQ ID NO: 659176 - DNA, 414 bp, Homo sapiens
cttcagtgtgctttaatacagatacatgaatgttcacagaagatcgcagctgctgtcactcctgtcgatggaacctctgtagtacaccatatacgagtaggtggcttctcacaccattctgttgcagctgaactagtgcctgcaatgcttctaacgtaggctgaggtaattttgctaatatcatccacagcctactggaggattggtagccgtagctgtgacaagaactggatgcggacagcgtgaagaactcggaacctacataggacgcgaatacgaacccatactagatcattatgcgacctgacacaaacggctagctgcagtttgtgagccagaccctgtcaggtctgggaagaagtctgctagattcaaacctctcagacacacctcctgttgcttcgatggagtctt

SEQ ID NO: 659177 - DNA, 402 bp, Homo sapiens
  misc_feature (20)..(20): n is a, c, g, or t
  misc_feature (30)..(30): n is a, c, g, or t
  misc_feature (69)..(69): n is a, c, g, or t
  misc_feature (78)..(78): n is a, c, g, or t
  misc_feature (127)..(127): n is a, c, g, or t
  misc_feature (172)..(172): n is a, c, g, or t
  misc_feature (300)..(300): n is a, c, g, or t
  misc_feature (324)..(324): n is a, c, g, or t
  misc_feature (356)..(356): n is a, c, g, or t
  misc_feature (364)..(365): n is a, c, g, or t
  misc_feature (397)..(397): n is a, c, g, or t
ccgccgactggtttggagtnagcaaggacngtgacagcacccagaaatggcagcgcaagagcatccgtnactgcagcnagcgctacgggaagctgaagccccaggtctccgggagctggacctgccnagccaggacaacgtgtcgctgaccagcaccgagacgcccattccnactctacgtggggccatgccagctgggcatgcagaagatcatagaccccgctgcccgtggccgtgccttccgtgtggcagatgacactgcggaaggcctgagtgccccacacactccgtcacgccggntgctgcctccctctgctccttctnccagtcccgctcaggtttccaaccggctgccncggcggannaacacgagagtcggtggaccaagatgagcttnccggg

SEQ ID NO: 659178 - DNA, 610 bp, Homo sapiens
gtagtgttggtctgtctctgcgatggtctcagggaggtcaaatatactcaggtcacaccaagcatcagggtccggaaccgatcaagtccagggcttcatagaggctaagaaaccacagcggggatgaggaggttaactgcctccaccacccacttgtaaggcttttctcgtttctggtggggagccttcctggtcctcacgcttcggggaattcctccaagggctctggtgttcgcactgcgtccagatctgtaccgatgggctcctgttccttcgatgtggtggctgctgcaagttcctcctcactgttttcctcctcctttatggtaggagggacggagggccagttggtcagaagacttccctggccttccttgagctgggcactctggaagccgtcctttttctcgagctcccagcggcaagtacactgggggctttcagtctttgtactccctcaagaacctcctgtttccaccttccttttgatgttcgagtccagtgatcttcacagcattgctttcttccccttcattcctgcgccgtggttcctagtctaaacggcccacgcttgactccctttgtccttatgagttattccccttgttca

SEQ ID NO: 659179 - DNA, 310 bp, Homo sapiens
gggaatgagtcaatcttttcaaacataaaaacacagactccaagatagtgcaatgaagctggtacatgctgagagattgggagaagcttttgattctcagctgtgttatttgagtaagagaattccatgttaaccttgttctaatcctgaggataaacttcacatttatagggacaattttgagagaggcatactctggagttcaacagagagagttttatagagcacacgcaccctcgtatatacaccacacatgtgtacagagttatatgtgatatgcagagctatattatgaagaggaggagagcga

SEQ ID NO: 659180 - DNA, 364 bp, Homo sapiens
  misc_feature (4)..(5): n is a, c, g, or t
tcgnntttgagctgtttttccaacttgctaagaaggtcaaagctgacaatgttgatcaggccagctgtcaggcggtccttcccagtcaccacgacgttgaaccactctgagctcaaagatggcatccacccaaggaagctctagtgcaagccgaagcgcacgttggaggagaccaactccagcagcggtcactcctctcagtacaagactgcgatacctatcagaaggatgagctcccccaggaccatgatcgcagccagcagcagactgcctactatgcctatctcaaaactgacttcaggactctgcacagccagcagaatgatcacgagcccgggacccacttcagaaagatgtgcctctg

SEQ ID NO: 659181 - DNA, 735 bp, Homo sapiens
ggccaaaaatctatttttcttggggagatttccacgaaaataaatttggtttatagttcaaaaggtgcgatacacaaatgggattatttgggggagacctttttgtggttcaaaacagaggggtaccccagagagaaagtaatagaggatgttcaccacctcgaccgatgttttctaggcttcttcttgtctcaatagaacatgtcagagacgcttggccccacctggagtgggtccaatgcatatagacatgggagggcgcccccacgttgatagaggacacacatactcggcgtctattttggtgacacacaagagtgggtccaatggcaaccactctcatctggcgtgaacgacttcacacagacacactggttctatccctgataaccaggccacacagggtgaatagcccaatcctctccgcattttggtgttctcgcagaagctcctttcctgttccccccaaaataagaatagctggttccaaagatttgacaatgtcgcaccagagaactagtgtgatcgaaccaggggattcccctgcgtgcgaactataataatagcggtgcgttctacactttgagatgtgttccaaacggagaatatgacatttaagactcatttctccaggagacaatattccatacgcccattgaaataatagtgtggcttgttttccccgacatcaccagaaccacgtgattagctcccagttcaagacaatatccaaca

SEQ ID NO: 659182 - DNA, 673 bp, Homo sapiens
cacctgtaatctcgacactttgggaggccaaggcgggcggatcacttgtggtctcaaactactgagctcaggcaatccacccaccttggcctcccaaagtgctaggattacaggcatgaggcagtgaagccggacctatctttgcaatatatacaaataaaaagctgatttaaagaagatgttagacacaaatataagagataaatccaacagatccaccatttcacggttactaacaactacagtacactaatctctgatactatctgacagagctggaggatgcgaaagaccaagaccacgtggacgtacttgaccacccgtgatcatgctgcgcgttacatatagaaacaataatgatccctctacacaactggacgcaaacactcaacggacatcaaatcaaacggccgagcaaaactcgccaaagtatccactgaacggttagaagcaacacacactacacggacggggaacttccgaacaacgagggagcgctctggaacagccacaaaggatacaggccacacaagacagcttaaaagtagcaccatcgagcgccccgtcacagagcgcgtaggacagccatcaccgatggcggcgcacaagaaagtaaaaacagggacatgacacccacgcgagcagtaatagagagctgcgaggccatggcacg

SEQ ID NO: 659183 - DNA, 348 bp, Homo sapiens
  misc_feature (48)..(48): n is a, c, g, or t
  misc_feature (52)..(53): n is a, c, g, or t
  misc_feature (261)..(261): n is a, c, g, or t
  misc_feature (311)..(311): n is a, c, g, or t
  misc_feature (338)..(338): n is a, c, g, or t
tcgagacagagtctttctctgtgcccaggctggagtgcagtagcagantcannagtgattctcctgcctcagcctccggagtagctaggattacaggcatgtgccaccccacctggctattttttgtattcttagtagagacggggtttcaccatgtgaccaggctgatctcgaactcttgacctcgtgatctgcccaccttggcctctcaaagtgctgagattacaggcatgagccaccgcacccagcctcccaggcgtnagttttttgttcgtttgctttttattttttttagatggagtccctctgtnacccaggctggagtgcaacagcacgantttcagctca

SEQ ID NO: 659184 - DNA, 456 bp, Homo sapiens
  misc_feature (26)..(26): n is a, c, g, or t
  misc_feature (148)..(148): n is a, c, g, or t
  misc_feature (207)..(207): n is a, c, g, or t
  misc_feature (212)..(212): n is a, c, g, or t
  misc_feature (321)..(321): n is a, c, g, or t
  misc_feature (323)..(323): n is a, c, g, or t
  misc_feature (337)..(337): n is a, c, g, or t
  misc_feature (353)..(353): n is a, c, g, or t
  misc_feature (380)..(380): n is a, c, g, or t
  misc_feature (416)..(416): n is a, c, g, or t
  misc_feature (445)..(445): n is a, c, g, or t
aggacactttcatccaaaatgagctnacattgcttcacaagttgatttgggggcccaccaacccccacaaagtggcatcatatgaatgtacaaagaattctgagacaaagatttttattgaatttctggagattaactcacatacatntacacaaatagaatcacacacaccacatatgtcatttttcttttgtttccaaatttatnttatncatttgtaaatactgaaatgttaaatgaacaatgaacatccatatgcccaacatctaaattcaataactgttaacttttgccacatttgcttaatgtagctataaatgngntttgtatttttcanataaactatgtgaaantcaatgaagacatcaagaatgcttcangatgtatcttctaaagtgaggacatggtcatttacnggccatactatttccattatcaatatgtnaggagttaccc

SEQ ID NO: 659185 - DNA, 141 bp, Homo sapiens
cacgaggggcatctaggagctgtcccaccactgcgactcgctgatcacgatcccgaccgagaagctgatcaccgtgctcggccgcacgccaccatgatccagggttccgcgccgccaagactgtgctcgggcggtgcaggc

SEQ ID NO: 659186 - DNA, 232 bp, Homo sapiens
gctgacatgcctgcatagctgactcttagagtatccgcagttgtgctgtttgcagctgcagggtgtcattagctcgcacacgtagccatgtcagacctaagtaggacaattggattatacaaattgctgtcgatatgtctttattttctagaacttttttttattatcaaagacttccgtgatagccattccgaaggtttctatcaattgacccacgccccatccccgaaat

SEQ ID NO: 659187 - DNA, 202 bp, Homo sapiens
cgtgggtcactagcttcaaactcgtacaagacttgcatcttcagggctggctgtgcaggtctggggctaggagggcctggagttcggggtccccaggcgtgagggtcatggttgtgtgtcctctcctgaggaaagtgtgaggtgctccctaacctatgagttccgcgcccgaagggaaacagggtcctggtatcctaagggt

SEQ ID NO: 659188 - DNA, 596 bp, Homo sapiens
ctcagaagaccaggctgtagtgcaggggtgcaaacttggcctcggtgtacctgtgactccccgggcctggttacaagcaatatattctgtctgagccttccgaggggtcggatttacatgcacgtgccaccatgcccagttaatttttgtattttaagcagagacaggggttcaccatgttggccaggttggactagaacttctgacctcatgagactgcccacctcgggcttccaaagtgctgggattacaggtcgtggcaacggctcccggccgcaacatgcccatttctactgagaattaatagaggacttgtagagagagtaagagcggatcggataaatgggtctgggagcagccctggtgcccagctcctcaggtcaggatagcttgctggaccaggttggacccaggctcacaggggtgtgcctggaatgatggaagctgatggagctgccctaggaacgcgcgcagcctcgtgccgaaatcctgcagcccggaggatccactagttttatatcgttcggcaccagtgctggagctccaagctttggtaacctttagcgagggtttaaatgggaagcatggcgtaatta

SEQ ID NO: 659189 - DNA, 649 bp, Homo sapiens
ttattctagaaggatccccagggctgaagcaatcgggtaggcaagccatctgagaaaccatcctcttcataacagggggcggtaaagccgggatccggtgcgggacaaaattcttctctatagtcaactccttcaagcatataaggggtcaaacaaaagcgacggtcttcatgggacaccttcagccaaaatcaggtggtactggccacatgcagtggggctgtcttcccaggggcggtgtcagcatctccaggggtgatcccgtggacaagcgtcctccttagcccggcaccgggaccggcccctcatctcccatctgaggccctgcacgtggccttctgtagtcggactggtcccattttctggtcctgggaacatagctgggtacttttcagatttccctttggtgcacttgggtggcctcttttctggaaacaaacttttctcctcaattcttcccgggtccttcccatccttaagggccggctaacggtcccttctccggggacactggaccacacccacccagtgggggccggaacccttattcctgattagggtgacggatggtcggataaatcatgagaagccctgatatggtggagtggtaaaagtatgtcaggcgcgctgacatacacatgaggtgatg

SEQ ID NO: 659190 - DNA, 460 bp, Homo sapiens
agtcttgaagagattaactgagagtctcgcacctcttaaaggattgaataggaaacatttgccatctatggtctgaaaggcctgccacctatagactactggaaactgcctgcttcactacatagtaagaaccttggagccacaaccccttatcttaacccagacactcctttctattgatcccaggtttttagataataacttaactctcagccaatcagaaaatctttgaatccacctgtgacctgtaagtccccacccttcaaattgtcctgccttttgggacttaaccaatgtatacctcacatgtattgattgatgtcttttgtctccctaagacatataaaaccaagctgcaacccaaccaccttgggcacatgttctcaggacctcttgagacagtgctgtgggccatggtcactcatatttggctcaaaataaaactcttcaaatattttac

SEQ ID NO: 659191 - DNA, 867 bp, Homo sapiens
ggcgggctggggcagccactgcttacactgaagagggaggacgggagaggagtgtgtgtgatgtgtgtgtgtgtgtgtgtgtatgtatgtgtgtgctttatctatatttcttctttttggtggtcggtggtgcgacaggggaggaggtgctagacagaggccgagccgttgaactctgctggaccagagctacagacctatggtcgccgtggaagtgcccgctagagaaagggagaagacacgcagaggggttagcagaggcgaacctccgaaatccgcagatcatgtctctgtgggagtcgtggtctccaagtatgccccacataataaagtagcagaggctactatgtacgactttccgccaacacctaacggacatcttctggagtgactgggctggagagcccagccctgcggacgttcctggatcggctcctgacgaccttctgcatgcaacttggctagtgccctactttcagacagtgtccagcaccttcaggcctcggtgggagagcagggggaggggagcaacatcttgagaacaatcaagacccttgagagcgatatatcagagggacaccccttgaaagctggtggacactttcatgagaatatagattaaggagagaataagagctgtttatggaatcacgtcccggcaggttgcaaatgcgctttgcactgggaacacaggacagacgtcaagtataagacaggctgtggagaagactgcaggcagcaactaggggagaaccaacagactccgaaaagaccagacaagggggcgcaggatgccacgcgtatctgacagcaagaaaaaaccctggaggagactggacacagaagcccggcaagtactgaacagaa

SEQ ID NO: 659192 - DNA, 660 bp, Homo sapiens
tcgcgtcgggcaaaacttaggctaggtacgaggctgggtgttcggctcggaggaggccaaggtgcaacttccttcggtcgtcccgaatccgggttcatccgacaccagccgcctccaccatgccgccgaagttcgaccccaacgagatcaaagtcgtatacctgaggtgcaccggaggtgaagtcggtgccacttctgccctggcccccaagatcggccccctgggtctgtctccaaaaaaagttggtgatgacattgccaaggcaacgggtgactggaagggcctgaggattacagtgaaactgaccattcagaacagacaggcccagattgaggtggtgccttctgcctctgccctgatcatcaaagccctcaaggaaccaccaagagacagaaagaaacagaaaaacattaaacacagtgggaatatcacttttgatgagattgtcaacattgctcgacagatgcggcaccgatccttagccagagaactctctggaaccattaaagagatcctggggactgcccagtcagtgggctgtaatgttgatggccgccatcctcatgacatcatcgatgacatcaacagtggtgctgtggaatgcccagccagttaagcacaaaggaaaacatttcaataaaggatcatttgacaactgg

SEQ ID NO: 659193 - DNA, 658 bp, Homo sapiens
  misc_feature (26)..(26): n is a, c, g, or t
  misc_feature (29)..(30): n is a, c, g, or t
ccctttacggctagtagaggctgggngtnnaatcggccgacggctcggaggaggccaaggtgcaacttccttcggtcgtcccgaatccgggttcatccgacaccagccgcctccaccatgccgccgaagttcgaccccaacgagatcaaagtcgtatacctgaggtgcaccggaggtgaagtcggtgccacttctgccctggcccccaagatcggccccctgggtctgtctccaaaaaaagttggtgatgacattgccaaggcaacgggtgactggaagggcctgaggattacagtgaaactgaccattcagaacagacaggcccagattgaggtggtgccttctgcctctgccctgatcatcaaagccctcaaggaaccaccaagagacagaaagaaacagaaaaacattaaacacagtgggaatatcacttttgatgagattgtcaacattgctcgacagatgcggcaccgatccttagccagagaactctctggaaccattaaagagatcctggggactgcccagtcagtgggctgtaatgttgatggccgccatcctcatgacatcatcgatgacatcaacagtggtgctgtggaatgcccagccagttaagcacaaaggaaaacatttcaataaaggatcatttgacaactgg

SEQ ID NO: 659194 - DNA, 639 bp, Homo sapiens
ggacgcgtgggtcgacccacgcggctcggaggaggccaaggtgcaacttccttcggtcgtcccgaatccgggttcatccgacaccagccgcctccaccatgccgccgaagttcgaccccaacgagatcaaagtcgtatacctgaggtgcaccggaggtgaagtcggtgccacttctgccctggcccccaagatcggccccctgggtctgtctccaaaaaaagttggtgatgacattgccaaggcaacgggtgactggaagggcctgaggattacagtgaaactgaccattcagaacagacaggcccagattgaggtggtgccttctgcctctgccctgatcatcaaagccctcaaggaaccaccaagagacagaaagaaacagaaaaacattaaacacagtgggaatatcacttttgatgagattgtcaacattgctcgacagatgcggcaccgatccttagccagagaactctctggaaccattaaagagatcctggggactgcccagtcagtgggctgtaatgttgatggccgccatcctcatgacatcatcgatgacatcaacagtggtgctgtggaatgcccagccagttaagcacaaaggaaaacatttcaataaaggatcatttgacaactgg

SEQ ID NO: 659195 - DNA, 760 bp, Homo sapiens
tgaggtgatctagaggatctcatgtagtcgctctcggctttcggctcggaggaggccaaggtgcaacttccttcggtcgtcccgaatccgggttcatccgacaccagccgcctccaccatgccgccgaagttcgaccccaacgagatcaaagtcgtatacctgaggtgcaccggaggtgaagtcggtgccacttctgccctggcccccaagatcggccccctgggtctgtctccaaaaaaagttggtgatgacattgccaaggcaacgggtgactggaagggcctgaggattacagtgaaactgaccattcagaacagacaggcccagattgaggtggtgccttctgcctctgccctgatcatcaaagccctcaaggaaccaccaagagacagaaagaaacagaaaaacattaaacacagtgggaatatcacttttgatgagattgtcaacattgctcgacagatgcggcaccgatccttagccagagaactctctggaaccattaaagagatcctggggactgcccagtcagtgggctgtaatgttgatggccgccatcctcatgacatcatcgatgacatcaacagtggtgctgtggaatgcccagccagttaagcacaaaggaaaacatttcaataaaggatcatttgacaactggaaaaaaaaacacaaccaaaaaccacacacaacaaaaaacaaccacaccacacaaaaacaacacaagagcggggggccgcgccaaaaaacaacccccggggg

SEQ ID NO: 659196 - DNA, 894 bp, Homo sapiens
  misc_feature (672)..(672): n is a, c, g, or t
  misc_feature (674)..(674): n is a, c, g, or t
  misc_feature (894)..(894): n is a, c, g, or t
ggacgcgtgggtcgacccacgcggctcggaggaggccaaggtgcaacttccttcggtcgtcccgaatccgggttcatccgacaccagccgcctccaccatgccgccgaagttcgaccccaacgagatcaaagtcgtatacctgaggtgcaccggaggtgaagtcggtgccacttctgccctggcccccaagatcggccccctgggtctgtctccaaaaaaagttggtgatgacattgccaaggcaacgggtgactggaagggcctgaggattacagtgaaactgaccattcagaacagacaggcccagattgaggtggtgccttctgcctctgccctgatcatcaaagccctcaaggaaccaccaagagacagaaagaaacagaaaaacattaaacacagtgggaatatcacttttgatgagattgtcaacattgctcgacagatgcggcaccgatccttagccagagaactctctggaaccattaaagagatcctggggactgcccagtcagtgggctgtaatgttgatggccgccatcctcatgacatcatcgatgacatcaacagtggtgctgtggaatgcccagccagttaagcacaaaggaaaacatttcaataaaggatcatttgacaactggtgaaaaaaaaacaaacaaaaacatcccacaaancnccccacaaccaccaaaccccgcagcaacgacccgagggcagcacagaagccgggaggggggcacaaacaaggaggaacaagacacacgacagcacggtcccagacaaagcgagagcagccacaccaagattcacgtacaacaaagagagtagaacccgagcagcaccaccaaaggagagccaagcaacacgaaagagccgagaacgcaccgggaaaaccn

SEQ ID NO: 659197 - DNA, 810 bp, Homo sapiens
  misc_feature (26)..(26): n is a, c, g, or t
  misc_feature (29)..(30): n is a, c, g, or t
ccctttacggctagtagaggctgggngtnnaatcggccgacggctcggaggaggccaaggtgcaacttccttcggtcgtcccgaatccgggttcatccgacaccagccgcctccaccatgccgccgaagttcgaccccaacgagatcaaagtcgtatacctgaggtgcaccggaggtgaagtcggtgccacttctgccctggcccccaagatcggccccctgggtctgtctccaaaaaaagttggtgatgacattgccaaggcaacgggtgactggaagggcctgaggattacagtgaaactgaccattcagaacagacaggcccagattgaggtggtgccttctgcctctgccctgatcatcaaagccctcaaggaaccaccaagagacagaaagaaacagaaaaacattaaacacagtgggaatatcacttttgatgagattgtcaacattgctcgacagatgcggcaccgatccttagccagagaactctctggaaccattaaagagatcctggggactgcccagtcagtgggctgtaatgttgatggccgccatcctcatgacatcatcgatgacatcaacagtggtgctgtggaatgcccagccagttaagcacaaaggaaaacatttcaataaaggatcatttgacaactggaaaaaaaaaaaaaaaaaaaaaaaaaaaaaaaaaaaaaaaaaggggggtttttttgggggggggggaaaaaaggtttaaagggaggggtaatgttttggcccctttttggaagggggaaacggggcccaaagggggaaaagaagcgggtcgaa

SEQ ID NO: 659198 - DNA, 430 bp, Homo sapiens
  misc_feature (32)..(32): n is a, c, g, or t
ggggggagggggagggtggcccatacggacgntcgttaggagcgaccggagttccttaggattacagtgaaactgaccattcagaacagacaggcccagattgaggtggtgccttctgcctctgccctgatcatcaaagccctcaaggaaccaccaagagacagaaagaaacagaaaaacattaaacacagtgggaatatcacttttgatgagattgtcaacattgctcgacagatgcggcaccgatccttagccagagaactctctggaaccattaaagagatcctggggactgcccagtcagtgggctgtaatgttgatggccgccatcctcatgacatcatcgatgacatcaacagtggtgctgtggaatgcccagccagttaagcacaaaggaaaacatttcaataaaggatcatttgacaactgg

SEQ ID NO: 659199 - DNA, 427 bp, Homo sapiens
ctgcctctgccctgatcatcaaagccctcaaggaaccacctcaatctgggcctgaggattacagtgaaactgaccattcagaacagacaggcccagattgaggtggtgccttctgcctctgccctgatcatcaaagccctcaaggaaccaccaagagacagaaagaaacagaaaaacattaaacacagtgggaatatcacttttgatgagattgtcaacattgctcgacagatgcggcaccgatccttagccagagaactctctggaaccattaaagagatcctggggactgcccagtcagtgggctgtaatgttgatggccgccatcctcatgacatcatcgatgacatcaacagtggtgctgtggaatgcccagccagttaagcacaaaggaaaacatttcaataaaggatcatttgacaactgg

SEQ ID NO: 659200 - DNA, 398 bp, Homo sapiens
  misc_feature (56)..(56): n is a, c, g, or t
  misc_feature (71)..(71): n is a, c, g, or t
ccgcaccaccgcgccaaacgagcgacccgatcccctccccctaaaagaagagaaanaaaggcttattatgnaactggtgccttctgcctctgccctgatcatcaaagccctcaaggaaccaccaagagacagaaagaaacagaaaaacattaaacacagtgggaatatcacttttgatgagattgtcaacattgctcgacagatgcggcaccgatccttagccagagaactctctggaaccattaaagagatcctggggactgcccagtcagtgggctgtaatgttgatggccgccatcctcatgacatcatcgatgacatcaacagtggtgctgtggaatgcccagccagttaagcacaaaggaaaacatttcaataaaggatcatttgacaactgg

SEQ ID NO: 659201 - DNA, 930 bp, Homo sapiens
  misc_feature (484)..(484): n is a, c, g, or t
gccttgtccagtgaaacaccctcggtgtgaagttcagttcgttctctcctctcctctcttcttgtatgaacatggtgcggactaatagcagacggcgttccaggcactatacagaattagtggtggctgctcgagccctccagaaaggtgctaggttcttccacctctgtcattagttcagacgatcagtttcatcgaggacatgctgagcattagtatgcaggtagggaaccccgtttgcgtgcgcccaagtcccaagtggctgaaaggattgggagaattctttagagtggtccccgtaagagattctgaggagcacgagaactcatgacttcctgaaagaggctgggaggcaggggttcaggaaaagcaaacgaggacaaatgcatgtcctttgtcatgcgtgatcacgcggatatgatgatgagggaataggaatctgttctcactttgcatcttggagataacgtctaccttgtttgancccttggtattctagaaactgtaaagtgccaccataaattgtgttggtgcgcaattaggcttgtggaacaggcctctaattaaaaggattcagcgtctagatgtagatgttcagaggtagttgtgacatttgagaatgcgtacgactaatgatggtaacttagacttagtattcaatatgaatgcatcgttcgggttctctcaaccaattaggtgtctagggctgctgacatcactcgtgcctcgtgttcaataacagcatgtggattcgagattgcttcgctgtggccggcggcactattggggcggaaatgggaggggcccatgaacccctctgggaaagcagggatttttcctaactggtttctcggaaacaaacaaattgggcggccgaataacacgggcgccggaatatccgggcaagggccaaacggggaaacggtttcc

SEQ ID NO: 659202 - DNA, 781 bp, Homo sapiens
aggttgatggtatgcaggtccgtgcggtgctttaattcagtgacggggctgtggggtctgtacctgagatctggagtggccggcagtaccaagcacgctccaccatgccgccgaagttcgaccccaacgagatcaaagtcgtatacctgaggtgcaccggaggtgaagtcggtgccacttctgccctggcccccaagatcggccccctgggtctgtctccaaaaaaagttggtgatgacattgccaaggcaacgggtgactggaagggcctgaggattacagtgaaactgaccattcagaacagacaggcccagattgaggtggtgccttctgcctctgccctgatcatcaaagccctcaaggaaccaccaagagacagaaagaaacagaaaaacattaaacacagtgccgagactagtctctcgtctctcctctctctgtggggctgcaaaaagataccgccgggggagataacggcaaagagtgcgtgctccgggcgcgatggaatgagggccggtggtccgcgacccattccatcgaggggagcccgaggacgggtactcacaaaaagtgctgagggggatcacaaacttacaatggctgcgaaggggcacctttccagtggccatcttaacacgtcattttttcaaaagacgtgggcacgtggttgaagaatgtccctctaatgcttgaagaagcggaatagtgggcagccgatacctctgtggaatttgaagaaacggggcgtgcttaagcatgggaagggtattgccgcgtactg

SEQ ID NO: 659203 - DNA, 380 bp, Homo sapiens
ctcaacatgaatttgtttcattgaaccatcagaaagtaaagggatcactatctcagccacccgtgtagacacaatctgtggttgtttgacatcaccattattcctgaccaaatttacatattaccaataagcaaccattttcttacacttacacctaactacttaatggttaaaaaaaaaaaaggggcataccattaatacagtgaaaaaaatcacatgttcagggtagctacagcagcacagaggcatcaccagaatacctgtgccagctgttaaacagaagcaacaaacagcaggctttctgtttccatctggaatgctttgttttgattaaaaggtactgtaggccaggctcagtgtctcacgcctataatcccagc

SEQ ID NO: 659204 - DNA, 233 bp, Homo sapiens
  misc_feature (70)..(70): n is a, c, g, or t
catgctttcgagtctggtgagattataacgcgttaccattaaagtatgcgttggatcgttactcctattnaagcagaatatctccgttcaacacttgctgccctgttgcatcagaacatactcgactccgatattggaccttttgttggttagaaatgtcttgatccaatgggatctaattgagctaaagagcttctgctcgcgcagaagaaactaccgggttccgaggctac

SEQ ID NO: 659205 - DNA, 361 bp, Homo sapiens
agctaggcgaatctcctcctccttactatttggggtgccttaacaactgtcgtgactccagagaagccgatccccatttttattgaaagatgtattgagtacaacgtctccaaggacttctggcgcggaactgatctaccgggtgagggtgggacaatctctgagccagaagcggctgccatgatgcatagacgggagttggtggactagctgcatcgcgcaggaagataccccagggggatcagtccagcaggatccaccagaggctgcaggtgctcatgcttgggtgcttgagctatgcggctagtggtgcaagacgagctagcggttagcgggaaacctggtatggagaaggagaggc

SEQ ID NO: 659206 - DNA, 914 bp, Homo sapiens
gatgaacttcctggctgtcaagctcccggcctgtggctgactcaatgcgtgagggctgctgcggaacagtctgccgagtgctgattccctgcccagtgctcctgtaaccgccatggcatgtggccccttgccaatgtcccagcccctgtgaccccatgagcatggcactggatacacctgggggactgccccccaggcaggagagacgaggacgctggggaggggatccagtgctcccaatcgcatgctcagcttcagtgactgccctgctgtccaatcatcgccaaccgtcatgatcctgcctgtgacccacacggagatctccccagaacaggtaacggggcatgtgctgtgctcgtgcgtggtgtggccctgcgcaaggatatagggtccccgatgctcgacctggcacagggttgctgaccctgcaacgccttcgaaagcttctgaggctaaggagtgcaagaggcggggaggctagcggccctccatatgtgaaaaggggacaagcggagtccaacaaggtcctgcatcagcctgtgctcacccctgtgcggagggtacctgggctacctgggagaggttgtggagactaggggcatcctaagtggctctgtttcccgatattcatgtggacaaaagtgcaatggtaacccctggactagttgagccctgtaaggtgcaccaagtatttctggtacagaagggaacatcggtatcctagtgtggacctttcaaccgctaagatggaaccacgaatgtgttattcttcgtgcagtgtgcaagagaaggtttgtcccaagatcatggttagagacgcacttagtgatagacgtcgctccttgacgttataactcgctggtaccatctgccccacggtgcacatgaggggggactgagttcgctaaaggctg

SEQ ID NO: 659207 - DNA, 181 bp, Homo sapiens
cgcgcgacagctcctgagggaaacttcggagggaaccagctactagatgttgtagatgtgtggtattatttctgagggctctgttctgttccattggtctatatctctgttttggtaccagtaccatgctgttttggttaccgtagccttgtagtgtagttcaaagtcaggagctggtcga

SEQ ID NO: 659208 - DNA, 87 bp, Homo sapiens
ctagaagattcagcaaagtacttttgtgctcttggggaactaatatatttctactcatgggggatacccggcaccgataaactcatc

SEQ ID NO: 659209 - DNA, 663 bp, Homo sapiens
gcttctgctgcttctcctaatggcggcgtctgcgatggtccggagcgagggctcggcaatctgggcggcgtgtccagcaacagattataggatgcagtacgccacggggacgatgctcaagttccactatttgtgtttcctgaggttataggcgggtgtttgaggagtacatgcgggttattagtcagcggtacccagacatccgcattgaacggacgagaattacctccctcaaccaatatagtatgatcgacatagcatctttcctgtcagtctttcaaatctagtattaataggcttaataattgttggtaaggatccttttgctttctttgggcatgcaagcgtccataatcactctgcgacacgctgtggtgccaagaaagagataaggtttgatgcaatgtatgattggttttcttcttgagcaatcatgattgagaaccagtgtatgtcaacaggtgcatttgagataactttaaatgatgtacctgtgtggtctaacgctggaatctggtcaccttccatccagtgcaagcatacttgttcaaatttcttgacaagtgaagatgaagctcaatgtgcatatggattcaattcccacagcatcgatcatagcaccacctatcatcactgaagactcttttgcattaggggatcatg

SEQ ID NO: 659210 - DNA, 823 bp, Homo sapiens
caggctggtacgccccgagttatgggatggctttggcttctgatagtcatggactcactaggctgctgaggaagatcaataatacctactggaatcagtcatgagaagtcaagcatggaaattgtgaattgtgtgtgtggccagaccagtacctccaagtgttcagaagatgtgtgaccagacaaaacacagtaaatgctgcccagcaaaaggcaatcaatgctgcccaccacagcagaaccagtgctgccagtcaaaaggcaatcaatgctgcccaccaaaacagaaccagtgctgccagccaaaaggcagtcaatgctgcccaccaaaacacaatcactgctgccagccaaaacccccatgctgcattcaggccaggtgctgtggtttggagaccaagcctgaagtctcaccccttaacatggagtctgagcccaactcaccgcaaactcaggacaagggctgtcaaacccagcagcagccccatagcccacaaaatgagtccaggccaagcaaatgagagcagaagaagtcaaacaaagaagaagtccctggggccatgcctttcactttgtagggtgggggattactgagagtcaggctagacctgtgtttagagaagcagttttcacagtgactaccatttccacccaatgagaggctcctatttcccatcatagctccctaccctagggaggcctccatctggaaatgggaggatgaagaggctagaatcatctttcctagtgatcctgacatttagacagcacagaaataaagagcaataaaaagaaaaaacaaaaaatcttccagggctgaaccc

SEQ ID NO: 659211 - DNA, 879 bp, Homo sapiens
  misc_feature (221)..(221): n is a, c, g, or t
  misc_feature (444)..(444): n is a, c, g, or t
  misc_feature (490)..(490): n is a, c, g, or t
  misc_feature (492)..(492): n is a, c, g, or t
  misc_feature (543)..(543): n is a, c, g, or t
  misc_feature (650)..(650): n is a, c, g, or t
gggcagaattgagtgccacctaagctgggcttctgtgtgccaaaatgctggtgggtgaaattagtgaaattctttctattcattcctttgcccttctcccaagaaaacccatggggaaacaaattacaggggatgaattcctttagaactttccctacttagagtgtttgagattcagtttcaaaaggcactccatctgtgtgtgtggtttagagagcctntgtttgtaaattccattaaatttccttttgtagggcaggagctctgtactcagcagttaaaagattcatctggagtcgcaaaatgaaaagccgtgttctaacctgaggaatcagttaggggacaggagttccgtgggccaggaatgggctcagggagtggggctgcgtgtcacacacagtagctgtgttgcagtggcctagggccttggggattgtctttagngaaacaccctgaggggaagcaggtaaagagcctgggcagtatttgncnagtttcattgttttcctcctgctgaggtctagcagagcccttgctttgtcntctcggctgggtctggctgccagctggtgtgatttgagaaactgaccttacgcgcagtcaaggtccagctgacaaggccttgtattccttggctggccgtgattggncctttcctctgcagaaagcagcttagggaagcccaagcaaggagtgtggccggtagaaggcctcgtcgttccttctggagccagccagcacacaacgttttccagatgcgtgagtctggtttgtgacatcccgttcccttctgccggttggtctgatgcaagaggaggagttacagttgctctgaattttattctcagctgaaaatgtagcacgtgtagaaagtgaacc

SEQ ID NO: 659212 - DNA, 334 bp, Homo sapiens
cggcagcggcggctataggcatgcgacgcggcgcgtggtgagcagtgcgcgcggcggcggtggcggcggtgtgcggggtaccttggctcggccgtgacgcgggtcgagcgccgaatcggccgggggctccgctcgttacgcggaccgggcactccctaggatggtgccttggatctgacgtagtcggcgcgcacagtttggtcccagtacgtgcgtgctcgtaccgcgttaccgcattggtaggcagtcgtagcggcataagctcttatatcgcgggtggtcgccgatcttcggtgacgaattacgtcggcgtaggcctccctggttcgctcct

SEQ ID NO: 659213 - DNA, 221 bp, Homo sapiens
cgttatagtcaccgtggtaggaaaagaggcagattcattgcactgttatctttattatttgtacatgtttaaaattttccattaaaaaaagtttaaaggccaagtgaggtggctcatgtctgtaatcccaacactctgaggggccaaggtgggcagactacttgatgccaggagctcaaaaccagccttgccaacatggcaaaaccccatctctaccaaag

SEQ ID NO: 659214 - DNA, 319 bp, Homo sapiens
tgcaatttcatatggtagttctgtttgtatcttttctctgcatcctcaccagcatctagctatttcactctctttttaatgatagccattcttactggagtgagatgatacctcactggttttgatttgcattttcctgatgattagtgataatgagcttttttcccattttttgggccatttatatatcttcttttgagaaatgcctgttcaggtcatttgcccttttttaaaacagagtagagttttttgttttaatttgtttgtttgtttatttactgttgagatgtttaagttccttgtatattctggatattaa

SEQ ID NO: 659215 - DNA, 691 bp, Homo sapiens
caggctggtacgccccgagttatgggatggctttggcttctgatagtcatggactcactaggctgctgaggaagatcaataatacctactggaatcagtcatgagaagtcaagcatggaaattgtgaattgtgtgtgtggccagaccagtacctccaagtgttcagaagatgtgtgaccagacaaaacacagtaaatgctgcccagcaaaaggcaatcaatgctgcccaccacagcagaaccagtgctgccagtcaaaaggcaatcaatgctgcccaccaaaacagaaccagtgctgccagccaaaaggcagtcaatgctgcccaccaaaacacaatcactgctgccagccccatagcccacaaaatgagtccaggccaagcaaatgagagcagaagaagtcaaacaaagaagaagtccctggggccatgcctttcactttgtagggtgggggattactgagagtcaggctagacctgtgtttagagaagcagttttcacagtgactaccatttccacccaatgagaggctcctatttcccatcatagctccctaccctagggaggcctccatctggaaatgggaggatgaagaggctagaatcatctttcctagtgatcctgacatttagacagcacagaaataaagagcaataaaaagaaaaaacaaaaaatcttccagggctgaaccc

SEQ ID NO: 659216 - DNA, 92 bp, Homo sapiens
ccttgaccgggtcgagcagcgaccagtcgccatccgggagcacatagcccttcggaaatggcgcgcgcagctcgagcccgagcgagcgcaac

SEQ ID NO: 659217 - DNA, 1161 bp, Homo sapiens
cggcgcgcacactgctcgctgggccgcggctcccgggtgtcccaggcccggacggtgcgcggagcatggcgggtgcgggcccgaagcggcgcgcgctatcggcgccggtgtgccggagggagacatggaacgcaggcgacgcggaggaacgatgctggaccagctcgaacgaagctgctgtgacgtgctcggctgccggcaggtgcacgggcgagggtcgtgaccctgcaggcggaatatcacgctgctcaacgtgtgtggctcatcagtcgtggggacctattgatcgtgctctcggcatcttcagttgacggccacactggagcagttgacttcataggacggcacggctcgccggggctggcgctggtggtgtgggccgcgtgcggcgctcgtatcttcaatcggtgggactcagctcgtggctatgcggagactcggtagccagcaatctccaaagtcgtggcggcgagtacgtcctacatgtgctggtaggctcgtacggctcgactgtccggacgttccatcagagcgtctggatctgacgctaggatcattcattgcctggccttcatctgcaagtagaggatcgtggcccttgggtcttccgtcaacgctacactgtatccaagccagcatcgttacctccagctagtccgggtgcccggatgtgggcagccaaagctctgtggcctgcctctgcgatgtctgctgttcacgagcgttagactgctagtgctgttagagtgccgcagcccgggttccggatgcctttggcgccggcaatctcttgtcctgggcccctgcatcatccctgctgaggattcggtccagaatccgggcacagggggatggtgttccaatgtcgaatcccgagtcttaattgtgaaggcacgaactgtgattgggggacacatgtgtcggaattaattcgagggaactatgtcacataggaggaggacataattagaagacacaaggaaaaaattaagccaaaaagacgagacgggccacaaagagcgggacagcacagcgagaggagacaccggacatcaccatgacagaagacacaaaagacggcacgaaaccagggacacgaacaccaaaagaagcaaaaaaggaaaagcaacggagaagaaaaaagaaagaaccgaccacaag

SEQ ID NO: 659218 - DNA, 179 bp, Homo sapiens
aagtacctcgggccatctgctgaaagctgatgctgctatactccggacatatcagctccaactactgggcttaatttccaaccatttgcatatggtgtgaccatcttcttattggtcattacacgtgctgtagcattattcacctcgattttacggccctctaccacggtgctataacg

SEQ ID NO: 659219 - DNA, 180 bp, Homo sapiens
acctttaagaataatgtcctgagtcaggcgtggtggtgcgtgcatctagtcccaactatttgggaggctgaggcaggaggatcgcttgagcccaggagtttaaagctgcagtgccctgtggttgcacctgtgaataactgcactccagcctgggcaacatagcgagacctcatctccaaa

SEQ ID NO: 659220 - DNA, 121 bp, Homo sapiens
cagctcggacaagtcttttcttaggtgtgtgtatttcctttcagagagtgcataacatttacaaaaatacacaccagcagcagtcgtcgctaagggctattaattctgtacctaggcgcct

SEQ ID NO: 659221 - DNA, 475 bp, Homo sapiens
tcctttctaaacttttatggaaaaaaaaaccgagccgaggtgtgctggatcccttttacaaaaaagccgtttctcatacaattggagtgctatggaccccacttaccaccggggctgagagagactgttctctatctacaaatcttaagctccccagagtacatcagggctcagaactggggtcaaagctctgggcaaccaatggtcctgggcatgatgtcgtgggatcccagcaatcagcgtacaggcgacaaatttgtgagattagcacccttgtgccctgggcagaagaaaacacaaaaaaactccgaggggccccaaatatggaaatagggcacaaacactacagcgtgaaaataaccgtgtccgaggcatgccggaagaggcgcattgctccagcggcatgcgaagagaaaccccataaccaggaaaactcacctagaaaccgaggaatccacatggaaaagagaagtat

SEQ ID NO: 659222 - DNA, 245 bp, Homo sapiens
  misc_feature (155)..(155): n is a, c, g, or t
tctagagatcctgtgcggtgctttcactcctggccctgtgatttctagaagaagggagaaggagggaggtgaccggcgagcgctctcaaaggcagctggtgccacggtctgcggacacgccctcccccacacacgtgggatccccgcagcccggnagccgatccacactgggggaaggcggggctgcctgaaccatggagtgacacgcttccgtcctggacttttttgcgaaacatattcgcaaa

SEQ ID NO: 659223 - DNA, 309 bp, Homo sapiens
gggggtttttttttttaaaaaaaaatttttggccaaaggggcctttccccccaaaaggggcccccgcccaaatttttttttttccccggggggtgggggcccagggggggtaaaaaaaacccccaattaaattggggggggaacaaaaaggggggtttttttttggtggggccccccctttttttttttttccccccggggccccccccccctttgggggggttggtttaaaactttccccgggggggttgggggaaccccttttaaaaccccggggagaatttttttaaaaaagggttttttccccca

SEQ ID NO: 659224 - DNA, 1412 bp, Homo sapiens
gggcgaatggctcgtctgtagtgcacgccgcgggccagactgcgaccccggccccgcacccacgggaccccggacatggacgaactgttccccctcatcttcccggacagagccagcccaggccatcgtggaccccatatgctggagatcattgagcagccaccaagacagacggggcatgcgcttccagctacaagtgcgaggggcgctccgcgggcagcatcccaggcgagaggagcacagataccaccaagacccacacccagcatcaagatccatcggctacaccaggaccagggacagagcgcatcatcccatggtcaccaaggaccctacactcaccggcctcaccccacacgagcatagccaccgcaacggactgccgcggcacgcgcttctcactgacgcgctgacccctctgcccggaccgacatgacatccacagaacccagaaacctggcgaactccaccgacgtgacgcacacgcgggaccctgcgacacaggctaactcaagcaccagcccgcatccacagacccaaaccacaaagcacctcccaagctccctatagcacgacacagcgctgccggacatacgacgctgaactgctgctgccggctcccgcatacccagacgcgaccagacgccggggaccccaaacagcgcaagcgacccatcacgcccctgccccgacatgacccatcacatcaatcaccactctttcgacacaccggcacccccaaaaacactggccgaagcccacgagatcaagcagactgcaaccacacaacctcctagcaacccgaacctacgcgagcgcccaaccagaaaagccatccacaaaccgtccgatgaacacagcgacagcccacacacacaagcaccacacgaaagagacacacaaccaccaagacccacacaacagcccgacgcaccaaactcacccaacagccacaccacaacaacaccacacaacatacgaaacacaaaaccacacaccagccaccacaccaccagcacgacaaacacagcgcaacgacaaacaccacccgcaaccccccacaacgcccgccccagaccaccccccaccgcaccacacaaccaccaacacaaacccacgccacacccacacaccccacaccaacacgccaccaccaccacgcaccacgcacgaccaccacacaacgagcacataagccgagaaccgcaagacctgatgccaaagacccgaagaccaagaccgagacaaaccacagaagccacacagccacacgacacccacaacccacctacacacacccacaacagcgcaccaccaccaccacacccaacccacacccaccacacacacaaacacaaaacacgcaacagacaccaccaacgaaacgccgcacgaccgaccacccgacagac

SEQ ID NO: 659225 - DNA, 207 bp, Homo sapiens
taatggtgctcagaaatgtaaacttctggaattcacgtttaaagactaattggagggccgggtgtggtggctcatgcctgtaatcccagtatttgggaggccggggcgggtggatcacctgaggtcaagagtctgagaccagtctggcaacatagcgagaccccatctctgaaaaaaaaaattgttgaaaacacctcagttttctct

SEQ ID NO: 659226 - DNA, 1134 bp, Homo sapiens
gctcggccttagtgtgtagttgtgggtcatagtggcacaagagaagactcttggtacaggtcacgtatggcttctcggtgagcagaagctactgggtgaccatccgtgctgccggagactgtctctcagcaactgggagcatgctggaggacaggctaaggaagcgtgcagtcctgtgttcaggctcgatcagtgagacactctgttatggggcgcctggtggtccgctgtgcagtacacgttccaaaaggacgggtgcccgctgagaagcgcggtcgagacactctaagccatctcgcggtcagggggccccatcgcgttggaagacagcccttgggcagaacaccgcagagagccaagggggtcaggacttggggactcgatcgcgagggacattgaaaggcactcctgtcttcaggcgttgaagtaaggttgcccgtatatggaagttgcgcgtgtgatctcgcaagagagacaagttctcgagaggcaggttccaatggtgcgatacagattggagcaaccctggagagtggttgctggggctgtgcaaggacgcgcccagaggttgtcacctggggcaccaggggcaggggccggggacaagaaggaagggaaaggcaacagggaaagtggcgcaacggaggggaatttcaacaccgaaaaagattcaaaccaaggcccttgaagaccccaaaggaaaggaaacacgagacctgtggcatggatacattgggcaagacgccgcaggcccagtggtccgctaacgtacaagcaacagggacaaaagaccacccagttggcggaacgaacacgggggaggaacatatcaaagccggttcattcagtgcttggaatgcgggaagaaattgaggggcttacaacaaattgaaacagaacagcacggatttaacagtagagcgattccaaaaggggcaagaccgaaggggacatggtccgttatcccggtgagggaacccactgtagatacctcgttcaaagtaagagagaccccgcttacgggtgtacattccaccccatgacgaaaggatcttagcagcagcgtggaactcagtaagaacgacccgtggttgaagagatcgtggggaagaatacccgggcgaattattaccg

SEQ ID NO: 659227 - DNA, 460 bp, Homo sapiens
cttcagcattcaccacagcagtgaatgcatgaggccagaggttttcaaactctttaaataagtgcatattatttatttttatttatttattttgagatggagtctcactctgtcacccaggctggaatgcagtggcactatctcagctcactgcaacctctgcctcccaggttcaagcaattttcctgtctcagcctccccagtagctgggattacaggcgcctgccaccatgcctgggtaattctttgtatttttagtagaaacggggtttcaccattttggccaggctggtcttgaactcctgacctcgtaatccacctgccttggactcccaaagtgctgggattacaggcattagccaccacgcccagcctagcagcaactttttagttatggtggtcagcagtcaaagagggcatagatagctgcaacatacaaaatagatgaaaacttcgaatg

SEQ ID NO: 659228 - DNA, 277 bp, Homo sapiens
gggttttttttcccccccgggcccccccaatttgggggggcagggggttttttttccccccccccttccccttttaccccttttttggggggggggttttttccccggggggaaaaggggcggggcttttaaggggcctttttccccccctggggttttttttttccccgggtattttttttacccggggttcccccccctttttccccccccccccccccccgggggggcccgggggggtgttgttttttgggggaatttaaacctttttccccca

SEQ ID NO: 659229 - DNA, 421 bp, Homo sapiens
acgcggtgcacatgtgtctgtgactctactatagctcactctgtagcacctatattctgtgcacatgtgagagctctcacattctatcagagcagagggaagtctctgtcacgtacccacgccacaagcctcaagaaggctttttgtctgagggcctcattatgcccagactggtggtgctgtgaccaggcttctgagacactggcttcctggagcccatgcatgcccaactgtgcttacatggttaaagccttgaagcagcacatcttcactgtgcctggcaagaatgtgggaagcttacaacccctggtttcctgacttcctcttctgtcccactgggtgcccctttccagattcccaggggctctatgggccaccggcagtgggtctgggcctgtcacagcgtcttgcgtcttctctt

SEQ ID NO: 659230 - DNA, 572 bp, Homo sapiens
taaatctggaatcggtatcacttaaatcagcatcggtatagaagggcaagaaagacagcggttccctcaaaagcagccccatttcttcagcgggcaggggacacaagggacccgaagggccccggttccggtccagagcacaggaggcccaagagggaccagggggggctcctcaaggcagaaactcttatagaattttagaagagggtgcgcccgagctcgaggagacccctcacgagggcggggtgtgcacgaaagggcgggtcagtgccggtgaagaagggtcgggcccaggaaccagcgcgagccaagtgggggagaagagaaatctggcgacaccagcggagagacatgtggggttctttggaagaaaggagggagtggaattaatctgtgggcgtttctaaaaatctggagcagggctgggcgatctttggtgctcttctcacaagcgcaaagatgtgtgggtgagaaccgcaagggtgggcccacgcttgtgggtttctctcacagcgggctcctctggcaaagtgggcgccttttcttcttatttccggaaactaagttttcta

SEQ ID NO: 659231 - DNA, 532 bp, Homo sapiens
cagggtatcttttcccctacaaagcgctcatagtccaggagcctgactaggtggacaggtgattacatagcaatgtaggacaggctgtgatagtcctacaaagaagacaagtgggagtatggttatgaccagttcctcctcttagatttattccttcttctattggctatcaagcaaaagaattggtcctattttttttaactagtgccaattacaccataaattttaaaaactttataaagattaaagacatgagccaccacgcctggcctagaactctccgtttaatggggtaatacaggaacatagtggtaacatctagtaagtaaattaaggaacaaaatttgtgctacaagcaagttaagaatcatattttccaaaattgttaggaaagcccatgacaccttttaagagaggactcctagaactcaagactaaatcacaggttaccctcccttatcagagtttggggtaatggtggctatcgccgcctattcatgagttatccccggcgaaaagggaaagttcacga

SEQ ID NO: 659232 - DNA, 150 bp, Homo sapiens
ggtatctagaggatccacgtatatgtacatgtccacactctgggcatggtgggattgtgacctacctgtcaggcggacagtggccaggagcatgaggacagttgtgtgcactggaagagaaactttttggaaaaccctaaatcaggtaga

SEQ ID NO: 659233 - DNA, 308 bp, Homo sapiens
gtcgacggaagggtgtctgtgtatgtgtatggaatgtgcgtgtatggaatgcccatgtgtatggaatgtgtgtgtgtgtgcatggaatgtatctctgtgtgtgtatggaatctgtgtgtgattatggaatatgtctgtgtgtatggaatgtgtgtgtatggaatatgcctctgtgtatggaatgtgtgtctctgtgtgtatggaatgtgtgtgtgtgtgtatggaatgtgtgtgtgtatggaatgtgtgtgtgtggaatatgtgtgtgtgtgtgcaatgtgtgtgtgtgtatggaccatgtctctgta

SEQ ID NO: 659234 - DNA, 136 bp, Homo sapiens
cgatctgaggatccatggagatgtgcacagggaaggaaataacatagcactttataaacactgtatgtaagtggaaaatgcaatgtctcaaataaaactatttaaaattggcacattcttccaatattggagatgt

SEQ ID NO: 659235 - DNA, 335 bp, Homo sapiens
gcaggcccccccagagggggggggtggccttttggttaggtccctgggccgttcccagggggggggggggccacggggggccggggcccggggcctttttttttcccttgggggttccggggaccacttttggccccccttttgggagggggggggggggttggggggccctgttttccttggtccaagggtgccggccccgggggcgggggacctttttttccagggttggggggccggggggggcttcgggcccccggggggggggggggtgggggggggctttttttttgggcccccccccccttccccctttagggttaacttccctggga

SEQ ID NO: 659236 - DNA, 139 bp, Homo sapiens
gcgggccacttagcaggtggggcagcgcagcaatctcttctccaaccatcaacatcttggccagatttgaactcttcaatctcttgcactcaaagcttgttaagatagttaagcgtgcataacgtgcccgccaatcgaa

SEQ ID NO: 659237 - DNA, 151 bp, Homo sapiens
ttagcggcgccttttccaaagttataacagtatgcattgtaaagcgacaaggatacgctctaagaaacgcattaggccatatcggcactgtgggaaccattcctagagctgaccttacacaacctggactgcccatcaccctgcctatgca

SEQ ID NO: 659238 - DNA, 113 bp, Homo sapiens
gtgctggttgctctagagtgatccccctgtgccgcgccacctgctcatggcctccaccagcagctgtgtctggcgcctaacacctgagatgcccgtttgcctgagactgcaaa

SEQ ID NO: 659239 - DNA, 299 bp, Homo sapiens
gcaacctctccctcctgggttcaagtgattctcctgcctcagcctcccaagtagctgggattacaggcacctgccatcatgcctggctagtattagtattttatagtagagatggggtttcaccatgtcggccaggctagtcttgaactcctagctcaagtgatccacccgcgttgggctcctaaagtactgagattacaggcgtgagctactgcgcctggccctccatcactgctatctaattggcagaatattctcgtcagtccgaaaagaaacccccgtaccataagcagtcacac

SEQ ID NO: 659240 - DNA, 163 bp, Homo sapiens
aggtgaagtctgggtcagaaacacaaaccaagacgcgaggatcctgaactgtttttcgagactcctcgcagctgcatgagcagaaagacaggagccaagaggtcacctggaggtttatttagacttactcatccagtagagatggattttttgattctggaaa

SEQ ID NO: 659241 - DNA, 589 bp, Homo sapiens
gtgatctagaggatcccagcgaccatttgctaaaagaaatacggctgggacgcggtggcacacacttttaatcccagcattttgggaggcgagggggtggacacctgaggtcaagagttgagaccagcctggcaacacggaaaaccccgtctctactaaaaatacaaaaattaggcagccgtggtggtgcgcacctatagtcccaaggttctgggattataggtgtgagccacctgacattacacctgagagcaagaactatttaaggtcagaatttaaaatatcaagaagtcagggcaacatcactatttctggaggagggacaagcaggttgtcaagcttgctttccttgttcagcagtgatgcttgtggacttacagatccagcatgccatgggtccagattgtcactgctctttgagttacatagaaaacttctgagacgcagtaaatactatatttgagttgagggagtaaggattctcatcataatagagttacaaatgttcccatcaccttccaaaagggaggtcccagggtgtgtgcaacttggagggagtcactcggaaacaatggggttgagtgtaatt

SEQ ID NO: 659242 - DNA, 838 bp, Homo sapiens
tctaactcagggtcagcttcctgggggaagcccaccgaccacagtgcctttccagctcactttccttcgcacaggtacccttaacgcaggcaagcccgcctggcgactcctcaggcctaggaaaggcacagactggccagtacgtgtgcgacactcagaagcggcgtaacgcttgggcaaagaggcttgcttgagttctaagaacgcggtagttacaagtcctagtctctgataaaatagactttaaaccaacaaagatcaaaagagacaaagaagggcattacataatggtaaagggatcaatgcagcaagaagagctaactctcctaaatatatctgcacccaatacaggagcacccagattcaaaaagcaagttcttagagacctacaaagaggcttagactcccacacaataatagtgggagattttaaacaccccactgtcaatattagaaagatcaacgagacagaaaattaacaaggatattcaggacttgaactcagctctggactaagcggacctaatagacatctacagagctctccacccaaatcacaaaatttaatccatcacataaataccaaatacattcctttctcagacaccctcatcacactatattctaaaaatttgaccacataattggaagtttaaacacctcctcagcaaatgcgaaacgaagtgggacatcataacaaaatagtctctcagaccaccagtgcacagccaacttagaactcagattaaggaactcagtgcaaaactcaacaatactggggaactgcagagctggcctgaatgagtccgggtacttatcgaatgaggcggaaaaaggg

SEQ ID NO: 659243 - DNA, 830 bp, Homo sapiens
gagcggcagcggagcggagcggaggcggcgctgagtttggtctcccgggcgtctggcgcgcgcggtgtgtccaggtaccccgccgctccctccttcccgaagactcgtccctcgtggccgtggcccccaagggtgcctgttcttgccggggtggtccgggtccagcgcaagagggggcgcgggtttccttctgtttctccgcggaaccattttagtctcaaacgcggggacttccattttttccccctttgcgttcttttctctcccttttttgcttgtctcttcgtggtggtctccctccagaggaatttgaatttattggacgtcgagggactcttcaagaagaaaactttgcgctcaagttattatttatggaagaaaaggggtggggtgtacgggggaagtttgaagaaaaaagaaactctattgagaaatttcttcctaaaaaagattgacgcgttcgttggaattacgtgagaaactttgtggtacttttgaagtcaagaagtgttcccctctcccggtccaatgttacgggtggcatgtggtagtggaaagcggtggccttcactaggggaaattctggtgcccttaccaacaacccagggaggttccacagtggccaggggtgtgcttgagttgtactccgcaacgggggacggcaagatactttgggagggtccctttaagtggccgtggagaaaggtcgttccgctttgtggttagggagtgcgccacacctttaaggggtgaaaggtactttctcccgaagggttatcagacggaggttgagaagagtcacctcggaagaacccttttttccactgggg

SEQ ID NO: 659244 - DNA, 574 bp, Homo sapiens
tgaggtgacccacgcctgtaatcccagcactttgggaggctgaggcaggtagatcacttgaggtcaggagttccagacccagcctggccaacatggtgaaaccatgtctctactaaaaatacaaaaattagccaggtatggtggcaaatgcctgtaatcccagctatttgggaggctgagaaacaacaatcacttgaacctgggagacggacttgcagtgagccgagactgcgtcactgcactccagcctgggcgacagagtgagattccgtctaaaacaacaacaacaaaagggtgagggagagatataacaggtaaagcaattagaaacaagatcagagaataggattcaggaagaggaatcgtggacctcaattggtatgatcgtgctcctcttacgtgagacaccagtgcctggccggggactggcaattccagttgacttgcggaggctagggcaaggagcaacgtgcttgaatccaggaggcggaggcatgcggtgaggccaatgatccgggccataggagttccagcctaggtgacagagcaaaagtctctctctcaaaaaaagtcg

SEQ ID NO: 659245 - DNA, 616 bp, Homo sapiens
ggagaggtgctgcgacgagagctcatcgggttgtcctgcttcaccagtggcttggacggaacaccggcgctcgttccccatcccggtcggcggccatagccagcccgtccgtcagcgtcgttcaccgccactccatcggaacgtgccccaaaggcctccacgcctggctgctccagcgccgcagtcagctcgaccgtgcgggcgccgacagtccttcttcacttatagtctgcacgtccctatgtactgacgcgaagtctcacacttcggcagggtgcggaccaagaaacttaatacaacgcgaggcaacgtctagaaagagcccggcactgaagagccggcgcgtaattcatatcgcctaggagtaccttccgtactgacacatcccctaacggatttgatacgatagtcccgactgatacgtataacgatgaacctgtttgaaacccggtagaattggactgggtgagggctattggaaaaggaaacatttctgaccccgaggaattaaactttttcatttgcgaacacaaattacgttcgaatagaagtgaagaaaggtgaaaacattcgacgtaggagggaatcatcttgaaatgcaaaggagctgccagta

SEQ ID NO: 659246 - DNA, 836 bp, Homo sapiens
  misc_feature (833)..(833): n is a, c, g, or t
aatttatgaagaaaagaagtttaattgactcatagtttcacaggcttaacaggaagcatgactggaaggcctcaggaaatttacaatcatggcagaagacgaagggaaagcaagcaccttctttacatggtggcagaagggggtgggggaggagccaaacacttataaaaccgtcagatctcatgagaactcacttactatcacaagaacagcataggggaaaccattcccccatgatccaatcacctccctccatgtcccttccccaacatcaggaattacaattcaacatgagatttgggtggggacacagacccaaaccatatcactcctccacctcaagccaccttccagagtactattaaaaccagtaaaacctgtaatgtgtagaaataatgtatggggattaactaacccactcaagacacactagcagaaaaagtcaagctactttaaaagaatcgataggggtacatctactatcatctgactttaaccctagtaggtgtttggggaaagagggttgccctacttctataatcagagcagcattacccatcagaagttgcacagtgaaatgaattttaaagatgtagagagtatcagtcagctattgccataatgctgcataagaaaccacccccaaactcagtggcttaaaataatcatttattctcatacttatgggtttgagttgtttggggtaggtaacctgcttcaaagttccatcctgagtccgtttggggaggcagtgactacccagagatgtttttccagtgatgatggtagaaggacaagaactcaagtacaataagcatgtttgttcccagacnaag

SEQ ID NO: 659247 - DNA, 596 bp, Homo sapiens
  misc_feature (418)..(419): n is a, c, g, or t
ctccatgtactctagccttttcatgacactgatattttcgtgacactgacttatagttcactgtttacctgttggtctaacagcaaatcataaacagtagttttcaacatacttctaaggctaaattcatttccagaagtagcaaagcttactagccaaaggctccacatttatcaactcttaagagctagacttgagagcctaacagcctatatgattttgtgtaaattgatctctataccctcagcttcttcatctcaaaagtgagataattgtactattctactttcctcatagtgcggttataacagattatgataatattacaaagtacttaatacttggcatatagtatatatattagctattacgtatctttgcaatttggggatatatgaaaatatagaaattgcatgtnntagttcactgctcgccactaccaatattgggttcattttggggcatcttcaaatgggtgaaatataccattattacagtttatcagtgtgcatctgtatctaccaaggagtatatattggcacacaatgatttctggtaccaaaaaggaaaggtacatataaacatgagcggctgcc

SEQ ID NO: 659248 - DNA, 257 bp, Homo sapiens
  misc_feature (184)..(184): n is a, c, g, or t
tgttattaaaatgtcaaaaaataacagatgctggtgaggttgtggagaaaaaagaacacttttacactgttggggggagtataaatgagttcaaccattgtggaagacagtgtggtgattcctcaaagacttagagacagaaattacattcagcccaacaatttcattcctgggtatatacccnaaggaatatattaacaaattgttgtattataaaagcatatgcacatgtattttcattgcaacacggtctctca

SEQ ID NO: 659249 - DNA, 911 bp, Homo sapiens
  misc_feature (908)..(908): n is a, c, g, or t
tgctgccttcttaccacacacacaattccttggcccccaatccaacctttcccctttccccctctttacccctggcctttaagtgcattcgccctggattccccccttttttttttttttttaaaaaaaaattattgcacaattccagctacagaccatactgaagctcagaattccatctgcagagccgaaggaaagcacactcttacatgtgcaaagggttgggagacgccacacttataaaaccgtcagatctcatgagaactcacttactatcacaagaacagcataggggaaaccattcccccatgatccaatcacctccctccatgtcccttccccaacatcaggaattacaattcaacatgagatttgggtggggacacagacccaaaccatatcactcctccacctcaagccaccttccagagtactattaaaaccagtaaaacctgtaatgtgtagaaataatgtatggggattaactaacccactcaagacacactagcagaaaaagtcaagctactttaaaagaatcgataggggtacatctactatcatctgactttaaccctagtaggtgtttggggaaagagggttgccctacttctataatcagagcagcattacccatcagaagttgcacagtgaaatgaattttaaagatgtagagagtatcagtcagctattgccataatgctgcataagaaaccacccccaaactcagtggcttaaaataatcatttattctcatacttatgggtttgagttgtttggggtaggtaacctgcttcaaagttccatcctgagtccgtttggggaggcagtgactacccagagatgtttttccagtgatgatggtagaaggacaagaactcaagtacaataagcatgtttgttcccagacnaag

SEQ ID NO: 659250 - DNA, 137 bp, Homo sapiens
tctttcgggtatgtgctcagaaaggaacagtgcagcacacacgaaagggttacagagggacacagaggagaccgaggtcagcgcctcaggaggcttatcaacattcagttaggaccgatggaggcgcaggcacttat

SEQ ID NO: 659251 - DNA, 235 bp, Homo sapiens
ttttcttgtagagacagattcttggtatattgcctaggctggtctttgaattcctggcctcaagtgatcctcacgtctcggcccgcccaaaagtgctgagattatagggcatgaggcactgtgtatggctgctatgatttcctttaaaccccccatagtaactagtcgtgaccccttctgtcgtctttctcccagccggtatagttaggtaagttaaggcgggcccgcttcttag

SEQ ID NO: 659252 - DNA, 143 bp, Homo sapiens
tgaatgatgagatggctgtggcaattttaaaataagaccacaataaaagatttctctgtagcatgtgatgctgtctgatagcattttactcgcagtaaaacttttcaaaactggagtcaatcctctcatcattcacctttgca

SEQ ID NO: 659253 - DNA, 108 bp, Homo sapiens
ggagacggccactgcctttcaagtgcatgcagctcactgatttcatcctcaagtttccgctacgtgcccaccagaagtatgtccgacaagcctggccgaaggccgact

SEQ ID NO: 659254 - DNA, 122 bp, Homo sapiens
gacaagtgagcaaaggtttatctccaaacatattagactggatgaagtaagatcagtaacggccacttgcgcaattacaggaggtctcattcccatcggaggtcgaggaggcccaccctggt

SEQ ID NO: 659255 - DNA, 566 bp, Homo sapiens
gaatcacttatcataccaagaagacaggaaaatctcaactgaagtgagaaaagacaagcaaatagatgccaacgtggtatgtgcgttggtattatctgattaagatttgaaagtagccatcacaaatgtgcttcaactgggcgattaaaaacggacatgataaatagaaagttggctgggcgtggtggctcatgcctgtaatcccagggaggtggaggtgggtggatcactggaagccaggagttcaagaccagcctggccaacatggtgaaaccccatctctaataaaaatgagaaaattagctgggcatggtggtacacgcctgtaatcccagctactcaggaggctgaggcaagagaatcacttgaacccaggagagagaggttgcagtgagccaggatcgcaccactgcactccagcctgggcaacagagcaagagtccgtctcaaaaaaaaaaaaaaaaagaaagaaggggaggtggttgtgagctgatttggcgccattgcactctcactcggtctcccaggcgggagggcaggggagggatctcagctcatggtagact

SEQ ID NO: 659256 - DNA, 223 bp, Homo sapiens
ggatcccatgttctccccaacacccggctaatttttcggtatttttagtagaaacgggttttcaccatgttggctaggctgggcttgaactcctggcctcaagtgatctgcacgccttggcctcccaaaatgctgggattgtatacaggcatgagccactgcacccggccttattgttattttaaatatttatttgaccatttttgtgttgggcgataacata

SEQ ID NO: 659257 - DNA, 707 bp, Homo sapiens
  misc_feature (165)..(165): n is a, c, g, or t
  misc_feature (176)..(176): n is a, c, g, or t
  misc_feature (196)..(196): n is a, c, g, or t
  misc_feature (206)..(206): n is a, c, g, or t
  misc_feature (265)..(265): n is a, c, g, or t
  misc_feature (299)..(299): n is a, c, g, or t
  misc_feature (317)..(317): n is a, c, g, or t
  misc_feature (346)..(346): n is a, c, g, or t
  misc_feature (353)..(353): n is a, c, g, or t
  misc_feature (355)..(355): n is a, c, g, or t
  misc_feature (362)..(362): n is a, c, g, or t
  misc_feature (365)..(365): n is a, c, g, or t
  misc_feature (377)..(377): n is a, c, g, or t
  misc_feature (399)..(399): n is a, c, g, or t
  misc_feature (401)..(401): n is a, c, g, or t
  misc_feature (412)..(412): n is a, c, g, or t
  misc_feature (536)..(536): n is a, c, g, or t
  misc_feature (544)..(544): n is a, c, g, or t
  misc_feature (547)..(547): n is a, c, g, or t
  misc_feature (615)..(615): n is a, c, g, or t
  misc_feature (629)..(629): n is a, c, g, or t
  misc_feature (631)..(631): n is a, c, g, or t
  misc_feature (643)..(643): n is a, c, g, or t
  misc_feature (676)..(676): n is a, c, g, or t
agtcccggcgggagcgcgagcagagccggggccgggcccgcagccaggcgccatggggcgcgcgccgcctgtgagcggcggcgagcggaccgcgggcgccgagcagggccaggcgggaggcgtcggcgcccgaggccgagcgagccgcggccgggccgggccgancgccgagcgangcaggagcggcggctgcggnggcggcggcnggatggaggcagcgccgcctccaagatggcggtatttggaggtggtgctggccgacgtnagctacctgattggccatggagaagagcaaagcnacgccggccgcgcgcgcnagcaagaaaatcctgctgcccaatcccancatccgnantgtcatncanaactacctaaangaccggggcgaggttacctttnanaagatcttttnccagaagctggggtacctgctcttccgagacttctacctgaaccacctggaggacggccaggcccttggctggaattctatgaggagatcaagaagtacgagaagctggagaaggaggaggagngtgtggtncgnagccgggagatttttgactcatacatcattaaggagctgctggcctgctcgcatcccttctcgaagantgccaatgagcatntncaaggccacctngggaagaagcaggtgcctccggatctcttccanccatacatcgaagagatttgtcaaaacctcc

SEQ ID NO: 659258 - DNA, 170 bp, Homo sapiens
  misc_feature (45)..(45): n is a, c, g, or t
ccttgtgtagactttgttgagtaatgttcagtttcttgtaaaaanaaaaacacaaagggggaaatttaaaaaataagggggggtcatccccaaattatttttcttattaattaaaaaattttttttggggtgtttgggaaataggggtttggtgggggggtgtgtgggcc

SEQ ID NO: 659259 - DNA, 621 bp, Homo sapiens
tataaaacaagcaaattttattaaagggaaaatttggcgggttatagggttggcgggtgaaatttggtgggtgaaagggtttacttttcaccagtctgtccgggcatggcttctaatggatggtcagagtccaccgggatcaatggataggccagggtgcacactctggtagtatttcccgcatgctggggcccagttcaattattatggccactcaaagctggggcagttggttagcagagaatggaccaatttcggcttgtgcctgggtctggatcatcttcagaagtctggctggtcccccgagggagcgtatcttccccatcttttccataagcgaggtgggagccctagaagttgtaccgactcccaggcgacttttccgtcttcttgggcggaagtctccccgggtccgccgattcctccctccctgggtcgccggagtcctggggtgggcgtaaaagtgggtctacaaatctctcctagccactaggagaagatctgggtctcgacaagtctcaaattatgacgacgcagaagggggatctctacgagcagatgaacgggcctggggcaggtgcctcccgccaggaaaacggcgccaggtgatctccgggactg

SEQ ID NO: 659260 - DNA, 318 bp, Homo sapiens
  misc_feature (15)..(15): n is a, c, g, or t
  misc_feature (177)..(177): n is a, c, g, or t
tacctacagactganccagtgggcttctcctatttaaaaggattttttggctgggcgctgtggctcacacctgtaatcccagcactttgggaggcctaggtgggaggatcacctgaggtcaggactttgagaccagcctggccaacatggtgaaaccctgtctctactaaaaatacnaaaatcagccaagcatggtggtgggtgcctgtaatctcagctgcttgggaggctgaggcataagaatcgcttgaatgcgggaggcggaggttgcagtgagccaaaatcatgccactgcactctagcctgggcaacaagggt

SEQ ID NO: 659261 - DNA, 344 bp, Homo sapiens
aacctgtttccaagggctttttaaaaaccccccaagaaacccttttgcatccttcccacatctcctttgattaggtttattactagatattttttagggcggcaataattcagatgaaatatttgaagaacccttgggtttcccctgataaactgccaactttggctttgaacctttggaaccaatgacctctgtttttaagcagcttatggaggtctttttgctaataaggggttttttaccctttccccccctaaattccctagggggttgcccttccatgccttccagattgtaaaatccttgtttttcattttcaaataaacccattttttagggtttta

SEQ ID NO: 659262 - DNA, 205 bp, Homo sapiens
aactacttctccggcgcgtatgcgcttctctgacctctacatggcctccctcagctgcctgctcaactaccgcgtggacttcaggcgtgctacccacgccgtacgccgctgcagcgacgaggcacccctctggatggaccagctctgcaccggctgcatgaagaggtcagagaagcgcacgaggcgccttgagaagtatgtgggg

SEQ ID NO: 659263 - DNA, 863 bp, Homo sapiens
tgaccggcccaaatattaggtcgttctacgccgatttgttggtgagacgatactgtgctaaaacaccgtctctgtttgaaggtggcccctgtgcactttgaaccgcgtgtgcaatacgcgaaggtcgcgcccttttacaggaggacccgttctttatgaaagatttgtctgctcttgagacgctgtgcttcccctccagtggatacctgttctgcgccccgaagtatccttgggagccaccaatacgacctaaaatgcgggggacttccttaaccatgtccattggcgagaggagatctattttttcttgggccaaaaggtgcccacgcggcccaggacggggggaccttgcggcccccaacttgggcagcccgggtaaaagccggctccccggtccacaagatgtgtttctgcgcccccgcctcgtgcgagggctgggcctccacccacacccgccgaatattttgtcaacacgtgataaaaccacgcacagcagacaccccacgcgtcggcaaaaataggggcgaaaaatgcctgcgcgcgcccccaatgtgttgtgcccgcacccaggcgccccaaaaacatggggtgtttacaggccgggccacactgccgccccggcttgtataacacgtctcagtgtcacatagaaagaggatacttcacaaggcccggggggtgtttaacgacaattcgttcgcgtgaactatacccctgacctcatacaacgggtggcgtcgtgaaaaccaccccccaaacggggcttctcaaacaaacaaagaggagcgagaaagtacataatagatttcccgagggttttgacacaatgtgaaaaattaggtgcttttaggcccacatgacaa

SEQ ID NO: 659264 - DNA, 773 bp, Homo sapiens
aactatccacacaaagaagcactttaatgagaatgaaaaatcaggtgaatgatcatagtacctggttctaacttcataccactgaacaggggcactgaagatggtagtgagagacagatcttgaattgctaacactcatccctgccccatctccacagtagtttgctgtgtgtgcacggagaacgagaatctgtgttgtttaacgggagacgagagggcagtgattgtgggcactttgtccgttggaactctaggctactgcctctgttacagcgagaatagcaacctaccaaggtcataagctcagactcggctacccagcagagggagcatttaaaccagtccctaaccagtggtcagaacctgagtttccacaaagccttcaccacttgtggacataatagtggtccgatggtgcgtaatgtgaaaggcagatctaggccactaatggtattacaaattcttgggcaaagttcctggggtgctgggctaagcttcagaactcatgtgtgtaccttaggtggggcattgccaccctagttgagataccagctggtggtggccaagcgtggttgctaccgtaccacccctccctcaactgcaggtagtacaagcttgcagcttgcctgtagtctcagtctactcgggatgctgaggcaggtgagaatgggcgtcaacctggcgaggcggagcttgcagtgagccgagatcgtgcgattgccgtccagcctgagcaacagagcgagactccatctcagtaaataccctgtcat

SEQ ID NO: 659265 - DNA, 1182 bp, Homo sapiens
tcttaagtaggcacagtaggagcagctactgaagatagcaaagatacacgaaaaaacttccagaacatctagggagaatattcaataggaaaatcgctatggttcaaaacctagacacttttaacagtagaacagcgttctagagtagtaggacgacgtagccagtgaagataatgaatagtacgaatgtagactagactagacagctatacatatttcgacatagagggtcgctagtctagcccatatgataagaggccagatatgtctatggaagtatccaaagtatgcacacgatattactagggctaagtagccacgcaggttataactatgcactagtatagtagtagaacacagctagataaacggaaaacccataccacgacaacaagagcttactatcgataatctaacagagacgagtgcaaacatcagaaccacaattgttacatattgtgggcatatcaaccacaaccaagagacacaaaagaggcgccgcgccggcctctctacagagggtcaatacgcgcactacgaagtgtgtggactccaaaaagcatgtatacaccgcggtataacacacaagaacatatctacaatgaggataacgaagaaaggctagagttaccccaattacatatgcgtggaacggttcgagatataataaaatatagacgccatttacgagcaccacaacacgtagagccgcccgtggcgatcacgcactaatgatatccaccgacatcagtgacctacccgagctgcaatcatgatcggcggagccatagaatacactcacgccgtatacacctacacatgagaacaaacaaccttccagatgcatgctggcagtagacacagaggtgcaaagacatcacataaatccaacgctagcaacaccatggagtgagatgccctctggagttgaccgcgaatcataagctacgcttatcggagacgaacaacagacagaggacctagaagcgccatatagaaccaacagacaacacgctacacatcccacaaccgactcgaggaactgccgtagacatcgcccgggatcaaaacaatgtatgaccaatgccaacgaacgagccgtggcatgtcctatcagcacagcgtagtcgggtatacactacgccaggcgcgcctcgctcacttcagaacagcaacgccacc

SEQ ID NO: 659266 - DNA, 1248 bp, Homo sapiens
  misc_feature (1001)..(1001): n is a, c, g, or t
ggtgggaatatcccggtgattaccccctgtgccgcgactcttacattttctaaagagggaattttccacgacactttcgtagaagaaatcatcctgcgcgaaatgatactacgttgctcactatacaacacgactttctctaggccgcggtgagaaaattatcgcgccctccgtggttttccatcgtaccctttgtgggaatttattctggggccccccacacaccaggacttggggggccttggtaggggaggtgtgcaaccattaatcgctgctttttgagacgcttcacaaaacgcgggccgtccttttaagcaaacaagaagaattggtcatggtgataaagaagacacccctctcttgccaaaaggagcccttctcttcggaagaactgtcgtgtgagggacactttttccacgggtttctttcaccacggaggttttctctcccacgtgttaacacacacaaagggggcactctcacacgaggccttttgtccccgccacactgtgggcccacaaacacacgaggggagggacaaaatatcctttatttatcgacacacagcggtggctctttctttgctcccctgttctatgcgccctctaaacaaaagggtttgtcttctttcccccaaggggagcgctggtcgtcctacagggaggggggcgaacacataattaagacgacgcacaggtggggagagcacacacacacactctgtgggtataggggggagcacacgaggggccccacaccaagcgagctttgtcgagaagaggggggacccctcaagagactctccttgcgcctgtgggtgtctatacaccacccggcccctcttcccgagaaacacaccgagggtgtcgtcacataaacctctccctcacgggagtggccgcctgtggaccacacatctctttctctcttgtcccctgaggacgtctctcccgcccacccagcagcgccgcttctcctccacaggcaaacgtgtctgcgcncccacaggtggggccccacaggcggggaaaaccagccctctggccacaagaatgcacgcccaccccacactgggaggcccaagaagggagaaggcctagagaggtgttggcagctggcccccacacgcgggggcgccacaagattttccaaccttttctgccttttaaaaacaccgtaatctttgggcccgggttttaaagtttttgtagaacaaaaaccctaaagaaaaaggtgtggccttgttta

SEQ ID NO: 659267 - DNA, 158 bp, Homo sapiens
ctgtgcgtcagcaccgactctccatctgaactgccatctgctctagtcataaaatccccacgccagtgcccaagtccatccccatcagcgagactccaaatatccctcctgtctccgtccaggcaagccgtggactagtagccaagcgtggactagtg

SEQ ID NO: 659268 - DNA, 412 bp, Homo sapiens
ctgacatgtcacatttatgccggtggtgagtcttgtgtctgctaaggctccgctcctgttctgggttgtgaaagggttggaaaagcagtccagtgcagtagggtcagacagggctgcatgcagattccagctctgccatgtattgaccttatggcaccaggcaagttactttcctaagtttcctcatctgtaaattaggaataacaagtactttttgggttgttgcaaaggtctaatgagctccacatgcacctccacagtgcatcacctggcatattctgggtacatgatactctctgccactcaacgatgtgttacccaggagccatgctatgtgtggaggaacaatggggagcataacaggcataatccatgctgtcatgaatttcccattctgtctggggacacagcc

SEQ ID NO: 659269 - DNA, 259 bp, Homo sapiens
  misc_feature (4)..(4): n is a, c, g, or t
  misc_feature (104)..(104): n is a, c, g, or t
  misc_feature (107)..(107): n is a, c, g, or t
  misc_feature (126)..(126): n is a, c, g, or t
  misc_feature (132)..(132): n is a, c, g, or t
  misc_feature (161)..(161): n is a, c, g, or t
  misc_feature (234)..(234): n is a, c, g, or t
tggnggaaaagcgcattgaccaccgggctgccgggcggcactagtggcgccttgaagaggaagctgagcagggacagcacggggtggaaggtctgcggcttggngtncatgttagtttagaagttnacgcgntggcacagtttggttagcagcgctaggtncagcatgatgggtgcggccagcagggagtttttatacgtgttgtgcagcaccagtgtgttggttttgcccagnattagttccgaggtatatttattca

SEQ ID NO: 659270 - DNA, 510 bp, Homo sapiens
  misc_feature (502)..(502): n is a, c, g, or t
ctggcaatccacgcatggtaacaggagagagagagtgaagagggaagtgctgtacacttttaaacaaccagatctcatgagaacttactatcataagaacagcaaggggtaaatctgcccccatgatccagtcacctcctaccaggttcctcccccgacattgggaattacagtttgacatgagatttgggtggggacacagagccaaactatatcattctacccccggcccctcccatatctcatcacctcacatttcaaaacacaatcatgccttcccaacagtcctccaaagtcttaactcattcctgcattaactcaaaagtccaagtccaaagtctaatctgagacaaagcaagtcccttccgcctatgagcctgtaaaataaaaaaacaagttagtgacttctaagacacagtggaactacaggcattaggtaaatgcttccattccaaaagggagaaattggccaaaacaaagggactacaggccccatgcgtgnattgccag

SEQ ID NO: 659271 - DNA, 1075 bp, Homo sapiens
  misc_feature (648)..(648): n is a, c, g, or t
tagagaacagagtttggctcttgtttgcccaggttggagtgtgatggctcgatctgtggttcaccaaaaccttctgtgccctcctgtgggtttcaagcaattctcctgtgcctcagcctcttgagttagctgggttaataggcgcatgtgccaccagtgccgtggctaatttggtggtttttagtagagacagggtttctccatgtgtgtgggctcaggggtgggtcttcaaactctcccaacctctcagggtgattctgtgcccttccttgtggcctcccagaggtgcgtgggatttacgggtgtgtgtgagccagtgtggtgccgggtcccgtgtcccccttccttatttatatagggccgtgaatatacaagagttagaaaagagattcactttttcgctttcagcgtgggtgcgcgtgaaaaaaatttttcttagaatataccataacgaggttcttatactctccctctttatttccccttttggtgtataatctcagtgtttgtgacaccccgaggaagcggtgcgtggagaggggggaaactcgtgggtgcttccagcgtgtttgagcgtcttactgtgggtgtccccccgagagaaaagggccgtggtgtgtgaacagtgtgcacaccattcttaaacantgtggcagggggagttgggtgaacaaatttattatcgcccaaatttctgtgtgttccctatagaggtggggggcatataacctctccctctccttttgggggcccatttgtgtgaaacctccacttttcaaaagaggcattctataggggggccatcaattcttttttaaccgaggggtgtcctaataaaaatttcaactctacatttctctggggccttgtgcggaaataaaattcctccaaacgttgggcgcccttggtgcaccacaattttccccaattttgtggtgtcgcgtggaggggggggctatatcccggtgggggtggtttcccctttgggttacccagagggagatgagggaggagcgataaagtcgacacgtatgatcggtaatattatgagacaacgacagaaagtagcgcatcg

SEQ ID NO: 659272 - DNA, 461 bp, Homo sapiens
  misc_feature (59)..(59): n is a, c, g, or t
  misc_feature (101)..(101): n is a, c, g, or t
  misc_feature (365)..(365): n is a, c, g, or t
  misc_feature (437)..(437): n is a, c, g, or t
  misc_feature (451)..(451): n is a, c, g, or t
aaaatgtgctcaacatcactaatcattagggaaatgcaagtcaaaacaaaaaggagctntcacctcacacttgttagggtggctatcaaaagagagataantgttggcaagcaggtggagaaaagagaatccttgtgtgcagtgagaatgtaaattggaacagccattatgaaaaactggttccggccgggtgtggtgctcatgcctgtaatcccagcactttgggaggccgaggcaggcagattacctgaggtcaggagttgaagaccagcctggccaatatggtgaaaccctgtttctcctaaaaataaaaaaattagctgggtgtggttggcgggtgtctgcagtcctagctactccggagntgaagcaggagaattgcttgaacccgggaggcagaggttgcagtgagccgagattgcgccactgcactccancctgggcaacagangcaagtccgt

SEQ ID NO: 659273 - DNA, 275 bp, Homo sapiens
agagagctagctgatcttcaacaaacctgacaaaaacaagcaatggggaaatattccctattgaataaatgctgctgggataactgagtagccatttacagaaaattgaaactggaccttttccttaaccatatacaaaaattaactcaagatggattaaagacttaaatataaaacctaaaactataaaaaccctgggaaggacaacctagggcagtacctttcagggacacagggcacagggcaaagattttcatggatggaaggatgcccaa

SEQ ID NO: 659274 - DNA, 190 bp, Homo sapiens
gtttctctatgtcgggacactcattagcaagaactttgctggctctacttgaggaacatggacatattttgttcccagaggatggatggatggatggatggactaaacagggatttacaggaaagggggaaaggcactcaactgaaggaatggtggatggtcctccagttttcctgcccctccccatgca

SEQ ID NO: 659275 - DNA, 297 bp, Homo sapiens
tccatgtgtcgagagaaattagcatcttggccagcgcggctaaacggcatcctgccggtttaccccccaaatcactgtcgaattgcggccatcgtgtttgacggggcgatttcagatcaagatcacgatcaaaagcgcagatcaaaagaccgctgacttcgtcatcgaaaaggatgtaagggccgcagcaacagcaacagcaacagcaacagcaacagcaacagcaacagcaacagcagagccagctgccacagaaaagcacatatttaaaactgcctaatatctctcggaccaatg

SEQ ID NO: 659276 - DNA, 888 bp, Homo sapiens
  misc_feature (45)..(45): n is a, c, g, or t
  misc_feature (625)..(625): n is a, c, g, or t
cggaggacgcagcagtcgttggctggtgtgccgtgtgttgtgttncatcgtgtgatgtcgctacctcctcggccccggtttaccccagggttcctcagcgcccgtttgtgcccccatttcttgtaccataattcgtccgccgaattccggttccatcccccggctctcatacctgggccccccccttcgcccctggtgcgtgcccttaaccccgggtgcgcccggttcctctctgcgttcttacagctcttctttgcgccctctgtaccacccccaccactcgggcccgggatttggcccctttgtccccgggttgtttatcgggccacccctctcccgggttcgcattaggccccctcccgggtgttttccccggttcgggttaccccgcgcggcgtctgccccccccccgcagcatttgtgtcaaccccgggcgtcttctggtttatggggcagtcctcctcgagattccgcgtctttcttgcttctccccccgccaacacgaagggtcttcgcgactctcttctccccggagccgagtcaagcgcccacgggcgagaatgggtgggacacccacctagctctctgcggtctggccccacccctgtttgccccgtctgccgcnctgtgctctggagacccgttcccccacgctctgctgtttctctcccttgatcggtcacccgcgcctcctgcacccatcgcagttctcctgtgtgcctgacatgttgcacacgggtgccctttgtggtgcctctcccccccgcgtgacgcttcttctccccccgcgccacccccccggggtgatagggtgtatcccccctcccccggttcttttattccctggggggtcccccccaaatatttaaaaaaacttttttcaaaaca

SEQ ID NO: 659277 - DNA, 483 bp, Homo sapiens
caatatttatcttttttaggggggcggttatttccagccgacccttccatggcgatgattgcacactgagagccacaaatctgcattagcatcaccaggcggggcaacccgccatttgtcgctgcatgctgtgcagatcaacaataaatgcctagaggttactttggaggcactgccgcaagcatggcgagctcaaagggtcgccaggtcactgctgtgagaactgagatcaaggccttggtgaccaagtttatggtacactcactcattcatggtattcccccacgtcttatgatcgaacaggaagcgtttctccagtagttcgattctcatcgtctgaaattcccagcatgagtgcgagagaaggtccatatcagtcctgatactcgaaccactgatatcttgaatggaacggtcttgttgccctacgcccgtatatgttgcaagacaaacagcgactgtcatgaagcgcccccctgaaga

SEQ ID NO: 659278 - DNA, 373 bp, Homo sapiens
atatgagcggtctagcatccgattgaatgtagtgcattccatgcagcatcactgaatgcagtggattccatgcagcatggtaaaatgcatcccgattaaacgcagtgcattacatgcagcatggctaaatggatcccgagtgaatgcagtggattccatgcagcatggtaaaatgcgtcacgattgatgcagtcgactccatgctgtgtcattgaatgcagtggattccatgcagcatggtaaaatgcatcccaattgatgcagtggattccatgcagtgtcattgaatgcagtggattccaggcagcatgataaaatgcatcccaattgatgcagtggattccatgcagcgggtttaaatggatcccgattg

SEQ ID NO: 659279 - DNA, 360 bp, Homo sapiens
catgatgtttagtgagaactatacagtggtagaaaagatagaactacttgagataatgcattattcttagcattttataggcattataacatagaatcctccatatcatttcactttctttttacaggcaacttttttgaaggacttatctctactttgctaccttttcatctttattttctcatctcccattgttactccttataggatagcactccactctggtttctcagttgtccaaacaggtgccaactaaagttgctattgagacttaaaaatgctaaaatctaatgggtctttttgtccccccatcttcatcttgcttttcctcttaatatcattcagcatttgctgatcatg

SEQ ID NO: 659280 - DNA, 920 bp, Homo sapiens
  misc_feature (10)..(10): n is a, c, g, or t
  misc_feature (70)..(70): n is a, c, g, or t
  misc_feature (126)..(126): n is a, c, g, or t
  misc_feature (145)..(145): n is a, c, g, or t
  misc_feature (154)..(154): n is a, c, g, or t
  misc_feature (162)..(162): n is a, c, g, or t
  misc_feature (165)..(165): n is a, c, g, or t
  misc_feature (167)..(167): n is a, c, g, or t
  misc_feature (252)..(252): n is a, c, g, or t
  misc_feature (285)..(285): n is a, c, g, or t
  misc_feature (291)..(291): n is a, c, g, or t
  misc_feature (296)..(297): n is a, c, g, or t
  misc_feature (304)..(304): n is a, c, g, or t
  misc_feature (308)..(308): n is a, c, g, or t
  misc_feature (316)..(316): n is a, c, g, or t
  misc_feature (320)..(320): n is a, c, g, or t
  misc_feature (322)..(322): n is a, c, g, or t
  misc_feature (324)..(324): n is a, c, g, or t
  misc_feature (334)..(334): n is a, c, g, or t
  misc_feature (336)..(336): n is a, c, g, or t
  misc_feature (393)..(393): n is a, c, g, or t
  misc_feature (399)..(399): n is a, c, g, or t
  misc_feature (434)..(437): n is a, c, g, or t
  misc_feature (459)..(461): n is a, c, g, or t
  misc_feature (474)..(474): n is a, c, g, or t
  misc_feature (476)..(476): n is a, c, g, or t
  misc_feature (478)..(478): n is a, c, g, or t
  misc_feature (486)..(486): n is a, c, g, or t
  misc_feature (489)..(490): n is a, c, g, or t
  misc_feature (495)..(495): n is a, c, g, or t
  misc_feature (499)..(499): n is a, c, g, or t
  misc_feature (504)..(504): n is a, c, g, or t
  misc_feature (506)..(506): n is a, c, g, or t
  misc_feature (509)..(509): n is a, c, g, or t
  misc_feature (549)..(549): n is a, c, g, or t
  misc_feature (553)..(553): n is a, c, g, or t
  misc_feature (563)..(563): n is a, c, g, or t
  misc_feature (576)..(577): n is a, c, g, or t
  misc_feature (582)..(582): n is a, c, g, or t
  misc_feature (605)..(605): n is a, c, g, or t
  misc_feature (789)..(789): n is a, c, g, or t
  misc_feature (792)..(792): n is a, c, g, or t
  misc_feature (796)..(796): n is a, c, g, or t
  misc_feature (809)..(809): n is a, c, g, or t
  misc_feature (904)..(904): n is a, c, g, or t
tttttacaantgctaaattgtgaatctcagagtcttaagatagaagccaaatatattcctcttgtaaatnaagaaataaacctatttaaatcaccccctgtgtggctccctcatagtaaaaaagcntgggggcataagaggtggnaggcacganataatggncananctgcctgcagccagcacatcaacctgcaccaacccaaggcaaacaccagagccctggacatggccctggagccagggtcccagcnctagtaaccgggggtggggaggtctctgcaccntggganccctnnaggaatngctnaggctgtncttncnanatcattgatncncgggcaggcggcaacatgccaccctccccagtggcagcgccttagaaacagcttgcntattanaatcatggtttaaaaaaaaaaaaaaaaatattttnnnnaggtagatggaggcaggggttnnngggggcccgtacntntnctcagggnttnnctgcnttcntcacntnttntttttttttggccccatttttaagcaggttgggatttttnattnttaaagatanttttttttttttnngtgcnagcgcggacagtggtgatttgcncaagaccccctttttgggaagagccttctgatgctgcttttggcctgcaggttccgtgggggacccgggagctccattcacctgggacggcttctggtttttcttctgcagttttggggatttggcaggggtgctggggctccgggtgggggcgccaggggctggactcttggtggttggcgtnccntttncctgggctgggancttagcctttgtcctgttcctcttcttcctgcccatgctggggggctggctcccgccggtggctgcaggtgtgccatcctccgctggcgtgccancctctgacttgcgttt

SEQ ID NO: 659281 - DNA, 106 bp, Homo sapiens
  misc_feature (48)..(48): n is a, c, g, or t
gaagtctgtacttgtatttttttatcaatttaatttggctggtggtanaaggtgggtatttctgcctttgtaccaagaacttcgagaactgatttattgctaatat

SEQ ID NO: 659282 - DNA, 599 bp, Homo sapiens
  misc_feature (341)..(341): n is a, c, g, or t
atacaatatgacggtgagccatcacgtcactgatgagaacagatcgaactttaatgccttccttagaaattatgttgtattgaagtcaaacctcaatcacaatgaacaaatatatttgcataaggagaggaggtgtatagtgccctggcaggaattaagactaaaacgtgggagtaaagctgtagatgcttctgttgctttttaaccaagaggccacagacacaggccgggaggctgagagggcaacctgccatttggccagcgtcactttgcgattgttataaatactttatcatagcttgagtacagacatgccttttcaatgaaatacatcctgactnattttgcagagggtactagtttcatagggtgactgtaacaaattaacacaaactattaataggtggcctcaacagaaatgtcttctctcacagttttggaggagttggcagggccacgttccctcgaagactccaggttccccttcttgccttctctcggcttctgatggctcccaactgctgggcatcccttgggttacagctgcattgctccagtctctgcctctgtcgatgtgtggcccgcactctgtgtgttgt

SEQ ID NO: 659283 - DNA, 116 bp, Homo sapiens
ggtccgtatttcgagcgaggagctgttgtagttggtggtctgggcgcgtagggggctcgtggaaaaccccggtctgttgtgctgatgcctggtctgctggttcgtttctgggatca

SEQ ID NO: 659284 - DNA, 132 bp, Homo sapiens
ccgcctactactactactgctcgaattcaagcttctaacgatgtacggggacatgacttaaggaacttatttatggatattagtaacatttttctaccatttgtccgtaataaaccatacttgctcaaaaaa

SEQ ID NO: 659285 - DNA, 280 bp, Homo sapiens
cacggttttgctttatgttatttagcggtgatgagagcaagctgaaactgtgagaagagacataaacgcaacaaaccgaggtcatggttcatgtcgtggagaatccagagtgtcccactggtctagacatcattccaattgtagctggtgtggttgctggaatcgttcttattggccttgcattactgctgactactggaacgcttttaatgactaattcatgacagaagggagttcgctaaatttgaaacaggagaaccactgaatgcccaatgggaca

SEQ ID NO: 659286 - DNA, 376 bp, Homo sapiens
caggcttcctccccaggtcatgggctgggccttgcccttttttatggatgcccaaccagggtttgagcccactcccatgtgagacgtcacgcagggcagaaaccgctcccccctttggtttgtttggggacccccaaaaagggattgggatgggtttgccctcccggatgaggatgagcccccccgcccgtccctttggggttggggccaaactgtcagggttcctccccaggtcatgggctgggccctgcccttttttatggaggcccaaccaggggttgagcccactcccatgttagacgtcccgcagggcaaaaaccccccccccctctgcttcccttgggtttttttataaaaaaatttcctgcggccggga

SEQ ID NO: 659287 - DNA, 178 bp, Homo sapiens
gctgagtttggtaatttgcacttggttttgtaaattggaactgctcctctcctcagcccgcaagaagcagataggaagacagtcttcagaccccgagacatcagcgaagaacactctctgattgtgtatctagtaactctgcttggcgtaccgacgctcgagattctgttatcatggt

SEQ ID NO: 659288 - DNA, 1773 bp, Homo sapiens
gagagagagagaatgggcagaagaacaaatgctaaaagagcgggaagagagagagcgcgcctgcacgcagcaacaacgcgcaggacagcagctcagcagcagtcatccaggcagcgggtgaagcaaattcagcacagcacacgtggcaacaggcaacaaacacgccaacagggcagttcggcacaatttgcaagcaaccgcagaacaggcgatagcagcagtgcaagcagcagcaagcactttggctgatcagttcccgttatactaggaacagtgactctacgtaagggagagcatcagcagcattcgagcacaggcacctaggcagcaaacaggacctcgaagcgagcatcctagagtaggaagaaccgaaaggacccgagacaagacagaacaggcgacgctgcgcaggcaccgaagcgcaacacaccagcgcagacgaacaagacgcgaacaacgcgtacgtacacataacaccaaacaacgcaccgcaacagaagacgagacaccgccgagaacaatacaatgcgaagacaactgcaccgacaagactaagcaagcaggagcacaaacgaaaacaagagaaaccacaaaacagacaaggaatacaaggagataaagacgcacgaagaagaataggagaacagcagggacagaggcacgtgacacaacgaaaagagaagcagcaaaagaaaacagacatgaagaaacacaacagaaaagcgagaaaggaacaaaagacagcgaaacagacaaacaagaaaagaaaagagacgaacgaaacaaccacgacaatgccgaaccaggacaaccgatcaaacatagaaacagaaggatcacgaccacacaaaggacataacacaccacacaacaagagaaacaacacacacgacgagaagaagaaaaaacaggagaacaagaaacagaaaaggacacgaaaagaagaaaaacaaaagaacggagacagatcatgcaaagacacggcagacaacaacaaaagcagaacagaaaaacacaagaccactgagacacgagacagaggcagacaaggggaacacgcgaaaagagaacagcaagagggacagaacaccaagcggagcagcgaacagacaacggaccaggaaaaagcaagagagacaccagacagaacagcaaaaaaagagaaacatgggagacctgagagcacgagagcagcaccacggaggaagaacacacagaaggcagcacgcaagaaaagcaagcaacagaaagaagaaaagagaaagcgagcaaagaacggaaagaaaagcagacaaaggagaaaaacaaagaacagagaacaaaaaccgaccggagccatgaatatgagaaaacgacaggaaacgtaggacggacacagaggagatgaccaactcgaacgcgcaacgcaaccgaaggcaaagagaaacaagacgcggcgaagggaagacgagagagaagaggagacacgccgaggagcagaggacatacaaatacacacaactatataacactaaaaaagcaaatagataataagacaaaaaataacgagagagaaacaaacgcaacaagacaacaacaaataataaaataacaaagaaaaaaaataaaaacataaagcaacacaaaacaacataagcatcaaacaaaaacacaaaacaaaacaaagaacaaaagacaagactaagaacaaacacatacaccacacaaaacacgaacacaactaagcactagaacaataaacacataaacacatagcaacaaatacatatataa

SEQ ID NO: 659289 - DNA, 542 bp, Homo sapiens
aaaaaaaaaaaaaaggggcgccgctcgcggatctagaaactagcacagcaggtccgtggatgggctggatgagtgaccaggccagcctctgtctcaggacattccagaaggacaaggagatgtctctccctctcccaaagcaccagcgttcccttgccttcccgtgtgggccctgtgttccggggtttgccctgttggttgaccccaagccttctgtccactttccttaacccagggacccttgcacagccagaaacttgcctttgggccctacggatggccactgggctctggtctaaagtgccttgggcttgtggtggccatcaagaagggagccagtcaaggccttgttgaagggccgttagaacctttgtattataccctgtgcaccagcagttgaccgggcaagagcccaaacccccttccacgggggttcccagcacccaactttttctaaatctatgatgtgacaccaataaaagcccaaggctccttgtgtcagggcaacagaaaaacaagaaaagaagaagaacaaaaagagg

SEQ ID NO: 659290 - DNA, 294 bp, Homo sapiens
cagagatgatgccactgcactccagcctgggcgacagagcaagactccatctcaaaaaaaaaaaaaaaggctgctgaattcgggcagggcttttcagattccgggcccgggtgatatcgtaactccgggggcacctgggttacgtggcccttccaagggccctgcaatttaccctcttcctccattaagcactgggcccatgtctcttacttctctttacccagttttaacaggggccggtgtaagagccttcacccagggaacagtacaaccgtggcggggggggggatcctc

SEQ ID NO: 659291 - DNA, 656 bp, Homo sapiens
ttggattaactatatcttggtcatacatccactctgtccatcagcaactgtagatccttccccaaatgattgctgctggcaaagctgagcaattcatgtctatctgcaacagctgacttcttatcaagttccccaattaggacattgatcagatgtgaatatttaattacaatcggcacttctacaatcatgtactcaaaggtgatatctgctttcaacaatgcttcaggggaaaaatccttttctttacaaacttccatcagttgaggagtcagtcttgtattgcctttagtgagaaacaaccttgggcagtttttatggcatcataaatgagaacgacagatccttcgatgtcatgctggtaactaaactgagaatccagtagtgcccggataactaatgagccataattatgtggactgataccagcccacgtgaagatcatcgaatgtttacatggcgaatgctcctgcattcatatccatcttattttgtacttcaacaaataatcagcagcaagggtcctcaagagtcacctgcatcattcaacttgcactgccgtcttaacactctatacaccccttcagggatccaccaccacaaaaataccaaaaacaaaaaacaaacaaaaaacaacacaaacaaaaaacaaaata

SEQ ID NO: 659292 - DNA, 955 bp, Homo sapiens
gttcgacggtactgcaatgaatgctggagaatccgtcccgggcctataatgagatctcttacccactcagccatggctgacgtgccgtgcctcccggagattgcagcttacgcattgtccgggtgaggacaaataaccatccaagttgagaattctcactgaatgctaagcagcgatctggagccgtcaacaaagtcctcggcgacgggaaagcggtactagccgtaccaatagacctagacgtaggaggcgcgcatcgcaagataatggcgacgagagctagatgggggtgactcgcgactggcagcatgatggtagttgagtgactcttggaagcgggttttcacctgtcctggtagcgtgagcgtgtctcacagtgcgccaagcagcgtgcatcatgtaacaagttcctcttgctgaactcaacacggatcctatagacgagacatcatcgaggttttgtatcaccaacaaatgacacgccataaggatgcctcgagtggatgctagcgagagcaccgtccctcaagcacaaacgcaaaaagacggtcagtggtctcgcagtggcttgtttgtgactagtggatctttctcagagagttatgcggagccctggggcacagactgtggtgggttggtaagaggccaaggggtaggacggaaataccatgtgggaggttcgagggcgagattggaagggccaagacaacaggggagaccttaaggtctcggacagctggattcccaaggtggctcggattgtagacagctaagatagaactccggtagtggcgggaaaattgaagggctcccgaacaagggcctccaagaggcttggtgccacagagggtgacggggccgaagcgctcgggtgatggcctggccacgggaggcaggtcacggctggaccaagccctggtcgaccagccggcctggtcgctggcgccaatcaccg

SEQ ID NO: 659293 - DNA, 195 bp, Homo sapiens
tgagcatgaccttatgcatattcatgtccatccatgctggcctgattcctgatgggtgccacgtgatgcactggtggactctactagatgtctgacgctgcatgtgcatcaatgcttgtgcacttggcctgtctgttttacaactgtctgtgactttgtaaaaccgcttgtgatctgtgacttgtgaaaaaccct

SEQ ID NO: 659294 - DNA, 685 bp, Homo sapiens
cggtagtataagacacgtacactgaagcgctgtaaagtccctgggcggtgcccggatctaacgtctacagtaagctcaacccccttagttacagaaaaactcggcaacaggcagtggaatggatgagacggcaagtcgccgcggacgcctgggctctcagctgctgaacaatgacatcgtttactccaggggtggaaatccaggtccatggctgacaacccaacaaggcggggacccaaattcgtacagagatgaggcagagtggagagaaacaactctggctgggccagagtctccagccactacttcttattcctgggcttgagctcttcggctgcattacgcaggaaaatgtagttttggttctggggattataaaattcatgtccctttgaccagtcgtagctggaagcgtatgcaaatatgtttccatggtgattgaaacagcaagctgagatgggctgatctaactgttccgaagtttttagttttgttctggcatctttgtcccagaagctgaatctaccatcagatcccacagttgcaagggtgccatgaacaggatggaacgcgattccatttaccgcataaatgtcctgaggagctgaagtgtaggttccattagatcgatgacatttaaaggtgaagttatctttggcgggggtcggggggtcgatatagtgaa

SEQ ID NO: 659295 - DNA, 210 bp, Homo sapiens
ggacgagacaggcgatcatctagtcagagagctcgtagctaggactacaggcatgtcactgacttggtagttttttctttgctctctctctctttttctttctttccttctttctttcttttctttctttctttttttttttggtagagacggggtctggctatgttgcccaggcgggtctcaatttccggggctcaagcgaccctctgg

SEQ ID NO: 659296 - DNA, 1047 bp, Homo sapiens
  misc_feature (21)..(21): n is a, c, g, or t
  misc_feature (73)..(73): n is a, c, g, or t
  misc_feature (78)..(78): n is a, c, g, or t
  misc_feature (120)..(120): n is a, c, g, or t
  misc_feature (380)..(380): n is a, c, g, or t
  misc_feature (866)..(866): n is a, c, g, or t
  misc_feature (1022)..(1022): n is a, c, g, or t
  misc_feature (1047)..(1047): n is a, c, g, or t
ggagaacccccaataaaagtntccctgctgtcctggcacaatatacagttaataaaagaaatacatgtaaagnctttnaatttagtagtatatccccttatatttttaaagcagtttcancctcaagaagagcatttaagataatgtgaattttagcaaaatttgtctcacttttagatactatttgtatgtattattgctgtatctatttgaactcagcagttaaccacatttctctctctgttttgaagctaaatgttgccagctacctacaaatgatttgcttaactgagaattttagaactgatgtaaaagactttgtaaccttgttaactgcaaatacttgtgatatcagaaaaagtatcctttacttacaattntggattagaagtggaggtggagttttagaagaacgaccattaaccctttatcgtggaaatagcagaaatgtacaactagtttgctctgaacatggccttgataacaaaatttaccctaaaaatactaaaaagaaacgtgtagaccttccaaaatgtgacagtggctgtgctgagaccttgtttggccttaagaacattttttccccatctgaagacttattttcatttttaaagcacaaaatcacaatgaaggaagaatggcataaattcatccagcttcttacagaattccaaatgcggaatgtagattttttatatagtaatcttgagtttattctaccattaccagttgataccattccagaaactaaaaacttttgtggcccatcagtaactgtggatgccagtgcagcaacaaaaagtatgaattgtcttgctaggaaacactctgaaagagaacagccattgaaaaagtcccagaaaaanaaacaaaagaaaacattggtaatattagatgatagtgatctatttgacactgacttggactttcctgatcaatctattagcctgtcctctgtatcatcttcctcaaatgcagaagaaagcaaaaccggagacgaagaaagcaaagccagagacaanggaaacaatccagagacaaagaaan

SEQ ID NO: 659297 - DNA, 847 bp, Homo sapiens
  misc_feature (180)..(180): n is a, c, g, or t
  misc_feature (666)..(666): n is a, c, g, or t
  misc_feature (822)..(822): n is a, c, g, or t
  misc_feature (847)..(847): n is a, c, g, or t
tgggttttgaaaaaaataaaaagttgaaagaacttccttccccgtggtaaatgggtgggcaagcaacctaaaaaaatgatttgcttaactgagaattttagaactgatgtaaaagactttgtaaccttgttaactgcaaatacttgtgatatcagaaaaagtatcctttacttacaattntggattagaagtggaggtggagttttagaagaacgaccattaaccctttatcgtggaaatagcagaaatgtacaactagtttgctctgaacatggccttgataacaaaatttaccctaaaaatactaaaaagaaacgtgtagaccttccaaaatgtgacagtggctgtgctgagaccttgtttggccttaagaacattttttccccatctgaagacttattttcatttttaaagcacaaaatcacaatgaaggaagaatggcataaattcatccagcttcttacagaattccaaatgcggaatgtagattttttatatagtaatcttgagtttattctaccattaccagttgataccattccagaaactaaaaacttttgtggcccatcagtaactgtggatgccagtgcagcaacaaaaagtatgaattgtcttgctaggaaacactctgaaagagaacagccattgaaaaagtcccagaaaaanaaacaaaagaaaacattggtaatattagatgatagtgatctatttgacactgacttggactttcctgatcaatctattagcctgtcctctgtatcatcttcctcaaatgcagaagaaagcaaaaccggagacgaagaaagcaaagccagagacaanggaaacaatccagagacaaagaaan

SEQ ID NO: 659298 - DNA, 258 bp, Homo sapiens
atctagaggatcttatgtgccattagaatctagcatatgcgggagcattatatgtcctaatactcacttacttgatgcacaatataaagtttcagaataacaatataaattatgaccacaacaatgtagttactataagaattaaatttatggccaggcatggtggctcccacctgtaatcccaacactttggtaggccgagacaggtggatcacttgagtccaagagttcaagaccagctgggcacacattatggag

SEQ ID NO: 659299 - DNA, 131 bp, Homo sapiens
tcgttacttactctgaacagagtgttacactgtggttgtatttgtaaattacgtttgcttctctatctattctgcctcctcttatctactatttatgtttttctatatacctcttcttattaccttgagac

SEQ ID NO: 659300 - DNA, 505 bp, Homo sapiens
aagaaaaaagtactgagagctaccaccaacagcaggaggtgaagtcatacctgctgttcccactctggggttctcaagtgcatgaacagatattgtggcaacaggcacaacgttgatttaacataagtaacaatacagaacagcagttttgccctgttaagagcagaaacattcaactgacatgcaggtatacgcacaactatctaaaaatgagagtcggatcaagattctcacggcggttgttgagctacgagatacacgagcccgggctctaggggaggacctcggagccgatatggcttataacgaagctcttgaacagtagtggtgcaggcttaccatgaggagacctgctaaaccccggagggtgacaaacttagatgtgttaagaaagcatcctttttctgataacggcagcatttaaaaacaggtcagacctccgtgcctatcccacatgtttccacccatcatgggcaatggcacatggtatgcgtatatattgggg

SEQ ID NO: 659301 - DNA, 835 bp, Homo sapiens
agcccatcgtgtcacgacccatgaggcctatgatcgtgaggggggtgaaccatgacctactgcatccggtttgtcccgctgaagatggtgacacacgacagtcagcgtgcagtactaagtggctcagccacgctgccatgggagccccttccgatgttacagccgatgcgtgcccctagggtagaaagggggatgcccacgaaggtccgatgctaggagggccctggcctgtagagagctgaagtctggatgtgccagccgaattcagtatctggacccgggaagctggtgctggaggcctggccattgctgtcgagggccccagcaaggttgagatctcttttgaggaccgcaaggacggctcctgtggtgtggcctctatgtggtccaggagccaggtgactacggaagtctcagtcaaacgttcaacgaggaacacgattcccgacagcccctttcggtggtgcctgtggctttcttccgtctggccgacggcccggcatggcctcaattgtttctaagccttcagggagttccagggctagagggtcaaccagccagcctcttttaggcagtcagcctgaacgggggccaaggtgggcgatcggatgcccaagggtgcaacagccccttcgggagccctgggagggagtgctatgtcgcggacgcttgcccacgatagtattgcttgtgcgcttcatgctctcgggaaattgggcggtttacctggtttgacgtcgagttccagcggacccaccttcccgtggaagccccttcgagatccgggttggggagcctgggccctggggggcccccgcttgcgtggttcggttac

SEQ ID NO: 659302 - DNA, 104 bp, Homo sapiens
agtttcatcacagagcaaatacccagaacatttaccaacatttctgtcactttttctccaacaaacggtaaagaccacgtgaagacatccataaaattaggcaa

SEQ ID NO: 659303 - DNA, 137 bp, Homo sapiens
tcatcggcactcgctatcatcggcacctcgctattcatcggcacctcgctattcatcggcacctccaagaccaattcccagaccctagagaatgacagttaccagagtgaggtgccgatgaatagcgaggtgccgat

SEQ ID NO: 659304 - DNA, 828 bp, Homo sapiens
gaagacaggctgtataaaaaacagccatgggggaaagaagaaaaaaataataaagagaatgaagcaaacctatgagatctagaaaacagtctcaaaagggaaaatgtaaaatgtattgaccttaaggaggaaataaagaaagagatcaggtaagaaagtttatttaaagaaataataacagagacatttccaaacctagaaaaaatattatcgggtagacgaaggtcatagaaaattaagcagatttaatccacataagactacttcaacacatttaataatcaaattcccaaaggctaaggataaagaaaggatcctaaatgaagcaagagaaaagaaacaagcaacattgcaagggagcatacatctggcaacaaccttttcagtggaaatctgacagtccaagatagaggtgcatgacatatttaaagtgctgaaggaaaaaaaaattgaaacaacttttatcctagaatagcatatccagggaaaatagccttcaaacatgacggaaacaataaaactttacaagtcaaataacagctgagggatttcatcaacagtggacttgtcctaagagcaatgctaaagagagttctttaatctaaaagaaaagggacatttaacaaacaattagaattctggaaggttcaaaaattcaagtggttaacaggcgaaatacacagggccaaattaagaaatactgcaacacttgtaattggggggtgtgtaaacccaagtcatattcttggaataggaataggtaaagaaattaatcaaattagatattaaacatattcttagaacttgatggttttaaatgttttgaac

SEQ ID NO: 659305 - DNA, 706 bp, Homo sapiens
  misc_feature (1)..(1): n is a, c, g, or t
nggaaggatacaattattgatcaggggttttaggcttgttaagaaaccagagaagacaaaaaaatgtgatgtagacagcagaatggggatgggatcaaggacaagctagaaaaattggaggtggcagtcagagagggttttcttaaaattgaaattataggagagttatagttgtagataaagtgtaggtctcacaggaaagagaaatggcagacagcaccactggaagaatggagagaagaggtgctgtggctgggcacagtgggtcacacctgtaatcccagcactttgggaggccaaggagggcagatcacttgaggtcaggagtttgagaccagcctggtcaacatggtgaaaccccgtcgctactataggcaggagactcacttgatctgggaggtggctgttgcagcgaaccgagatcgttcaacactgcattccactctgatgtcagagcaagactccattttcataagcatattacaaagccctcctaatttatactggttcttgaactcctagtgcgtacgaaatgcatcttataactttctgtttcaaacatgcaattcgctggaacacctcactctcatttatactgtcataacttaatgattgacctcaaattgctcctttttccgggtctataaatccatcctcgagtggttatctcccttctctctacttgttgtcgtcccgtcttcttccg

SEQ ID NO: 659306 - DNA, 82 bp, Homo sapiens
ggcacgacgaagaagaggaagatgaggagtcagggaatcagtcagataggagtggttccagtggccggcgcaaggccaagaa

SEQ ID NO: 659307 - DNA, 554 bp, Homo sapiens
gggagtggagagagaatggggagggagagagaaagagaaagagagagagaaagagaaagagacagagaaaagaaactatgttgtttaaaactgccagcgtgaaagtccatggggtgtgaaatgagtcctggcaactggccagggacgttagcatgcttgtgcgtagttgtcttccccactgtttatgtcttgtcttgcagaatcagcattcaactgcgacatgtgttccctgcagcatgacgttagtgccgctgcccactgccttgcagtgcctggactgatggtcaagatagagctttcctgtcacatgaatactgtttgggccaggaagatccggaacacttgcgggcttgggccaatctacctggtcccccactggcacacactgagtcgtccagggaaaatgcccggcttctgttgtgtgttgtactgtgcagcctttctgggcagagccgtggagaaggtggacgtagggcaggtgtgacgcgcagaggtgtgtccggggtggcactgggtcctttcctgctttacgtagggtggcggtggctcttccc

SEQ ID NO: 659308 - DNA, 1128 bp, Homo sapiens
ggagagaactagtctcgagtttttttgatggtattttccaggtagtccacggtatttaatgggaaaacatggatatatatttttcttcacagcttgaatcggaacacaatatggcccggtttaaaaaaaacaaaaccaaaacattccgaaattgtccacagcctcacgcctacctgcccttaccctcagatctggagatgggtctcccattatgcccaatccctccttccctcagaggctggttgccacagggtggatgaaaagagattctacaaagcggggcaggtcccaggaaaagccactggactcgaccgtgggcagtagagggaaaaccaggggttggcagcggtggacgtggacaacggcagctgggggcgagcacagaagacacgacacagacaaggagaaaaaagacacagacgcacaggacaccagccccaacctataggacaaagcaattgtcacccaccaaggacaaaacagatcacaacagcaagggacagagccatccacgactccgacgaacgaggagcaaaaaaaggcgaggcacaacacaagatgagacaaacgcaacgagcgcacgagaaacaccggacccagaggcccccaacagacataagaagcgaacaagcgccccccaaacacacaccagagagacaacacggagaacaacacaagaggccccccacagaaccccacaacggcattaacaaaagcacgaacgccccacatgacaaaagagcgcgccgcacaaggacacgtgaacaccacacacaaattgcgacccactagaagaacaccgaatgaagccggcaccaaaatatgcagaatgtcacccaaacgcatgaagcgcacgcacacccaccgcgaacggcaaaccaacaaacaacagactacaacgaaccaaacacggagacaacaacacaacagacaaacagaccaataaaacaagcaacaaacgccgaaatccgaaccagaaacgaacaccaacggacaacgaaacacaggcaaaccggcaaaagacagaaagagacaccagacacaagacaaactccaaagcacacggacgcggaaaaagacacagcgaaaaacaaacaacaacaccacacgccacaccaaaaacaagaa

SEQ ID NO: 659309 - DNA, 251 bp, Homo sapiens
cagacgtctctactaacgatacaacaaattagctgggcgaggtggcgggcgcgtgtaatctcagctagtcggaggctggggtaggagaatcgcttgaacctgggaggcgaaggttgcagggagccgagatcatgccattgcacttcaacctgggacacaagagagaaactccataaaaaagaaaaaatctcaagacactggaaccgactagttcctgaggtgacaacccactatgactgacgttagcctca

SEQ ID NO: 659310 - DNA, 138 bp, Homo sapiens
cacatgggcagtagcagaggggatactaaaaactagctcacacacacacacacacacacacacacagagcactgttccttcttccagacagagtgctccaattacagagcagtatatgggcaaaacaccagtgaagct

SEQ ID NO: 659311 - DNA, 211 bp, Homo sapiens
aaaaataactgagtacacagtaatcaatgagggggtatcaataactcctctcattattgcccaagataacagaatatagagatagaaatattagtgacggctcactaacatcacacgatctacatacggtctcccatagctatcacatatacacccccttgaggaactacatgcccttcctatacctacttaattcgagcatactagacaa

SEQ ID NO: 659312 - DNA, 1003 bp, Homo sapiens
taagaccctcatcaatagatggagacttacagaaatagtcaaaccacttctacaaaatgtgccagttttcaggcgggggctttcgaagccaaaggtgagtgtttgtggagtgttaaaggtgaaatattagtgtggcggattgaagcagattaggtgaggaaagttgagccaataagtgacggtgaagtccggtggaagccgtgtgtggctacaaaaaagtgttgacggccgtaaatgccgtcggaaagtggtgaagggagacttcgaagtacctctgaggcttgttaggagggtacaacatagagacccagtaacacattgtaatagcgcagtgcttgatatttattgggttctcggttggttctcctattagcactatggtgagctccaggtgcattgatactcctgatgcgagtaatccggtctgtgtttaggagtgggacttctaggggatttaccggggtgatgcctgttgggggcctgtgccctcctaatgggggggtaggggctcatggctgggacgtgggtcaccaggggtgcgatgatggttccttggcggattgactgtccgtctgtcttgctcgcctcgtgttcggctcggtcgtcgcgttgcttggttgtccgtcctttggttggtttcgggtcgcccttgcttgtgtgtcttctggctgctgtgtctctccggcgcttcgcctcctctctgtctttgctcgcctggttgcacgtgctttcgtgcctgtccttgccgtgctggccgtgcttgcctttggtgtgtggcgtctgtttggcgtgccgtgggtgcggcgctgtcacggcgcgtgctgcgcgtccctcgctctgtcctttgctgcccttgtgcgtccctgcattgcgctgtggctggttggttggccttgcgcgcgcgctggcggcgtgcgtggcctgtgtggctgtgctctggggtgtgtgcggtgctgccgtgctctgtggcgggcccgttgccgctggtccgtgctctagcggc

SEQ ID NO: 659313 - DNA, 438 bp, Homo sapiens
gagactttaagactacctctgacactctggatgtcattgttactgcctatcttacactgttcttaccgggctctgacacatgctgtccttactgccacactagcgacactgtatagcacaccgttgtcgtctaggaagcagccctacattaccgagctatagtgtcctcatacgcctgatatccagatgctgttctctcataggacctacttcggggtcgtcgagaccatctatgtgcgatcatacgcatgcatgttcgcttttgcgattgccacctctcatagcacaggcctccacagtccatatctacatgtcgagcctgtatatgatgtcatgtcttataaccctgaagtattgtacccagacgatgtgtggactgccagtccagacatcactgtcatgcggtacttctctactcacggactatgatcgtgaggg

SEQ ID NO: 659314 - DNA, 526 bp, Homo sapiens
agcatctccgttgaaagatacacttgaggcctcacttctcattgtcccaaaatgtcaaagatcctcctaaatgtgatggcataggtatcttaccatggtaaactaccttcagaatgcgtgtgagatctagctgacatataattcaaaaattataaataacagtagtagggtcatatttagcacacaggaaggcggtggtctatgtaaggggcctccccaacagtaggcagcatgtaagggggtataaataagataacacggtgcgtcaatcctttataaatcatgacgggtgttgcacatcacatatatgacaagcacaacgttatgatctttagttctagagtgcaacaaatctgagatccaattccaggctgcctcacacgatcagcggctcggaatctaagttacatcatcggttgacctgactataatagctgtaaccatgccacggaatggtggtgagcattcagtgaactcattcatatgatatggcacatagcacaaggtcgggcctatgataaagatg

SEQ ID NO: 659315 - DNA, 195 bp, Homo sapiens
  misc_feature (3)..(3): n is a, c, g, or t
atnagaggatctggcgagtgatgtcatcttgtatccaggcttggaggcaagcagagatattgaggcaggagtcgagacagctggtcacatggtgaaacccgtcttataaaataaaaattagtggcatgggggcgcacactattaatccagctactccggaggctgaggcacgataattactagaaaccgggagcg

SEQ ID NO: 659316 - DNA, 546 bp, Homo sapiens
cggatggaaggtttgttgtaatcctgtgtcaagcaattctatcagtgttatttttccaacagcatgtggctcactttgggtctctgtgtcacattttggtaattctagcaatatatcaaactatttcactatgattatatctgttatggtgatctgtaatgtgtgatcattgatgttactatcgaaactgggttggggcatcatgaactgaacccatataatacaaggaacttaattgataaatgctgcatgtattctgactgctgcactggccagacatcttcaattaggccaattaataaccctacaatggcctctaagtgttcaagtgaaagagttgcaggtctcacattaaatcaaaagctagaaatgattaagattagtgaggaaggcatgttgaaaactgagataggctgaatgctaggtctcttgtgccaaacagccaagtcgtgaatgcaaaggaaaggttcttgaaggaaatttaaagtgctactccagtgaatatatgaatgataagaaaatgaaacagccttactgctgatatga

SEQ ID NO: 659317 - DNA, 115 bp, Homo sapiens
attgctagtgtgagagtgggtcccaaacatcccaaacctgataggtatgtaggctttcatcaccatatacttcaattctaagataggtggttgtgcatacaaccatacacacatg

SEQ ID NO: 659318 - DNA, 967 bp, Homo sapiens
gtgccgagcctttgggcctctagggcagggtggcgcgaacaggggggccggtcggattcccgagttgttggacacggggcttccacaggggtgcccgcaagactgtcggcgcgcggtttttgtgcgggccgtgggtgtgggtggacccccccccgcgggggccgttttcgagttggcacgccccccttttgcacgcgcgtggcccacccaggggacccattggtcggccgcgaagggcgcctgtgtcccaaatagggcgaacactcttcctggaagagatagtcaacgcaggaaactccgtgggggtggcgggcatatcaacaggcgccgcgtggagggaacaatcccaccacatatagagagaaaggagcactccttgcgcggtcacaattccacagaaaggaagtttgtgaccacacgaagaggatccacatcccccacccgggaatcttcactttccctggaggagaggaaactctctcgtgttggtgtatatttgtgacgacaccacacactgcgagcccacaaccaacactcgtgtaaatgtagaactttctacccttgggggcgccagaggagccacacatctgatcgtgcgtatcacaaatcatggtggtgtaaaagccattgggcgcggtggccacaccaccacgaccgcggggcacgcactccccctatagccaggggacctgcgaccccctctaattctcccaaaaccccgaggagtggagagatttctaccccccctctaagaggggaccatctcgggagagtggtgtgggaaccccttggtggtgtttttgttcacgaggccacctttttggaaaaatatttttgtgggtataaaacacaaataagccaggaaaagacccacacattggatttatattttttttcccaaattttggccccccgggtttttttccaaaacccctcccctttaaaattaatttggtgccgggagtga

SEQ ID NO: 659319 - DNA, 163 bp, Homo sapiens
tgtgccgcagctataccgtgcttgctgcgtgcggaacacgctactctgtgtccccacttcttgccttagctcatgctggcttaatgtgagctcagcttaggagtccttccctcaggagcctttgctttctcagtcaggtgcgttgataagctgggtaccgtgc

SEQ ID NO: 659320 - DNA, 1447 bp, Homo sapiens
tggcaggcaaaaatgagtttatggctttaaagaaaaaccccgaaaaaacaccagcaaacacctccgtactagaacgagttatttagttgtgtgacctcaggggcatataaaaaaaacctcagaattacatagaattttactctcgtggggaggggggtgagtggctctcactccctctccttccttctcccttattcccttttaacaccagatgtggcaccctcatagagaggtgtgctcccagtgtggtgccaataacagagttcagcgtgtgaacctcttattctccccagcgtgtggccgtgtggccgtgtgttccacctctccgagggcggaagtttaagcccggccccacaaagtgataaaatagtgccccgtgaagaggtggtcgtgggaaacaagacacaaaaaaaacatagtgagagcggagtggggcgtatagcgcaagtgtggaaaacgcctgtgaaccctgtaaagtctctaccacaagctaatgaggtgcacacgtgtgggcgctctccccacattggggggagagtgaagaagctgtgtgccctctctcccagagttggatactctcctgtgggacaaaaaacctgtgccctccaagtgtgcattctcctctcgctctctctctctcgccccaagaaaacccccccttagggcgcccacgagggccaatgggggccaccacaaagtggggtcgtgctacaagtctaaatcaaacggggggggcggtgccgtgtctccaagagagaacaatgtgaggtgtgaacctcacaaacttccttctctagagggggaaagggcgtggctctccctggggggccccatagaggggggtgcccctggcgctggacaacaaaacaccaaaacccacgcgtgacaacccgggacctcgtggaaaacacggtaccacaacgggtaaacaacacagggacccctgttgatgtgcccaaaaaacccccgggtgtatgcgcgtgggaaagcacccctgggcaaacaggaggtcctggcaccaccaagacgccggggaaaacaacaaccccgatgccagcacacaggtgggaccacgcggaaccacacgtggggcgcacaccagagcctcgggcccaaaaaaaacgtgttaccccccaaaaaaccccggctccacaaaactcttccctgggggcccattctgtacagagaatccgaccactacaaacggccgcggagatcggccccaccacctaaatgcccagcaccgggacaacaaccggcggcgccaacaaaaaccaccaaccagagctaccaacaccacaatagaaaacaacgggaaccgcgtacctcacaccacaaacagagcccgcaactcatcacacgagcgcaaacccagcactcgacaacacacggcacggacaaactcaaaccatgaataacaaccacacatacaacccagtagatcacg

SEQ ID NO: 659321 - DNA, 112 bp, Homo sapiens
tgctggaactgtggatcacttagtttatttctagtggagaatggactatttgggccttgggacctagaagcagcatggagggaagtctgatcatttaaaagtggtcaagatc

SEQ ID NO: 659322 - DNA, 264 bp, Homo sapiens
aagctgtgcagtggctctggactgctctgagaatagagcccaaacttctagaaccttggccgcaagctcctcgcctgccctctgtctcactttccaaagcacttaggtgcctgcctgcctggacttctctgggatgctttcatctcaccctgctctcctccttccctcatttcctccattctcttctcttctttctaccctattcactgggcaaactcctaaagcaggttgctgtttagatactgtttacccagtgaatagggt

SEQ ID NO: 659323 - DNA, 603 bp, Homo sapiens
  misc_feature (225)..(225): n is a, c, g, or t
  misc_feature (237)..(237): n is a, c, g, or t
tggagctcgcgcgcctgcgaggcacaggccagcccagctccacgaggactgaacaaggtgctgtctcactgccaccatgccggaagtcgagagaaaacccaagatcactgcctcccgcaaactcttgctgaagagcctgatgctggccaaggccaaggaatgctgggagcaggagcacgaggagcgcgaggcttgagaaggtgcgctacctgtgcagagcgcatncccaacgctgcngacccgtggcctgtaccatcaagtgacctagaatggaaacttgtagccctgggacagcttggcatcgccaaagggttgtgaagcgttgcggttgggacttgacgagcaagctgactaaccagaaccattagacagtggccacaagaattggcctcacatactaaacaacccaggggaacagatatacacgggacaccttgacaaggcttgcacagggtggaatgcgaccctccgaatgtgggacagtttcaaggaagaccacgggcccctgacgcatccgacgctccggtgatcatcggacctgaacggcccaatgctaccgtggaaacaccatgcatggagactaccaacagccacaacagtgat

SEQ ID NO: 659324 - DNA, 467 bp, Homo sapiens
  misc_feature (38)..(38): n is a, c, g, or t
  misc_feature (70)..(70): n is a, c, g, or t
ggtcgactactactactaaattcgcggccgggtcgacngagaggctatgtgaacaggaggagaggctacntgaacaggaggagaggctacatgaacaggaggagaggctacgtgaacaggaggagaggctgtgtgaacaggaggagaggctacgtgaacatgaggagaggctgtgtgaacaggaggagaggctacgtgaacaggaggagaggctgtgtgaacaggaggagaggctacgtgaacaggaggagaggctgtgtgaacaggaggagaggctacgtgaacaggaggagaggctgtgtgaacaggagaagctgccagggcaggagaggctgctggaagaggtggagaagctgttggtacaggagaggcggcaggaggagcaggagaggctgctggagagggagaggctgctggaagaggtggagaagctgttagaacaggagaggtcacaggcaagagcaaga

SEQ ID NO: 659325 - DNA, 232 bp, Homo sapiens
tagtcagcgccagggatgcggatccccttttgcagaactcatatctcgagcagtttacattaaaaattagcctcccttcagttaaaaacccccattggggttagtcgtgtctggcttgtacctcgttgccattagtgatctttctagaacatgaggaaatcaagtcgtggttagaaaagcctggagctaaaagtggcaaagcccatttcctgtcctctgctggaacatgctg

SEQ ID NO: 659326 - DNA, 599 bp, Homo sapiens
  misc_feature (414)..(414): n is a, c, g, or t
  misc_feature (436)..(436): n is a, c, g, or t
  misc_feature (460)..(460): n is a, c, g, or t
  misc_feature (543)..(543): n is a, c, g, or t
cagtttaaatgctggaaaaaggacgtgagatttgatgctagggaaggaggcatggggttctaggcaagggagacagtctcttaggcctggagcaaggggccaggggcctgggcaggccacagagccccacagtgtcctcgctaccctattaatgggccaggaatttggaagccagccaccacatgtcctcatgcccagggtcttccggcaggtggagctgaagagccaagaggctccgagtctgcagcagcagccagaccagtagctggagccccagtcccacaaggagcttggatgtgcggacaagcagggtggactccccaggagcacccaggcttgagtggagaagctgttggtacaggagaggcggcaggaggagcaggagaggctgcatgccattcttttcgggctgcngagaacagggagctaaacatcnccatcatctaagagcgggtcaagnaattgaaaaaaaaacaacaaaacatttaaggggttaatatcctacacaattcatttacttcatttgaatgttagagccacttntgtttatttgtgtttctaatttatagtttaaatttatttgtgtttctaaaaaaaaa

SEQ ID NO: 659327 - DNA, 237 bp, Homo sapiens
aaacactctccaagtatgtgcacatccgcatcaagcatgtcctattgtctttcgttccttccttctcgtctctctctctttgaggaaggatctcacagtcacccaggagccaccgcgcctggcctcttttattgttctcttgttcatgtcaattttctctttgtctgacacctttctaaaatgctggtcactttcagatccacgatctgttgctctaaggtggtggagatgtgcaag

SEQ ID NO: 659328 - DNA, 747 bp, Homo sapiens
  misc_feature (414)..(414): n is a, c, g, or t
  misc_feature (436)..(436): n is a, c, g, or t
  misc_feature (460)..(460): n is a, c, g, or t
  misc_feature (596)..(596): n is a, c, g, or t
  misc_feature (622)..(622): n is a, c, g, or t
cagtttaaatgctggaaaaaggacgtgagatttgatgctagggaaggaggcatggggttctaggcaagggagacagtctcttaggcctggagcaaggggccaggggcctgggcaggccacagagccccacagtgtcctcgctaccctattaatgggccaggaatttggaagccagccaccacatgtcctcatgcccagggtcttccggcaggtggagctgaagagccaagaggctccgagtctgcagcagcagccagaccagtagctggagccccagtcccacaaggagcttggatgtgcggacaagcagggtggactccccaggagcacccaggcttgagtggagaagctgttggtacaggagaggcggcaggaggagcaggagaggctgcatgccattcttttcgggctgcngagaacagggagctaaacatcnccatcatctaagagcgggtcaagnaattgaaaaaaaaacaacaaaacatttaaggggttaatatcctacacaattcatttacttcatttgaatgttagagcccccagcaggccatctaaggtagagcagctacaagatgagaccaccacctaaggaaggngctagagagtgtgggaagacagctcnggctgaggtggaaacaatcagatgttgagtctctgacagagcaggagagagctacgtgacagagagagctacgtgacagagagagcacgtgacagagatagcatcatgaccttgcatatatgatt

SEQ ID NO: 659329 - DNA, 976 bp, Homo sapiens
  misc_feature (38)..(38): n is a, c, g, or t
  misc_feature (295)..(295): n is a, c, g, or t
  misc_feature (643)..(643): n is a, c, g, or t
  misc_feature (665)..(665): n is a, c, g, or t
  misc_feature (689)..(689): n is a, c, g, or t
  misc_feature (825)..(825): n is a, c, g, or t
  misc_feature (851)..(851): n is a, c, g, or t
ggtcgactactactactaaattcgcggccgggtcgacngagaggctatgtgatctcctgaacaggagacaggaggagaggctacgtgaacaggaggagaggctacgtgaacaggaggagaggcaacgtgaacaggaggataggctacatgaacaggaggagaggctacgtgaacaggaggagaggctgtgtgaacaggaggagaggctgtgtgaacaggaggagaggctacgtgaacatgaggagaggctgtgtgaacaggaggagaggctatgtgaacaggaggagaggctacntgaacaggaggagaggctacatgaacaggaggagaggctacgtgaacaggaggagaggctgtgtgaacaggaggagaggctacgtgaacatgaggagaggctgtgtgaacaggaggagaggctacgtgaacaggaggagaggctgtgtgaacaggaggagaggctacgtgaacaggaggagaggctgtgtgaacaggaggagaggctacgtgaacaggaggagaggctgtgtgaacaggagaagctgccagggcaggagaggctgctggaagaggtggagaagctgttggtacaggagaggcggcaggaggagcaggagaggctgcatgccattcttttcgggctgcngagaacagggagctaaacatcnccatcatctaagagcgggtcaagnaattgaaaaaaaaacaacaaaacatttaaggggttaatatcctacacaattcatttacttcatttgaatgttagagcccccagcaggccatctaaggtagagcagctacaagatgagaccaccacctaaggaaggngctagagagtgtgggaagacagctcnggctgaggtggaaacaatcagatgttgagtctctgacagagcaggagagagctacgtgacagagagagctacgtgacagagagagcacgtgacagagatagcatcatgaccttgcatatatgatt

SEQ ID NO: 659330 - DNA, 113 bp, Homo sapiens
aatcaatgctgaaaacggagctaaccaaatacatgctgatgttcacttccttcagataaaatcggttttcatttttcacagcaaagacaaagtctagatacttaatggtgctg

SEQ ID NO: 659331 - DNA, 809 bp, Homo sapiens
  misc_feature (128)..(128): n is a, c, g, or t
  misc_feature (476)..(476): n is a, c, g, or t
  misc_feature (498)..(498): n is a, c, g, or t
  misc_feature (522)..(522): n is a, c, g, or t
  misc_feature (658)..(658): n is a, c, g, or t
  misc_feature (684)..(684): n is a, c, g, or t
actggctactccccaggtagtggtaaccaccagaagtggctagagagtgtgggaagacagctccaggctgaggtggaaaacaatcagatgttgagtctcctgaacaggagacaggaggagaggctacntgaacaggaggagaggctacatgaacaggaggagaggctacgtgaacaggaggagaggctgtgtgaacaggaggagaggctacgtgaacatgaggagaggctgtgtgaacaggaggagaggctacgtgaacaggaggagaggctgtgtgaacaggaggagaggctacgtgaacaggaggagaggctgtgtgaacaggaggagaggctacgtgaacaggaggagaggctgtgtgaacaggagaagctgccagggcaggagaggctgctggaagaggtggagaagctgttggtacaggagaggcggcaggaggagcaggagaggctgcatgccattcttttcgggctgcngagaacagggagctaaacatcnccatcatctaagagcgggtcaagnaattgaaaaaaaaacaacaaaacatttaaggggttaatatcctacacaattcatttacttcatttgaatgttagagcccccagcaggccatctaaggtagagcagctacaagatgagaccaccacctaaggaaggngctagagagtgtgggaagacagctcnggctgaggtggaaacaatcagatgttgagtctctgacagagcaggagagagctacgtgacagagagagctacgtgacagagagagcacgtgacagagatagcatcatgaccttgcatatatgatt

SEQ ID NO: 659332 - DNA, 864 bp, Homo sapiens
taacaatcgggctgttgtgcgctggcgtcggttcgctggctatccagtacaccaggcgctaaggtcgtagggtgcgccgaggaaaccgttactaggttaccggcgcgccggtcaggatcgttacgctattattagtcgtacgacacttactagatccggaagaatagtacacccctgtcggggccaagtacgactgcacacattgttagcacgtcgcccagccagtcttacatagtcgggaggtagcagagcagggtcgtaaagtcctgtatttgcgcagcactagtgcgctttacagacgccgataccgagtgacccaagacaccagcgacaccttcgatacccttgtgagtcgacaaccacactaagatacgcgatacggataatcgcacaactttctcagtgttagtatcagtatctaagcatccggctatgcttaaccaggcaacacgagctacgaagcgcttgggctccggcgcgctgcacgaatacaactgtaggacacacatcaagcccgctgtcgttctgctcttagtcaccagatcacactgcgggcacccgcgtcaggcactcaccaatacatacactcagcaggcaatctcaaccgagccaattaccattattcctgaccccccgactataaaggccgccaaacgcggtctacaagctaggcattattctttgtagcatgttacacaacactaagtaccacgtcattccagctgaatcagcacccgatcaaagcgcgcatagggcaggcttagggacggtaaactacaaacaactaggccgcttacgacgcattaccagcaacattggcgcgatttcacacacccaagtactcaggcactccggacgctaagg

SEQ ID NO: 659333 - DNA, 360 bp, Homo sapiens
ggtgatctagaggatcttatgctgctccctcttcacaaagagcccattgatcccgtcaagacatctgggggaagaggaaaaaaaaaaacaaaacagcccaccagaatgtgtggccggaaacctgcccagttagctcctaggccatggattgtgggcggccactgcaccttctgggtaccccattccccttgggaggccccagcccccgaagaaggcccaaagccctttggtggagaaaacagggaaggtgacaacaccagttgaatggcaaacgccttctcccccaaagcagccactgggaatccagggccaacgaaggtggcaacacaccctttccttgaagaagggaaggcagccagg

SEQ ID NO: 659334 - DNA, 290 bp, Homo sapiens
ttctcagcagtccatctagctgagcatcttgtgccgatcgtagcactgtcttccgctgcctcctgtacctgcggcttccagcgctgctggcgcatcttccaaatgctctaggactgtgtttgctcggggtcccccgacgtgtgatgctgcgagctgcttggcgatagtagcgtgcattctcattctcctcctcattgtttgcatcttgttcagtgtatgtattcggctttcggatcagagggttcgccagcatccgggtggccatgtggagccacagtgttgccaccatg

SEQ ID NO: 659335 - DNA, 1546 bp, Homo sapiens
tcccctatatacagctccctgtgtggtgtgcagaacaaccaacgcacgttgttgtggacccacgcagtagtggcccttgtggatggagttcacacacactgtgtgttgccacaaaaactcacgggctttgtaaactacgtcgtccgccccgttttctcttattctcggggctcctcttaagggtatccgaagggcctcttgtggtgtcgcctcaaaatttttctctgcgccgccgagggactataatagttgtgttgtggcccccacccacaggtgcatgttttcgtcgttactgtttaggcggtgggttagtcccaccactatgagagtggtgtgtattctctgaagtgctcccacatctaattgctcccctccgtgaatgttcaattgatgcacataatgtcgtttctgtgtacacctgggtaccccacccacgccggggggggtctcctatccactgaggaaatagtccccctctgagtggtgtttctgccacccgtgtgtttgtaaattctcactcgggtccccgattttatcttgtttgtcctgtggtaccataggtagcacctatggtggccacaacatatgacctcccgtggggccccaacccccaacatattagggcccccccatcgtgtttctttgtgggttacaacagagagaggcccgtttttctcccatactcaaaccccaaatgttttggcccaaagagagagtttctcacataggagggagagcactcacatagaggacacatcctcaaagagtgaagcgcccatttctcttcttgctcgtttccccacagaattttttttaagatgatacaccccttgcacacagagcaccatattgtaatattttaagaatttggcaccaaccccccctggttttcctgttcattctcttgtaagagccaaccacactgtggatttgtaaaaagagtgggccccgcgcccaacacacaggggataagagagagtgtgtccacaggccctgtggtacccccttgaaagcacatggtgttaatgagagagatgtgcccccgcacatcacaaagcctcacggatatgagaggcacattttgtcccctgccacaggagatgtatcccccctgtgtctggtcttgttgtgttctccgcctctccatctcatctgggtcttgtccccgtgtcttcttgggccatatctgcggtggggtgtatagagcaccctctcagatgtctcagaaagagagaccttgtccagacttgtctccagaatagaggaaccgagacgccatcttctctcctggcgtgtcctccagaaagagaggccagaatattggctgcgcccaagaaagaaagactgcccaagaaagtgacacccttgcccccacccaacatccccagaatattcaaagaggaggttgattgccaaaaactgtgcccaagggggaggaaggaggtcacaccccatatgatgatggttttcatgactttgaatgaaattaatttttgtacatctagctgtatcgaggcatcaggccctgaataaaccatcccttttt

SEQ ID NO: 659336 - DNA, 105 bp, Homo sapiens
gtcacacagatttggccaaggtgttagctcagaaacaacccaagttaacgtgaagccttttcatgagctgtttccaacacggtcggtcccggcgttggagtatcc

SEQ ID NO: 659337 - DNA, 673 bp, Homo sapiens
  misc_feature (521)..(521): n is a, c, g, or t
ctcagcgtgtacgtggtatcaccactgacatctccgtgtggagatttgcgaccagtacgtactatgtgactatcattgaggccccaggacacaaagactttatcaaaaacatgattacagggacatctcaggctgactgtgctctcctgagtgtagctgtcagtgtgggtgaatttgaagattgtatttccaacaatgggcacaccctagagcatgcccttatggcttacacactgagtgtgaaacaactatattggcggagttaacaaaacgggtgtcactgagccaccctacagtccggagagatatgaggagcttgctaacggagtgagctcttacattaagatggctacaaccccgacacagttgcatgtgtgccaatatctgggtggaatgatgacaacatgctggaagcaagtgcttacatgccttggttaaaggagatggtcacgcgtgaggatggcaatgtcagtggaaccacgctgtttgaggctctggactggatactccaccaactctgntaactgtcaagcccttgcgcctgcctctacaggatagctacagaagtgagggtttgggacagcccctcttgggccgagagagaactgtgttttacacccggcctggtggggcctatgcttccattaacggtcaacggaaggtttattttctg

SEQ ID NO: 659338 - DNA, 191 bp, Homo sapiens
  misc_feature (118)..(118): n is a, c, g, or t
  misc_feature (123)..(123): n is a, c, g, or t
  misc_feature (135)..(135): n is a, c, g, or t
gtaatctgcacaccaaacctccatgacataattttagctgtgtgacaaacccacatgtgtaccctgaaccaaaaataaaggtaaaagaaaaaaaaaaatccctgggtgggagagagtncaatntaggtgagaggnctgatttttggtacagatagtggtcccagtggggctgtactctatttatttccgtg

SEQ ID NO: 659339 - DNA, 723 bp, Homo sapiens
  misc_feature (283)..(283): n is a, c, g, or t
gagcgtaggctagtatactactactaccgccaaggcgtagtagctacgcccactagatatcggtgtactaccgaaaagggggagtacatactaggcataaaatagtacactataagcctagctagtaattacaaggctacctaattacgaccagataataagtagaactataagttacacaccaactaagcgcaaaaacaacagacagccctaatagctagtacagtagaattaagcaggtacatacagactaagtagctagagtactaaggggtaactaggncagagctagtaggctacgaatattacccagagtatacgaggtaggtagggactacaccgctactaggccagggtagctatataaggaaacatagtagtacgtaggaggccgaatagtataagcaccataccaaaacctaggcgccgtaaggcatacgtaagagtagaacacaacccaaaaacgataacgccatactagtatctagccctaggctagcctacagccctaaccagcactaggtacatagtactaaaaggtacatacgtaataagagggaagtaatcctagaaactatacctataaggtaagtaagaaggataaaagtaagaagggctaacaaggaagaccaaggaagctagtataagctacctataaagaaactataaaagcctaggaatagatatacaaaaggtactaatagccttataagcgaatagaga

SEQ ID NO: 659340 - DNA, 441 bp, Homo sapiens
  misc_feature (76)..(76): n is a, c, g, or t
acaacgctcgaccagaattatgatttctttgcactctcttcccttcagccagacctttctggaagaaatcattcanttaaataaaatggatataccttgctaggtccttgggatatttaggttcaagtgaagaaggtaaagaataggaaaatgcctttaagtccaggtgccatggctcacacctgtgatgggatgccaaggcaggggaggatcagttgagcccaggagttcgagaaacagcctgggcaacatggcaaatccccgtctctacaaaaaatgcaaaaattagccagacatattggtacacacctgtattcccagttactcgggaggctgatgagggaggatcgtttgggcccgggagttcaaggctgcagtgagctgagatgaacccactgtgctccagcctgggtgacagagcaagacactgtctccaaaaat

SEQ ID NO: 659341 - DNA, 164 bp, Homo sapiens
agcgatggacacttgtacccagaagttttggatgctagcagagagatctatcacgacacagtgatatagccactgcacgtccatggcctgtgggaacatctcaatgacctcgcatctttttaaaatacaaaaggcaggagggctctcgtacacgatccgcgtct

SEQ ID NO: 659342 - DNA, 202 bp, Homo sapiens
cgctcactcggcaatcaaacaaaaccagagtcatctggggaaaagtaactcgggaccatggaaacagctgtagcatcgtgccacattccgagaggcaaacaacctgctaaggccataggacacagaatccgagtgatgctgtacccctcaaggatttaaactaacgaaaaatcaataaataaatgtggatttgccgaggtgg

SEQ ID NO: 659343 - DNA, 1506 bp, Homo sapiens
  misc_feature (676)..(676): n is a, c, g, or t
tggcttgggctttatacaaaaaacccaaataaccaaaaaattaaagcgataatattaaaacacactctctgtgtgtgtggagacctctcccccagccccccaacaccatgtggtggggagaaatgtgggggggttcttgaaacagagaaggggagaaagaaaaagcccctctcaccaacacccacaagaggggctcacgccaaagaacacatatttctctgcggggtctcgagcttagggccagcgtgtgtgtgtgggtgtgggacacagaggggtgtgttggaggaaagtttgttccccaagaagtctctcccgggggagagttggaggggtgtgggcaaaacgccaatatataacgcaccccgcgtggagagagagagagaagcggctggggatatctcttctggtgagagccaggtggtgaacctcatctctcccattatatctctcttctctccacatatctctcccgcgtgagagcggggcgccctgtagaacctttttaacaagagagaaaagatatctgggggatatctgtgggggagatgtgggggctctctagaaccccttgtgcgccctgtggagagcgccctgtgggggcgctctatgagcgcgacaagtgtgtgggcgtcgagcgagtgagagagtatataacagagagagacaaaaaaaactntcagagacacccccagagagaagagaggaggaggacccccacaagaagagcgcccttatctcccgcgagcgcccccagaagagcactagtgtctgctgtgacacgacacccgaggggggacgaggcgcgtgtgggaaacgagtcttctgcgcgagagagggcgacgagtaatcacgcactttgggggggggagacacacacccagacaaacatgtgggggccacccctctgttgagaggtactcttctgaaaaacgaccctttaacaaaagttggggcccccagaggggtgccccccacccagaggggggggcgcgcagtggatcaacagggggggggtgcttgttccacaccacgggcccctcctgtgtgtagaccccccagcattatggtcgccccccggaggggaaaaacaaataaaacaacaaagggcgagcgatcaacggccgaaaaaacaccatgttatttttccctccaaggagataaaataagaacccccttaaacagagggggagagaggaaaaacacctcttcctgtagagtggaagagtcgcaccgaacggcggtgtgttgctcactcaaaccgcacgggacaagctaggattttaccacacccccgccggcggcgattttctccccgccaggcgtctgtaacggaggagacacatcttattgatgcatgagtcgtttgatgtcgccacccaatgtgatgcctcgttgtctacaccgagggaaggagaaacctcgtttcttcacaactgattgagtgaggacagcggaccacctctgtatttatatgcgacgacaaacacgcgaggggtgcaccaaacc

SEQ ID NO: 659344 - DNA, 392 bp, Homo sapiens
gattctattcctagtagtttttctttggtgaagggccctgtcctgaaagggagctgtattagtccattttcacactgctgtgaagacatacctgagactgggtaatttataaagtaaagaggtttaatggactcacagtttcacatggcttggaaggcctcacaatcatggtggaaggcaaaggaggagcaaaggtacatcttacatggtgtcaggcaagagagcatgcagaggggaactgccctttataaaaccatcagatctcgtgagacttactcactgtcatgagaacagcatgggaaaaacctgcctccatgattcaatgaccttccaccaggtctctcccatgacacttggagattatggagttacaattcaatgtgagatttggg

SEQ ID NO: 659345 - DNA, 433 bp, Homo sapiens
ccccagaccccaagcccataaatgggaagggagacatgggagtcccttcccaaaaaactccagttcctttccttttttgccttttcccactcccttcccttgggtttttcatatttaaaggtttcaatttctgtatttttttttttttgagagaaaacttgttgattttttatgggcaggggggggctacaaaaaagccccttttttcctttgtttgcaggggagtgtggccctttggcctgggtggaacagtcatcctcccccttccccgtgcagggagcaggaaatcagtgttgggggtggtgggcggccaataggatccctgcctgccagtttttcaaacttttttatatatatatatatatatatatatatatatataaaaatgccccggtcctgctttggtcaataaaggatcctttgttgtttcgta

SEQ ID NO: 659346 - DNA, 635 bp, Homo sapiens
tctatgatactatgtaacatcagaaaacatataatacaatatagttgtcttatagccatgctcccattttagatgacagctagttagcaactcctacgtgttagtttaatactttacaaatgcataaccgatattcagtcagcattataaaacctttaagacagaaggctgtcaagcagaatagacagagggctcatcatcacttatgtctgaatcttcatctactccttcaataaccgatttcttccctttacaacaggatacaattaatccaatcaaaaataccccaagaaaggcccagttaccaaaatagtaagcagcactgaagaaccagaacttgtgaaggaataggtatgtccgggtaacagtacactgatcttcaggagcttctgcatcacatctctttgacacagaaagggttgaattgcctttatgattatcagaagttatattagtctctattaagtaattttggcttccatacataacatattggggagcaagactatcaatcatgtagctagtgtgaaggacaataagcagaagtatcatgcagagaaaaaggagtgcttggggcctggttctacctcttctgattttatataatctaatccacaagaccatatgccatattc

SEQ ID NO: 659347 - DNA, 384 bp, Homo sapiens
caatcctcccatgttagcttcccaagtagctagaactacagggttgtgctaccacgcctggctaatttttaatgttgttttatctacagagcctggctatgttgcccaggctctctcaaactcctggcccaagtaatcccagcactttgggaggccgaggcgagcggatcacgaggtcaggagatcgagaccgcggtgaaaccccgtctctactaaaaatacgaaaaaaaaattagccgggcgcagtggcaggcgcctgtggtcccagctacttgggaggctgcggcaggagaatggtgtgaacctgggaggcggagcttgcagtgagccaagatcgcgccactgcactccagcctgggcgacagagcaagactacaactaaaa

SEQ ID NO: 659348 - DNA, 792 bp, Homo sapiens
  misc_feature (114)..(114): n is a, c, g, or t
  misc_feature (178)..(178): n is a, c, g, or t
  misc_feature (233)..(234): n is a, c, g, or t
  misc_feature (254)..(254): n is a, c, g, or t
  misc_feature (258)..(258): n is a, c, g, or t
agcgggggagtggtgtgattcccgaccaagatggcggccgtggggcgagtcggctccttcggttcttctccgccgggattatcctcgacttacactggcggccccttgggcaangagatagcgtcgggcaacggtggcgccgcggcagggacgacgaggacgggcagaacctttggtncctgcatcctcagcgaggtctccacccgctcgcgctccaagctccctgcgggganngaaccgtgctactgctgggntganagatggagctggaaaaaacaagcttaactcacagacacccacattccagggcacatagcaggacgtcatcacagcaccacggcacgcaggcattgcgcaatattctgctacttaaactgtgccatgcatgcaagaccagggcatgcatcaacacaagattgtaactgttcggatcttagcatggagcacctatatccacaaaggtcctccgttaaatttcgcactggaatgccgctatctctgaaggatactctagttatgctggttgtatgacatgtcaaagccttggactgctttggcacttctttacagaacatgggcaagtgtcgtctagagaatatgctgacaaactgacaatcctcctgacgaacatgacaccacatggaacaaaagtcgattagagacttccaagaactctgtagagccacggagaagacttcccggcttctcgccagagaagaaatactgcgtcgcaagaagacaacgcatgacagtgtacgtttacctctgggtgcggatacacttagcacatac

SEQ ID NO: 659349 - DNA, 114 bp, Homo sapiens
gcgcgtgctgctgcagaagctgcaccatgctaaggctgttgttttccacggcgtggatatgcggggagcggccgctcttaatgtccactgcgtcgatatcggcaccacccatca

SEQ ID NO: 659350 - DNA, 158 bp, Homo sapiens
acagcgtacaacgcacggtgagaaattgcgatgaccaataggcaggctcaacctcgatctcactggatatagaccgagccgtttcgacccaggtattcacgccgttcataaaaatagtcgagttagatcttcgtcattgacggccagggcggcgagtt

SEQ ID NO: 659351 - DNA, 922 bp, Homo sapiens
agcggggacgggagaggcgagagcctcgtgtctgcgcatcacccctgtgtgctgggagtgcttagacctagtgggagtggcgggcaagggcatgaggatcgcgagtggctggatggacgtgtaacctctgcaagatggcgtggagtgcggggcggcatgagaatgtagtgctgcatgtactatttagtgagtagttggctctatttgctgtcactcaagcagaaggaaggagccagtgcttttggcttccaaattcactgctgaacagatacgccggtgcagggacgagacctgaccttgcagtacaatcatctacacatgttggcgtcaagtgctagcagttagacgtggaactatctgatgattccttccctccagaagacttggggattgtgtctggaatgctcaatgtcaacatggtgaccggattgcccctgatagctaatgtctgccactactgtggtcctgtgccctctcaatgctggttatttcaacttgcagctcggcaatcaattacttacctggtcccatgagtgatgggcccggttgtgattggtctctaccagatgcagcctggacagtggagtgaatcctgtggttcatacggagagttggaccaggcgattcctccgcctcattattctgagactgggcagcctttggggtcatgagccttccctccatcgggatcctcctggctattgtggtactccagcgagaggaaatatgaccattcccaaaaatgaagaatgaacggaattggggctttccacagtcctacctctcgcatgaaatcccaagtgtctctccaagaaatgcaggtgctttccagaatccagagggtatcttaaatgcaatctcttctcgtctagccttggccacttctctggatcctgcctggtccacaaccatgtgaaggacg

SEQ ID NO: 659352 - DNA, 798 bp, Homo sapiens
  misc_feature (139)..(139): n is a, c, g, or t
atagtctttgaacccaagggccaacggcattatcaccactggggtgtaagggccatatttgtttttagcctttcttaaaccggataaaaatttttctccgcgcaggtgccctgggaggattaatggtctcggtaagtanaaacccaaaacaccagaaggttatttgatttttaagaattctgttagcaacacaatgtttgtaaagggggggtgtggaaggggcccccagctctgtgcactagggcagaatgaacggaatgtggggggacaccctgagctttaggcaaaataaatttattgtctaaaaaaaatataacctatattatatatatgttatacatacataaacttttattttttttcttctgaaacagtctcgctctgtcgcccaggctggagtcaagtggcactatttgggctcactgcaacctccgcctcccgggttcactctgggcctggggctgttgaaaggttccttgctaagggggttctctctcctaaaagctctaggaatccaaggtggaatcagaggtggaaaacagaaatggttgggatattctgaaaaaaggtcagaatgtggtcaaaggggaaaaaaccaaaggattgcccgtacgtcagggttgtttagcatcttagaaatcatttagggcagggcccagtggctcacgcctgtaatcccagccctttgggaggcataggtgggaggatctcttgagcccaggagttccagaccagcctgggcaatacaatgcgactcccatctctcccaaaattcaaattaaataaaaaatgaaaaga

SEQ ID NO: 659353 - DNA, 431 bp, Homo sapiens
  misc_feature (6)..(6): n is a, c, g, or t
  misc_feature (22)..(22): n is a, c, g, or t
  misc_feature (126)..(126): n is a, c, g, or t
  misc_feature (137)..(137): n is a, c, g, or t
gcagcnaccggaccaccgttcntaaaacgggtaacttgcacacaatttcttaaccgtcacctaagggaaatgcacggtgtatggtggaaaaaactgtatctaacactgaaactactacggactccntcatgagtccnacagtgataaaaaaactactgtactgggcaaattggcgtctaaacccactctactctaacagtctgatggtgcatagtacgtaacagcctgagtacgaatgcccttacacagccacagattctaaacagacagatttatacagacatcattgtgttgtattttaaggaaaaatttccatttacaatttcacattaactcatataaaaataacttgaccctacacaaaatgtccttttagcaacattcaaagtaattaactgttacaatttccaaagcggcagaagtattgaagc

SEQ ID NO: 659354 - DNA, 902 bp, Homo sapiens
agcgggggtcgcgatgaccgcacggtgtgaaccgtcctgagcagggcccacgcccggtccaagcggcccagccacctgggctgtgagcggcggtcatcccgttatgtctgccctaaatcacgtgtacatgaatgatcgcgagaggcgacgagcgttgttcgaagttcgacggcgtaattggtgcaactggggtagaatctagagattcgggaaaggtccgcatacttaagtgcagactcagttattcgctcaccgagattatgtacttgctctcaatgaggtaatcccagagtcctttacttcagtaagtacactcacgccaagatgatcgtgtgaccacaggtggaaacgaaatgctcagatagggtgttcaacatgcacaaacgacacggtggcgctagcaagggttgacatggcgttccagcaataagcttggattatcccccagggacttgtgggaagaaataggcaagagtggcagtgaactaagatacaacgtgtcgcttgggcagctcgttgttgatatacaggagcttaagacattttgcactaaggtgcaagagctaatgaggggagcgtatccttacaattggcaggacattccactgtacggtagaaagccagagaggctacgaagaattgcgcgtggaataagcagggggttgcaggttgcctgggactgataactaagcgtttaccactttgtcctttcccgtttccagtggaaccacttgggcacgtttcacaaaacccacgttggcgaccttcactcgaacgtttttaactgcaaacgccggtcgtgccattgacactcaaccgttggacactcacttccaatcgccaacctttcattggccaaaaacgtcaagaacgacccctttcagcaccccagacgggacatg

SEQ ID NO: 659355 - DNA, 206 bp, Homo sapiens
ccggggtttttttttgggggtcccctttgcccaattcagggccgattcccggtgtttgtggcctttgaatccagggttgggccataaataaaccatttcgccattttttttttccagaattttttgttaattttttgtaagaaccaattgtctatagggaatttgggaaaaaaaaaatttccaataaagggtttattattattgga

SEQ ID NO: 659356 - DNA, 114 bp, Homo sapiens
aacattacactccgtcatgtactattctggccggagccaaactccaacttaggaacgcactcagagatcagcattataatcctctctcaaggacttcaaacatactactcccac

SEQ ID NO: 659357 - DNA, 171 bp, Homo sapiens
accggacaggtaacctgttactgcataacgtatcgagattacttcattggccttaactccagagttcactgccagtcccccgcgaatcgcttcaaatgcctcagcaaacttcttaacagcatactgttcaactccacgacctgtctctccctatgctctgatctgtttggc

SEQ ID NO: 659358 - DNA, 1020 bp, Homo sapiens
  misc_feature (48)..(48): n is a, c, g, or t
  misc_feature (195)..(195): n is a, c, g, or t
  misc_feature (260)..(260): n is a, c, g, or t
  misc_feature (364)..(364): n is a, c, g, or t
  misc_feature (419)..(419): n is a, c, g, or t
  misc_feature (454)..(454): n is a, c, g, or t
  misc_feature (463)..(463): n is a, c, g, or t
  misc_feature (478)..(478): n is a, c, g, or t
  misc_feature (488)..(488): n is a, c, g, or t
  misc_feature (517)..(518): n is a, c, g, or t
  misc_feature (538)..(538): n is a, c, g, or t
  misc_feature (540)..(540): n is a, c, g, or t
  misc_feature (558)..(558): n is a, c, g, or t
  misc_feature (596)..(596): n is a, c, g, or t
  misc_feature (605)..(605): n is a, c, g, or t
  misc_feature (753)..(754): n is a, c, g, or t
  misc_feature (977)..(977): n is a, c, g, or t
cgaaaaaaaagaaaagggatgaatgattaaattgagtagagtaagtangagtagtatataaacacgagttaaggtttttacggcagttaaccattgataattctgaaaattagctaattgtatggaccagcgttcagtttttcaacaaatatgcagacactacgacccaaattattaagatattcactgaacacngtgctagagtgagaatagctgatgtcgttctactctgcatgaacaactggctcattctcatgcancatatgtcagctcagttgtgatctgccataagcagctaacagtgaagcttctacgtgcatgagatgacagacctagcactttggctatctgacctcgagatacnacctagtatgatagcagtctctcgtagcagacacaagcatatatgatatgatctnagtaatagaggagaagcagatctgaatggatttcnataatagcnttcctctagttaacntgattttttnccacatatgtatctttcacagatcagttnnggagcatcaatttagcacancntggcttaatactgcacanacacatagtaaagcattatgcttttatctatgtcatcnatggtttcnatgggaatgactcatccttcctctttaacactctgttctaatatggtttactataaataatgcagacagagagagagagagagagggagcaccagcgagagcgagcatgtgcagctcagcacaaggcccctgcactgttaggtcacannagagccgagtccaacagacaatcctaaggtgaatcttgggctcagtggatggacgagtgttggttcaatggagaggaaaagcaaacattcctctctccactattcaagtgttcggggcaaggaacattgtcaggaaaggggaaaaaatacatgctgagtatatgccaggtaccaggctaagatttgaacacacaagctcctttaaccttccagagccttccanagaggcagagtcagaattctaactcaggccactgtgctcgtgc

SEQ ID NO: 659359 - DNA, 260 bp, Homo sapiens
gtaaaacatgttctcatcatggttaatgtctatgatacggtagtgtcagggcgaaatgtcatgatctatatgaaatgccttcagcaagtttgtgcactaataacaggtattactttaaatcagcgttagagtttgtgctcctgcaactgctgtgaaaatttctctgagtaattgtgagttgtgaatgatcccagaccacccttgagattttgtcaacctgcctaagtcaatatgaatgtgtaaaaagatgtgtgctctga

SEQ ID NO: 659360 - DNA, 100 bp, Homo sapiens
caggcagaagtacatccagatggacagcatcctctccaccacagtctcagacctgcgcagcatcagcttgaagttctagaccaccacgtactgctccagg

SEQ ID NO: 659361 - DNA, 1541 bp, Homo sapiens
  misc_feature (675)..(675): n is a, c, g, or t
ctccggcaatggcagctgacccttatactggctctgtgctggacgtgcgtgatagacatcagggacagacaaaggtgtgtgcgagagtgccatgagtgggacatacctgcactgatgacttcgccctgcccttgcccaccggggctggaagattcctgaggaagatggattacaccactcagcttcctcaacagctcttccatgaccactggctgtcttgtgataggcgtgttcttcatccgtcgttcgtgggaccgatttagtacgatgcatgcgcacaggtatatcttgagccagtaggtaactgttggcattccgaatcgatcgtaagtacggcagttggaccccctgtacactgtgactcctgagtcgagcaggcgcgtgaaatgcccaaacgggatgggtacacggggacatgaggtgtagggaactccagctggcccgaacgttatgggcagcgtaacgctaacggggagttccatgcatcgaaaacgatggtggaagacctacgtaggaaggggaaggggggggccccttcacgcgacccgagatcttttccttggaactcctacttcatatgtcgcccccaagaagcgcattgggcttggggcaacgtcaacacgggttgtggaactatgggcaaaggaccgcgtcgtgtacaacccatgagaaatnccccacggaaagggccgggccctctattgagcaaaacatgtaccttcttccaacttctgaggctaagcgcattatgaaacgttgtttacacctcctggacaaccggcggctgaacaggttggactcggtgcgctcacacggaatttcttggacggtggaaaactcggtgccgatgtgcgacacgccgtatgacaactagggatgcgtttgcggtggcatcaacggtgcgccttcggtttgccaattctaccctccaaaaacgattgtcagtgggaggcatgggctacttgtggaaggaatagtaggagaaggacatagatacacataggaagtgtggcttattacaaccaactccttttgcggaccacattgccgggcactgcgtgccacacttcccttgcggtgtgacaccatatccgcagccttccagggaatgtcgacacgcggtgatatgtaaaaggctgtgccccccgtgtccagttatgaaacggaaagtacacccacacaaatttgcgacggacgttggcagcaccattgtggcgtggccccaaagggcatcgagaaacggggaccgatgagcggatccaatggacagggcgccccagacgggggggactagagtggcacgggtccatgagaacgcggaggatcgcgaggaaacgcctataggagagtgcggaacggaaacatcgggttgactatgggcgaaccagaagtgggaggacagttgatgtgcaggacgcacgcccccaggagttgagaggaacaacggcacacgcagcccaagtccccatccgagtctcctacaagataggagggtcgccaaccccagggatatacggtcccgtagtgggtcacactcgcca

SEQ ID NO: 659362 - DNA, 113 bp, Homo sapiens
cagagcaagctaagtctccagattgagagggccaatacaatctacatctagacacatattgtaaaatttggagtattaaggatagaaggaagatattaaagtggccagggaga

SEQ ID NO: 659363 - DNA, 137 bp, Homo sapiens
  misc_feature (69)..(69): n is a, c, g, or t
gccagagtgaggcgtagaggcacgccagccagagcctgtggagagactccgtctgctgacactaacggnctgggaaggtgggccccttcccttgggtcttttgcaacttgacttcccccaacttcctggacccttgg

SEQ ID NO: 659364 - DNA, 530 bp, Homo sapiens
tgaggatacccgaccagcctgcccagggccagcaaagccttaccacctcaagcttttccactatacctatctatgctcaagaagtagggcggctactgaagacatgctggtctctcccaagtctttcctcaggatccacacatcagacattcatctctattctccaaagagcacaccatggctgctgtgttcctctccttctcttcttcctcttttgataccttttctttatcttttagcttctccttatttagagtgaactggattggattagctgctggtctcgtccttaaataatacatcccagtcttcaaaccctgcttccagccgtagaagtgcatactagtgagtttgccatagttaggctcagcaatgtggatgttcaaagattggctttgatcaatgaaagcacctctctcagctgccatcttgagaacagttttctgagagatttcccacacagttttataaagttgcttcaggtcatcaggaatttctggtatgctctgaatagagccattgcatgcaat

SEQ ID NO: 659365 - DNA, 232 bp, Homo sapiens
taaaacaaaacctaattttttcaacaagcaggttttccagggaaataatttgggctaatggaaatttcaacccccggggtaaaggaggtttaactgccttaagcctcccaggaggggggaattacggcccccattcttaaccccgggttatttggcagaccctttatttgaccggaccccagtttggttttttccaaaggaaccccggccttttttctttcaaatagcgggg

SEQ ID NO: 659366 - DNA, 648 bp, Homo sapiens
tgttctgtgaatatagtgtagctcttacgcgtgctcatgatgaccttattgtctggaccaaaatttaggacatattaagcgtctgtaaagtaaagaaggattattcttacgcctctctgctggcttgtgctaaggtctttgcagatgatgttgttttgaccaccccttaacatcttggtgtatgactttgctgaaggccttattttcttattctctggtaactactccttatatgctgatgtctcccaaatcttaactctcagcccaggtcttacccctgaacattatgtagacacgtttctctgcaacagccctaactggactttccctgcactcagggtgttcaagatgaactcaacattgccattcacaaaaatcacttactgatgaatgacaccaccattcatatgacacctttacatccagccagcccccaagtcctgatgctcctacttccttgactgttcttctgacctctctcttctgggccttaatcctttattaactcggcttgcctgcctcacatcctccaaactggctaatttaaggggaaacccctgccttttctaggctgcctccctaccctagaacaagcagggcatttgtgaccagatcctcatcctgtatcgtaggcctcttgctgttctc

SEQ ID NO: 659367 - DNA, 138 bp, Homo sapiens
  misc_feature (16)..(16): n is a, c, g, or t
ggatttgctggtgcantacaactaggcttaatagggacatgacgggcaggaattttcaaggaccaacaatgtatgacaaaataaacagaaacacttctggggataagaaaaaaaaacgttagaagcttgaattcgagc

SEQ ID NO: 659368 - DNA, 436 bp, Homo sapiens
acttctagactcaaattggttccattgatttctatgtctatacttttgctaatacaacctaatcttcttgattgtaaccctgaaattgggaagcatgaccatgaccaggtgtgatttatcccaagagtgcaaagttggttcaacatccaaaaatcaatataatacaccattttaatagaataaaagtcaaaaagcacatgatcgtctaaatagatacagaaggaggatttaaaagtatgcaacattccttcacccaacaaatggaaggaatgtcctcaaccgataaagggcatctacaaaaaatcaacaaccaacatcttactaaatgacaaaagatagaatgctttccccctgtgatcaggaaccagacaaggacgtctgccattgccatttgtattcaatgttgtgctggaggtcctatccaggacaattgggc

SEQ ID NO: 659369 - DNA, 908 bp, Homo sapiens
ggaggagaagtaggactgctgtgattaggactggatcagaccgaagaggggcgttttggtatttggtgttatgtgcatgggtggttttatattgataattgttgtgatgaaattgatgtgccctaacgatagagtgagacactgctatggatggacatgagaaagatggttagagtctacgtgagtgcctccaagggtgggagtcgttcccttgctaacggagggtagacctgttcaacctgcttcctgctaccgagccgtccactactagcaggatgcagagaccgcgagcaggcgagagtgcaggctccgagctcacgcagcctacatgcatgcgtatccactagcgcctgcaaaacgcacccgataccggcagcctcccacgcaccgatcccagcggcaacctctgtccaggtccgcccacaccccctcctcacccatccacacgcccaatccactaagccacggcccccccaccgcacccacagtcccgcacacatatctccaccctacagccccgcccagcttccacgcgagtcccggccacccaacgcactggccgacccgccacccaccctccgcaccgcgccgcatccgccctccgcccacagcccgctctgtcccacccacagctgccagcacaccccacaccccaccccgcccgaccctacctcaggcccccaggcgcccacggcccaaccaggacacaccacacataagagaacaaatcccccaccactccgcacacctctccccccctcctacctccccgtcgagcaaacagcgcgacgtcccaacgaccacacagcgtccacaccgcccccgcacctacgcagcacagccacacagcacacagcacccctcgaacagaccgcaaccactctcacggcgccaacgaccccggagac

SEQ ID NO: 659370 - DNA, 203 bp, Homo sapiens
cacacctgcatgcttgctcacctcataggtgggagactgggacaactgagaacagcatcggagcacagaaaaggggagacatcacactatccactagcctgttgtgcgggatgtgcgggaagcgcgtactgggtagcattaggagatatacctaatgttaaatgacgagttaatgggtgcagcacaccaacatggcacatgta

SEQ ID NO: 659371 - DNA, 510 bp, Homo sapiens
cattaatacacaatgtgtttaatagctgacattgtgttgaaaaattacattgcaagatgctgttcacagaatcagagggttgcaccaaaacacatattaagcacctcctgataagtacacagtccttgtatgaatttgtttaaagcaaatgtttggttaatggctcgtacgactttgtttaaaatctttatggaaaatgaatgggaaaatacttctggaaccggcgctgctgaaaaactggatggacgctgtttatgaaaactctcttttgtcctggtggctttaagctgtggatttccagtgccttctaaagagtcctgaccagccacgcttatgtttaaaaaaataacatatgaaatgcaaattttaaagtgtttacagatattctttctttaaaatgcattgaaattgcaatgttgccaaatccagtgattttatttatatgatcaaatttttattgtaatgtaaaatttaacttaaaactttggaaaataaaagatttttgaagta

SEQ ID NO: 659372 - DNA, 126 bp, Homo sapiens
tcagcactccttggcgttggtgtaaataggcggtgttttctcgtgtgaatgagggttttatgttgttaatgtggtgggtgatgtgagacccccatagatattgttggtgttgttgacattcacata

SEQ ID NO: 659373 - DNA, 327 bp, Homo sapiens
acaggctgggctgacataccactgtccccatgcaggcggggaactcctctttctgtcatccattgattatcatcgtgtttctaacggattatatgacagggcttaggcacaatcagctcatgaactgccctcctcatgctccacctctccctattgaatcttgttggtacagatacctgagaaacgctggttgtctgctgccacttcagctcatccaggggctgagggaacaagctggccattagccccgaggtgcaaaaccttcaaatacaggttgccagcacggatggcttgtacttggccttcagcaactccagtgagggatcc

SEQ ID NO: 659374 - DNA, 293 bp, Homo sapiens
ctagttagaagtttagcaggctgatggatggatgagatcttatttctcagcaagatcaaagcttggcaaaatgtcattcgcagatcgtggatccaatacggtatgatggcaggagagaagatctttcacctctggaggaaaattacttaggtactctgggtagcagtgactaatctgtgccataaacatcaccagctctgctagttcttggctgggtttattgggtggcaatttgaaaatctccacatgggattggtagtgattatactgctatggaaacttctaaaactagg

SEQ ID NO: 659375 - DNA, 203 bp, Homo sapiens
gactcggcacctccttaatgtgtgcccagcctggagtgcagtggcatgatcatagctcactgcaaacttgaactcctgagctcaagtgattttccaacctcagccccctgagtagctagatgtgctccaccactcttagctaatacttttagtttatgtagagatgggttctcattatgttgcccaggccggtcttgaactcc

SEQ ID NO: 659376 - DNA, 938 bp, Homo sapiens
cattcactcagccagggaggtcccccccccccgagatatttaaagggcacaaagattcgccccctccaggacatgggggaacccccttccggaggagcgtttaaaaggtctctctgcaaatacctgttgtccggaacaccggggctataatggaacttctagagaaaagacgcccctcgtatttgtgtcgtcgtcgcgcctgttcatagatccccctttagggtcacaagtgcgctccgaggattaacgtgcccgtgattcagaatatgctgcgtgtttccccgccgctgggtaactggaagcacaccatggatgaaaaaatctgagtcttctagttcccaaggcagagttcccggccgcattggtcccccttggttgcctggttatgttccgtcccgcccaatactcctattgcggcggtttccccggcataacggcccttgctgccaacccccttttggtctggtaggattggccctgatagtgccctcgcccctcggcttgcggttgatgccccgataaacgggtggggttccacccccagaagttgctcccacgctgctagaccaacgcgtgttctgatttaagtaacaccgcgcttcttggagcatgaacccccagttttccgcccgcacgggcgatacctcctctgggggggttgcacccggtgggcctgctacgccccccccgccaccccgctatgtgttgttgccgacaagtcaaaccgaccgcggcccagtgtccagctttgctatagtcttcccccagggtgatagcccaacgaagaatggcacatactcctcagagggttttgtagtagtcagatactcgttatttagagtggtggacaccacctagatcctccctgggtgcgtggcggtcgcagcacccagaagagggatacaaccgaaattggaccttctcaaacaaacaaaaca

SEQ ID NO: 659377 - DNA, 213 bp, Homo sapiens
ccccattaacataatgcatgtaaaatacctgttcttatctatacaaaaaatatatgatatatacaaatatgtgtatgtctaggttaaagaataataaagtaaatacccctttacttgaagaaatataaaattatgccaggcatggtggttcacatctgtaatcccagtacccttttacttcagccaaaataaatataaaattcctagtagctt

SEQ ID NO: 659378 - DNA, 371 bp, Homo sapiens
  misc_feature (44)..(45): n is a, c, g, or t
  misc_feature (164)..(164): n is a, c, g, or t
  misc_feature (176)..(176): n is a, c, g, or t
  misc_feature (179)..(179): n is a, c, g, or t
tatggaatcgagtacttgatcgtatgagtctcagcggacttatnnactatagacatgcttagggagcgtacgcacctggtggcgagaaaactcacgattagaggcagagttcacattctccaccatctcatcccactcccacacatcaagaaaacgcgtaccanaacgacgcttantanaggtatgacgaccaattaaaccgtgaacaaaagaatagagctgcttatgagcttgctgtgttgtccatacaaaatccaaaccgcgatgacgatgctcggcaagcgcccgcacatgatctggcgtagtctgacgcataccgctaccaccatacttcataccgaaccacttccatgcttcatccacaaaaacta

SEQ ID NO: 659379 - DNA, 335 bp, Homo sapiens
cgtcgacgcagcgttagtagtagtagtggtggtgatattagtagtagtagtagtagtagtagtagtagtagtagtggtggtagcagtagtagtggtagtagtagtagtagtagtagtggtagtaggggtagtagtagtataagtgatattagtagtagtagtggtagtagtagtagtagtagtagtagtagtagtagtagtggtagtagtagtagtggtagtagtagtagtagtagtggtagtatagtagtagtgcagtggtagtagtagagtagtttaatagtggtacagtggtagtgctgtagcattataggcatagtgtggtaggtcgacgc

SEQ ID NO: 659380 - DNA, 321 bp, Homo sapiens
  misc_feature (48)..(48): n is a, c, g, or t
  misc_feature (107)..(107): n is a, c, g, or t
  misc_feature (156)..(156): n is a, c, g, or t
  misc_feature (246)..(246): n is a, c, g, or t
  misc_feature (299)..(299): n is a, c, g, or t
gatctaggctcgccgcaacctctgcctcccggctttaagcaatgttgngcctccatctcccgggaagctgggattacaggtgcgcaccaccatgcctaatttttgtntttttagtagagagtagggtttctccattttggccagactggtcttganttcctggcctcaagcaatccaactgtcttggcctcccaaagtgctggaattacaggtgtgagctgcctcacctggcctggaaaaacagcnttccatgagataggaccttcaccagtgacttttatgtcttcagaatttaatgntctttcccatcatcctatatcc

SEQ ID NO: 659381 - DNA, 518 bp, Homo sapiens
  misc_feature (1)..(1): n is a, c, g, or t
  misc_feature (13)..(13): n is a, c, g, or t
  misc_feature (147)..(147): n is a, c, g, or t
  misc_feature (224)..(224): n is a, c, g, or t
  misc_feature (319)..(319): n is a, c, g, or t
  misc_feature (322)..(322): n is a, c, g, or t
  misc_feature (378)..(378): n is a, c, g, or t
  misc_feature (427)..(427): n is a, c, g, or t
  misc_feature (453)..(454): n is a, c, g, or t
  misc_feature (463)..(464): n is a, c, g, or t
  misc_feature (503)..(503): n is a, c, g, or t
ncacaactgccgntaacaaatgtgcaccacaagcacactgttgtatccaacagatagaaaggactttcaaaaaaaaagaagctggttgctctctgaggaagggagaaagaccatctcaacttattagaaatgtggtcacgtctttgntcacttcttcaaagtgcaggtggaaatggcctgtccagtttccaaaagaagatgactagcagggagggaaccctgtntctgcagttgtgcgatcagagtatcttaaatagaaaggtatggccttaggcctatcagctgcccccagccgaacctgtgaagatgtagaaaaganaanacgttccctggctccccccctagtccctgctatggtggagggaggccacacacaanctagggaggaaactgtgactggaatcaactgccctctgaaggacttggnctactggcatacatacaggaggttgnnttacagatnntgggggcggaccactgatttctctgaatacaaatgaacntggggagatccaagt

SEQ ID NO: 659382 - DNA, 822 bp, Homo sapiens
  misc_feature (14)..(14): n is a, c, g, or t
  misc_feature (21)..(21): n is a, c, g, or t
  misc_feature (42)..(42): n is a, c, g, or t
  misc_feature (45)..(45): n is a, c, g, or t
  misc_feature (57)..(57): n is a, c, g, or t
  misc_feature (644)..(644): n is a, c, g, or t
  misc_feature (693)..(693): n is a, c, g, or t
  misc_feature (774)..(774): n is a, c, g, or t
  misc_feature (811)..(811): n is a, c, g, or t
gcaattccaatccntaagggnatcatttttccaggactcttngangaaaggaaaaanccaactaaaaaaatttttgaccactttttgtattttttccttaagagctatttgtggttgttgaggtttgaaaagctgactgttttttttgcaggggttcccaccaatttggaaggcattgaagcttgcaccttttcatgtacagcattaaaattttacctctctctgggatttaccagcttaagagtccaactcacttccagtgcccaaaagggcacccaccagaaattccagtaaatcctcatttgaggaagctctcccttgtttactctgttaccacattggggaaatttttaagtttttcactttgggagtttttgtttgtttcttcttttcctttatccacttttcttcttcctggtagactaggtttatttatctgagcaataacttctatgttggtttcagtggctggaattaaaacaaaacaaaacaaacttccaaacagtgtgttggtgctttagcgattgattgatgtacagaacacaaatgtctagtttctagtgtcactgatgaactagtgatgtagaaaagagacttctctggtaaagtaattggccacagctggtattttgggctttctcccnggtccccttcccttctcccccattttttgggaagcctgtatcaaatggnacagtttataatggtggaataaatccctcgtcctaacataacactaaatgccggattaattagagccattagagcacagcntcttctggccctctactggttgcacagccagaagggntgctgctttgg

SEQ ID NO: 659383 - DNA, 331 bp, Homo sapiens
cgctaaggcacttcctcatctttatttttcccagtctcatgaggcacgcacattataagatctttccacttagatatctagccatctaaagatggagatgatgaatcattctacctatacaaacaagctagctattagagggtggtatagggtatgcaactcataagattacagaggtgtcttcccaatctgaaatctcaatgttctcagtacgaaaaacctgaaatcagcatggcctatgttaggaaagtgctattcacccagtaaacccaaaaaagcataatggataatgctggccattttgcctttctgacatttccttgggaatctg

SEQ ID NO: 659384 - DNA, 1051 bp, Homo sapiens
ggtgccgtgcgagtgacgattgctgagttgcgatggccgagaccctgcatcgtgcatcgtgtcttgtggtcaagctggaaagcattgagaagccctaacgccttgagagactgtgatgtccaaagagttacctacttagagctcctacgtcacacgttgtggtctagtccccggagtgagatagctggaattgagcgtatggtgcgcggtccctcgcttactccgcaaacttccttcctttcgctattactggtcgtcctgcgttcgagtggccgcaggtggctcgcttaggtggtccgtggtcggggcaccctcggctcttctcgtgcgatagttttgggggcatgggcgggtccctgctagggtcatctcgcggatccgtgttgttccatgtactctcctgaatttattggctggtcgcccggactcgtcaatagggtcaccgagtttagccctctgtgcgtgaccattcctcacatggggcgggtggcgaggggtgtggctgcccggcggtagatgaagtgcacgagtcttcattccttgtcgcgtggccgggctactgtctcgtctctcaccgaggtctcgatcgttaagacgccgtgctctcttcccggcacgaactttggctggagccccgatgggcttcgtcttcccgtgatctcctccacgcgtctcctgtgatcgtgttcctggacggaccggcgtttcccctacgaactaataacgattccagctcgtgggcctaccagtgtcattgtcgtcgcacatcgtgtttgcgtccccgatgtgtggctcttgtggagccccttgctggctgtcggcgtatcccggttcggtgttcaccgagtccatggccacagtggccgggcatgcccggcgtcacgggaggacctatcttaccccttctccgtgtggcagaggggcgggaagataaggcgtagccgggggctcccccagtttcacccggtggggaataccggttcccagccgggttcaccacgggccacgtttttgggcccacacaagcgggttctcttgcgaagcgcgcatt

SEQ ID NO: 659385 - DNA, 439 bp, Homo sapiens
  misc_feature (16)..(16): n is a, c, g, or t
agttcgacggagactnctcttgggtcaatctagaccccaagagagggttcttggatcttgtgcaagaaagaattcagggtgatgccacagtgtgaagtgaaagcaagtttattaagaaagtaaaggaggaggggcacggtggctcactcctgtagtcgcagcactttgggaggccgagacaggtggatcacgaggtcaggagatcaagaccatcctggttaacacggtgaggcctcatctctactaaaaatacaaagaaattggccaggtgtggtggcgggtgcctgtggtcccacctactctggaggctggggcaggagaatgggatgaacccgggaggcgaagcttgcagtgagccgagatcgcgccactgcactccagcctgggtgacagagggagactccatctcaaaaaaaaaagagagtctccgtcgaactgg

SEQ ID NO: 659386 - DNA, 916 bp, Homo sapiens
ggaatgtaagtggattggagggcagggagaaaaggtccaagtaacaggtgaagtttattgccgtgacgtttactcctttctagatgaaaaccaagcacagatgtgtaaaacttctaagattattctcctctatccacagattcacaaaaattaatataatttttaatgtagtgacagcgatttagtgtttgtttgataaagtatgcttatttctgtgcctactgtataatggttatcaaacagttgtctcaggggtacaaactgtttgaaaacaagtgtgacactgaccagcccaaatcataatcatgttgttctggctgtgataggtttggaagcctttttcattattgttttagcttttatgcttgctgccattatttcagtggttgcctaatatttaaaatttacacttctaagatagagacccaatgtgtaaacaatcatgcatgtgtgatacagagacagtttatatgagcagattcaatattattcataagcatgtaattccagggacttctatgtgagatgactactaagcaaatatctagcagggtagctgtcatatagtctgatggatttcgtctcctgaaagagacatgccgcagcagccgggtacccacgcagcggtgatctagacacctttctggtgcatgtcctcccactcatgagtcattatcatcatgcgcattatctgatcagtcctcacattttacatttacatcaacagagaggtccttccgcaaccggtccccaggcgccacttagcaccgaaaaccgattggacacggccatccggtttcagcgcgaaacgcaggcgccgcgcaatgctcgtccacgactctccactttttcctaccagggcgattacgtagaaggagacaaggtaatgtcgccaggactaacacaagaacaaaac

SEQ ID NO: 659387 - DNA, 200 bp, Homo sapiens
gtctaaggcccaaactctaaccctagacttaacctagctcctaagcctaaaagtaaccctagctcataaaccttaacgtaagtctaaccctaacaataattttaaccttaaccctaacccccgtaggaataatattttaccttggtggggacttacttaaaatgttccccagcttttctttttcttatttacttccttct

SEQ ID NO: 659388 - DNA, 173 bp, Homo sapiens
ctagacctgttgttctctcctgggcgaatcctcctgctgcttagtagctggtactacaggtccatgctaccatatctggctaattatttttttgttgagacaagggctctctatgttgcccaggttggtcttgaactcctggcctacaagcaatcctacctacctctagcctc

SEQ ID NO: 659389 - DNA, 149 bp, Homo sapiens
tgggtcagaggacgcttacgacggcaaggattacatcgccctgaacgaggactgcgctcttggacctgtggtggacattgtgagtcagatcacccagcgcaagtgggagacggccatgaggcggagcagtggagagcctatctggaggg

SEQ ID NO: 659390 - DNA, 294 bp, Homo sapiens
agtcctggttccactgagcaaccctgcccagcccaagacccccaggctagagggtaggggacgatgcccagcagcttacctgataccaggtctagacggctctgccctgcagagacagcccaaatgggtggggcatggggagggtggggaggcagggggcagcccactggctggtgttggtcttcagggcagaggtctcgtctggctgggcttgacatggcaccctcccctttgtgttctgtggcctcatctgctcagtttcaccttcagagggggggtccggcttgtctgaat

SEQ ID NO: 659391 - DNA, 298 bp, Homo sapiens
aaacctagaaaactgaacaccaggatagtagcagtggaaatacacagccacacagcatgaaaatgagagaatccagccagatataaatctgtaagaactaagccacagggataaaatggttccagcattcccttggctgtcctcatagcctcctttctctcacacccagttataaattctctcctattggtgaaaaattacatgctttatcaaaagctatgaaagttactgatttatcccacctccttttaacactgaagctcaatcttctaaacagaatttctttccagaatcatgc

SEQ ID NO: 659392 - DNA, 187 bp, Homo sapiens
gtgagattttcacaagtcttccaaacagtgtgaaaatgtgaacctgaacaggtaactgatttaatatgatttagatcaatgcaaaaacctcttaagaaacaaaagcacaggctaggtgcggtggctcactcctataatcccagcactttgggagggcaacctgggcggatcacatggccactcaata

SEQ ID NO: 659393 - DNA, 394 bp, Homo sapiens
tggcccattgcacaccaaggaagatcttagaatctgacaggggaagctgtgtgcctttgaaaaccgtgtcttcatttccaatttggaagagagaagcgtgaaggttaccctttctcgaagctggcccctggcttgggctcctctcatttctctagacccttcttaagagtctggggtgagcacctcctatagaactcagtatgggggaacacagccaggggtcccttcatcagcctcaaggtcaggacaccttgagacagcagcagacccagaagctctgagggggaaaataccccacaatataggaaacacaacccaagacaatccttaaagtgtcagtgtccatggagaggatcccacagctctgagctaacacagtcagtgccacatagac

SEQ ID NO: 659394 - DNA, 400 bp, Homo sapiens
ccccctaaattttggtttgtttccttgaagaatgcggcgaccctgttttgcgtttttgtttgggcaggtcaggcccccagttttgataaacggcagtaaccagtaagggggcccttttttttttttttccgcaaggcattctttgaagctatggagaaattttttttgccccttcgatcagagaatacccctgccccagtaaagccttttttccccccccctccctcccgggggtagttttactaaattgttgttttgttttttattttttcaataaactgtcaaacgccaaaagggtggggttatgatgttttcataaaggttttatcagccgggtattcagttttttatgttaaatatttaaagtctatgatgatggaagaaaaacataaaaaacaaa

SEQ ID NO: 659395 - DNA, 1297 bp, Homo sapiens
gcggatactggctcaagaggacgatcagaagccagtctctgatgcccaccgtcattctccaggcttcagtgcctcaagccctgtagacacgagaaggcgaggcctaatgttgaagccaccggacaaggaggcgggttaggtgcggccacatccaaggccaaagcgagaaaagtcttactgcgcacgcgcactagacagccgataggagccaccgcaatggaagccgtccggagagcgagcaagagcccggagccgacagagatacctggaccgtgcacctgggaaacgacgatgactgcatcccaaaacagtcctgaaccgggtcccgcatgacagccaagaatgcatccagagatgcaagagagataaaacagaggagacataacacaggatcaaactagagatatgcaaaaaacacacatgacacagaggctggaaaaccgaatacaagctgcacagaaacacaatggaaacaagcaacaaatcacacgacgaaccagaacaaatagggaaccaagatgaaatgaagacaaatgacagaaacacgactgaccagaagaccagcaccaacatgagaaaccaacgatcaaaccgacatgagcaatgacaacccgacaagcaccaatagaatgcaagagaaaagcaacacagggaaaaaccgcaagacccccggaaaagaaaaaacaatgcacgaacaggacaacacaaaagaaaaaaacaaaaacaaacaccaatggaggacaacagaacacaaagagaagaaccacacaaccaaacgaaaccaacacaacacggacagcgaaaagacaaaactaagaaccagaaagaacaggaacacacacacaaactagcaaccaaagaaaacgaaacacaagacaaaaaagaaccagtgacacaaacgaacgcaagcccaacaaacgagaacaaggacaaacaagaaacaatgccaacgagaacaagaacaagaaaaaacccaaaaaaacacaagcgacgaacaaacccaaacaagagaacacagaaacgccacaacaggactgagacagaccaacaccaaaaaaaaaaaaaaagaaagacacacaacacaaagacagaagaaaagaaaaagagaagaccagacgaacatgaaggaacagacaccgaaaggaaaaaagagcacggacgagacagcaaacaagaaagacaaaagaacagacaaaagaaaaagaacaaccaaaccaaacacaagcagacacgaatgaacaaaagacaacgaaaacaaaagaaagacaaaacataacaaaaagtgcgactacacata

SEQ ID NO: 659396 - DNA, 727 bp, Homo sapiens
cgaagagagttagggccttgcgctgaattaggctttggcttaagggaatgttgtgactgatttgatctctccagaccactcacactttctcccatcggcaataaggctgttttgctttcttatcatttggatattcactggagtagcactttaatttcctttagtaacttttcctttgcattcacaacttggctaactcttcggcacaagaggtctaacttttagcctgtctcagcttttgacctgccttctaactaagattcataatttctagcttttgacttcaagtgagtgatacgcaactcttctttcacttgaacacttagaggccgctgctgggttattcattggcctgtgttatgtctctaggaataggacggcccgaggagagggagagagaggagaaaatgggaacaactgggccggggagcagtcagagcacacacaacacttatgaagtacgctgtcttatgtgaacgtgctttgtggcactccaaaacagttacaaaagtcacatcagagattactgatcacagatcagaaatataataataatgaaaaagtttgaagtattttgagaattaccaaaatgtgacagagacacaaagtgagaacatgctgttggaaacatggcatcaatagatttactccatgcagtggtggcacataccctccatttgtaaaaacaaacaaaaaatgcaatatctgcagagtgcaataaagcaag

SEQ ID NO: 659397 - DNA, 813 bp, Homo sapiens
gggagaagcaggctgacttcctggacaagcagatgagccgggatgagcaccgagcccgagccatgaagatccctttcaccaatgacaaaatcatcaagccgtgcctgtggaccgagttcaatgatactgcgtgtccgaaataccagttgagtgaagcccagtctgagcctcatccgaggacatccgtgcgccggggctaggagaactgaagatggcggcgctcgtaactgccgtgaagcgctaagctggacttaccgatcctgaatctggagcgtgatgtggaggacctgcagctgtgacaaagcccggctgctgcgggcagaaagtggagttcctgcgctcctctgcgacagatgaagcagaaggtccgagagcctgtaccaggaggtgtttgggcaggtgcggagatgagaacggacggacctagcttcgcccgagtcagtatgcggctccagtactgcctggggactggggaagtgtccgtccgtcatcccccgcacgatggacgagacagcaggccggggcaggagaggaagccaagggaccggaggaaagtgagcctggggaagaagggggttttgaaagcccgatcaaagagctgaatagatgttagaagggctggatgtgtgacctggagctggacctacaagggggattagatgcgttcttatccaatatatcttctcaggattgggatgattgggcggtcagtgtacaagaagaggaggggtggtggctcagtcactcgggtggagtggaagtgcacggacatttaaaaggaaaggtctaccttaccttctgtgagaaggtgtg

SEQ ID NO: 659398 - DNA, 154 bp, Homo sapiens
caatctcatgaggagagaggaacatgctgccgaaacttgatgacatgctgcagaaccaacgaggtggccgaatcttaccttcaggatatctaagaaagcagactgtgatgactgggagagcgggctgcattgcaatggagtgtgcattacatta

SEQ ID NO: 659399 - DNA, 878 bp, Homo sapiens
agcgggtgtctgagttggggtgcctcccctgaagggtcccatctggaattcccaaagatctcctctcattagctgggcatggtggtgcgtgcctgtaatcccagctactggggaggctgaggcaggagaatggcttgaaaccagtaggtggaggttgcagtgagccaagatcatgcgactgcactccagcctgggtgacagagcaagactctgcctcaaaaaaaaaaaaaaaaaagagagagagatctcctctcaggggttgtcctcttggctgccccttccacacagggtctgagttccccccagaaagtataaccggggggtctctcccagaaccgttaccaggcctcacgggggttgtgctgcccctgatccgggccatcatggtatggtcttggcctcccaccatttccgccgccgaagttcccgggggcttctgggctgacccaccacctctacatcctggctctatggtcctggctcatcatccatgggtacgctttggccctgttccagctgaccccgtttccacatcttctcccgggtcccagcaatcatctatgggggcgaacaagctggtgagcctgaacccggaaaaacggtggagatcagcgtggttgaaggcggacctgctgccctcaggagtgacccacctgcggtaccaccggcccacagggcttcgacgtaccagctcagggcagtggcgtgcggaatcgcttgcctggactccgggcggaccaacgcgattaccacgcctttcacactgacctctggcgccttgaggaccccgcttagcctgcaccatccgggcagcaggcccttggaccactcgctcgggcagatctatctagccccgacgttgccagatttccgattcc

SEQ ID NO: 659400 - DNA, 847 bp, Homo sapiens
cccacgcgtccgcttcactttcgatcaagaatccaaataataagcaggagtaacataaagataatcaaacagactttacacagctgacttggagattgtgtgctgctatgctgcttgatgctagagagagtaagacggcgccgtgtcgcaagtgttctagaactatttacacagagcactcttcatctacaagagagaatggtctactccaagatagtaggtgctcacgctcgcttcccgttgttttcgcatcctgtatgtactcgattcagggggtgattagtgttaccttctctggacttgctatgtagacgctcttagattgtgtgactctttcccatctcttagatggttggttgctgcttgcttggccatgccttgggttggtcccctcgcactgtcttgtgctggtgctcctgatgctcccgaggggaccgcataagccgcacttgttgatattggagtggctgtaccttcttccctgtggaattcagtaacaatcagcatcgagcaagactcgcaaagtaagaacacaggcgctctgcacttgtaaacacgaacaaacaaaaatcgcatagtcttgaggtttgaatgaagaacgatgcctccaagcaacttttgcactttgggatcgaaccgagggtctgccacagtcccgtagtcgtggttgccccccttctccccttgattcgatcgaaccacgactacagctgatggggcatagtcctttctcgaggccaattgtttcccttggaattaattgcccttccttcgttagggattatactacataggaggctttttcgtaggttgcctttttgaaatatataacaaaaaacttttcaaa

SEQ ID NO: 659401 - DNA, 148 bp, Homo sapiens
ctatgctttgttaactgtgtgaacctctcctattggaaattttgttccgtgtttgtgtaggtaaataaaggcagacatggtttgccaaccccaaaaatcattagttgtagagaagcccgattataataaattcaaaacatttggttga

SEQ ID NO: 659402 - DNA, 133 bp, Homo sapiens
gattcttattacggaagatgtggacttagcctttttatgctgtcccttgccccacccagtataattatcacagtatttgtttaaactcatgtacggtgttatctgatgatataaattcttttcatggctaaaa

SEQ ID NO: 659403 - DNA, 165 bp, Homo sapiens
ccctgcttctccccagggctcacatctgccggtgctgggtgcagctctgttttttagacaggttctcgctctgtcacccaggctggagtgcagtggtgcaatcacagctgcgtgctgcctcaacctcctggattcaagtgatcctcctgcctcagcctccggagt

SEQ ID NO: 659404 - DNA, 316 bp, Homo sapiens
ctagttattgctcttacagatatatgttgagacggattctccgccgcagctgtactgatactgccccataacaagctcaactgtcagccaggtgcgtcttatgctacagtaatggatgtttgtcgtccaagtccctgtgtaagtttatttactctgcttaccctatctgtgctaaaacagtccgttcagagggatggagtgggagagggcatactgttaagcagcattttgtagctgtatttttgagacggagtctcactctgttaaccacgctgtgagtgcaatagagtgatcttgtgtcactgcaacctctgtc

SEQ ID NO: 659405 - DNA, 837 bp, Homo sapiens
aaaaaattaagtttaaaaattaaaagattagccaggcatggtggcatgtacctgtggtcccagcctcccgagtagctgggaccacaggtacatgctactcgggaggctgaggtgggaggatcgctagatcctagagctttgaggctgcagtgagctgtgattgtgccactgcactccagcctgggtgatgacagagcaagaccccgtctcaaggaacaaaaacgttgccaaagactctgttaaaaggctgaaaagacaaactacgtgctgggaaaaaaatatttgcaaaccatgtatctcacaacagactcatatctaaagtatacaagaaacactcaaaactcaactggaaaaacaaacaagcaatccaactagaaaacaagcaacagacacaaggaaatatttcaccaaagaggatgtacagatggcaaataagcacatgaaaaatttcaacatcattagcaattagggaaatggaaattacgagcatggtgagatatcactacacattgttagacaactctttttaaaaagtgacaataccaaatgctgcaaaggatagagagaaactgctgatgggattgtaagatagtacaaccactacaggatcaaggagttctacgggttcttgagaacctaaagatatgcttaccatatgacccagcaaatgtacatggggcatttatcccagagaaatgaaaacctacgtccacacaaaaaatctgggaccatgaatgttctaggcgatctatcgtattctcccaaagtggaactagccactcttttcaacatcgactggttcgcgggatttaatcctacccggaaaacgcctcgcta

SEQ ID NO: 659406 - DNA, 408 bp, Homo sapiens
tgatcagctcggccccggttacgctagagggcagagtatctgggggcatgtgacctagagaaacagcagctagggcagctatggagtgcttgcccacccctcctccaaccctagacagtgcagctcgcagctctgacagagacctctttcttccgcttgaggagaggagagaggagaggactttgtcttgcatcttggatactagcttacagtaggagggggcactggtcagagtcatgagacccccctttcaggtctcagctttgggataacatctctagacaaactctgggctacaagggaacctgctcccttgaagggaaggactcagtaatggcaggattcttcactatctgactaaagagcccttgggccttgaataatcagcagtggtaaccaggtagtaca

SEQ ID NO: 659407 - DNA, 134 bp, Homo sapiens
tcacggacttcctggaccccgtgggttcctggagataaaggcaaggatggattacctgggacaacaacggccttcccggatctaagggaatcaccctgccctgtattattacctgggacttgggctatcaaggt

SEQ ID NO: 659408 - DNA, 458 bp, Homo sapiens
  misc_feature (10)..(11): n is a, c, g, or t
  misc_feature (49)..(49): n is a, c, g, or t
  misc_feature (57)..(57): n is a, c, g, or t
  misc_feature (60)..(60): n is a, c, g, or t
  misc_feature (62)..(62): n is a, c, g, or t
  misc_feature (225)..(225): n is a, c, g, or t
tgagctctgnngagggtggaaggaggttggttgatattgttgttcttcntgtgaagngtncnaactccttcagctacttcagtctcctgtcagcaagtacttcttagcatcagcaatagtgtctgtgtttggtgtctgcagatgtgatgaatctctagatagggtagtctctgggtggcctttccttcagtctctgctccactctttgtccctgcatttcctttngacaggagcaattctgggttaatatttttgaagatgaagtaagtaagccccatccctcaaccaggggccatgcctaacctctgtttatgctctctgcaagttctatctcccctttgttgaatattgcagctaatgtcatctccattggggtcctgggaagcctcttgctttcctggcatctggggaccttctaagaggctaatccacaagtttgccaactccaactggctcca

SEQ ID NO: 659409 - DNA, 316 bp, Homo sapiens
attaagcacagagatgggctgtaaccagggatgaaggatgtccagctcaagctagagcacgcagaaggggagagggacggggtggatttgagagacattgtggagatacacttaacagtttggatgtaaggccaggcacggtggctcatgcctgtaattccagcactttgggaggccgaggagggtggatcacttgaggccaggagttcgagactagcctgaccaacatggtgaaaccccttctccatcaaaaataccaaattagccggacgtggtggcgcacgcctgcaatcccagccactcgggaggctgaggc

SEQ ID NO: 659410 - DNA, 352 bp, Homo sapiens
ccacaaagaagggcttcaaaaataagccgcattggaacacacctcacctcactaagctgggtgtgctgtcagtgacatggagtgatggaatccttccttcaaatgccagctgccaatgccttaagccctcctgtcctcctgtagtcctactcttcacttccattcccatcatgtgggggtcttggtccaaggctcagcttctctccactgtccatccctcctatcatctgtagagcagagccagcagttgtgtgccttgggcccagggaaccctccatcaactgagacaggactcagtatatggttcttgggtatgccctccaggtggaataaaggaccagatttgatttct

SEQ ID NO: 659411 - DNA, 664 bp, Homo sapiens
tctctccacactggttataaataaccagaactatatgaggagcccaggtaaaaaatctaataatctgatcaaaaaatgggtcaaagacttgtatagacatttcttaaaagaaaatatacaaatggcaggcagggatatgaaaaggtgtttaacatcactgatcatcagagatatacaaatccacactacaatgagatatcatctcaccccagttaaaatggcttttatccaaaaatcaggcaatagcaaatactggtgaagatgtggagaaaagggaactctcctaacactcttggtgagaatgtaagttagtataaccactatggagaacagtttgggggttcttcaaaaaactgaaagtagagctaccatgtgatccagcaatcccactgttggatatatacccaaaagaaaggaaattagaacattgaagagatatctgtactcccctgtttgtggcagaactttttacaatagccaagatttggaagcaacctaagtgtccatcaacagataaatggataaagaaaacctggtacttatacacaatggagtactatgcagccataaaaagaatgaggttttgtcatttgcaacaacatatatggaactagaggtcattatgttaagtgaaataagcagtgtggagagagggtaccgagct

SEQ ID NO: 659412 - DNA, 226 bp, Homo sapiens
cttcggtacccattggtccgagagaaattagatgcattacctagtatattacaacagagccattaattcttgctagcttcatcaacattaactggtttgctattcatgacgctgctgaggaatcagttctttctgcagagcgttcatgtgaattgctttttgcgaaatgtgcaagttccttttgtacatttactaaagctttatttactctgttaatttttacctc

SEQ ID NO: 659413 - DNA, 327 bp, Homo sapiens
gggggggggacatgttgaatattattaacccattttacagaggggaagcaagggttaaaaaaagtttaaaagggacccaaggtcaggggcaaaaatgggaggcaaaggggaggcacccattttaaaccccacccctagggactaaagccgtagccaacaaagcagtagtaatccgggttgttttaaggctggacgggactaatggggaggacacaggcattgggggcctaatccttggttgccgaaaattgatcggggatgtcaacaggccgggggggaacctcctccgagcggtagtagaggaaatattgaggggcactgtctgcc

SEQ ID NO: 659414 - DNA, 885 bp, Homo sapiens
gttcgtattgctatgttcttctgttatttatttcagcatggactgttcatttgaaacctttttctagttattagcgttttaacagttacaagctttaaatggcaattttttctttttcttttttttttttttttttgtcaaaacccaaaacacaggtaatgcacaacattgatggctgcatttaaccttcaaaatattggtccttattgactgggtctccttaattattgtccacttgtcattagaatgcagacggaggggactcaccatgaatatctggggttgatccccagatgtgtgttgctttctctattgcaagcagattccctgtggaattacttcggatttatccccttttaaagaatttttgcccatatctggaagggccctatattttggggaggagccatagatcccgggttatccctatttttaaaacaaatgtgtagacacagtgaactctattcggattatcgagaaaggagtagtttcactatccctctaagagtatactcgaatcagacattcaaggatgtactaatggcactgttgtcatttccaatttcctaaaaaagttggtttacgtttgctaaatcgtgtaaatgcatcattaacttcgtcttaacattcccttttttacccaggtaactcctttttcgtcacctctggttaattggaagaggtttttggccccgtaatattatatttcccccttacaataaataactgtcctccatattctttataataacgccactctgtaaaagccaaaaaacagaaaaaaatatatatgagcagatagtaaacaaaaaaggcgggcgctataaatcacaaggggcagatataggctaccgttgttaaaagcccagtatgactatatacagg

SEQ ID NO: 659415 - DNA, 284 bp, Homo sapiens
aaaaataacctggccagtggctaccttggagatagcaggaagcaggaagcagggagcagggagtagggggagttgccagctgggtaggatccagattgtagacagtgggtcttccagcaaactgcacaggagcccttattctccagtaatggggccattatcagccactgggtggcccaaaacaaacagaggcttatggaagataaaatccctcagacatcaccgcagacgcatgggggtgacatgcaggagtcaaggcggccgagtagcacaggcgtcgacgc

SEQ ID NO: 659416 - DNA, 608 bp, Homo sapiens
agatagagaccctaggaaggcgatgctgggatctatgggttctcaacagagggccttacggggccactgaacaccaaccacgaatgggaggctcaacacaactgaaacgcacgtcctcacagtcctggaggcccgaactcaaaaccaaggcgccagcagggccacgctccctccacggagcctcggggagcagaaggtcttgagacgagacttgctcccgcaaccctttcccagctgcagctgcctctccgccatctctgcctccatggccacgcggcatcttctccctggcatgggctgaaccaccgcatctcgggcaggtctgacggcgtttctatcagcacagcccacaatgatggtcttctccctcgcttcctgattttgtttgacatccaacctcctctcagatgctgtaaactataagctgtaccattgttttatgcactaacagggaagaaaaaaatgctggcaactaaaccgtgaggtcccttcaagagtaaaatggaacctaagaggaagacggaacctaacagagatgtcgggaggagaagcagcatgcatcttagaattgataagcacgatacatgacgacaggtgttttggttaaa

SEQ ID NO: 659417 - DNA, 477 bp, Homo sapiens
agatagagaccctaggaaggcgatgctgggatctatgggttctcaacagagggccttacggggccactgaacaccaaccacgaatgggaggctcaacacaactgaaacgcacgtcctcacagtcctggaggcccgaactcaaaaccaaggcgccagcagggccacgctccctccacggagcctcggggagcagaaggtcttgagacgagacttgctcccgcaaccctttcccagctgcagctgcctctccgccatctctgcctccatggccacgcggcatcttctccctggcatgggctgaaccaccgcatctcgggcagggaagaaaaaaatgctggcaactaaaccgtgaggtcccttcaagagtaaaatggaacctaagaggaagacggaacctaacagagatgtcgggaggagaagcagcatgcatcttagaattgataagcacgatacatgacgacaggtgttttggttaaa

SEQ ID NO: 659418 - DNA, 155 bp, Homo sapiens
aacgccactcggtgcatttccccaggcgctggcaggggcactgattcctagcagatgaggcctcccttccccttcccaggccgcccctcctctgacgggcggccagagcagggccgagttttgcgggggagcctgggtgcgcgccgggcggccgc

SEQ ID NO: 659419 - DNA, 122 bp, Homo sapiens
cgtcttgctaacagaagaactgatgcaatcctaggaaggcttgggcctacaccggcccaaccgcaggggggagggaggctacgcgcccggccttccccagcattgtgctcgtgctgccgcac

SEQ ID NO: 659420 - DNA, 798 bp, Homo sapiens
gaggatcgcttgagcccaggagttgggaccagctcgggcaacatggggaaaccttgtctctacaaaaatcagggaaactggctgggcagggtggtgcgtgcctgttttctcagttacttgggaggctgaggcaggaggatcatttgcacgcaggaggttgaggctgcaatgagccatgattgcaccactgcactccagcctgggttacagagagagatcctctcttgaaaaagatgaacaaaaaaacccaaaaatgcttgccaaaaaaacacgaaaagaaattagtatatattcttttagacttatggtctacatatacatatatgtagacatgtatattttacttatatttctcttaaatggagccttgcactgtcacccaggctgaagtgcagtgggcacaatttcagactcactgcaagctctgctccccgggttcaagcagattcctcctgcctcaagacatacactagtttgattgggatttgacagggtcacgcaccattgccgaggttactaggagataacgagatacaagaggatatttaggagagaaggagaatgagaggtatagcgagattggagggaccaggggtgggatataattaaaaagcacgtaccgacgtagtagaggggctatgcagcgatattaagcaggtccaaaagtgagtgatgtggaaatacatgaggaggtgttaaacacaagcggtgtgagggggaccgaaaaagtgtattgattgtgtaaataagaaatattgttgtgggtgagcgtagttaaatgatgagcacaacaaatga

SEQ ID NO: 659421 - DNA, 408 bp, Homo sapiens
ctctagacgatcgcgttatgaggaggagctgacccagctggaggctttggttgggcgggaccgagccagctacgaggccgggagcgcacgtggcggaacggctgctcatgcacctggaggagatgcaacataccatctctaccgacgaagaaaagagtgctgccgtggtcaacgcgattgggctgtacatgcgccaccttgtggtgcggaccaaagagtggagacaagaagtctggggaggaacttcttccggaaaacggtgatggggaaccggctggtcggacgagcctgccaagaccaaagaaggggctgagaaggatcctggattgcggccgctggaaccggggagagccccaggttccagattttcgagacctcaaagcagaggttgatgccgagaagccaggt

SEQ ID NO: 659422 - DNA, 572 bp, Homo sapiens
  misc_feature (125)..(125): n is a, c, g, or t
accatcaaaaatcacctgcactgaaaatcggaagaaaaaaatagaggatgagaagaatataaaacaaccataaaacaaataacaagatgacaggattatctccctacttattaagaagaacattnaatgtatatgaactaaactataaaatccaaagacatatactgcgcttaaaggatcaaaaaacaagatccattgacctaatgcttacaagaaatacacttcacttataaaggcacacatacacagaaaataaaactgtggaaaaaagacattccatgccaataaaaaaccaaaaagaccaggagtcactatacttacaacagacaaaatacatttcaacccaaaaatataaaagacaaacaaaggcactaaattatcttaaatgggtcaattcaccaagaagatacaacaattttaaatatatatatgcatccaacaagggagcatccagatatataaaggaaatatcattagacataaagagacacataggccccaatacaatatttattggagacttcaacaccccactttcaccattggacatattttccaaacaaaagatcaac

SEQ ID NO: 659423 - DNA, 1251 bp, Homo sapiens
cggggtgttttttcccaccacgcggcgatctgtgtgttttatagactccctgctctcccacgggttttttggggggggagagtacgtccgcatcgtttagtgagtagagggtgttggttttcctacagcgaggatgtttgtggccgcggggtgctaccgagagtgatatatcccctcggcgggatatctccctgtgggtgtccccctccggggggtttatacttcttacgcgcccccctctgaagtgttgtgaaacagggggaccacattatgttggtgagaaagtactctgggcgccctctcttgttgataggggggagaaataaaaaaggggggcccaccatacgtgggaaatttgtggaagggaggggcccccctcgggggggaaataaaaaagggctatactgtttggtcgccacagccccacacacacgggttttgttctaaaaggtgtcacaacagatgtgaagtggcgcgccttttgccccacaagagaggagagaattttttgtggagcaccacgtggtgacgccccaaatatcactggagaggtgtgttaatatctctttataagaggaacgcggggtgagtaccatagagagaggcacaaccacagaaaactctgttctatgatgggcgttatatacacaccaccgggagggtggtgtatcccacagagagacactctggagagtagagacgccccacactaaacacatatttccgcttgtggttctgagcaagggcaacggggacacacactgtgggggtgggaattgtcctattgggggcgtgggtaaagggccccgcgggcccccctttgtggggagatatcacaaaaggtttttcggagaaatggagaagagagataactggggagagatatcgggtgttctcaccggaataaaacacgaggggtccaaaaaccgctcccacgctgtgaaaatcttttcacgagaagaagacctcatttaacaggaaaatcaagggtgggaggggagagctctttccataagggtaagacgatttccctacacagtgctctgataatatagtgaggtattttaagcacccagagtttttgctggtttcgtgagtgttgttaaacacagaggcgaatcataagtgagggttggtagacttccccctaggaaactggaaagaggtttttttgaaaaaaatatttgcccttttgaaaaggggccccccagtcgctttctccgaaataaaaaaaacaaaattgggggggta

SEQ ID NO: 659424 - DNA, 608 bp, Homo sapiens
aggagttacgatcatgtatcggacattgaggtgacaacacatctcacaagcttatagatgcacgacaagctggcatatctatgaggtcgatgtgtgaacaaatctggatccgtctgactgtaaggacttgtacattactaaacgttcaggctcctaacgcacacggtctaattcgaaggccaatattagccacctgctgtagcagggatatacagtggaggtgttagcacttagaaagacaggacaatttccgaacaggatcatctgtgattatggaaagggcgttaactgccacggatatgtggcgagcaatttaagtgagaaggcgcactgttgctgtgcaagactttgaggtgacaggcttgcatactagagaggaggtagcctcaatgctcaagacactgtctgacacacactcggatgtggatccacttagaagatcatatgagaggggcattacatgtgactcacatagtgtcccggagtattactagagtcttcatctagagaacagagttgtcactatgcgtgcagagtcactaagcgcatgtgttagggcatttgggttctatcacacagcgccatggtggcttaacgggcccgtgggg

SEQ ID NO: 659425 - DNA, 159 bp, Homo sapiens
actttggacacagtggcagcatggagaggtggggcctttaagaggtgattggatcatgaaggctctattcccactaatgaatggattcatcatgggagaactggcggctttataagagaggaagagagacctgcgctagacccttagcacggtcagtcc

SEQ ID NO: 659426 - DNA, 261 bp, Homo sapiens
tgcccaggccattatttctttgaatatcttgctacttctttctctaaacctctcccttggaacttccaggatggttatgatgcacttaatgtcgtcctatatttctctgaggcttgcgtcatttttatttgtttggtcttgctctgctcttgggattgcataatctccatcaatagtctatcttcagattcactgttgatattatctgctagttcagatctactgttgggctcctctagtaattctcctcacttcgggaaa

SEQ ID NO: 659427 - DNA, 110 bp, Homo sapiens
atcaagctttgatagagtctactcaaaacatcttctactaattacaaaagatgtttgagtagactctatcacagcttccttcctttgtatgaagaattgaagactgacca

SEQ ID NO: 659428 - DNA, 123 bp, Homo sapiens
ggcaatgcaaccacatatgcccaagcataatttgtgtatttttagtagagacggggttttgccatgttggcctaggtgggttttgaacctacctgaacctcaaggtgatcctgcccgccttgg

SEQ ID NO: 659429 - DNA, 1397 bp, Homo sapiens
  misc_feature (1)..(1): n is a, c, g, or t
ntatacgttcggtcttctagctctacgtcgttgtggtcgtcccctcacctcctctcgggctgaatttgctttgttctgttcctggtgcttctgcttctcaggttttttgtctggtgtttgctcgttgctctcctctctccctgccggtgtctttttctttcccccctccgttgtggtgtcccgtttgctgcgagtgctccttttatactagccccgactgtgtggttgaatcgttctcgttcttcgtctacagaggtgccaggtttgtgtgttgagtttttgacagacgacctatgcggtggggggctgatctcttatagctgatgctatgctggttactaaaatgtgtttaccccggccctctttgttccccaatgaccctcgggttttaacctctgttaccccccacgtgggtttacccacaccgggagccctctgtttaacgtgcgcgcgacacaacgatctccgctgtgtgatataataatttggggcccctttttacaaaaaggggtgtaagaaaacacagaagtgtgttaaacccgcacactggttactctccccggtctccccctttctaaatatatactaataaggtttaccccttggcgccactctttttaggaataccccccatttgcgccactattattaaatagaccctaatggttgaagaagaatttggtagtgatcccccacacttgttgtgtaagatgtagaagaggtggcacccagtcaccccagtggttgggggaattcttgccactctaagagtgtgtgtaatttagaagcccccccttggttttcttttctgacctcgcaccttgttctccactagtaggtaaaatgtctattgcgccactttatatacccctgccactaagtgcctccacttttaaccaccactcgttaacccccttctatgctgtatataatgccacacccctcaaactgtggggattttaatttaataagggccttctagagaaaaaccgcagcgttattttcaccaccccgccactcacttcttaagctcaaccctttctgagaactagttatgtgcacgcctctttcacattgtgttgtgttggttggtctcacaaaactaggttgaagtttttctccctcctcgctcgaggaaaccacgctatccgcgagtttcttttttcttgtggcacatttgtaattataaaaccttggtttgggggaaggagccccaaactcccgccccctgaacctctgcccattaagatggtgttgggttaggttacactctggttactgtcctgggaaaatcactttttatagagatggccttcccagtggtttttaaatttactgaaatttttaggtccattatgtatgttgactaaatttaccaataaacttgtttatcccca

SEQ ID NO: 659430 - DNA, 2476 bp, Homo sapiens
  misc_feature (338)..(338): n is a, c, g, or t
gttactgtcccgcgaacccacatccctacaaagcaggaaagtatgcttgggagaggccaagtgagtggggaatcagcccaaagccaggcgtccagggtctccctcacctgaagctgactttttccccaccttggacagagggcgggagatgccatccccactgaacccagtgctttcaccagccatattagctcccactcaccccccgtcgtggaagcctcggccgtcacacctgcagggccggggcgtgcatggcctcagggatggcctgttcagctgctgggtgactcgggtccaggtgcctcaccacctgctgagctctgtgtgatttctggacncttctgctcgttgcctttgggctcagtgaagagtctggagtttatctggagtgaggtggccggttcttggtgggatctgagcaggtccattcaggagcaggaaagttcatctcagaccctaaatccagccacgtcatgccacgcttaacacctctaacaacttcccctggcacttaggacagcgtctggctccttccctcggctcatggccctcagaatctgcgtcacatacaccccagctctcccgataggtctctgcactcgctgttgcctctgcctggaacagtctccctcctggtgtcattgtctccgtggtgtgtccttcctgaccttccacctccaccaggtgccgacacttccctgaccccagtaacctcttctcttgggtgggtgaatgccacctgctgatgtctgatttattcatcggttttcttgtctgtagtctgtcccccttggggacagggactcgttgctcatgttcacccggcaggctggacacttcgtggagggctccaaagctggcagatcccggggccgcctctgtctctcccaggccctgcgtgttgcggtgagaggagcatttgtgtctctgtggtttgctgctggagctggtgaccgggagagaaacaagggagacaagggtgcccagacaggtgcggggctcagccaggaggcagaagacgtggacgtgtcccgggccaggagggtcacagatgcaccacaaggcactctgtgtggcactgggaacaggaattctgggagtcagtctgcaagggcggtgggcgttgctcacctgggagaagcctttagagtgggcgttgagcaggccattagctcgtgccctgaggaggtgcatgggcggcatgggctctccatggaaattatgtgggcgcgaatggatgtggctctgcgctcacctgggcgaggacttctggccggtgccggggcactctgcatgaccctggcagaatcgagctgccctgactatgaaaggggaagaagagcatgcctgaccctccaccggcaccccacccctcactgctccacctggggcctgcctctgcgggtggctgggtcctggctgactgttgtgactgttgaggccctgggggggtggcgcatgggagttaggaggactggccaggtggggcccactatgcacccacccccagtgtcaggtgcttctcctctcctcctccaccacctcctcctcctcctcctcatcatcatcctcacttgttgaggacgtcctgtgtgccaagtggtttatatgcccagcctcatttaatcctcagaatgactccatgaggtagctactaaaaccccccacttaacagatgaggaaactgaggcctagagaagctcaacaagttgcctaagttccaagtttcctctcccaactctcctaccctctcctcttccttctcctttctcccattcttccctgcctcttccctaactagacaattttttattgagtgtctcccaggtgcaggcatgagccaggtgctgggaaaatcatgataacccagctccttctggtcattttctcagctggttagaggctgggaggacacgcaagttcagctccagccgactggggcattggtggtagcccctggagacattgtgcaatggggctacgaggctgcatctggctccagggaagcgtgttgcaatccatgagtgatgtctgccatgcgtacaggcatggagagtgaggcgcctgtactgtctttctgtagaccctagactggtggggcctctgaaatgcatccagacactgtgctgggtgtgttgcatggccctcccaaccaattcagtatttttctccccattttccagggagaaatctaaggcgtcagaatgtaaggttcttattggaacccaggctccagggtccctggttttctgtgacatcatgctgcaggaccctgtttctctctttgctttggctgctggggagctcagaagggagctttaggcttgctctcagtcaccacattagctcaggggtttgggcatttttgtcgccgtctcctttgggctctgtctcctccctgctgtgcttcctgaggagcaggccggatgtaagttatcaactataaataaaaccaagacttccgttctggctctca

SEQ ID NO: 659431 - DNA, 106 bp, Homo sapiens
actgcttttcccagaaagctgatactgcttctggagaaggggaaatactgactacctcttgcttggcatgaaataaactgctatcctccccttttccagcatcctt

SEQ ID NO: 659432 - DNA, 231 bp, Homo sapiens
gccttatgagcagggcgcagtgattataggctttcgctctaatgattaaagaatgccctagcccacttcttaccacaaggacacagccatacagcgcccttatccccagtactgacgttattatcgagaaccatcatgcctactacagttcaagccatataggccctgtgcacagtacggcctaagcacgttaacagttactggcagtgccatccatactgcatgctagcg

SEQ ID NO: 659433 - DNA, 594 bp, Homo sapiens
ttgtcctcgaagatgagatatactaatggtgaggcgccatcggacgacaggacagcggaggtggggaggaggaagaggcggcgggagagcgagatcatccccacctcgtcgtcttcgtattctttgtccaggaaaaaaatactccaggagctgaggacaatatcagcgtgtcggggcggcgacgacttcttctcgcccccatgctactcttttttcttctccctcgcattctgtatgctaccgaatgtaagtttcgcgggcgaggcacagagcgcccagcgcacacagagagtatgctctttatgtccctgtatatatataaagagagagagtagaaaaataatacgagggcacacagagagagagaaacactcacgacagagaatagagaaagagagatacacatcttgtgtgacaaagcccccaaagaggagcgaggacagagaaccagaaggcgccgcgctccgcggtctatggagaagaaggtgcgcacccctctgtttttgatggaagaaagtgaactggcgcccccctcgcaaaaggtggtggtgagatccccactgggaagacagccccgcaataaacaagcaaaca

SEQ ID NO: 659434 - DNA, 2288 bp, Homo sapiens
  misc_feature (338)..(338): n is a, c, g, or t
gttactgtcccgcgaacccacatccctacaaagcaggaaagtatgcttgggagaggccaagtgagtggggaatcagcccaaagccaggcgtccagggtctccctcacctgaagctgactttttccccaccttggacagagggcgggagatgccatccccactgaacccagtgctttcaccagccatattagctcccactcaccccccgtcgtggaagcctcggccgtcacacctgcagggccggggcgtgcatggcctcagggatggcctgttcagctgctgggtgactcgggtccaggtgcctcaccacctgctgagctctgtgtgatttctggacncttctgctcgttgcctttgggctcagtgaagagtctggagtttatctggagtgaggtggccggttcttggtgggatctgagcaggtacagcgtctggctccttccctcggctcatggccctcagaatctgcgtcacatacaccccagctctcccgataggtctctgcactcgctgttgcctctgcctggaacagtctccctcctggtgtcattgtctccgtggtgtgtccttcctgaccttccacctccaccagtctgtcccccttggggacagggactcgttgctcatgttcacccggcaggctggacacttcgtggagggctccaaagctggcagatcccggggccgcctctgtctctcccaggccctgcgtgttgcggtgagaggagcatttgtgtctctgtggtttgctgctggagctggtgaccgggagagaaacaagggagacaagggtgcccagacaggtgcggggctcagccaggaggcagaagacgtggacgtgtcccgggccaggagggtcacagatgcaccacaaggcactctgtgtggcactgggaacaggaattctgggagtcagtctgcaagggcggtgggcgttgctcacctgggagaagcctttagagtgggcgttgagcaggccattagctcgtgccctgaggaggtgcatgggcggcatgggctctccatggaaattatgtgggcgcgaatggatgtggctctgcgctcacctgggcgaggacttctggccggtgccggggcactctgcatgaccctggcagaatcgagctgccctgactatgaaaggggaagaagagcatgcctgaccctccaccggcaccccacccctcactgctccacctggggcctgcctctgcgggtggctgggtcctggctgactgttgtgactgttgaggccctgggggggtggcgcatgggagttaggaggactggccaggtggggcccactatgcacccacccccagtgtcaggtgcttctcctctcctcctccaccacctcctcctcctcctcctcatcatcatcctcacttgttgaggacgtcctgtgtgccaagtggtttatatgcccagcctcatttaatcctcagaatgactccatgaggtagctactaaaaccccccacttaacagatgaggaaactgaggcctagagaagctcaacaagttgcctaagttccaagtttcctctcccaactctcctaccctctcctcttccttctcctttctcccattcttccctgcctcttccctaactagacaattttttattgagtgtctcccaggtgcaggcatgagccaggtgctgggaaaatcatgataacccagctccttctggtcattttctcagctggttagaggctgggaggacacgcaagttcagctccagccgactggggcattggtggtagcccctggagacattgtgcaatggggctacgaggctgcatctggctccagggaagcgtgttgcaatccatgagtgatgtctgccatgcgtacaggcatggagagtgaggcgcctgtactgtctttctgtagaccctagactggtggggcctctgaaatgcatccagacactgtgctgggtgtgttgcatggccctcccaaccaattcagtatttttctccccattttccagggagaaatctaaggcgtcagaatgtaaggttcttattggaacccaggctccagggtccctggttttctgtgacatcatgctgcaggaccctgtttctctctttgctttggctgctggggagctcagaagggagctttaggcttgctctcagtcaccacattagctcaggggtttgggcatttttgtcgccgtctcctttgggctctgtctcctccctgctgtgcttcctgaggagcaggccggatgtaagttatcaactataaataaaaccaagacttccgttctggctctca

SEQ ID NO: 659435 - DNA, 191 bp, Homo sapiens
caaactagttcagcctctacggccggcggggcggcgcgctgttgtgactctagataactcggcgatcgacgcccctgtgtgcgacgaccattcgaagtttgctatcaattcgatggtagtcgcgtgctaccatgtgacacggtgacgggaatcagggtcgatcgggagaggagctgagaaaaggtaccaca

SEQ ID NO: 659436 - DNA, 130 bp, Homo sapiens
  misc_feature (49)..(49): n is a, c, g, or t
  misc_feature (66)..(66): n is a, c, g, or t
  misc_feature (111)..(111): n is a, c, g, or t
  misc_feature (123)..(123): n is a, c, g, or t
gaggctgcaactcccggaacaacagccacaacatcaggagcaggagcgncagtctgacggcggcanagcctcccccaccccgatccccacagtcaccgccccgtccctggntgcggcggaggnggcggcg

SEQ ID NO: 659437 - DNA, 145 bp, Homo sapiens
gcgatatgctttggtcgataggactcgcaatcagtaaggagacggccatgccttacaagtgcatgcgatcactgatttcatcctctagtttcacgcagcagtgcccaccagaagtatgtccgacaagcctggcacgaaggcagac

SEQ ID NO: 659438 - DNA, 2309 bp, Homo sapiens
  misc_feature (338)..(338): n is a, c, g, or t
gttactgtcccgcgaacccacatccctacaaagcaggaaagtatgcttgggagaggccaagtgagtggggaatcagcccaaagccaggcgtccagggtctccctcacctgaagctgactttttccccaccttggacagagggcgggagatgccatccccactgaacccagtgctttcaccagccatattagctcccactcaccccccgtcgtggaagcctcggccgtcacacctgcagggccggggcgtgcatggcctcagggatggcctgttcagctgctgggtgactcgggtccaggtgcctcaccacctgctgagctctgtgtgatttctggacncttctgctcgttgcctttgggctcagtgaagagtctggagtttatctggagtgaggtggccggttcttggtgggatctgagcaggtctctgcactcgctgttgcctctgcctggaacagtctccctcctggtgtcattgtctccgtggtgtgtccttcctgaccttccacctccaccaggtgccgacacttccctgaccccagtaacctcttctcttgggtgggtgaatgccacctgctgatgtctgatttattcatcggttttcttgtctgtagtctgtcccccttggggacagggactcgttgctcatgttcacccggcaggctggacacttcgtggagggctccaaagctggcagatcccggggccgcctctgtctctcccaggccctgcgtgttgcggtgagaggagcatttgtgtctctgtggtttgctgctggagctggtgaccgggagagaaacaagggagacaagggtgcccagacaggtgcggggctcagccaggaggcagaagacgtggacgtgtcccgggccaggagggtcacagatgcaccacaaggcactctgtgtggcactgggaacaggaattctgggagtcagtctgcaagggcggtgggcgttgctcacctgggagaagcctttagagtgggcgttgagcaggccattagctcgtgccctgaggaggtgcatgggcggcatgggctctccatggaaattatgtgggcgcgaatggatgtggctctgcgctcacctgggcgaggacttctggccggtgccggggcactctgcatgaccctggcagaatcgagctgccctgactatgaaaggggaagaagagcatgcctgaccctccaccggcaccccacccctcactgctccacctggggcctgcctctgcgggtggctgggtcctggctgactgttgtgactgttgaggccctgggggggtggcgcatgggagttaggaggactggccaggtggggcccactatgcacccacccccagtgtcaggtgcttctcctctcctcctccaccacctcctcctcctcctcctcatcatcatcctcacttgttgaggacgtcctgtgtgccaagtggtttatatgcccagcctcatttaatcctcagaatgactccatgaggtagctactaaaaccccccacttaacagatgaggaaactgaggcctagagaagctcaacaagttgcctaagttccaagtttcctctcccaactctcctaccctctcctcttccttctcctttctcccattcttccctgcctcttccctaactagacaattttttattgagtgtctcccaggtgcaggcatgagccaggtgctgggaaaatcatgataacccagctccttctggtcattttctcagctggttagaggctgggaggacacgcaagttcagctccagccgactggggcattggtggtagcccctggagacattgtgcaatggggctacgaggctgcatctggctccagggaagcgtgttgcaatccatgagtgatgtctgccatgcgtacaggcatggagagtgaggcgcctgtactgtctttctgtagaccctagactggtggggcctctgaaatgcatccagacactgtgctgggtgtgttgcatggccctcccaaccaattcagtatttttctccccattttccagggagaaatctaaggcgtcagaatgtaaggttcttattggaacccaggctccagggtccctggttttctgtgacatcatgctgcaggaccctgtttctctctttgctttggctgctggggagctcagaagggagctttaggcttgctctcagtcaccacattagctcaggggtttgggcatttttgtcgccgtctcctttgggctctgtctcctccctgctgtgcttcctgaggagcaggccggatgtaagttatcaactataaataaaaccaagacttccgttctggctctca

SEQ ID NO: 659439 - DNA, 207 bp, Homo sapiens
cggcacgaggcctgttgcgaagatgctgctgggagctcagaagggagctttaggcttgctctcagtcaccacattagctcaggggtttgggcatttttgtcgccgtctcctttgggctctgtctcctccctgctgtgcttcctgaggagcaggccggatgtaagttatcaactataaataaaaccaagacttccgttctggctctca

SEQ ID NO: 659440 - DNA, 338 bp, Homo sapiens
  misc_feature (28)..(28): n is a, c, g, or t
  misc_feature (37)..(37): n is a, c, g, or t
  misc_feature (39)..(39): n is a, c, g, or t
  misc_feature (52)..(52): n is a, c, g, or t
  misc_feature (132)..(132): n is a, c, g, or t
  misc_feature (150)..(150): n is a, c, g, or t
  misc_feature (153)..(153): n is a, c, g, or t
  misc_feature (170)..(170): n is a, c, g, or t
  misc_feature (174)..(174): n is a, c, g, or t
  misc_feature (194)..(195): n is a, c, g, or t
  misc_feature (208)..(208): n is a, c, g, or t
  misc_feature (228)..(228): n is a, c, g, or t
  misc_feature (230)..(230): n is a, c, g, or t
  misc_feature (240)..(240): n is a, c, g, or t
  misc_feature (264)..(264): n is a, c, g, or t
  misc_feature (279)..(279): n is a, c, g, or t
  misc_feature (326)..(327): n is a, c, g, or t
  misc_feature (332)..(332): n is a, c, g, or t
  misc_feature (334)..(334): n is a, c, g, or t
attcacttccatggtgactagtgtttgntgtgcctgntnttatattctgtgntgcatttctccccactccctgccctgcttaataaacagcaaaccaatatctaggaagaatgactgggggataatattggngtattggccccatggcangancagccagcttggcatcngggncccggtgccacactgcggtnncttggtgtggttntcgcagcctcttccctgccngncttgctcccnttgacccacgctgtctggtggttnattctctgccctganccaccaccctggactggcccactctccagagctggcacaccctgccnnttgtntntttt

SEQ ID NO: 659441 - DNA, 926 bp, Homo sapiens
cgcctcctgcgaaggtagcttccaggtgtctacaggggagcccggggtcatgctggcatcattcattctccacgcatcagatgatcctgtggccctcagtgccaggccccactggccctctggcgcacatcagtgactctgatgttctcccccaccgcatgctgcagtctgatggtggagacagaacagcagtcccggatggtggaggcaatgcccagagctgtggcagccaccttgcagccgtgaagcaccagtgggaatgacagtcaagagaaccacggagatgccagcccctggacccacagcagcagcacctgcttccagactcagagtgtgagaaaaaaataaactcctatttgtttatggcaagagacaaggtctagctctgtgatgcaggccggaggacagtggtgtgatcacagctcactgcagccttgaactcctgggttccagcaatcctcccacctcagcctccttagtaggcgtggctacagtaatggcacgcacagccacacagaagctcggagatccctggtttaaagcatttaaagcctctgtgacacattgaccaggcaacaattcactttccaccactcagtgccacgaaagtgccagctctaagctggggcttcctgtgcacgagatgactccactgagtgcacacacaaccaccgtgcggacaccaccccctggcagactcattctgggaaaacacctccaggccagacatcggggccagtaacccttcgtacccctcgacatacggtgtggcccttgggccctcgagcccacagtcaatcaccacagagcgtctgctgctcactcagatatcctacaccacaaatggtgttgcacctcgttctggaacgtcgggacaacgttcacgcctcacgtcaccgccccgacttctgcaccacgcgcccacc

SEQ ID NO: 659442 - DNA, 483 bp, Homo sapiens
ggactatgagaatcgaacccatccctgaggaatccaaaattctccggtgccaccatcaaaaaaaaaaaaaaacaaaaaaaacaaaaaaaacactttttgtggggccgcgcctttgggccctgtggaagaagagttttttagagaccaccattcgctgtgtgtgggcgcgcgcgcgcgggcccacgtgtggtgttaggtgtgaacaccgtgtggccaatttgaggtgtgctttccattgagagaagaaccttcgcctggcggtctcaatcagaacaatgagcggccgtgggaatttctctctccaccattatttaaaaaagcgcgcccggggcgggcacacccacagaacggtgtgttcgtgataacaaaattctccacaatgtggagactctctcagagagagcgtctccactaacaggggggaatccccatatctcaaccacggagaggctcccacaaggcaaagtcttcgaaattctttaa

SEQ ID NO: 659443 - DNA, 437 bp, Homo sapiens
gggaggggactgtctgtctttggaaatttcctcatctgaccaagaaagcatctttccaaaagaaatgcaattgtcttaacacctcccctagaggtctcatcaaataaccaagaaagataaaccccagaaagagatgagactgggaatcatcaccacacccagacagacttcatctattcttctgagagcagctccaagagattgcctggaggactttatctgcttaataagacaagctttgttcctgtacagctccgcccctcaccttcctgtaatatctgcctcccacctccccagtccatacatctcctccctcctgtatgaaaaagggtatacaagcttctgtgccccattgggttattgggaaatcattctcctgtgattcccctgtgccatgcacactaaaataaaattttgtatgccttttctcctaaaaa

SEQ ID NO: 659444 - DNA, 610 bp, Homo sapiens
  misc_feature (70)..(70): n is a, c, g, or t
  misc_feature (167)..(167): n is a, c, g, or t
cgggtgatgttggcgggctcgtttgtgttctggttggcatccattgcttgctcctgggcgcccaacctgnaagtgatgatcatcattcgggtgatccagggtgctgccggcgcggtgctgatccctttgtcattccagctgatcatcaccgagctcccgcccagcanaatcgcaatgggcatggccttgttcgccttgtccaacagcgttgcccaggctgccgggccatccattggtggctggttgaccgatgcttactcgtggcgctggattttttacctgcaactggcaccgggcattctcttgttgctggcggtggcatggtccatcgatgccaagcccatgcagttgagcttgctcaaaagcggtgattggggcggcatcctggccatgatcgtcggcctggggggcttgcagatcgtgctggaggaaggtggtcgcaaggactggttcggctccgatttcattgtgtgggtgtcgttgatcgccggcgtcgccctggtgtacttcgtgctgtcgcagttgtacgggaggcgttcattcatcaacctgcgcctgctcaagagctacaacttcggagtggccagtgcggcgatgttcatgtcgacgc

SEQ ID NO: 659445 - DNA, 2082 bp, Homo sapiens
  misc_feature (41)..(41): n is a, c, g, or t
  misc_feature (43)..(43): n is a, c, g, or t
  misc_feature (52)..(53): n is a, c, g, or t
  misc_feature (55)..(55): n is a, c, g, or t
gaacgccgctagaggccatggggacccaggcacagagcggngncctctcatnntncccatggtcaagggggtcagtgccttcccggggtggattacggatggtagtatcttccttctcctcagagtccattcaggagcaggaaagttcatctcagaccctaaatccagccacgtcatgccacgcttaacacctctaacaacttcccctggcacttaggacagcgtctggctccttccctcggctcatggccctcagaatctgcgtcacatacaccccagctctcccgataggtctctgcactcgctgttgcctctgcctggaacagtctccctcctggtgtcattgtctccgtggtgtgtccttcctgaccttccacctccaccagtctgtcccccttggggacagggactcgttgctcatgttcacccggcaggctggacacttcgtggagggctccaaagctggcagatcccggggccgcctctgtctctcccaggccctgcgtgttgcggtgagaggagcatttgtgtctctgtggtttgctgctggagctggtgaccgggagagaaacaagggagacaagggtgcccagacaggtgcggggctcagccaggaggcagaagacgtggacgtgtcccgggccaggagggtcacagatgcaccacaaggcactctgtgtggcactgggaacaggaattctgggagtcagtctgcaagggcggtgggcgttgctcacctgggagaagcctttagagtgggcgttgagcaggccattagctcgtgccctgaggaggtgcatgggcggcatgggctctccatggaaattatgtgggcgcgaatggatgtggctctgcgctcacctgggcgaggacttctggccggtgccggggcactctgcatgaccctggcagaatcgagctgccctgactatgaaaggggaagaagagcatgcctgaccctccaccggcaccccacccctcactgctccacctggggcctgcctctgcgggtggctgggtcctggctgactgttgtgactgttgaggccctgggggggtggcgcatgggagttaggaggactggccaggtggggcccactatgcacccacccccagtgtcaggtgcttctcctctcctcctccaccacctcctcctcctcctcctcatcatcatcctcacttgttgaggacgtcctgtgtgccaagtggtttatatgcccagcctcatttaatcctcagaatgactccatgaggtagctactaaaaccccccacttaacagatgaggaaactgaggcctagagaagctcaacaagttgcctaagttccaagtttcctctcccaactctcctaccctctcctcttccttctcctttctcccattcttccctgcctcttccctaactagacaattttttattgagtgtctcccaggtgcaggcatgagccaggtgctgggaaaatcatgataacccagctccttctggtcattttctcagctggttagaggctgggaggacacgcaagttcagctccagccgactggggcattggtggtagcccctggagacattgtgcaatggggctacgaggctgcatctggctccagggaagcgtgttgcaatccatgagtgatgtctgccatgcgtacaggcatggagagtgaggcgcctgtactgtctttctgtagaccctagactggtggggcctctgaaatgcatccagacactgtgctgggtgtgttgcatggccctcccaaccaattcagtatttttctccccattttccagggagaaatctaaggcgtcagaatgtaaggttcttattggaacccaggctccagggtccctggttttctgtgacatcatgctgcaggaccctgtttctctctttgctttggctgctggggagctcagaagggagctttaggcttgctctcagtcaccacattagctcaggggtttgggcatttttgtcgccgtctcctttgggctctgtctcctccctgctgtgcttcctgaggagcaggccggatgtaagttatcaactataaataaaaccaagacttccgttctggctctca

SEQ ID NO: 659446 - DNA, 189 bp, Homo sapiens
gctcgacagaaaagaaaagaaaagaaaagaaacgaaaacattagcctagcacagtggcacatgtctgtagtcccagacacttagaaggctgaggtgagaggattgcttgatccagggagtttgaggctgcagtgagccctgatcgtaccactgcactccaacctggggaacaaagcaagactgtgtctc

SEQ ID NO: 659447 - DNA, 2454 bp, Homo sapiens
  misc_feature (338)..(338): n is a, c, g, or t
gttactgtcccgcgaacccacatccctacaaagcaggaaagtatgcttgggagaggccaagtgagtggggaatcagcccaaagccaggcgtccagggtctccctcacctgaagctgactttttccccaccttggacagagggcgggagatgccatccccactgaacccagtgctttcaccagccatattagctcccactcaccccccgtcgtggaagcctcggccgtcacacctgcagggccggggcgtgcatggcctcagggatggcctgttcagctgctgggtgactcgggtccaggtgcctcaccacctgctgagctctgtgtgatttctggacncttctgctcgttgcctttgggctcagtgaagagtctggagtttatctggagtgaggtggccggttcttggtgggatctgagcaggtacagcgtctggctccttccctcggctcatggccctcagaatctgcgtcacatacaccccagctctcccgataggtctctgcactcgctgttgcctctgcctggaacagtctccctcctggtgtcattgtctccgtggtgtgtccttcctgaccttccacctccaccagtctgtcccccttggggacagggactcgttgctcatgttcacccggcaggctggacacttcgtggagggctccaaagctggcagatcccggggccgcctctgtctctcccaggccctgcgtgttgcggtgagaggagcatttgtgtctctgtggtttgctgctggagctggtgaccgggagagaaacaagggagacaagggtgcccagacaggtgcggggctcagccaggaggcagaagacgtggacgtgtcccgggccaggagggtcacagatgcaccacaaggcactctgtgtggcactgggaacaggaattctgggagtcagtctgcaagggcggtgggcgttgctcacctgggagaagcctttagagtgggcgttgagcaggccattagctcgtgccctgaggaggtgcatgggcggcatgggctctccatggaaattatgtgggcgcgaatggatgtggctctgcgctcacctgggcgaggacttctggccggtgccggggcactctgcatgaccctggcagaatcgagctgccctgactatgaaaggggaagaagagcatgcctgaccctccaccggcaccccacccctcactgctccacctggggcctgcctctgcgggtggctgggtcctggctgactgttgtgactgttgaggccctgggggggtggcgcatgggagttaggaggactggccaggtggggcccactatgcacccacccccagtgtcaggtgcttctcctctcctcctccaccacctcctcctcctcctcctcatcatcatcctcacttgttgaggacgtcctgtgtgccaagtggtttatatgcccagcctcatttaatcctcagaatgactccatgaggtagctactaaaaccccccacttaacagatgaggaaactgaggcctagagaagctcaacaagttgcctaagttccaagtttcctctcccaactctcctaccctctcctcttccttctcctttctcccattcttccctgcctcttccctaactagacaattttttattgagtgtctcccaggtgcaggcatgagccaggtgctgggaaaatcatgataacccagctccttctggtcattttctcagctggttagaggctgggaggacacgcaagttcagctccagccgactggggcattggtggtagcccctggagacattgtgcaatggggctacgaggctgcatctggctccagggaagcgtgttgcaatccatgagtgatgtctgccatgcgtacaggcatggagagtgaggcgcctgtactgtctttctgtagaccctagactggtggggcctctgaaatgcatccagacactgtgctgggtgtgttgcatggccctcccaaccaattcagtatttttctccccattttccagggagaaatctaaggcgtcagaatgtaaggttcttattggaacccaggctccagggtccctggttttctgtgacatcatgctgcaggaccctgtttctctctttgctttggctgctggggagctcagaagggagctttaggcttgctctcagtcaccacattagctcaggggtttgggcatttttgtcgccgtctcctttgggctctgtctcctccctgctgtgcttcctgaggagcaggccggatgtaagttatcaactataaataaaaccaagacttccgttctggctctcactctagtttcctggtgcattttttttttttaaagttcttaatcaagggaggggatactcctaactgaagatgacatcagcatcagctggccccggggggcaggcccccagcccccaggcccgtgtgggccctgaatgcccccattatgaggggtaacctcattaca

SEQ ID NO: 659448 - DNA, 2266 bp, Homo sapiens
  misc_feature (338)..(338): n is a, c, g, or t
gttactgtcccgcgaacccacatccctacaaagcaggaaagtatgcttgggagaggccaagtgagtggggaatcagcccaaagccaggcgtccagggtctccctcacctgaagctgactttttccccaccttggacagagggcgggagatgccatccccactgaacccagtgctttcaccagccatattagctcccactcaccccccgtcgtggaagcctcggccgtcacacctgcagggccggggcgtgcatggcctcagggatggcctgttcagctgctgggtgactcgggtccaggtgcctcaccacctgctgagctctgtgtgatttctggacncttctgctcgttgcctttgggctcagtgaagagtctggagtttatctggagtgaggtggccggttcttggtgggatctgagcaggtacagcgtctggctccttccctcggctcatggccctcagaatctgcgtcacatacaccccagctctcccgataggtctctgcactcgctgttgcctctgcctggaacagtctccctcctggtgtcattgtctccgtggtgtgtccttcctgaccttccacctccaccagtctgtcccccttggggacagggactcgttgctcatgttcacccggcaggctggacacttcgtggagggctccaaagctggcagatcccggggccgcctctgtctctcccaggccctgcgtgttgcggtgagaggagcatttgtgtctctgtggtttgctgctggagctggtgaccgggagagaaacaagggagacaagggtgcccagacaggtgcggggctcagccaggaggcagaagacgtggacgtgtcccgggccaggagggtcacagatgcaccacaaggcactctgtgtggcactgggaacaggaattctgggagtcagtctgcaagggcggtgggcgttgctcacctgggagaagcctttagagtgggcgttgagcaggccattagctcgtgccctgaggaggtgcatgggcggcatgggctctccatggaaattatgtgggcgcgaatggatgtggctctgcgctcacctgggcgaggacttctggccggtgccggggcactctgcatgaccctggcagaatcgagctgccctgactatgaaaggggaagaagagcatgcctgaccctccaccggcaccccacccctcactgctccacctggggcctgcctctgcgggtggctgggtcctggctgactgttgtgactgttgaggccctgggggggtggcgcatgggagttaggaggactggccaggtggggcccactatgcacccacccccagtgtcaggtgcttctcctctcctcctccaccacctcctcctcctcctcctcatcatcatcctcacttgttgaggacgtcctgtgtgccaagtggtttatatgcccagcctcatttaatcctcagaatgactccatgaggtagctactaaaaccccccacttaacagatgaggaaactgaggcctagagaagctcaacaagttgcctaagttccaagtttcctctcccaactctcctaccctctcctcttccttctcctttctcccattcttccctgcctcttccctaactagacaattttttattgagtgtctcccaggtgcaggcatgagccaggtgctgggaaaatcatgataacccagctccttctggtcattttctcagctggttagaggctgggaggacacgcaagttcagctccagccgactggggcattggtggtagcccctggagacattgtgcaatggggctacgaggctgcatctggctccagggaagcgtgttgcaatccatgagtgatgtctgccatgcgtacaggcatggagagtgaggcgcctgtactgtctttctgtagaccctagactggtggggcctctgaaatgcatccagacactgtgctgggtgtgttgcatggccctcccaaccaattcagtatttttctccccattttccagggagaaatctaaggcgtcagaatgtaaggttcttattggaacccaggctccagggtccctggttttctgtgacatcatgctgcaggaccctgtttctctctttgctttggctgctggggagctcagaagggagctttaggcttgctctcagtcaccacatttgtcgccgtctcctttgggctctgtctcctccctgctgtgcttcctgaggagcaggccggatgtaagttatcaactataaataaaaccaagacttccgttctggctctca

SEQ ID NO: 659449 - DNA, 781 bp, Homo sapiens
  misc_feature (338)..(338): n is a, c, g, or t
gttactgtcccgcgaacccacatccctacaaagcaggaaagtatgcttgggagaggccaagtgagtggggaatcagcccaaagccaggcgtccagggtctccctcacctgaagctgactttttccccaccttggacagagggcgggagatgccatccccactgaacccagtgctttcaccagccatattagctcccactcaccccccgtcgtggaagcctcggccgtcacacctgcagggccggggcgtgcatggcctcagggatggcctgttcagctgctgggtgactcgggtccaggtgcctcaccacctgctgagctctgtgtgatttctggacncttctgctcgttgcctttgggctcagtgaagagtctggagtttatctggagtgaggtggccggttcttggtgggatctgagcaggtggaggcaatgcccagagctgtggcagccaccttgcagccgtgaagcaccagtgggaatgacagtcaagagaaccacggagatgccagcccctggacccacagcagcagcacctgcttccagactcagagtgtgagaaaaaaataaactcctatttgtttatggcaagagacaaggtctagctctgtgatgcaggccggaggacagtggtgtgatcacagctcactgcagccttgaactcctgggaggatcacttgagcctgggaggcggaggttgcagtgagctgagattgtgacattgtactccagcctgggtgatagagtgagacccccactcaaaagagaaaaaaaacagtagt

SEQ ID NO: 659450 - DNA, 785 bp, Homo sapiens
cttgttttgaaagtcccctccattgaaacacgcacatctaatttgtccttcagttcggttggactccacgctgaacgtgccatgctccattgccccgtgagtaactccatgctcttgccggtttcacacggcctctcagagctggagcctttgttcaggagccctgggcagctttcaggaagctcttgggctcatcagcttcctctggctgaagccgccccagtggaatcatggggatttcttactttgaaggtggggccacccgcagactgtaaccggctggttcaagatcaaggacttccccaggccacctgcctcagaggcaagaaaggctcagctgagtcccagacactcctcgctgtggcccctccttcctccctgctgggcaggcccccctcaattctgtttgccagcagggcctagtaacactgaaagacgaaaagggaaataaaataaacacaattaataggctaaaggttactgaataaagtggcagcagtaaataaattgactactgtgcaaatacaaagacatgaagacatgaaacccctgctctaaatgaccactcaccaagagcaaggcctgggctggaggcagggagcacctccctaaggagcactccctctttcccggagtgagtcctccttctagatggaattcagtccgggttcctcttgagccacagtccctgttggggcctatctcagtggactcaagatcctgaacttcttccagattgctgactacacatttgagtcacccagagattaaaagaaaaaacaaat

SEQ ID NO: 659451 - DNA, 210 bp, Homo sapiens
agtgacgcacaccctgggttcaagttggatctggagtggacgcacgagtgtgttattttcattattcatacaatattttctatatatccggggcaacggagaatttggagtccgattggggggggtccttcagagaaccacagagcggtggaatcggcgcggaagtgccaggttcacacgtgcagcttgtggctcgtgttcatcttgcag

SEQ ID NO: 659452 - DNA, 767 bp, Homo sapiens
taaaaacaaaggttaatgtccgtgtaacggaaacatttccgagggaaagcagttcacagcaggcaccgagggcccacgtggaatgggtgtggatgctcaggctgggaggtggacgctcggggcggcccgctttgggggcaggtgcggccgggttcaccggccgtgcaggggtcattcccgagcaaagtggcgtgggagcgagacggggtgcagaaccaagacaagggggacccgtgggtgcaccgtgacaccaagctggccccacaaaaaaggcggtaacgcctcaggtccccaggcagggatgcccccaccccgaaggcctcgtgggggcgtccgttcatccgggaaagagcttccggaattggccgaaggcggagtggctgatgatgaccctaacgtcggccggccggtcctcggggatcaggtcaacctcctgaacgggggcctccttatacggccagctgagctgggcccctgggagcctcacacggagagtgaggatcgggttcccgcgagacctcaaaaccgccgaatcgagccgagctcagctccgggagcccgggacccgcagagcagaacgggacgacgtagcggaccgggggatgtacccgggccacgagggtcccacctttgttgtgaacctccaacagggagtccacgggagcggggagggcactggccggccacgcagggtgggcaaaacgctggatacgggagcccgatccgggggggctgcgtccacaggtgaaatgagaccggtggggcag

SEQ ID NO: 659453 - DNA, 876 bp, Homo sapiens
  misc_feature (876)..(876): n is a, c, g, or t
ggcgcttccgggcaggggcggggcttccggggcgcctcaggtcgcgggcgcctaggcctggttgtcctttgcatctgcagtgtcgcagtcgttccggatgtgcctctgttgcgctggggtgccctgtgttgctgggctcttccggtcggccgggcctcgagggctggcggcgcccggcttcggctttttcgggagaagctctctgaaggccggccacccggggttggtggcacccccgggcccttccggggtttggctccaggggtgcggcgacagggttccagaagggggaggccggggaccttcgttgggggccttcggggggaccccgtggcgccccgtgtggggattgggtgcacttggcgggctcccgtttggcacacacaggcaggcggggaaaaacaaaagccttgggggtggagatccccctcggagctggcatggacacactcaagagggagggaacaagcaaacacatctcccagaacaggctattaaaagccccctcccattaagggattgggtctggaagggtgtgggcagctggaaaaacctgagtgggggaccaagaaaaggcgaaaatttaaggggcggagaaaacaggtctgcccgggggagaagacaaacatccaggcggtccacttttcaaatcatttaacaacagatggatttcccaccaacatgtggggtgggtggagagggaggagaccccttcgaagcgggacacagaagggtttgaacagaaagggaacgcttgagtgtggatcattcaactcccaatttcgctgggttggaaggttcatacacgaattggttgattggggacaagaaggctttggttggtggacgtggcaatcaatccaggaggaatggagn

SEQ ID NO: 659454 - DNA, 750 bp, Homo sapiens
gttactgtcccgcgaacccacatccctacaaagcaggaaagtatgcttgggagaggccaagtgagtggggaatcagcccaaagccaggcgtccagggtctccctcacctgaagctgactttttccccaccttggacagagggcgggagatgccatccccactgaacccagtgctttcaccagccatattagctcccactcaccccccgtcgtggaagcctcggccgtcacacctgcagggccggggcgtgcatggcctcagggatggcctgttcagctgctgggtgactcgggtccaggtgcctcaccacctgctcgttgcctttgggctcagtgaagagtctggagtttatctggagtgaggtggccggttcttggtgggatctgagcaggtggaggcaatgcccagagctgtggcagccaccttgcagccgtgaagcaccagtgggaatgacagtcaagagaaccacggagatgccagcccctggacccacagcagcagcacctgcttccagactcagagtgtgagaaaaaaataaactcctatttgtttatggcaagagacaaggtctagctctgtgatgcaggccggaggacagtggtgtgatcacagctcactgcagccttgaactcctgggaggatcacttgagcctgggaggcggaggttgcagtgagctgagattgtgacattgtactccagcctgggtgatagagtgagacccccactcaaaagagaaaaaaaacagtagt

SEQ ID NO: 659455 - DNA, 303 bp, Homo sapiens
  misc_feature (221)..(221): n is a, c, g, or t
  misc_feature (302)..(302): n is a, c, g, or t
ggctaacaaacttttagaaaagtgttttagtctcactagtaagtaacaaaatattggggcagggcacagtggctcatgcgtataatcctagaactttggaaggccaaagctggtggattgcttgagcccaggagtttgagaccagcccaggcaacattgggagaccctgcctctacaaatatacaaaaaattactgggcatggtgacacacacctgtagtnccagctgttctgaaggctgaggttgggaggatcactttgagaccaggagaggtcaaggctgcagtgatctgttgatcacanc

SEQ ID NO: 659456 - DNA, 339 bp, Homo sapiens
tgggagctgccagtgcaatggcatgatcttggcttgctgccacctctgcctcctggattcaagcaatactcccacctcagcctcccaagtagctgggactacaggcacattcctcaagcctggctcattttttgtagagacagggtttcaccatgttgcctgggctggtcttgaactcctgggctcaagcaatttgctccctttggcctcctaaagtgctgggattactggcatgagccactgcacccggcccggatgtttttatagtttgctttttaagatcatgcagtggacaacacaatttaggaaatcaggagagcaaaatctgtataccacatg

SEQ ID NO: 659457 - DNA, 761 bp, Homo sapiens
gcgcaggacgcaagcgtctgccggcgtggacgggtgccgatttgacaagatcacagctgcggaaaatggacagtgaggtgcagagagatggaaggatcttggatgggatcgatgatgctgggcgagaagacaagctggcttatgaggatgtcgcaataccactgaatgagcttcctgaacctgaacaagacaagtggtggcaccacagaatcgtgtcaagagaacactgaaatgaatgtggagcagacttgagccttacagtacctccatgagaatgttccccccattggaaattgaacgctgtgggtcctttcttgtggatggattttctcaaagtacacagataaagcatggtttgtttcagtctccaaattcaaacctttgagtaataaatcagcgactcaaagaatgtacacccattgagtttgtggtagcaaagtgcaatgcgaacattgaatgagaaactgagatttctcagtaatggtgaatatttggtctttaaacgtaaaacgtcttcatgtgaagtagcttatattttgaacatggatgtgtgttaaagcatttggctctaagctctgatttgtgcttgtgctgtcaagagtttagaaacttccaaattaacttatgtgtgttcgttgtaacacagggtgattgaacgtattgaagaagggaaaggggaagaaaaggaagcagaaattaggggaattttgaatttcataatttcccaaattgagaagatttcgggggggattagcggtggt

SEQ ID NO: 659458 - DNA, 163 bp, Homo sapiens
ccgtcgcagcctgctgcgtgccgccgcgggcgcttcaccttcagcgcctgggtgcgcgccgaccagccggccggcgagcagctggtgtcgcccgccgcgatgccggcaacgcgctgctgatcggtatcaaccagggcgtgcccttcgtcgaagtgaacggcca

SEQ ID NO: 659459 - DNA, 239 bp, Homo sapiens
  misc_feature (9)..(9): n is a, c, g, or t
gatctctgntcctcatgtcgaagtcagccgcatcttcttttgcgtcgccaagccgagccacatcgctcagacagctactgagagctcacctcctcacaagacggctggtccatgtggagaacattcaaagttgtcttccctggcaggttctgggaggcctcatgtaaatgcaaaacatgacaatgccagtttacacttcacttcctccagcgcaacccaacgtgcagccttcctgtcct

SEQ ID NO: 659460 - DNA, 642 bp, Homo sapiens
tggtacccagtttgtgtaggaggacactacaccagcactgttttgccagtaattagctgtgggcttagagtcgcggcgcgagtaaatcggctcaggacccatgccattgccacgagcaccggacactacccagccacacagaatcaacacatgattgccaccaacaaggacccgaaggacctttcggccaccctttagcacagtttatgtgcactagttatgttacaactcaactacacccaccacaaggggatccgtgcacgttaccgattactaggactatgacataaacctccagccttactttggtgggcactacttccccactgatctgcaggttgtggatcttctaccagttacaggtgccgacccagggcctgcctgacactggactcgcagaaacccacgttgttatacacctcatgtctcctacgggaatcatctacagaaccacctgcaaagtggaggggtcgctgaacagcctctacccggaggccgactgtacacccacctagtacgaggcccatatagagggctacgcggagggcagagaacgctgcccactaatactaaggctactactacatcagcagcagcagccgtgggttggtcgtcttctcagttgtcttgtggtagctggcc

SEQ ID NO: 659461 - DNA, 213 bp, Homo sapiens
  misc_feature (48)..(48): n is a, c, g, or t
tggcatatttgtatctcttttatgacaggagatgggcaaggagtgcantcgttgaaagttaatttatttcaaacctttacacagcttcttcattcatgcctcacaaatatctttgagaattaaggtagccattatttcccattttaacaacttgataaaattagaaagtattggtaagggctgggaatgggtgggtccacaacctgggagaat

SEQ ID NO: 659462 - DNA, 381 bp, Homo sapiens
  misc_feature (83)..(83): n is a, c, g, or t
  misc_feature (89)..(89): n is a, c, g, or t
  misc_feature (200)..(200): n is a, c, g, or t
  misc_feature (204)..(204): n is a, c, g, or t
  misc_feature (237)..(237): n is a, c, g, or t
  misc_feature (306)..(306): n is a, c, g, or t
atgagacatcaacgcacagaccatacgctgctcgacaggctatcaaatgccctggaacacgaggcaaaaatgcctgtcatcgngtgganaacaccatggagtccctcctggtggacattgtggccgacctacggcctggcttcgatgacgttgatgccgaagagttcggaaccagcctgcagggcgagaccgaactgganggcnatctcaccttccgggatgtgctgcaccgcatgntgcatcgcctgacctactacgtggagaccaaccgctatggtgaggccaccaaggtccccgtgacctccnaagagttcatggatgtggtttcgacagtggacgggttgatcaatgacttcccggatctgccggtgtcgtcactgg

SEQ ID NO: 659463 - DNA, 386 bp, Homo sapiens
  misc_feature (327)..(327): n is a, c, g, or t
  misc_feature (355)..(355): n is a, c, g, or t
  misc_feature (370)..(370): n is a, c, g, or t
  misc_feature (382)..(382): n is a, c, g, or t
aattcggaacgagggtgggtttcatacaaggggtgcagagatggtttaacatacacaagtcaatacatgtgatacaccacataaacataatttttaaaaaaaatcacatgatcatctcaatagatgcagaaaaaacattcaacaaaatccagcatcctttatgattaaaaccctcagcaaaatcgacatacaagggacataccttaatgtaataaaggccatctattacaaatccacagccaacataatactggatgggggggaaacctggaaggcattccctctaaggatgggggacaggacagggtgctcactcttcacccactnctctttcaaatggtactggggagtcctnggccaggggcctttnccaccagggggnaggg

SEQ ID NO: 659464 - DNA, 146 bp, Homo sapiens
ttaaccggtgggaaacttccggaattggtcgaaccacttttccaaattgccatattaaggcgggggtttcaaacccaaagggatgttggattgtaaagggaaattttatttggcggttaaaccaaatagggaggaaggtgaaccca

SEQ ID NO: 659465 - DNA, 379 bp, Homo sapiens
  misc_feature (171)..(171): n is a, c, g, or t
ggtccaggttttttccagggggtttgggctgatggtttccatggaaacaagggtaggggccaggggtggttttccctgcttatgtttttcgggattttgggagccccccctctatccgtttccattttgttttgggggccccagggccgaaaagccaagatttcatgaaanaaataggtttttccccttgccctaagatcaatttgaacttttttagccccgtcaggggggtttgtttcctaaaaaggcattttttgccaggggattccccccaaggttggggccccccttggaaaatgaaaaattgcccccccttggggtagacaaaaaccagttccccttggggttgtggcctaaaaaaaaccctttttttttttta

SEQ ID NO: 659466 - DNA, 405 bp, Homo sapiens
  misc_feature (405)..(405): n is a, c, g, or t
tgggctttccaagaaaacacataactttgaatcaacacaaccagcccactagcctacattattacgcatcatccgctctactcatttttgtaaccgaaatgtcaacaagcaagcgctatttagcgtagttccccgaacccttttccgtccgtacgccgcctagacaacgccccactccatagatagctaaactacgctggactccgtaaccccttcgacaaatcaagtggcaaggcacaactggggcttgtggccatgccatttatcgcattccccttgggcattcaatgcacacagcacacacacatcgaaaccgcgaatactatcagcaccttggccaaggaaccattgggccctggtcatcgacggacacgcacacacaagcggaaccttccaaagcaccgn

SEQ ID NO: 659467 - DNA, 154 bp, Homo sapiens
  misc_feature (12)..(12): n is a, c, g, or t
  misc_feature (83)..(83): n is a, c, g, or t
  misc_feature (128)..(128): n is a, c, g, or t
cccacatccttnccagcacccttaggaaggcccaggcagggctgttgcagcggacctgggctgttctgtgttgaaggagtgtncccagtgcccttggaggacctgtgagagccacctcacaggcagancccaccaggcagggcaaggagatctc

SEQ ID NO: 659468 - DNA, 176 bp, Homo sapiens
  misc_feature (46)..(46): n is a, c, g, or t
  misc_feature (130)..(130): n is a, c, g, or t
gattggccactgcatgtacagtcagccaggtccagactgtggaccnctagactcctggcctggcagtcccactggcccccatgattcccgcaacctgtcctgggcccagagtttctttggcccttaaagnaggcaggggggggcccagggctggtggccaggcaaactgggaattc

SEQ ID NO: 659469 - DNA, 401 bp, Homo sapiens
gatggaaggtcgtgtacactgtagccccagcgctgcgtgcagcctgccaactacagctggtaccaggcgggcagtgctcgaccaggccctgttacagtctacccctacatgcatgccctggacaccctatatgtgcctctgctggtggatacaggggtgcccctagtcactggtgccactgtccttggtcaccatcagttgctgcttcatgaagaggcttcgaaaaagggtgatcctttactccccaggtcttgcaggtgtcgagtgtctaccggcccagttacaagccctcttctggtggcctggacaccctctccctcagaccactcttcctataatttatgggccctcccactaccaagaatggggagaagtgcctccccttccccattcattccctc

SEQ ID NO: 659470 - DNA, 1647 bp, Homo sapiens
  misc_feature (596)..(596): n is a, c, g, or t
  misc_feature (719)..(719): n is a, c, g, or t
  misc_feature (793)..(793): n is a, c, g, or t
  misc_feature (847)..(847): n is a, c, g, or t
tggggggttggtatctggcgagccttttctcccggggactcccggtctggcgcgccaagggatgttgaaaaaatctgggaatgatgacacagctctccttctttcttcttttttttctttgtgcgtggcctctctcgcggggttcgtgggagcgggaggaggcgtgggcataaaaaaggggtgagtgaacgtggggcacatttctcttctccagaagcgtggtgagaagtgcctcgagtgtggagcgcgtggtaggaaaccgtggtataaggtggcattgtggcgggtgtgggagccatgagggatgtgccaccttgtggcgtatagagcgcgcccgtgtgtcaaggagagcctcatgtgggacaagagcctctgcggagaatcttctatatttacagagtgtggtctccactctgtgagagctctctgtggagaaaatgtgtgggaggccctctctctcttctcgagagagacaccccgaagagtctttatgagaggccacaaacaaagaagagcgggggggacactctcccatgtgtgtggccccacccagaggggggcttctcaaaaatgttgctgtgaagatgtgtgtcccnagctgtgggcacacgcgtgggcattatctccgagtgggcgggcccccttctcttttttatatctgtttcctcgctgtgagagcccatctccagaggagaaatatatttgtgtgcgggctcttntctttctcccctcacaagggtgggctcccttatattctatatctctcgctgtttctctcctttggggagggggncgcactctacaggaatacgcgtggcctcatcccttgtgtgccacaccatgtggnggactcctgtgggggcgggataaaccctgtgcaggcggcggttgaggggcaccacgtcgggttgtagaacgccgtgaaatataactcgtggcgctccgtgaggataactccggcgaagaacagcgggcggaaaaaaacttccttctcgtgtcccaggggaaggggggccggactccctttccacagaaggtccaagttggggggtcttacaaaccaccaaaatttctcgtgggaagttctgccaggaaggggggggacccaggaccacaaggcccttctctgttggggtgggaataaaacgccattttcccaaggacacccagcggcgggggggaacatgttaccccccccaaagaaagggggaaatcaactgggggcccttggaatgcgaactcccggagcaaaaagaggggcgctacacaaaggggggtgtctctaccacaaacacccgacttgtggtaaaaggcgcccaaaaaaacgcgggcgaccaatagtttgaacgggtggaaaaatacccgcccccgggtagtacgggcgcacgaaagaagggagggcccacgaagtgggagaaggggacaagcgcgccaaagaagaggccgcgaagagaggggtagcgaggagaacaccaaacacggaagataaactaagggagaggggggagagcacaaacgggtcgggccgcacaaaccaacccacgacgacgggggacagagatagtatagcaaccacggaagatccctatagcgagagatagatgcgcaactacaggttacggaaaggactagaacaaagagcgagcg

SEQ ID NO: 659471 - DNA, 145 bp, Homo sapiens
tagtgttcgatagctttaaatctcactaaacaaccaaaatatgtacagagataagcactaaagaaaattacgcaggaagaagaaattagatttttgtttgaaaaaaaaacggaaaagaaaaaatttggttacgtttacaaaagtg

SEQ ID NO: 659472 - DNA, 945 bp, Homo sapiens
  misc_feature (533)..(533): n is a, c, g, or t
tccagttctaaaaccaaattttttattctcttagtttgtgaaaagggaggggttaaagtggttgtgttctcgtgtttatagttctccagaagaaccagaaacagaaggcccaataggtctagaaatttttaggaaaagcagaaatttcatctcattttatagaggagaggattttctaacacattatagaaattttctatacacacattataaaatctcatctccgagggcccctcgagggagcgtgtggcgagaagttctccgtgtgtcacccataagtgtgcctcaagccagagaggccgaggtgtgtctccatatatgtgcctacaaagatgtggagagacaacaggagacaacctctcaccacaggaatattttcttcccctctcagggctgtgcgcccctctcacatcttcacacaattgtcgggagacaagtctcctgtgtgcgccgcggtgacacatgtgctgtagaggctccctgtggacaggagacgcagaaaagagagggggtctgtgtgcgggtgtctctcnagacacagagaaacccgcgtgggcacacacgagtgtgactgtggcgtgacacgcagcctcgaggggggagaggggcccttctctcgagcgcgccgttggagaaaagcgggcgccgccaccgcagacatctataggaggcgcgcgagacaccgagacactctagagagagtagtcttaaagaggtgcccccgtgttggggggcatcatccggtggccctacctctgtgcgggcaaaacgggacaagtcaagggcatattgcgcacacgtcatattttttaacccccacgacaagcaaaccggggggattcctctccctcccccaacagtctccgtgggggtgttgccccaataacgccaccagggggggcgtgaccacggtgtgggcgcacgggtgcgcaaaagggacacaac

SEQ ID NO: 659473 - DNA, 517 bp, Homo sapiens
tgggctccataaattttcctggttggccatggaaatgtaaaagtggattatttaattacatttctcagtttaagtcctcgtgtaagtgctcgggaaattttccaaaaaaaattaaaagagtggacgtgaaaaaaaaaaaaaaaaaaaaaaaaaaaaaaaaaaaaaaaaaaaaaaaaaaaaaaaaaaaaaaaaaaaaaaaaaaaaaaaaaagaagaggcgggggcgcgcgcgccaataatacactcctcctccgcggcggaggccgccaccaaccagcagcagcagcaccccacctttgtttctgaaacaacagcagggcgcgcaccaaaggagaggagcgagctctctaataataaagaacgagcgaagccgcgcgcgccgccgctcaataaaaaaaacagataacatggagggagaacacaaagggcccacagagggaaatcacttgggaggagaagagccaaaacatttggtggggggtggaaacgacaaaggggaggaaaaccaccccacgaaa

SEQ ID NO: 659474 - DNA, 717 bp, Homo sapiens
tagtaaaaacaggttttccccatgttggtcaggcgggtctcgaactccggacctcgtgatccaccggcctcggccttccaaagtgcgggggattacaagttggacggccattgcaccgggctaattggccctattttaaagtcaagcaaggggaagaataacaagattatttagtaatcagtttcatgacactaaaagtcatatagtcatagggttttcatcttcatatcttggcctaaattcattggctcacagtgcgggaaccaaaattggttcatctcatgattccctacttctgaccttaagggaaagtaagtggctcagaaaataggtgcagggtcaataagtggcacaaagtgggggctgcaattattggctaccataagagctacaaggctggattagaaatgatctcaaaaccttttagaatttccaaaatcttcacatttacggaaccggtcggacatatatggggtcttggaaaattccaggaacgagtgattagttcactcttccccattattatataagcgctaatcagggcaggggattatcttaaccatcatatcacttcattgagatttctaacatactccaattataaacggtcatgtaattccccatgtggaacctcctccacggggattactgacgacatattagatggttcaaccaggctggaaattccctctggggaattccatggaaccaattgta

SEQ ID NO: 659475 - DNA, 433 bp, Homo sapiens
cagtgtatccctgactgatatgctggtgggtatctgggcactcctcatccattttgacacaacacagcacatacatacacacacacacacacagcagacacacaaacaaacacagacacacccactcctgatagtaggaagaacagtattgtggacaaagaggaggctgaaggctgtatgacgccttgagacatcaactcagtgtatgtgtggaggtggcggaaatgtattattacctggacacactcttcaccctttaggcctaaaacatagctccacctccaccgggacgtttttgcacaagtgtgttcctttgagagactcaccagatgctgtagtgcatatttggttctccaatagaaatatattttgtatttatagttcctagaggatatgtgtgttttgtacttagcagactctatagcaccatctt

SEQ ID NO: 659476 - DNA, 195 bp, Homo sapiens
  misc_feature (133)..(133): n is a, c, g, or t
  misc_feature (140)..(140): n is a, c, g, or t
ggtcgcggagcagatactggaatccatacttcagttgggcgagccgtgaggtctcggtcgaaactactcaactcggccgtcctagcacaaaagcagccatagacaacacacaaacgagagggctgggctcccnttccagngaagatttatttaaccaggctcccagctggaatttcactccacaggacacagttt

SEQ ID NO: 659477 - DNA, 343 bp, Homo sapiens
taaaggtagaaaagggaagaggaaacaggcacaaaatcaaaggaggacgaggacaggagagatgagacaacaccaaagaagagaaaaagtaaggctagaaaagcgagagaggacagggaaaacataaaacgggaggacgacagaggaaagagagagtcaggtatagagaagaagcagtatgagacatggacgaagatagtacagagagcagagagtagagaagcgcagccgaacagacacactcaatctctctctctctctctctctctctctctctctctctctctctctctctctctctctctctctctctctctctctctctctctctctctctctctct

SEQ ID NO: 659478 - DNA, 1916 bp, Homo sapiens
cggacctccacactgagccatgcccacccccgacgccaccacgccacaggccaagggcttccgcagggccgtgtctgagctggacgccaagcaggcagaggccatcatggtaagagggcagggcgccccggggcccagcctcacaggctctccgtggcctggaactgcagccccagctgcatcctacacccccaccccaaggtccccgcggttcattgggcgcaggcagagcctcatcgaggacgcccgcaaggagcgggaggcggcggtggcagcagcggccgctgcagtcccctcggagcccggggaccccctggaggctgtggcctttgaggagaaggaggggaaggccgtgctaaacctgctcttctccccgagggccaccaagccctcggcgctgtcccgagctgtgaaggtgtttgagacgtttgaagccaaaatccaccatctagagacccggcccgcccagaggccgcgagctgggggcccccacctggagtacttcgtgcgcctcgaggtgcgccgaggggacctggccgccctgctcagtggtgtgcgccaggtgtcagaggacgtgcgcagccccgcggggcccaaggtcccctggttcccaagaaaagtgtcagagctggacaagtgtcatcacctggtcaccaagttcgaccctgacctggacttggaccacccgggcttctcggaccaggtgtaccgccagcgcaggaagctgattgctgagatcgccttccagtacaggcacggcgacccgattccccgtgtggagtacaccgccgaggagattgccacctggaaggaggtctacaccacgctgaagggcctctacgccacgcacgcctgcggggagcacctggaggcctttgctttgctggagcgcttcagcggctaccgggaagacaatatcccccagctggaggacgtctcccgcttcctgaaggagcgcacgggcttccagctgcggcctgtggccggcctgctgtccgcccgggacttcctggccagcctggccttccgcgtgttccagtgcacccagtatatccgccacgcgtcctcgcccatgcactcccctgagccggactgctgccacgagctgctggggcacgtgcccatgctggccgaccgcaccttcgcgcagttctcgcaggacattggcctggcgtccctgggggcctcggatgaggaaattgagaagctgtccacgctgtactggttcacggtggagttcgggctgtgtaagcagaacggggaggtgaaggcctatggtgccgggctgctgtcctcctacggggagctcctgcactgcctgtctgaggagcctgagattcgggccttcgaccctgaggctgcggccgtgcagccctaccaagaccagacgtaccagtcagtctacttcgtgtctgagagcttcagtgacgccaaggacaagctcaggagctatgcctcacgcatccagcgccccttctccgtgaagttcgacccgtacacgctggccatcgacgtgctggacagcccccaggccgtgcggcgctccctggagggtgtccaggatgagctggacacccttgcccatgcgctgagtgccattggctaggtgcacggcgtccctgagggcccttcccaacctcccctggtcctgcactgtcccggagctcaggccctggtgaggggctgggtcccgggtgccccccatgccctccctgctgccaggctcccactgcccctgcacctgcttctcagcgcaacagctgtgtgtgcccgtggtgaggttgtgctgcctgtggtgaggtcctgtcctggctcccagggtcctgggggctgctgcactgccctccgcccttccctgacactgtctgctgccccaatcaccgtcacaataaaagaaactgtggtctctagaaaaa

SEQ ID NO: 659479 - DNA, 1823 bp, Homo sapiens
cggacctccacactgagccatgcccacccccgacgccaccacgccacaggccaagggcttccgcagggccgtgtctgagctggacgccaagcaggcagaggccatcatgtccccgcggttcattgggcgcaggcagagcctcatcgaggacgcccgcaaggagcgggaggcggcggtggcagcagcggccgctgcagtcccctcggagcccggggaccccctggaggctgtggcctttgaggagaaggaggggaaggccgtgctaaacctgctcttctccccgagggccaccaagccctcggcgctgtcccgagctgtgaaggtgtttgagacgtttgaagccaaaatccaccatctagagacccggcccgcccagaggccgcgagctgggggcccccacctggagtacttcgtgcgcctcgaggtgcgccgaggggacctggccgccctgctcagtggtgtgcgccaggtgtcagaggacgtgcgcagccccgcggggcccaaggtcccctggttcccaagaaaagtgtcagagctggacaagtgtcatcacctggtcaccaagttcgaccctgacctggacttggaccacccgggcttctcggaccaggtgtaccgccagcgcaggaagctgattgctgagatcgccttccagtacaggcacggcgacccgattccccgtgtggagtacaccgccgaggagattgccacctggaaggaggtctacaccacgctgaagggcctctacgccacgcacgcctgcggggagcacctggaggcctttgctttgctggagcgcttcagcggctaccgggaagacaatatcccccagctggaggacgtctcccgcttcctgaaggagcgcacgggcttccagctgcggcctgtggccggcctgctgtccgcccgggacttcctggccagcctggccttccgcgtgttccagtgcacccagtatatccgccacgcgtcctcgcccatgcactcccctgagccggactgctgccacgagctgctggggcacgtgcccatgctggccgaccgcaccttcgcgcagttctcgcaggacattggcctggcgtccctgggggcctcggatgaggaaattgagaagctgtccacgctgtactggttcacggtggagttcgggctgtgtaagcagaacggggaggtgaaggcctatggtgccgggctgctgtcctcctacggggagctcctgcactgcctgtctgaggagcctgagattcgggccttcgaccctgaggctgcggccgtgcagccctaccaagaccagacgtaccagtcagtctacttcgtgtctgagagcttcagtgacgccaaggacaagctcaggagctatgcctcacgcatccagcgccccttctccgtgaagttcgacccgtacacgctggccatcgacgtgctggacagcccccaggccgtgcggcgctccctggagggtgtccaggatgagctggacacccttgcccatgcgctgagtgccattggctaggtgcacggcgtccctgagggcccttcccaacctcccctggtcctgcactgtcccggagctcaggccctggtgaggggctgggtcccgggtgccccccatgccctccctgctgccaggctcccactgcccctgcacctgcttctcagcgcaacagctgtgtgtgcccgtggtgaggttgtgctgcctgtggtgaggtcctgtcctggctcccagggtcctgggggctgctgcactgccctccgcccttccctgacactgtctgctgccccaatcaccgtcacaataaaagaaactgtggtctctagaaaaa

SEQ ID NO: 659480 - DNA, 107 bp, Homo sapiens
agagtgttcttcgagatattacgtctttcgattaggaagtacagcacaagactttcttcacctattgttaacacatcaggctcagtctcactgcagagaggatgaga

SEQ ID NO: 659481 - DNA, 1647 bp, Homo sapiens
cggacctccacactgagccatgcccacccccgacgccaccacgccacaggccaagggcttccgcagggccgtgtctgagctggacgccaagcaggcagaggccatcatgggccaccaagccctcggcgctgtcccgagctgtgaaggtgtttgagacgtttgaagccaaaatccaccatctagagacccggcccgcccagaggccgcgagctgggggcccccacctggagtacttcgtgcgcctcgaggtgcgccgaggggacctggccgccctgctcagtggtgtgcgccaggtgtcagaggacgtgcgcagccccgcggggcccaaggtcccctggttcccaagaaaagtgtcagagctggacaagtgtcatcacctggtcaccaagttcgaccctgacctggacttggaccacccgggcttctcggaccaggtgtaccgccagcgcaggaagctgattgctgagatcgccttccagtacaggcacggcgacccgattccccgtgtggagtacaccgccgaggagattgccacctggaaggaggtctacaccacgctgaagggcctctacgccacgcacgcctgcggggagcacctggaggcctttgctttgctggagcgcttcagcggctaccgggaagacaatatcccccagctggaggacgtctcccgcttcctgaaggagcgcacgggcttccagctgcggcctgtggccggcctgctgtccgcccgggacttcctggccagcctggccttccgcgtgttccagtgcacccagtatatccgccacgcgtcctcgcccatgcactcccctgagccggactgctgccacgagctgctggggcacgtgcccatgctggccgaccgcaccttcgcgcagttctcgcaggacattggcctggcgtccctgggggcctcggatgaggaaattgagaagctgtccacgctgtactggttcacggtggagttcgggctgtgtaagcagaacggggaggtgaaggcctatggtgccgggctgctgtcctcctacggggagctcctgcactgcctgtctgaggagcctgagattcgggccttcgaccctgaggctgcggccgtgcagccctaccaagaccagacgtaccagtcagtctacttcgtgtctgagagcttcagtgacgccaaggacaagctcaggagctatgcctcacgcatccagcgccccttctccgtgaagttcgacccgtacacgctggccatcgacgtgctggacagcccccaggccgtgcggcgctccctggagggtgtccaggatgagctggacacccttgcccatgcgctgagtgccattggctaggtgcacggcgtccctgagggcccttcccaacctcccctggtcctgcactgtcccggagctcaggccctggtgaggggctgggtcccgggtgccccccatgccctccctgctgccaggctcccactgcccctgcacctgcttctcagcgcaacagctgtgtgtgcccgtggtgaggttgtgctgcctgtggtgaggtcctgtcctggctcccagggtcctgggggctgctgcactgccctccgcccttccctgacactgtctgctgccccaatcaccgtcacaataaaagaaactgtggtctctagaaaaa

SEQ ID NO: 659482 - DNA, 1925 bp, Homo sapiens
tccatctctgtctctttctccttctctctctcttcctgcttttgctccctaagacgtttgaagccaaaatccaccatctagagacccggcccgcccagaggccgcgagctgggggcccccacctggagtacttcgtgcgcctcgaggtgcgccgaggggacctggccgccctgctcagtggtgtgcgccaggtgtcagaggacgtgcgcagccccgcggggcccaaggtcccctggttcccaagaaaagtgtcagagctggacaagtgtcatcacctggtcaccaagttcgaccctgacctggacttggaccacccgggcttctcggaccaggtgtaccgccagcgcaggaagctgattgctgagatcgccttccagtacaggcagtgaggggcccctgcgctcgggacccagactccgtcctgcaggctgacgctggacctggggggtgggagggaaggacaaaggggaggacccatcttgtcaccagcatcagtgcctcctgccaggcagctctgctccagggctttccatgtccccaaatcccagtggggaaactgaggcccaggggggctagagcaacctgccgaggccacatagccggctcacggcacagtcagctggggtgcaccctcctgtccatcctccaacccaaaggcctcgctgcactaggcgggtgtggacctgtgcccagtgaagctccctccctccctcctgcccttctcactccccgaggggacctgctgaccactggccccctccccagcggcgacccgattccccgtgtggagtacaccgccgaggagattgccacctggaaggaggtctacaccacgctgaagggcctctacgccacgcacgcctgcggggagcacctggaggcctttgctttgctggagcgcttcagcggctaccgggaagacaatatcccccagctggaggacgtctcccgcttcctgaaggagcgcacgggcttccagctgcggcctgtggccggcctgctgtccgcccgggacttcctggccagcctggccttccgcgtgttccagtgcacccagtatatccgccacgcgtcctcgcccatgcactcccctgagccggactgctgccacgagctgctggggcacgtgcccatgctggccgaccgcaccttcgcgcagttctcgcaggacattggcctggcgtccctgggggcctcggatgaggaaattgagaagctgtccacgctgtactggttcacggtggagttcgggctgtgtaagcagaacggggaggtgaaggcctatggtgccgggctgctgtcctcctacggggagctcctgcactgcctgtctgaggagcctgagattcgggccttcgaccctgaggctgcggccgtgcagccctaccaagaccagacgtaccagtcagtctacttcgtgtctgagagcttcagtgacgccaaggacaagctcaggagctatgcctcacgcatccagcgccccttctccgtgaagttcgacccgtacacgctggccatcgacgtgctggacagcccccaggccgtgcggcgctccctggagggtgtccaggatgagctggacacccttgcccatgcgctgagtgccattggctaggtgcacggcgtccctgagggcccttcccaacctcccctggtcctgcactgtcccggagctcaggccctggtgaggggctgggtcccgggtgccccccatgccctccctgctgccaggctcccactgcccctgcacctgcttctcagcgcaacagctgtgtgtgcccgtggtgaggttgtgctgcctgtggtgaggtcctgtcctggctcccagggtcctgggggctgctgcactgccctccgcccttccctgacactgtctgctgccccaatcaccgtcacaataaaagaaactgtggtctctagaaaaa

SEQ ID NO: 659483 - DNA, 1200 bp, Homo sapiens
ccacgcgtcgcccgtcgtaggcccctacgggctacctagaacctttcgctgacgccataaaactcttcatcaaaagagccccatataaacccgtcacatcctatccatcacccgtctacatcatccagcctcctgaccttcagctctctactcatcagcgtcttctactatcgaacccccgatcccccatacctcaaccctcctggtcaaagccgtcactacttaggcctcactatcatttctgaccccagcctgcttatgccttaagctcgtttagcatcaagtgcgcttgctgatcaagaggtgcagcatcaaagaccgtctagaatctgagcgccactgactccggcgcaacgtggcagagcaagtagccctatagcaaggtctcactattgaacgtcagctcctagctcaattacatatcttacctatctacacagttaccttacattaagctgcgtctccctatctactccatcatccaaccccattattccaccccctacgaagtaaaccacccctcctgcacttcacttcaccctgcctcgaatccactgtaccctctttgacgccccacgttacacctacctacgaacttaaaggccattccgccaacaccgttacgcgcacggacacgaccccatattccggaaaactccgccccgttatatgacgcgccatgtggtccccgaacaagggttggaatggcgtcccacggaacgcgactttaacggcatcgatccacaggggccctttttccagacgccaggtccgggaacactaacccggtgcccggacaaacgagtaccctccccctttttccaggctccccgctacgcttatccctttaccactcacaagacccccggactaaatatacacacctaaaacatcacaatttacaacttcccacttacactctccaaaacactcaaccacaccattcccatcccccactaatagccgagacactacttactacgccattcagcgagacacagccacaacgctacaccttacgctcgcacactctgacacacacactcccttcaacccacccgttgacaacaacccataccgctatacacacgctacacaacgccacctccacactttactaccacggactttacacactccccactaatcgaaacgcccccataaaccgacttggtctatataacatccacacttccgacc

SEQ ID NO: 659484 - DNA, 1476 bp, Homo sapiens
cggacctccacactgagccatgcccacccccgacgccaccacgccacaggccaagggcttccgcagggccgtgtctgagctggacgccaagcaggcagaggccatcatgggccaccaagccctcggcgctgtcccgagctgtgaaggtgtttgagacgtttgaagccaaaatccaccatctagagacccggcccgcccagaggccgcgagctgggggcccccacctggagtacttcgtgcgcctcgaggtgcgccgaggggacctggccgccctgctcagtggtgtgcgccaggtgtcagaggacgtgcgcagccccgcggggcccaaggtcccctggttcccaagaaaagtgtcagagctggacaagtgtcatcacctggtcaccaagttcgaccctgacctggacttggaccacccgggcttctcggaccaggtgtaccgccagcgcaggaagctgattgctgagatcgccttccagtacaggcacggcgacccgattccccgtgtggagtacaccgccgaggagattgccacctggaaggaggtctacaccacgctgaagggcctctacgccacgcacgcctgcggggagcacctggaggcctttgctttgctggagcgcttcagcggctaccgggaagacaatatcccccagctggaggacgtctcccgcttcctgaaggagcgcacgggcttccagctgcggcctgtggccggcctgctgtccgcccgggacttcctggccagcctggccttccgcgtgttccagtgcacccagtatatccgccacgcgtcctcgcccatgcactcccctgagccggactgctgccacgagctgctggggcacgtgcccatgctggccgaccgcaccttcgcgcagttctcgcaggacattggcctggcgtccctgggggcctcggatgaggaaattgagaagctgtccacgctgtactggttcacggtggagttcgggctgtgtaagcagaacggggaggtgaaggcctatggtgccgggctgctgtcctcctacggggagctcctgcactgcctgtctgaggagcctgagattcgggccttcgaccctgaggctgcggccgtgcagccctaccaagaccagacgtaccagtcagtctacttcgtgtctgagctgagtgccattggctaggtgcacggcgtccctgagggcccttcccaacctcccctggtcctgcactgtcccggagctcaggccctggtgaggggctgggtcccgggtgccccccatgccctccctgctgccaggctcccactgcccctgcacctgcttctcagcgcaacagctgtgtgtgcccgtggtgaggttgtgctgcctgtggtgaggtcctgtcctggctcccagggtcctgggggctgctgcactgccctccgcccttccctgacactgtctgctgccccaatcaccgtcacaataaaagaaactgtggtctctagaaaaa

SEQ ID NO: 659485 - DNA, 1430 bp, Homo sapiens
cggacctccacactgagccatgcccacccccgacgccaccacgccacaggccaagggcttccgcagggccgtgtctgagctggacgccaagcaggcagaggccatcatgggccaccaagccctcggcgctgtcccgagctgtgaaggtgtttgagacgtttgaagccaaaatccaccatctagagacccggcccgcccagaggccgcgagctgggggcccccacctggagtacttcgtgcgcctcgaggtgcgccgaggggacctggccgccctgctcagtggtgtgcgccaggtgtcagaggacgtgcgcagccccgcggggcccaaggtcccctggttcccaagaaaagtgtcagagctggacaagtgtcatcacctggtcaccaagttcgaccctgacctggacttggaccacccgggcttctcggaccaggtgtaccgccagcgcaggaagctgattgctgagatcgccttccagtacaggcacggcgacccgattccccgtgtggagtacaccgccgaggagattgccacctggaaggaggtctacaccacgctgaagggcctctacgccacgcacgcctgcggggagcacctggaggcctttgctttgctggagcgcttcagcggctaccgggaagacaatatcccccagctggaggacgtctcccgcttcctgaaggagcgcacgggcttccagctgcggcctgtggccggcctgctgtccgcccgggacttcctggccagcctggccttccgcgtgttccagtgcacccagtatatccgccacgcgtcctcgcccatgcactcccctgagccggactgctgccacgagctgctggggcacgtgcccatgctggccgaccgcaccttcgcgcagttctcgcaggacattggcctggcgtccctgggggcctcggatgaggaaattgagaagctgtccacgctgtactggttcacggtggagttcgggctgtgtaagcagaacggggaggtgaaggcctatggtgccgggctgctgtcctcctacggggagctcctgcactgcctgtctgaggagcctgagattcgggccttcgaccctgaggctgcggccgtgcagccctaccaagaccagacgtaccagtcagtctacttcgtgtctgagagcttcagtgacgccaaggacaagctcaggagctatgcctcacgcatccagcgccccttctccgtgaagttcgacccgtacacgctggccatcgacgtgctggacagcccccaggccgtgcggcgctccctggagggtgtgaagaatgacttaggctcaatcacatactctctttagaaagtgcgagggggttcaccgagtcacccagctggtttatacatagacaagattttgcaatggagcgaatgcatggttccagacgaggggaagacatcctgaagg

SEQ ID NO: 659486 - DNA, 162 bp, Homo sapiens
cgtgaccaccctggaacacaaggaagtgaaatggacgtaccctggagaataacgtagcaagaagtgcagcaaaacgaatctgcggccaagaggtgaaatcaagggtaaaatgatgggaagtgatgacccgtgagaaaaaaaagcctggggagcagcgaagag

SEQ ID NO: 659487 - DNA, 165 bp, Homo sapiens
attagcggtctttcctcaaaatgtaagcaactgctgcgttagcatgagtaggcacccacgtattaacgatggttcatagactttctgttataagcatgtgccacctgtaccctgtagcatgttggccagtgaacgccatgatccgatgttctcgagctttcaagg

SEQ ID NO: 659488 - DNA, 1788 bp, Homo sapiens
cggacctccacactgagccatgcccacccccgacgccaccacgccacaggccaagggcttccgcagggccgtgtctgagctggacgccaagcaggcagaggccatcatggtaagagggcagggcgccccggggcccagcctcacaggctctccgtggcctggaactgcagccccagctgcatcctacacccccaccccaaggtccccgcggttcattgggcgcaggcagagcctcatcgaggacgcccgcaaggagcgggaggcggcggtggcagcagcggccgctgcagtcccctcggagcccggggaccccctggaggctgtggcctttgaggagaaggaggggaaggccgtgctaaacctgctcttctccccgagggccaccaagccctcggcgctgtcccgagctgtgaaggtgtttgagacgtttgaagccaaaatccaccatctagagacccggcccgcccagaggccgcgagctgggggcccccacctggagtacttcgtgcgcctcgaggtgcgccgaggggacctggccgccctgctcagtggtgtgcgccaggtgtcagaggacgtgcgcagccccgcggggcccaaggtcccctggttcccaagaaaagtgtcagagctggacaagtgtcatcacctggtcaccaagttcgaccctgacctggacttggaccacccgggcttctcggaccaggtgtaccgccagcgcaggaagctgattgctgagatcgccttccagtacaggcacggcgacccgattccccgtgtggagtacaccgccgaggagattgccacctggaaggaggtctacaccacgctgaagggcctctacgccacgcacgcctgcggggagcacctggaggcctttgctttgctggagcgcttcagcggctaccgggaagacaatatcccccagctggaggacgtctcccgcttcctgaaggagcgcacgggcttccagctgcggcctgtggccggcctgctgtccgcccgggacttcctggccagcctggccttccgcgtgttccagtgcacccagtatatccgccacgcgtcctcgcccatgcactcccctgagccggactgctgccacgagctgctggggcacgtgcccatgctggccgaccgcaccttcgcgcagttctcgcaggtacgcctgcggcctcggagggagcctggggtcacccagggctggcttggcgccgggggcgggcggggatcgatgtgcgggtgggtgaagtgtgctgcctgctcccgggccccgccaaggaggctcggcgccccgagggtcgcgcggcatagggcggggctggagcggagcctcccacggcctgtgctgccacctgccggctacctgggaacggcgcccacgggcttacgaatatggtcaaggagggctgcctggcggaggaggcccggtgtaggtgcggatcctgggcggccagggaaggtctctgccgcccgggaagtgtcccagagacccctggaggggctgctgacacccccggtgcccccacctcgagcattgacccagggcttgcctctcccccatccttcatcctccctgctccacaggacattggcctggcgtccctgggggcctcggatgaggaaattgagaagctgtccacggtgggttgacccctccctgcagggcctggggtgtgggttgggggtctgaatccaggcctcacctcttgccgtccaggctgaggcctctccttcacccacgaattgtgaccctcaacctggcctgcctgcatcctggcttggctcctg

SEQ ID NO: 659489 - DNA, 333 bp, Homo sapiens
ccgacggtggaggccgccgcgcgcgcgctcgcaggcaagcgctggctgccctccgtcctgcaagccagcgctacgccttagaaaaaaacggccccgcccgctcgcgcgggcaacccgacaaaggtggtccgagccgagtgctcggaccacgcaagccacaatctattgaagaccaatcatgaccaagaccaccgcagccaagtccgacaaaaacgaactgatccgccatgccatcacagcatgcggctacctcgtgcgctggggttcccggctgaccttgcccgagtttgccgcagcgatccgccgccactcgacggaccaacgcgccgaagc

SEQ ID NO: 659490 - DNA, 232 bp, Homo sapiens
  misc_feature (79)..(79): n is a, c, g, or t
ggtcattaagagtgtcgcagacaagttctgaaaattaagaagaatccccccaagattgcccaacactgaactacagacnaacactattttatttaaataggagacagctttctaaaagtatacattctctaataaaaatagtttattattttgaatgatttaatggttttctacacaatttacatcacaacatgtaaattttagcagtaacatctgattctaacagcacatc

SEQ ID NO: 659491 - DNA, 125 bp, Homo sapiens
aagctccccaacaagaaatagaagtgtgtagattttttgaaaggtaaatgcttcacaataaacagtcttcttgggtagtacatgtgtaacttgtgattgtttaggactgctcttgttgggagctt

SEQ ID NO: 659492 - DNA, 211 bp, Homo sapiens
ccggggggggggggggcccccccccccccctggggccttggccccccccccccccggggggaaacccccgggggggcccgggggggggggggccccccccttttgggggggggcccccccccttcccccggggtttcccttggggggggggggggggggggggggcccccccccccccccccccggggttaaaggggggggggggtttaga

SEQ ID NO: 659493 - DNA, 365 bp, Homo sapiens
  misc_feature (256)..(256): n is a, c, g, or t
  misc_feature (316)..(316): n is a, c, g, or t
  misc_feature (323)..(323): n is a, c, g, or t
  misc_feature (358)..(358): n is a, c, g, or t
  misc_feature (364)..(364): n is a, c, g, or t
tatgacttggttaaaatatactcttgatatcagcagaagtaataagcagttgaaaataattgagagtcatatgagcgttaagtaaattgattttctgagcaacacttgctacttgcttgattctttacaaagaaagtcaatatttaaaagtatccagcctacttggcttacataaagcttagatttaatgatgtccatatttactattcatacattgtggtggcaattatatataattttcccttttttgatatcntcacatggattttggaatgtacctaggttttgaggggggggttttaatggatattttttnaattaanccccctccaataaaggttggaaaagggggttaatngggggna

SEQ ID NO: 659494 - DNA, 836 bp, Homo sapiens
ccaaagcccataaaaataagaaaattataacgaaccctggagaaccgaaagatgaagcgaaaatctgttcgcttcattcattgcccccacaatcctaggcctacccgacgcgtcgagatactgagtcattgctatttccccactcatattggatccccgacctccaagatatctcgatcaacaaccgattaatcaccacccaacaatgacgtaagtcaaagctaagcctcaatagacagaatgagtaatccatacagcagagcatctaagaggaccgaacctgatctcttatactagtatccttaactcatttttcatttgccacaactaacgctcctcgggacatcctgcccttcgactgcatatttacacgcaactcatcccaagctgatgctaatatacacgctattcccattgggctcatctccccttatagagctggagcgacagttggagtgtattaggctcatctggtgcttagatgattaaaaagtgccactaggcccacttcttacctacaaggctacaccgtacgaccccattagtcccgcatactaggttattgatcgaaagccgatcagtcctagctcaattcaagccaagtagccctggccgtacgcctaagccgctaacattactgtcatggccacctactcatgcacctaattggaagcgccacctagcaatatcaacattaagcttccctctacagcttatcatcttcacaattctaattctactgagtatctagaaatcgctggcgccttaatccaagcctacgttttcacacttctagtaagctctacgtgcaggaaacagatttacatccaccatac

SEQ ID NO: 659495 - DNA, 213 bp, Homo sapiens
tcaagagattccctacgcgtgtccaatggggtgaaacgctgtgtgtcctaaaaatacaaaaattggctgggcgtggtgggtcaagacaatagtcctgagtactcgggtggctgaggcatgacaagtgcctgaacctgggaggcagaggtggcaatggaccaagatcacgccactgcaccccagcctgggcaacagagtgacactcggtctcga

SEQ ID NO: 659496 - DNA, 200 bp, Homo sapiens
gctggagcccgccatgctttctgaccgaggcacctcaccaccaccgtgttaacttcccgtttcatcctgtcatcacgaacagtcgctgagctaccttcagagcccattacgaccttcccagctgctgaaaggccaagggaggtgaggctcttcacaacccattggggctccatgctcctcgagaggggaaatgcaataat

SEQ ID NO: 659497 - DNA, 970 bp, Homo sapiens
  misc_feature (790)..(790): n is a, c, g, or t
gctacaaagcgggggtggttaccgtctgcgagcttttccggggggtttgtttgggcgccggcgtgccgcgcctttttttttggtgcgcccggcttgttatagaggcttgttgctccgtgagtgttgccttgatcgttccgttgtgcccgcctgttggtgtggcagctgacggcttcgcacgcaaccatctggggtggtgattatgcatggccgacttttgttgacggcgctctcgcggcgggatgttgttaagcacccctctgtggtggatttaattgtctctgcccccccctctgtctctcttctgtgttgtttctttgctgcgcgcccccacgacttacttcttgcgacggatgctctcttctgtagatcatcccgcacggcggggggttgacgatgctgctccccgctctctgctgccactacttacttcatactgtgtgtgccgccccccctcgggtggtttgtgaactcctcgctgggggttaccccccgctcgcttttcgcggcgcggcgagttatatatttgtctgctcttcccgacacacacaatgttgtccccccgcactctttttttgttgtggtcgccgcgcgccgcacctctgcgtgagattcctctaggtttaacacaatctgggttggtgctactctccggatgtgggacccccccacttcgtgtaataatagatacatctcccacacgttgttgtgcaccatctgtagaggctggtgccacacaactaggtgtgtgaaacaaaataggttagtttttccgggaggtgtttgaacncacaacccgctttgttgcgccacaaccacccaccggggatgaataatccgggtcattatttttaaattttggggcccaccccccttttttcccccccttttttagatattttcccccaaaattttttaaaaagggccccttttttccttttaccccccctttcccccctttaagccccca

SEQ ID NO: 659498 - DNA, 819 bp, Homo sapiens
  misc_feature (60)..(60): n is a, c, g, or t
  misc_feature (819)..(819): n is a, c, g, or t
gggcggagggggggagggcggggggggagggggaaaaatcctgaagggaacttttcccangttaccagtgaatggctcaaccatagaaccaaaatgaatgtgcgggtcacttatcttccgggcaactgctctttacactccccaccaacttataaaactgtgcttattcatcattttccatattactaactcttatattttgaaataacgcaatgcaatcatgtttataggaaatgtatattcaattcatggaaaaaagtacatctttcactctggagaggcttttcttggttagttgaaaagcattaaacacacataatggtgactaaaattaatagtaatgcatggttcaaaattactaaaaaaaaatccaaatggtttcactacaatgaaatcactctgtgaggtggatgggatggtaattagcttaattgaatcatccccctatgagtgcatgcatcagagcatgggaggttgccgggggaacacatccattaggatttgggacctatgatacaataaaaacaatttacttcttggaaaaagtgacacagttgacaaggatacgcgtcgcctactccaaaagaaaggacaaatgggcccgctggggctaaggggggaggtgtgggggcgcgtcccctagggagggggacctcgtcaccccggtaaattactgatacagccggggcgcaggggggcgcgacatgatatatcacctcaagggccgaatctctgttaccaagagtagccgggacgcaggcatactcttggcgccagcggccggcgcgggcccgaaacgacacgaggcccgctattgcn

SEQ ID NO: 659499 - DNA, 143 bp, Homo sapiens
cgaccagaggatccccggatgtgcttgctccgggaccccgagatctcggccagctacccccgcggccgccacagcccctcagacgacttgggcggccagccttctacccggagctggggccctacagctcccgggaccccgaa

SEQ ID NO: 659500 - DNA, 848 bp, Homo sapiens
  misc_feature (3)..(3): n is a, c, g, or t
  misc_feature (6)..(6): n is a, c, g, or t
  misc_feature (10)..(11): n is a, c, g, or t
  misc_feature (21)..(21): n is a, c, g, or t
  misc_feature (497)..(497): n is a, c, g, or t
  misc_feature (605)..(605): n is a, c, g, or t
ggntcngtanngctatgtgcnattcttgagatgtattttacataagggcacgttcctctagtcctagaccgagctctctaacaacactctttctcccccacccctgaatccaactcccccagaggcgtagccaccctgccgggtacacagagctgaggtcactggactgaacactgccagaaatgaggttcacttcctgaaatagctcttgaacacaggagtgaatgggctgtggattcaggtggaatatttattaatgcatcaagcaaacaggtagtgcgaggtgggaggtaggcatgaggctgggtgctaggtgctcagtaatgactcaaatctaagtccacaggtcctgggcagtgggagtggagatgcatgcacagaaaaacggtgcaagtgccaggcgaggtggctcaagcctagaaccccagcactttgggaggcttacttgagaccaggcgcttgagaccagcctggacaacatagcaagaccttgtttntacaacaaatttaaaaattagggccgggcatggtggctcaagcctgtgagcactttgggaggccaaggcaggtggatcacgagctcaagagttcgagaccagcctggncaacaggtagtgaatcctgtctctactgaaaatacaaaaattagctgggcatggtggtggacgtctgtaatcccagctaccaggtaggctgaggcaggagaatcgcctcaggtgaaccaggaggcagagattgcaatgagctgagataatgccactgcattccagcctgggctacagaatgagactctgtatctcaacaaaacaaaacaaaacaaaaacacaacagtctgtttgtggtagcac

SEQ ID NO: 659501 - DNA, 404 bp, Homo sapiens
  misc_feature (337)..(337): n is a, c, g, or t
  misc_feature (373)..(373): n is a, c, g, or t
  misc_feature (403)..(403): n is a, c, g, or t
tgagacagggtttctctatggagccccagttgtactggaactccccctgtagaccagattagtctcaaactcaagagaactatctccctctgactcctgagtgtgccaccatgaccatcaaatgtctttaagtctatggatcaggatgatttaaaaatgggcacaactagttagtcggtggttacctacaataagccaaggaatcattttattatagtaacgatgatggaacagaaaagccactcattagttcttttgtaaatatactactaccaagtccccagagtacatgaaaggacattctcctttagagaagcagcagctaataaaggcgtgnctggccattatttacaacctggtactgacttcatgnctgggatggaatgtccggctgaaatcaccnc

SEQ ID NO: 659502 - DNA, 205 bp, Homo sapiens
  misc_feature (19)..(19): n is a, c, g, or t
  misc_feature (30)..(30): n is a, c, g, or t
  misc_feature (32)..(32): n is a, c, g, or t
  misc_feature (38)..(38): n is a, c, g, or t
  misc_feature (67)..(67): n is a, c, g, or t
  misc_feature (80)..(80): n is a, c, g, or t
  misc_feature (115)..(115): n is a, c, g, or t
  misc_feature (119)..(119): n is a, c, g, or t
  misc_feature (123)..(123): n is a, c, g, or t
  misc_feature (126)..(126): n is a, c, g, or t
  misc_feature (152)..(152): n is a, c, g, or t
  misc_feature (154)..(154): n is a, c, g, or t
  misc_feature (178)..(178): n is a, c, g, or t
ggacattcagactgagcgngcctaccaaangnagccgnccatctttcaaaacaagaagagggtcctnctgggagaaactngcaaggagaagctcccgcggtactacaagctgcancccncctnggncttcaagacacccaaggaggctattntngggcacctacattgacaagaaatnccccttcactggtaatgtgtccatccg

SEQ ID NO: 659503 - DNA, 122 bp, Homo sapiens
  misc_feature (45)..(45): n is a, c, g, or t
tgttgggattacaggcagaagccaccgcacccaacattactctgngcttctttgctttgacccagaaaggagacaaagcgcaggagactgcactttccttcaagcttctggcatgcacctgc

SEQ ID NO: 659504 - DNA, 811 bp, Homo sapiens
  misc_feature (334)..(334): n is a, c, g, or t
gaagagagtggggacgcttcggcttcggagcgggagtgttcgcttgtgccagcgacttaaaaagagaagttacatatgggtgatgtagagaaaggcaggaagatttctctattatgaagtgttcccagatgccacaaccgttgagaagggaggcaagcacaagactgggccactatctccatggtctcttgtgggcggaatgacaggtcgaggctccgctggatactgctttactacagcacgccaaatataggaacatacaggtcattcatctggtggagtaggactatcactggatgcgagtacttctggagcaatcccatagtaagtacantccctgggaacaataacatgattctttggtcgtgcattgtgacagcacaggcaagcacacaggcgcgagacgtactaatcagcgttatcttcaaaagataagccttacgtacatgcacgtaatcaatctggccaacatgcgctctgatgttcattaacagtacacacgagcataatgctctctatgaacgttgtgctagtgtgtcaccgatccgtttgagtaagatcgtcatacacctagaattcagaatcatgagatgtagtgacagagatatttggttggggcagtcgtgatttataaactaagactggcttgtggttaagttgaatatgttcagttctggaatattaatagtaactccaattcagtagcactggtatcactgtttaccccttttaaagatgtgattagacttcgttcgtaagtgttccacttttcacaaagatggtgagtgccatcttgaaattactggagatg

SEQ ID NO: 659505 - DNA, 340 bp, Homo sapiens
atactacggtggtttacgctctaaacaaaaactcttaggccggacatggtggctcatgcctatcatcccaacacttaggaggctgaagtgggtggatcacttcaggtcaggcgtattgagaccagcctggccaacatggtgaaatcccatctctactaaaaatataaaaaattcgccgggcgtggtggcgggcgcctgtaatcccagctactcaggaggctaaggcaggagaatagcttgaacctgggagggggaggttgtagtgagccgaggtcatgccattacactccagcctgggcaacgagagcaaaactgtctcaaataatgataataaataaaa

SEQ ID NO: 659506 - DNA, 253 bp, Homo sapiens
attagaggatctacgctggccaatgcaccgctgggcctgctgcctactgcaggagaggctgaggtcacccctggacggtataggtgtatagggggaactggtggggtcgtctggtgcatagaggacatcaggatgactgcgtcgctgtggtcaacacttaattcgttctgtattccacactcatatgggtcctacaatcattccttatgacattgaatagagtgaggggtctgttgccattgggccaggcggg

SEQ ID NO: 659507 - DNA, 557 bp, Homo sapiens
tgtggggggggggacaacccccaaaaaatttttttttaaccccccggcccgggggggccaaattaacccgccgggggggggtgggaagagatgatcttagtaagtaggcgccgcacgaaacaacctccgtcgaggagaatggaaacggcgacgcgggtggtatagaaagagagggcgccaatgaggtgttggtggtctgcataccgccaacatccttcgagcacataatcaactgatagaggaactctcttggagacaaccacagtctcgcctccgtggatgacaagccataacgagacaaatataaagcaagacgaaggtgcgtcactaggggagagatctataaaactctctattcaatctactctgtatcgagaggaatatacaggacgaatgtataatgaaggactagcggtgaggagataataggagagacgacaacatctctccctcccacgagagagaagatatgtaggcgcacccgatttatttatggccactcttctacacgaggagcgctcgtatgattggtaaccaccacgggaggctccaaacaa

SEQ ID NO: 659508 - DNA, 256 bp, Homo sapiens
  misc_feature (64)..(64): n is a, c, g, or t
  misc_feature (67)..(67): n is a, c, g, or t
  misc_feature (70)..(70): n is a, c, g, or t
  misc_feature (73)..(73): n is a, c, g, or t
  misc_feature (84)..(84): n is a, c, g, or t
  misc_feature (90)..(91): n is a, c, g, or t
  misc_feature (117)..(117): n is a, c, g, or t
  misc_feature (172)..(172): n is a, c, g, or t
  misc_feature (180)..(180): n is a, c, g, or t
  misc_feature (198)..(198): n is a, c, g, or t
  misc_feature (207)..(207): n is a, c, g, or t
  misc_feature (210)..(210): n is a, c, g, or t
  misc_feature (219)..(219): n is a, c, g, or t
  misc_feature (225)..(225): n is a, c, g, or t
  misc_feature (231)..(232): n is a, c, g, or t
  misc_feature (242)..(242): n is a, c, g, or t
  misc_feature (248)..(248): n is a, c, g, or t
  misc_feature (255)..(255): n is a, c, g, or t
atcctcttttgcctggcctttgagaataacttactgtgtgacttttcggcaagttccttccccnacnctnggncctcagtttcncacttnnggaaagcaaggagttgaccagatgancacaatgggccttcctagctctggccaccaagaatttgtgaacattagagctccnggtctggngggtagagccagagctgntgactggtnctntctgtcctncagagnggactnnattggacctnagaggntcgcagng

SEQ ID NO: 659509 - DNA, 942 bp, Homo sapiens
  misc_feature (642)..(642): n is a, c, g, or t
ggctgcatgtgccttcttctgccacctaaatattacttcccttcaaatctgcctttgaatcatcatttttaagaaaaaataaaacatgtagtggtagtgatctaactggggtttcaattcgctcagaaacaagtttgtttgcacagacggaaaggaaagaagagtagtgtcctattcgagtaaagtacaaagtgttgattttacaaaagagtaggtaatctttgagagcaattcaaatcagtgctgacagaggatactgatgagaaaaagcgatgtgcttcttattataaagtacatttaaagtgcagggactaaccttattttattggggacaggggaggaggaaggaaatgattatggtacccagacactgggctaggctgcaaactttatctcgatttaatactcccagctgtcatgtgagaaagaaagcaggctaggcatgtgaaatcagtttcatggattatcaatggatttaggagggcatcaatcagctcaactcaagatttcataatcattttgagtattgagattgtgcctcaaagttgtagtacctccacaatacctccagtgtttccggtgtaacaaaccttcagtgagtttggaccatgtgtgctcttgggtctgtgggctggaagtacncggtgttgagggagttaacaactagaaagtctttagtacaacaactggtctaggggacacctggtgcttccctaacacacgtgatggtcatattgctcaataaaggagtctccctaatccagggtctaatgatgccgaccatatttgtaatttgttcgggtacctcttttaaacactcttgcttcccgcgaataattgggggtacaacacggtcgactcctgggccaaaaacaccggggtcacttatccacctggcacgcgcccgcggttggaacctctctggggtgggcttatcagaaa

SEQ ID NO: 659510 - DNA, 709 bp, Homo sapiens
acttatccgaacatgctggatgtggttggcatcatttacaggctagaaaagtgtagtaggcatagagctgtactgccacagcctgctgacgaagtatacagtcatcacagtcgcaggctcctgctaagtgctcgtcaatcatgccactcttactttgcttctttcttaatagagcactggtgtcccggccgtgtggcccaggcatggtctcgaaggtccgtggcagtcaggtcgtatccatccgtgccctgtagggcatcgcacggaagatacgggggagtgaagaaggctcttgcttctgaaagctctcaaagttgtgaaactggggtattatcgtctggtacatctgcgcactagattggttaatgcttacttggttctgtaatcactgagattgggtcggagatattctccaatagagtgatctttgctagcggatgatgcctaaagaagtctcgaggcatggcgttctggttttattcagggaatgctgtataatagtccatcagatcagggatactgggcgcttcttcatgtatgtaacagcatattaaacgggagacagtgatgaatcagctacaaaggtaatatggtattaaagatcatgtttacgataggctgctcaatgtgtatttatataggcatgctttgtaaaaccatgctgggtgatgaaagattagttttagagagaaaatgtcatctgtgacgg

SEQ ID NO: 659511 - DNA, 281 bp, Homo sapiens
  misc_feature (111)..(111): n is a, c, g, or t
  misc_feature (116)..(116): n is a, c, g, or t
  misc_feature (147)..(147): n is a, c, g, or t
  misc_feature (163)..(163): n is a, c, g, or t
  misc_feature (216)..(217): n is a, c, g, or t
  misc_feature (240)..(240): n is a, c, g, or t
tcagtcgcctcgccctgcctgtgcacatgtcatgtgtgactcggggagaggctcctgctctgatgcgtcagccctccagcctgcagctgggggccccgatgccagccgggnactcnatttactcccctcttctgagtcggtacctgnctggggttcgtggganacccagacctggatctcttacgcctacctgttccttctctgtcttggaggctnngggatttgagattgacgcggtgnaactctgtccagttttcaaaccacacagataagcctttgac

SEQ ID NO: 659512 - DNA, 418 bp, Homo sapiens
  misc_feature (391)..(391): n is a, c, g, or t
gcggtgtgaaagaggctaatcgtgagcggaggccgtactccctgcactgcgcagggaccgccttggaccgcagttgccggccaggaatcccagcgtcacggtggacacgcctccctcgcgcgcttgtcgtccacatgctcacccagctcatgagctgtggaattatgtggccacactgcgaggagatcggttctgagtcggaggctatcgtaagactcccacatgctgtctggagcgatgaacgccggcatccagacaccattccaaggaggtgcacgagaacagctgtgtgaatccagctcacttgttgacactacttctacttgaaggaacgtgtaatacagcttactctgcagagaaggaagatggctgttttcgaagaggacgacgnaggctgatacaggtgatgcatgccccg

SEQ ID NO: 659513 - DNA, 81 bp, Homo sapiens
gccgaggacacggccgtatattactgtgccaaagatccgaacggtgactatttgggggcctttgactcttggggccaggga

SEQ ID NO: 659514 - DNA, 118 bp, Homo sapiens
cggcccccatgccctgaacaactctttttattttatttttttaagacgggttctctctcactctgtcgcctaggctggagtgcagtgctgtgatctcggctcaccgcaacctccacct

SEQ ID NO: 659515 - DNA, 314 bp, Homo sapiens
gtggtttacatgctgaccactcgggagcagagtggcagttaccaggacatgggttatctagacagctggagttctcatcctggctccacggcctgacacttagcccacctcagttccttatctgaaaaatggggatgatgtgacaatatgtagtctaatggagccacagggaagactgagataatccatgggaagcaccaagcaaggacagggcacctgggaagttcaggaatcgttggcagtgctcctcatcatggtaaccatcactgtcactgttattcctgtttcacctgctctttggctttttagctgat

SEQ ID NO: 659516 - DNA, 244 bp, Homo sapiens
gcggccgcctactactactactactactactactgctcgaattcaagcttctaacgatgtacggggacatgcacaaacggtagttttgtgtgttggctgctccactgtcctctgccagcctacaggaggaaaagcaaggcttacagaaggatgttccttcaggaggaagcagcactaaaagcactctgagtcaagatgagtgggaaaccatctcaataaacacattttggataaaaaaaaaaaa

SEQ ID NO: 659517 - DNA, 602 bp, Homo sapiens
tgcatgcagtgtactgcacttatgggaggctgagcaggcagatcgcctgaggtcagaggtcagaagtttgagaccagcatgaccaacatggagaaacccccccgtctctactaaaaatacaaaattagccgggcatcgatgtacatgcctgtaatcccagctactcaggaggctgaggcaagagaatcgcttgaactcgtgaggcagttgcagtgagatcgcaccactgcactccaacctgggtgacagagcaagattctgtctcaaaaaaaaaaaaaaaaaagaaaactctgacttttatttcccaatggtttccattcccattgagataattggagaagtatggggataattgggggaagtaatctgagagattatttgaccaagcacttttagaagaaaaacagttttcaaaacactaaatagaaggtgaccacaattttttttaaagaaatatgcttaaaatgaccacaagggcaatattagattataacaaaatccttgggggataggataatagggggtaatatattcccttctttgtctcttcatttggatctttaaaatgtcaccatggtgccatgactatctggagaaaaaaa

SEQ ID NO: 659518 - DNA, 401 bp, Homo sapiens
aattcgcggccgcgtcgacacggtgcgagaagacgacagaaggggcctttccggcggtgacgacctacgcacacgagaacatgcctctcgcaaaggatctccttcatccctctccagaagaggagaagaggaaacacaagaagaaacgcctggtgcagagccccaattcctacttcatggatgtgaaatgcccaggatgctataaaatcaccacggtctttagccatgcacaaacggtagttttgtgtgttggctgctccactgtcctctgccagcctacaggaggaaaagcaaggcttacagaaggatgttccttcaggaggaagcagcactaaaagcactctgagtcaagatgagtgggaaaccatctcaataaacacattttggataaaaaaaaaaaa

SEQ ID NO: 659519 - DNA, 823 bp, Homo sapiens
  misc_feature (357)..(357): n is a, c, g, or t
  misc_feature (433)..(433): n is a, c, g, or t
gatcgggcgcacccaccccagatgccgcctggcaccaagcgcagccgccgctgccgcactttccacttgtattgatcacctctcagccccgcgcagccggctcgcccgagcggaccgcggcagcgcgccagcccttggcagccccggagcagtcgggctccgggaggaaactccttgggagcgccctgtccggggtgccctctgcgctctgcagtgtctttctttctgcctgggaggaggaggaggaggaggaagaggaggaggaggaggaggaggaggaggaagaggaggaggaggaggaggacgtctggtcccggctgggaggtggagcagcggcagcagcagcagccgccgcgncgccgccgctgccgccgccgccggaaagggagaggcaggagagcccgagacttggaaaccccaaagtgtccgcgancctgcacggcaggctcccttccagcttcatgggcaaagtgtggaaacagcagatgtaccctcagtacgccacctactattacccccagtatctgcaagccaagcagtctctggtcccagcccacaccccatggcccctcccagtcccagcaacaccagcagtaataacaacagtagcagcagtagcaactcaggatgggatcagctcagcaaaacgaaactctatatcccgaggactgcctccccacaaccaacgaccaggaactggagaagatctgatacaaccatatgggaaaaatagtctccacaaaggcaagaaaggataagacaacaaacaaatgcaaaggttatggaaaagtcgactatgacagccctgcagcagctcaacaaa

SEQ ID NO: 659520 - DNA, 422 bp, Homo sapiens
  misc_feature (34)..(34): n is a, c, g, or t
aggatagcagaatgagatgggagtggagagaagnagcaggaagatgaggagggtaggagagaggggcctttccggcggtgacgacctacgcacacgagaacatgcctctcgcaaaggatctccttcatccctctccagaagaggagaagaggaaacacaagaagaaacgcctggtgcagagccccaattcctacttcatggatgtgaaatgcccaggatgctataaaatcaccacggtctttagccatgcacaaacggtagttttgtgtgttggctgctccactgtcctctgccagcctacaggaggaaaagcaaggcttacagaaggatgttccttcaggaggaagcagcactaaaagcactctgagtcaagatgagtgggaaaccatctcaataaacacattttggataaaaaaaaaaaa

SEQ ID NO: 659521 - DNA, 372 bp, Homo sapiens
gtcaatctagaggatctcctgtgaaacgagacgacctacgcacacgagaacatgcctctcgcaaaggatctccttcatccctctccagaagaggagaagaggaaacacaagaagaaacgcctggtgcagagccccaattcctacttcatggatgtgaaatgcccaggatgctataaaatcaccacggtctttagccatgcacaaacggtagttttgtgtgttggctgctccactgtcctctgccagcctacaggaggaaaagcaaggcttacagaaggatgttccttcaggaggaagcagcactaaaagcactctgagtcaagatgagtgggaaaccatctcaataaacacattttggataaaaaaaaaaaa

SEQ ID NO: 659522 - DNA, 364 bp, Homo sapiens
  misc_feature (17)..(17): n is a, c, g, or t
gtccggaagcatctggntggtgacgacctacgcacacgagaacatgcctctcgcaaaggatctccttcatccctctccagaagaggagaagaggaaacacaagaagaaacgcctggtgcagagccccaattcctacttcatggatgtgaaatgcccaggatgctataaaatcaccacggtctttagccatgcacaaacggtagttttgtgtgttggctgctccactgtcctctgccagcctacaggaggaaaagcaaggcttacagaaggatgttccttcaggaggaagcagcactaaaagcactctgagtcaagatgagtgggaaaccatctcaataaacacattttggataaaaaaaaaaaa

SEQ ID NO: 659523 - DNA, 888 bp, Homo sapiens
  misc_feature (64)..(64): n is a, c, g, or t
  misc_feature (414)..(414): n is a, c, g, or t
  misc_feature (777)..(777): n is a, c, g, or t
gcccaagcctggtggcttacaagggtgtgggcctgtaagtgcacagaaatcaagaattgaggtntgggaatctctgcccagatttcagaggatgcatggaactgcctggatgtccaggcaaaaatttgctgcaggggtggagccctcatggagacctctgttagggcagtgtggaagggaaatgaggggtgggagcctccacacagagtctccactggagcactgcctaatggagctgtgagaagagggccaccatcttccagaccccggaatggtagatccactgacagcttgcaccgagcacctggaaaagccacagacactcaatgctagcccatgaaagcagccaggagggcagctgtaccctgcaaagccacggggtggagctgcccaaggccatgggagcccaccttntgcatcagcatgacctggatctggagcatggagttaaaaaaatactattctggaactttgagatttaatgactgtcctatggatttcggacttgcatggggcctgcagccccttcattttggccaatttctcccatttggaagaggtctatttacccaatgcctgtacccccattatatctaagaagtaactaacttgcttttgattttacaggctaatagacaaaagggacttgccttgtctcagatgagactttggacttgaacttttgagttaatgctgaaatgagttaagacgtcgggggactgttggaagagtgtgatggtggttgaaatgtggggacatgagattgggagagaccanggtggaactgatgcggttggctgtggtctcagccaaatttcatcttggatggtagcttccataattcccacatattgtggggggaccggtgggaggtcattgaatcatggt

SEQ ID NO: 659524 - DNA, 385 bp, Homo sapiens
  misc_feature (28)..(28): n is a, c, g, or t
ccagaggattagtggaaggagatatcgnggctttccggcggtgacgacctacgcacacgagaacatgcctctcgcaaaggatctccttcatccctctccagaagaggagaagaggaaacacaagaagaaacgcctggtgcagagccccaattcctacttcatggatgtgaaatgcccaggatgctataaaatcaccacggtctttagccatgcacaaacggtagttttgtgtgttggctgctccactgtcctctgccagcctacaggaggaaaagcaaggcttacagaaggatgttccttcaggaggaagcagcactaaaagcactctgagtcaagatgagtgggaaaccatctcaataaacacattttggataaaaaaaaaaaa

SEQ ID NO: 659525 - DNA, 170 bp, Homo sapiens
acgagataggcagacaggtcgagctgagtctgacaagtgagggctgaagatctgtgattgggtccaggttggagctgtgtccttagggcgatgtctagagcagctctggtgaggtgagcctgggtccccgtgggcaagcagaccagcacaaagggcatggggtccagcac

SEQ ID NO: 659526 - DNA, 160 bp, Homo sapiens
gttttcccttaaatttccccgggggggcccttttttaaaaaaagacctttggagggccgccttggtttctatttaaaaaggaggttttttttcccccaaggggggaaattggggggggaaccgggccaattttttaaaaggggggtttgggggggtttta

SEQ ID NO: 659527 - DNA, 366 bp, Homo sapiens
cggacgcgtgggcgacccacgcgtccgacctacgcacacgagaacatgcctctcgcaaaggatctccttcatccctctccagaagaggagaagaggaaacacaagaagaaacgcctggtgcagagccccaattcctacttcatggatgtgaaatgcccaggatgctataaaatcaccacggtctttagccatgcacaaacggtagttttgtgtgttggctgctccactgtcctctgccagcctacaggaggaaaagcaaggcttacagaaggatgttccttcaggaggaagcagcactaaaagcactctgagtcaagatgagtgggaaaccatctcaataaacacattttggataaaaaaaaaaaa

SEQ ID NO: 659528 - DNA, 804 bp, Homo sapiens
  misc_feature (272)..(272): n is a, c, g, or t
  misc_feature (286)..(286): n is a, c, g, or t
  misc_feature (289)..(289): n is a, c, g, or t
  misc_feature (302)..(302): n is a, c, g, or t
  misc_feature (317)..(317): n is a, c, g, or t
  misc_feature (330)..(330): n is a, c, g, or t
  misc_feature (354)..(354): n is a, c, g, or t
  misc_feature (376)..(376): n is a, c, g, or t
  misc_feature (378)..(378): n is a, c, g, or t
  misc_feature (405)..(405): n is a, c, g, or t
  misc_feature (411)..(412): n is a, c, g, or t
  misc_feature (421)..(421): n is a, c, g, or t
  misc_feature (432)..(433): n is a, c, g, or t
  misc_feature (441)..(441): n is a, c, g, or t
  misc_feature (451)..(451): n is a, c, g, or t
  misc_feature (453)..(453): n is a, c, g, or t
  misc_feature (456)..(457): n is a, c, g, or t
  misc_feature (461)..(463): n is a, c, g, or t
  misc_feature (465)..(465): n is a, c, g, or t
  misc_feature (471)..(471): n is a, c, g, or t
  misc_feature (490)..(490): n is a, c, g, or t
  misc_feature (497)..(497): n is a, c, g, or t
  misc_feature (504)..(505): n is a, c, g, or t
  misc_feature (510)..(510): n is a, c, g, or t
  misc_feature (527)..(527): n is a, c, g, or t
acttagactaaacgtgaacagtattatatggactctcacaacgctcttagagaatccgtgaatgtgaacagacaaatgtggctaaccatttgattcttcagtatgccttctaatgtggctattttatttatgtgagactctaaacctgattgtcctaatatataaaactaaaagatttgtaaagggagtgtctttagaaatagatgaaatgtagaatgttaaaaattattgctagggtagtcttttttttttccagaaacctaattagggtnttaaatttggtgtnttnttggttttttttntttaaacagaagctntgttatttcattncccattcccagaaagggagttaantgaagataaaaatttatttttnanggtctttatggagagaaacttggtttnctgatnntgacctatngcagatgtttnntataaatnctttctttanantgnntgtnnncngtagtncccaacacggtaaactcangtgaaantagtaanntgatncttttattactaagacngtcatgcattctgaagcagtgggctttttttataaccattaggaagtaatttccctctagctcctttccttactagtctccgtgtcagaccattagtgaggtacttggttcaaattaacaaacatctagtattaacttccaattattcactcccaatcgggtcatctttcacactattgtaattatacctaatttctgctaaattcccatttacaattagtttcaacttcacttttattcaacccagttggttctgggtttcccccctggttgccag

SEQ ID NO: 659529 - DNA, 213 bp, Homo sapiens
  misc_feature (19)..(20): n is a, c, g, or t
  misc_feature (39)..(39): n is a, c, g, or t
  misc_feature (42)..(42): n is a, c, g, or t
  misc_feature (49)..(49): n is a, c, g, or t
  misc_feature (63)..(63): n is a, c, g, or t
  misc_feature (76)..(77): n is a, c, g, or t
  misc_feature (91)..(91): n is a, c, g, or t
  misc_feature (114)..(114): n is a, c, g, or t
  misc_feature (121)..(121): n is a, c, g, or t
  misc_feature (184)..(184): n is a, c, g, or t
  misc_feature (190)..(190): n is a, c, g, or t
gagtatatattttgcttgnnctttcatgcagtttctaangcnaatgctnatttaagtgttttncggttttgtttgnntctgtatttattgnagttctggtcatagaccagcgancttggcncgtcatggctgcatgaacagccaggaacatagttattggggaacttcatggctcaaaaccttntgaatnatttaacttattttgtatgttgc

SEQ ID NO: 659530 - DNA, 129 bp, Homo sapiens
ctgggtgggggaagagggtggggagaagtgtgagctccttcgaagctcctgctgcagctggctccctgctctgggccctgcaccagagctgccaccctcttccccagccagccctcttccccagcccag

SEQ ID NO: 659531 - DNA, 487 bp, Homo sapiens
  misc_feature (4)..(4): n is a, c, g, or t
  misc_feature (42)..(42): n is a, c, g, or t
  misc_feature (146)..(146): n is a, c, g, or t
  misc_feature (150)..(150): n is a, c, g, or t
gacnaagcggttgcatggttcaagggggaatcaaatggaagngcatttaagtcaagccggcttgttccttgccatggcaaagttccaagaagttcccaaagccaagtacatttggaaagtgcttcccaattggcgcacccagtgtnaaancagggcacacgagaacatgcctctcgcaaaggatctccttcatccctctccagaagaggagaagaggaaacacaagaagaaacgcctggtgcagagccccaattcctacttcatggatgtgaaatgcccaggatgctataaaatcaccacggtctttagccatgcacaaacggtagttttgtgtgttggctgctccactgtcctctgccagcctacaggaggaaaagcaaggcttacagaaggatgttccttcaggaggaagcagcactaaaagcactctgagtcaagatgagtgggaaaccatctcaataaacacattttggataaaaaaaaaaaa

SEQ ID NO: 659532 - DNA, 103 bp, Homo sapiens
gcggccctagtgtgtagatatctgcagaattaagctgaattccagcacacgtggtcggacgtaactagttggatcctgagcgtcggtaccaaatgacttgtga

SEQ ID NO: 659533 - DNA, 359 bp, Homo sapiens
ggcgactgatccagaggatcccgacagccagagtaggcggtgtggtgtaggcaggagtggtagaggctgacgtagtgaggtggaggtggtgccggcgagagatggaggtggaggtggaaggggaggcggtgttaggagtcagcttcctcttggcactctttttttttcttgcttttctgctcctcctctgtgctgtccgcacagaggaggtggacagcacagagaagaaccttccagacagcactcttcctggaccggctcctggatgggtccccgctgccgcaggaggtggtgatgagcctgtccaagtgctactcctcctactgtgctgtccacctacctctgggttccgagctcga

SEQ ID NO: 659534 - DNA, 363 bp, Homo sapiens
  misc_feature (24)..(24): n is a, c, g, or t
gccgcaggatttaggcaaaagacnacctacgcacacgagaacatgcctctcgcaaaggatctccttcatccctctccagaagaggagaagaggaaacacaagaagaaacgcctggtgcagagccccaattcctacttcatggatgtgaaatgcccaggatgctataaaatcaccacggtctttagccatgcacaaacggtagttttgtgtgttggctgctccactgtcctctgccagcctacaggaggaaaagcaaggcttacagaaggatgttccttcaggaggaagcagcactaaaagcactctgagtcaagatgagtgggaaaccatctcaataaacacattttggataaaaaaaaaaaa

SEQ ID NO: 659535 - DNA, 147 bp, Homo sapiens
ggtcacgagcgcccagtacccctgaatttaagccagctgaaagtactccggaggaagcagagtttcacaacagcatcataatgcgaggtacagtccctttaccacagcgctctagatgacttggaggcgctcgttgccggcgtaccg

SEQ ID NO: 659536 - DNA, 545 bp, Homo sapiens
aattcgcggccgcgtcgacacggtgcgagaagacgacagaagcacacgagaacatgcctctcgcaaaggatctccttcatccctctccagaagaggagaagaggaaacacaagaagaaacgcctggtgcagagccccaattcctacttcatggatgtgaaatgcccaggatgctataaaatcaccacggtctttagccatgcacaaacggtagttttgtgtgttggctgctccactgtcctctgccagcctacaggaggaaaagcaaggcttacagaaggatgttccttcaggaggaagcagcactaaaagcactctgagtcaagatgagtgggaaaccatctcaataaacacattttggataaaaaaaaaaaagtcgacgcggccgcgaatttagtagtagtagtcgacccgggaattcgggacgggtactggaggggtgtccagttttcccaaaagggagccgtttaagctctggttaacacagggcaaacggtttcccggtggaaatttttatccctcccaaatttccacaaatatgggggt

SEQ ID NO: 659537 - DNA, 267 bp, Homo sapiens
atttgggggccccgccctttgggtgttttttttttggggcccctttccggcaaggttgccgggggttttttttttcccccccccccgttttcctttaaacgggcccccccctttaaagagggtttaaaaaaatgtttcttgggtaatggggttttttttggggattggttggggtaacccctggggttaattttaaaaaatagggggttggcccccccttgttggggtggtttccttgtttaaaaaaaaaaaaaccttggtttttga

SEQ ID NO: 659538 - DNA, 146 bp, Homo sapiens
aaaaaccccaaaaaggccccgggccccgggttttttggaaaccccttcccaaaatcccggtttgggggggggttccccccccccccccccatttttaaaagggtttttaaggggttaaaaaaaaggttttttttttttaaggggga

SEQ ID NO: 659539 - DNA, 968 bp, Homo sapiens
gttattttttgattaaaaggtttctagacttttgttgtttgtttgttttattaaggccggaagaaacatcagaatcgattgagggaccaggaaatggggcctctagggaagagaaggcattctgctagatggcttttaaaaatatttccgccagagtcacttgtctcattaacaacagtttttgtcttagaagtctctctgtgattttataaactagcatgattttgttatgaatgcatgctgctctggttctctaataagcccaacatgcatttgcatcatgtcggcaataagcactttttttgctgtgttaacaatgtcatcttcattgttgtgtgcctgtgttttgactgtgacctgtcacatgaggttgggtgtggaattttccacttgtggcatcgtgttggagctcaaaaagttttggattttggacccatttcggattctcggattcttctggattaggaattctcaacctgtgctatcagccaggaggtataaatgatgtctccttgtgggtttaaatataacttattacttaagaagttggcttgtcacttggtatggatcataatttatgcttcatgagcctctaccttatgattgtgctttagtcatcttttggcattggtgtgatgacaccaggtttccataaggaaagatcccattgtgtgggtatttctaaaagtaaagaactttttctaattttgcgcctttaatttttatcctttccttgaattagttccttcaatgatgttacacttctaccctatcctactgggacaaatgccccagactggggcacggcactacggttcttaccgtgattggctacccgtgtcgggttgccgcgagagggtatcccttcaatgtgcaaacgcggcttgatctgaacacttatcgacaacaaactatactgcacacaaagtgtacaaagggggctacaaaataccacgccatccaagtcg

SEQ ID NO: 659540 - DNA, 713 bp, Homo sapiens
gctgcggttgctaagtatcgcctgcggagtaactgcatagattctgtccgtgcgcgttgctgacggttgtgttccgtgccttcctcggcgggccggactggtctccagatatgctttgggttcgtctttcatttgctgcagggaacttccatgcctctaacactcatctgcagaagactgggacggctgaatgtcctctattcttgacagagcgtattatttggatgcctgatactctcatgttgatcttgaagaaactgggcgtgatcattaagtattgggtgaatgtgtagttgcccgcgtacatgggctgaaggaagtgttcaagcgagaaaagacgatggtagaggttattctatcagtgcttagaaatgggtatgtccgttgaacttgggaaccctgacaatggttggtgttggtcgctgtgtggaaaatgataagttaaattaaagggacatcgacgagtataggtgagggacggagtatggctcgcattatgtgtaccgattccgaggttcagtgaaaggagttgcttcgcttcgatgatttacagagtcgctcgttttgattgccgctatcggaaagagagagacgcggacttcaggttgtgtccctccagtgacgctgtgtaagcacaaggtgcgctcgtcgaatggaccacctctgtggatgggtcccttacgaactaccaagtgacgcgagaccccgaatga

SEQ ID NO: 659541 - DNA, 1496 bp, Homo sapiens
  misc_feature (107)..(107): n is a, c, g, or t
  misc_feature (249)..(249): n is a, c, g, or t
  misc_feature (256)..(256): n is a, c, g, or t
  misc_feature (288)..(288): n is a, c, g, or t
  misc_feature (621)..(621): n is a, c, g, or t
agcgaatcgattatcctgcttccgcacccacaaagcaagttaggaacgctgagtcacctatcatctactgagcagacaatgtaacttagacgtcgctatggcgccangcgactatccgacatccgatatcatatcgccgagcgcgctgatgctagggatcgatccgacgagtcaatcctctcatacgagtaaacgatccagcaatcctacgaatcagtaagtgctgactagtacgccgccatgctagtnttggtangactgaatcttatcgatgtaaggtacctagantaaccgcagggtctatcatctcagtcaagaggccttgtgaggcgaagcgtgggagcataaggtatcacacacgtgaagatagatcggttgctcctctcgcatgtagtggtccgtctatgtccctcggcatcaagagcagaatttactggcatatgcttggaactctcttgaaccacctcacatgcgtacatactgtaatcgtacacgtgctcttcgggggaatcttgtccgtgactaaggtgtggatgcgccacagcgcataatccaaggggataccaacgtgctatgtgcacatcaacgagtcttagcgcgcattccgcacattttatcccnaaagagcagacacttaccgtgcgcgcaaacccctcgttgtgtaaggacaccttctctgttcagtagctcatgatagccctagttcattttcattctctttttcacaatcaccataatgctctagggggtagctaacatccatattaccataaatacatataaaagagggccacacattacaacactattccaatccaaccaaaacacacaaatttcaatcccaaaatacatatacgaagacgcacacacatttgcgcacattaacccccaaaaaataacacaaaaaaaatgcacccacattcttatccaggtcctttgatcccgtggtcacaattaaaattcaccatgccaagttccctaactttcttacccttatttctcctaccccaaagtccctaaggactatgcttaggggcaattcagcgttaattaacctaaacttataacaatgaaccctggcaaagccttacaaaacaagcccaaccctttcctttcccgagaacccaccggcccggtgaaagaggaaagaggaaagaaacgccccccaagtgtacttaagttaacccaagaagcaagccccgtaaaattttccatcgaacggtcatggtattcccggagggggtcgacacccccctgtgagacaaaggagttgtacagatatattacccattagaagagtaccgtaaaaccaccaagggggggacgatattcacgggggacgcatataaattgctctccccgccgacgatagtatgttggtcgtcaagaccctatttagcggcagaacgtctcccgcggggagaaagactataacagtagagaccccacattattcgtagcgagaacacaatatcacgcgatataatcacggacac

SEQ ID NO: 659542 - DNA, 318 bp, Homo sapiens
cgcttcccatgggtagtgcccacaacgcttacatattgaaagtgttagccttttttccccagacttgttggcgtaggctacagagaagccttcaagctctgagggaacgggccctccttcctaaattttcctgtcctctttcagctcctgaccagttgcagtcactctagtcaatgacatgaattatagcttaagtggggaactagtaagtagggcttgctatactgtccctagatagtaaagtaacaccattataatgaatttagagagcataggtaatccatgtaactgcctagaaacaacactgtagtaaataat

SEQ ID NO: 659543 - DNA, 214 bp, Homo sapiens
ctggcgtcctcagtacacggagctgttccggatccacagaacagaacatgctcaggatcatctcgaagatcatgatcacagcgagcacgatggcggccctgcttatgaggtacagcttcccggagacgaggacatcgatcttctagatggcagtcctcctatgaagaggtatgctagatgcggttttttgtataccgggatacccgagctcgaa

SEQ ID NO: 659544 - DNA, 262 bp, Homo sapiens
gtccattccaccagactgggctaccctgagtgcggataagaacgatgggtggaacaagagcaacgccggagcccaggtgcccagaggactttcttccagcttctgcggtccttctttgtggagagcaaggtgacatacacggagataactctggctgtggtgcattgaacctacaagtgggctggggtaggtggttcaggccgtgtaagcccaggattttgggaggctgaggtgggaggatcctttgagcccaggagttgga

SEQ ID NO: 659545 - DNA, 1774 bp, Homo sapiens
  misc_feature (1492)..(1492): n is a, c, g, or t
  misc_feature (1774)..(1774): n is a, c, g, or t
cccacgcgtccgggcatggggcaggggcccagttcgtcagcagcagacactctgtgacagttttgtcaagtccctgctttgtgaagtaaatattctcagcgacaaaaaaagaaaaaaaacaaaaaaaaaaaaaaaaaacgggggggggggagaaaggaggttccccccgggggggccccgggtcagggggaccccacgcttctgctctgtggcccaacagcgggggccccccaatatcaggaggagagcagccgcgatttgtctatgcacgcgctgagcgaccggcgagacgcacagggcaaaaaaacagacgcaagcagcagggggcgacaaagcgtgggcacacacaggaagagcaacacggtggagaagaagaggaaccctcattcaacctgagcgtgagagaggcgagagcaccacaaaagaggtgggagcaaaccagacaaactaccacctccagagagggaacaactttacacagcacctcaccaaacaggggggaccacaaaattaatactaaaaacaatacaaaaaacaagagcgggtcaacaataacgggtgcgtgaatacacacacacctacgcagcacggagatcgatatatagaggtgaccgccggcgaccgcagtgacaggccggatgaagaaagaactaacttgtgcgcgccccaaccgcgcggagaggaacgaacagaccgacgagaaacgacaagacggagacgaccaccgctatatatatcattatcaacacaccgagactgggggagcgccgaccttaccacacgacgaacgaacattcagaacgaacggaccacatggagcatacaggatcgaccaacacaacacgacaacagacgcagcgagagagagaagagatgcaacgagggagaacgaaccgagcggagcaaggacgaccgcaacaggatacggcacgcacaagcaataaggaggtagggagagcgagagaaaggagagcagagaggtcgaggaccgagggagggtcagaagtgtagaatgagagagtgagactaagaccgtagagagagatagagggagggctgtacacagaagagcaggacagagagaggagagagaacgcagcagaacgagtgagaaggacagagaccgaaaggacaagagcacgacagcgaagaagaggagagcagaggagggaagcgcgaggaggagaggaggaagaaggagagcgaggaggaaggcaggggaggagatgagagaaggcgggcgaagagggaaggagggaggagcacgcgagggtggatgaagaggacaggcatgggtgaggatagcagattggagagaggcgacgaagcgcaagcggaggatggcggagacgcggacggaagcctgggggctgctcggagtatgccagcgcgatagagaacagagcggacaaggaagggaggggatgagcgaggcaagactcgaagtgacggatgagagccacggagcgagtgagctgcacaatgcgacatngaggtcagacgcgaggcgaggcgtgtagactagagcgagaatgaggacgacatcgaggatcgaagcgatcgtcaggaggagagagagacgtggagagagacgagcacagctcagtcggctcgtgagagcgagtgcgtgatggaactagcaaagaagaagagcgcagacgactagggcaacacaacggagcgacaggaaagagactgtcgagaaggatgagcggtgagcgagaagcaccaggacgagtgcgagaagagatcgagacggggagaacagatgagn

SEQ ID NO: 659546 - DNA, 109 bp, Homo sapiens
ggcgcgaattcactagtgattagagactgcgagaaggagcccaaacaatctacatatgaagtacaccctaagaccatcaattctaatctatcaacatatactaaataag

SEQ ID NO: 659547 - DNA, 175 bp, Homo sapiens
atcccccgtccgtcgaccgcttgctggacagcgttttttccacagttttcagtaccaacctgaagatgcttcttgaggagtcttgtcacttatccctaggtgcctctggcaggccccagtgttacagaagcagccggttcgcacatggatgttgtgaagaagcggacgacggacg

SEQ ID NO: 659548 - DNA, 446 bp, Homo sapiens
gtcggaccggtgtctatcgatgcacactaaccggtgtgaggtgtactcattgcagttttaattgcatttccctgatggttgtgatgttgcgtgttttctcatatacctgtaggccaattttttttttttagaaatctctactcaggtacttggcccattttttaattaggttatttgctttctggctatgggaagtggtctgagttccttatatatttgggatattaaccccttatgggacatatggttggcatatattttctcccattctacaggtggtctcctcattctgttgatggtttccttggctgtgtagaagctgtatagcgtgatataattccattggttggtttcgggtgttgttgcctgtgctttagaggtcacatccaaaaaattatggcccaaactaatgccacagagcttttcctctgtggcatcgataaaca

SEQ ID NO: 659549 - DNA, 806 bp, Homo sapiens
taaagaagtaagcctttatttcctggtttggcaaataaaacgggctaagtgggtggcttttgggtgattagtcaaagagaccaaatcccatatcctcgtcggattcctccgattcttcctgggttttcaaccttagcgggggcgtgcagcagcagcgaggagcagcgggtgggggcagcgagccacgaggggcagcagccacaaaggcagagtggatcagccaagaaggcctgaccttttcagcaaggtgggaagggtgtaaccgtctccacagacaaggccaggactcgttggtacccgctggatggatagaagggggtacggagtgcaccagctggggatagccaatcggcagacagacacgggcaacatgggggagcgccctccaggaagcgagaatgcagagttccctcggggatatcaagcacttcagggtggatagatgcgtgccatgggtcgaacaccggcgggatgaccagcccaagggagacgggggagcactgtgagcatgtcagcagcgtggtacgcgggccccacttgtctccagtcttgatcaagtggacatcagtcaggatccaagggttgccccgggagatcatacgggggataccctaaaagctggagaaagggaggtctctcagggcgcagaaaacaattgtctgggtgacagtgattcccatggggcagggcccaccagggaggaagcggccctattggcagcaagtggcctgtccaaggagcgcctgggaccaaagcaatcccggatagggagtccaaggggcccgagcgaaggcggcaggtccacc

SEQ ID NO: 659550 - DNA, 899 bp, Homo sapiens
cctcccgtggcggggggataaataaaacagcccttcttttgtgaccccccccctgtgcttgctggtgacgacccactcccacctcgtgtgcgttcccccttaatgaacaccctgggtctgatttttacctctcgcggcttttatatccattatctccgcgggtgcgattaatcatttttctccctgacgagacgacctcttgttgcctcccttgtgcgctctcttttttggtggcgactcccattaatggataccacacactttgtttgtgctcagacaaagcatgcacgcggtgtggtgtcgctcgcctctcgtcgatatcctccgcggaggattttgtttgtccgccccgcgcggcgtccctccctctctctgttctgtacacacacacccgcggttggtttgttttccgtgctcgtcccgagcgggggtgcttctattcaccctcccggggcgtcgtcccctgattgttttgtgtatttgggtgcgccccccgcgccccccccatattttgttctgccgcgccgcgcggtttattaccaaaaatttttgttggcgggttggtgttttttgttcctccccctcgcaccccccgtcgtgagggttttctttgagcttctccctctctctcccatacattgtgcgcggcgcgtttttccggcggcgcaacacaattttttttgtggcagcccacgagtttctctggcggcttctctcgctattttgggtgctgcatcttctcttcacctgatggtggtctgtcccccccctcggatgttttctctctgtaccaccccccacaaccctttgtggttttaaccccccccccctattcccctttttagaaaagggggttaattttttttttttttccccttttttgggggggggggtgttta

SEQ ID NO: 659551 - DNA, 300 bp, Homo sapiens
ttgaaatagggcccgtatttaccctatagcattcccgttaccccctctagagccaaaaaaagggaaaggttaaaaaaaaaaaaaaaaacaaaaaacaaaaacccggctgagatggcggcgcccggaatccggggaagcggctgcaaagggtgccgccgcccaaggcgaagaagggccggcctgagcgaaagaaccgcccccagcaggagcaccaccacggttaagcaaagaaacccaaaccccgcccggaaaggcagccgaaccatggagactaccagtccatcgaacgctaatgcctcc

SEQ ID NO: 659552 - DNA, 446 bp, Homo sapiens
gatgcaatatttgagagagggacttttgctgaggtttctctgaggtttttttgatgctttataggaactattttttaaaaaaagccatttccacccaaggacacagtggatgtgtttccctgactccagcagggcaaggattgtagccgagaggttgtgtggctgggctctggtgcctcttcctggccagacactttcctcctgattccttggcaccttgtctttctgtctgttacctgtctcctgcctgccatctgaatctttgcagccactctgacttccatcttgggctagacacccttgcctgccccttcttctgcctaagaatgccctttaggctgggcatggtgctaagctgtaaccccagcactttggaaggcggaacgggcagaaacctaggcaaggattcggacccaacctgacctaaatgggaaactcgccttagt

SEQ ID NO: 659553 - DNA, 345 bp, Homo sapiens
aggtatgaacgattctatcgagtggcagtgtcatcgagcagtatatatctagcgcacagatatgcatttcagaatattagccatttaccagcgtttggtaatgttacgcagttctggagcttgatagctgtggatcatttcctgtagtgtgtaaatctgttgccctctgcccgctttgatacagtaaactttcgcaggaatgggcaacctgagagctgttaactttcatgctacagaaagctgctggccattctcttgcattgcgacaagaattgttacctgtcattttgcactgtagattgctggcagatgctttacagtcaatagtgttgcagtgggcttccg

SEQ ID NO: 659554 - DNA, 129 bp, Homo sapiens
tgccgagtgtgcccagactggtcatgaattcctgagctcaaacgatctatctgcctcggccgtctcaaagacgctgggattaccgagtgtgagtcactacgacctggccttgtggattaaactaatatt

SEQ ID NO: 659555 - DNA, 185 bp, Homo sapiens
gaatacatctctgctatttaatattgtacttgaagtcctagccagaataattaagcaagaaaaaataaaatccaaattagaaatattttccgatgaaatgtttctatataaagtcccaaagtatacacacaaaacaatgaaatctaataattcagcaaagattcataataaatttagggttgatg

SEQ ID NO: 659556 - DNA, 388 bp, Homo sapiens
cctaaagagacggcgaagtgacgattcaggccgaagtatcatgtggactctctcggacatcgccatgctggatgttgcccaagttggtcatatcgaccatgagtatgaggtactgaggcagctgctggtcgcagcagcttatggcgccagcacagattcagtacatcatccgcaaagcccaggaagatcatgcagcagatggcaaggagggcacctgtcatggccacaaattcatggtgtgggaatgccttacactgctcatctgctgtcggctggtatcgtcgaggtcctgaccactgaggcgcgcagtcttcacgtggcccctgaaggccgggatgagggtgactgtgtccataattcccagcatcgagactatccaactttgatc

SEQ ID NO: 659557 - DNA, 1025 bp, Homo sapiens
gcgtgggctccgagatcgagcgcatgggcctggtcatggaccgcatgggctccgtggagcgcatgggctccggcattgagcgcatgggcccgctgggcctcgaccacatggcctccagcattgagcgcatgggccagaccatggagcgcattggctctggcgtggagcgcatgggtgccggcatgggcttcggccttgagcgcatggccgctcccatcgaccgtgtgggccagaccattgagcgcatgggctctggcgtggagcgcatgggccctgccatcgagcgcatgggccctgagcatggagcgcatggtgtcgccgcgaggtatgggagctgggctgtgagcgcatgtggcccgccgatggtagtcagtcagtggtgcgaccggcgcgtgcagcacatcatggccaacaataagtcatgcgagactggatgggccatggagcgcatgggcaccaacagactcgcagcgcatgggcctggagcgcattgggtgccaacagcctcagagcgcatgggccccgacatgggcccggccctgggcgctggcattgagcgcatgggcctggccatgggctggcggtggcaggtgccagctttgaccgtgccatcgagatggagcgtggcaccttcggaggacgctacgaaggtacctagggtggagctggacggccatgctcctggggtggacaggaaggactgccagatatatggaaacatctgacatacgattttcacatggaaccatgctaccggaccaattccacgaattgagccacgataagcaagccgactcaaactgccgaagggaaagccccaagggggctgtgggatcgcacaagcaccggctcccacaaggtgcccaaaaagcacgccagcatgaagaacgtccatcaaagtagaggccgaaaaacattacgattgactgaataaaacccaacacaaagcattatgacactaacaagccaccgactagatatccatcacacaatcaatgcgggagatacacgagcacacacaccaa

SEQ ID NO: 659558 - DNA, 478 bp, Homo sapiens
ggtaacgcagtaagcactgtcaactcttactggtatttcaatttaactcctcacaagaaccgtggagaggtcggaatcaacatatagggatggatgagatacagagccccagaaaacagtaatgtcacctatgagttaaacttctgaaaagtaaaccggcatatgtatttaaatattgcttcaaaaagcgaacctattagaccggataacatgtacctgacggtaggaaaccaacagaagaaaaggtgtcaagaaacagggcatgttctaacacaagggaggtgctctacagtcagggaacattcagattacatcaaggagcatctcagttgctccttccaccaagcaacccccaccagatgatctgctggggatgctggtacaagttgtgggactgcatgctactgtctagagcttgtctcaatggatctagaacttcatcgccctctgatcgccgatcacctctgagacccaccag

SEQ ID NO: 659559 - DNA, 175 bp, Homo sapiens
  misc_feature (20)..(20): n is a, c, g, or t
cagttttacgaagtttcaantagcagcaaagcacttaggtgacttgggtgctgttaaagatattcagttttataagggaagcaaagcatgaaagttcagaaaatttgcagccggacagtgcaatagaaaagaaaatcccggttgagtgtggtggctcatgcctgtaatcctagca

SEQ ID NO: 659560 - DNA, 247 bp, Homo sapiens
ctatgactcttctccagctgccttttgagggagggacatggaagtatgacagagggtagaggatgggcctaaggcctttagatgcccgtctcaccttaccattcttgagaatccttcgagccttttctcctcctcaaccacaagctttgatatcctggagggagcctttctctgacgaataactggccttactgtcccaccactgcatctcccattgctttgcctcagagagcccctagccctttaa

SEQ ID NO: 659561 - DNA, 133 bp, Homo sapiens
caacggcgcgtcgcttacattaaggaacacaagtctggcgcggtcgccaggctagagctgaggggacgatctggagtcactacaacctccacctccggtgttcaagcacttctccggcctcagcctcctaagt

SEQ ID NO: 659562 - DNA, 553 bp, Homo sapiens
ggttttactcagtttttccaggtttggtttttgtttcttttgggtctgtaagtgatttcttcttgtcttacccttatccatattatggctggggggcagagaaaagagcctctgattcttatacacacccctcccaagggagagggtcttttcttataaaagacccggcgcgcccccgctcacaagaacaaagcagcccgttaataaagaaaaagaaacaacacgcggggagagtggccgtccacccacattgttttaaacactcatggaaccgcactcctgatctgtcaccagttacgagctccctcattaccctaaacaaggctcgctgaacatcgaaaacagagaaaatttttatatataccgatggcacaagggagaatggcaataaaaactgcacctcgggaaaaacacgttgaaaggatgtacacactatactgggcctaaaagctcagtgccacaggtatgttacgtgggcctttaatacataggcggaacttgacactaacaatttgcagactcagggaacaggcttttgtctacaataactatc

SEQ ID NO: 659563 - DNA, 402 bp, Homo sapiens
agtgacgaccttaatggtcttcatggctctcatctttaacatggggtagcctatgactcctctaggaacagcttgttactgacttttcatgtattatctcgattgcgtcttccagtgacggctaagtgggtcctggctctgttgggcgtgattcctcccagagggatgggcagcaggaacctgtcgtccgtggtacctgccgggttccaaccttggtctgtctgactccagcctcccgacagtgtgagcgtccgtggtacctgccgggttccaatcttggtctgtctgagtccagccccgccacagtgtgaccttcggtggtacctgccaggatttcaatcgttggtctatcttatacaagccacctgaacgcgttgacgtttggagatgccagccggtttc

SEQ ID NO: 659564 - DNA, 130 bp, Homo sapiens
ccgtagtactctgcttaaatcttgtcgttctgtttcccatatctaggtccattagaagccccttcaatcccatcgatcccttttcccttcaaatcaaggcgactccgagatagctttcttggctggcggg

SEQ ID NO: 659565 - DNA, 868 bp, Homo sapiens
  misc_feature (243)..(243): n is a, c, g, or t
atggctccttcctccagctgggggactcttataggggactggggtagagacataacgagtgcccgtaggagggcgtcagagattgtgctgactaggctcagatccaagatagcgttggcgttctatgcaatttcccctatggggacttgatcgtggtgctcctatcgtgtccatcgttctcttgtgtttctctttcttcttcttggatcagtgcgtacgatcctccttctcccttggttgacncggagtggggccgcttcctcgttcgtgccgtggcactctgtgcaggctcgccgctgtctcgtcgttttgctgtgcgtgttctgcagcgccttgtgtgtgttgtctgtgtcgttcctttgcggagacgcttctctgtcgagatggtaacgcctattgtggggacttatatgcgggtttccctatgtcctcactctgtgtgcacgcggagctctattcttctatgtacggtcagtgtctttaccacgttgagagacataaccgaggcgtttctctgccacccagtgtgtcgtttcggggccacacggatatgtgcgctttatcggatctctcatctctgtgtatcctctgcttcttgttgtccccacacgcacactgctgtcgtggggccgctactctcggcgatagggttgcgtcggtcggggggggatatctcccaagtggaggtggtttcgagcgggcgcaagtctttggcgctccctcgtgtggcccttggacgcccctgtgtgtgttgtctctttctcgtgccatagattggaagctgctactccggggccacccgggggggtggtagttgtttggctttgttgaggttctctctcctctcttcgcccgtgtggtgttatcg

SEQ ID NO: 659566 - DNA, 340 bp, Homo sapiens
tgcgaggagatctagaggatcccacggggatttgtgccgtatccagcaagataatacacagcagactatccaattcacatgaagcagcagatgcaactctaactattcatctccaagatggaatggtcacaaacacaagcctcactagctcaactaaatatcatccccaatcacccagtgacctctaagtatcactagtggcatgccaaaataatttctctgaaatgcctcaacaaagcacaaacccttaacttatggagggaagagacaaccacaaatgtaaagactccattaccttctgtggcaaatgcttggcaagtaaatgcttcatttctcttat

SEQ ID NO: 659567 - DNA, 873 bp, Homo sapiens
tgcgcttggttaatttttgtattgtagtagagacaggatttcaccatgttaggccaggatggtctcgatctcctgacctcgtgatccgcccgcctcggccttcccaacgtgctaggattacaggcatgagccaccgcgcccggccgggacttttctttttcttctgaggcccccattcagtccgaggaatgtagccttcattcagcgcaacgtactgtttgtgttctcatggtgctctcagacctccagccaggtggtggagagcgagcactgccagccacttcagtgcagggtgtgactgagccgcaaggacagcggggtcaggtgtccgggcgccaggtagttctcagaacttggtacatgtcaacttgtccagcccaactgcagcccaggacagcctgtccctgttcccattctacagacaagacgcggaggcagccgggagggtgaccaaggggagctgttaaccccagatgtctggtgcagggtccaaggatgtgaccacatgaaacagaacacatagaggccgaggtggcaaacctgttctgtggcagggacaagccggggacccgagggtgagaaaggtcctggccccaaatgcagcttgggcctcctgactgtagcacagggggaccagcctccccactgaggcttggtctctagagggtctgcagagatgctggcacctcttgttgtgggcagctttgaatgctgacctccataagatggggcctgggggccagtacaggccctgcatcaggtgccctccaacaaggccctctgcaaaaggcttatgctggttgaccagcccctgagagcaccacttcaagtgtcggggcagttgggaagacaaccacttttccaaaatgtaac

SEQ ID NO: 659568 - DNA, 575 bp, Homo sapiens
  misc_feature (271)..(271): n is a, c, g, or t
  misc_feature (350)..(350): n is a, c, g, or t
  misc_feature (385)..(385): n is a, c, g, or t
  misc_feature (471)..(471): n is a, c, g, or t
  misc_feature (483)..(483): n is a, c, g, or t
  misc_feature (487)..(488): n is a, c, g, or t
  misc_feature (525)..(525): n is a, c, g, or t
  misc_feature (552)..(552): n is a, c, g, or t
ggggcacaggcagacccctccccccaccacacacacacactgcttatcctctgaaagctatgtggccttcataaaaatattaacagttcttttacagtaatgattttcccctatgaggctccccagtgaggaggctgtaaatgacactgaccaccagcagccctgcagatcaaggctgttctcttctcggccagcccagaaccagcctctgctcgctccctccctgaggactcctgtctctgacctctgcacacatgctgtgatttgtctncacctcacaccattccccatcctcacctttcagaactcactggcagtgtcccccaataccttccacctctctccagaanttaccttcccatctcaatgtaagggaacttgcttnttccctcagagatctgctgtctctgctgcaagtaatagctagttttcatgcattttgttctgtctgactttaggttgttgcattgntctcccaacctncttnnacccatggcctggaggcagaattatatacctgtgaanttgcttttctttctagttcctctcctncaaaacctcagtccttctggaaa

SEQ ID NO: 659569 - DNA, 269 bp, Homo sapiens
actggacaacgcactcaatggaatcagctccctctgagccccacgccagcgtggccacctcagatctctagctctcctctcctctaccattctctctatggggaggggagcaggcaggaggagcagaaattgccaacattgttacagccaggtatgggagcagcctagggagagcccccatcatgcccaccacccactctgggactgggttcatccttgagctatccccttccaccctccttggctggttaataaattctgaacttgga

SEQ ID NO: 659570 - DNA, 158 bp, Homo sapiens
ccaatagcagacacagcccgtgcaggtgatgtgaaggcaccctcggatttctccagcctgtgttgtaacctctgcgtcctcaagcacacacctggcaagagtcttcttccctttgaaggcgaatcatcattgttgctattgacacttctcaaactagg

SEQ ID NO: 659571 - DNA, 299 bp, Homo sapiens
gtgccacagtctgcgccaacaataaccatgtgatgcccacttacaaatgccttgccatatcaactaagtctgaattcttgtcatctttacatccttttcatattcgaaagaactatcacctatgtgtataatattgatctacatggcagtcacagatgaggacactccgcgcacagagtttgacagcttgccgagagccatgaagctgctcctaggcagtggcgtctccacacttgtggctaagtgctgagccactgacgcatacaatcaccctatctgagatagtagtacaatggcgt

SEQ ID NO: 659572 - DNA, 1521 bp, Homo sapiens
  misc_feature (445)..(445): n is a, c, g, or t
  misc_feature (464)..(464): n is a, c, g, or t
ggagagccttgtgctgagtccgatgcgccgtcccgtccagacggcgacgtcagctcgagcattggtatagatgatcatcgcctcggtctctgtcagtcagagatccggcgtcctggtgcatgtgccaagggctctggcttcggcggaggcagacgcatcgcgcgcgccggtgtctgctctttcccacttcgctatcggtgcggcgcgccgccaacggagggctagtgactgtggagtgcgttgggcgattaggagtcgagaatatcgcgaattcgcttgagtcgtagcgtgagagccgaaggacgcaagagacgaaggatagatcggctcatccctctacacacgtaaacacgctactccgcaagtcacgaggcactcgtgatatcacgatcactcgagagcatgagagcactggacaatagagacagcataggatcatccggcnaccatatcatcattacatnacagacatgcagttgtgcggttgtcgcggtacgcgcagcagagcagcgatcgcctgtagcgtagctggaacgccgcaaggcctgcacactgcaacacggccaagagccgaaccggacaggatggaacgatagacatccatgagatcatgagtgaccgtatgcacacttaccacacaagcccatagtcacattgtggctgtatcgctaatgccaggggctagtagcttatgtccttggttactggcgtctggtgcccgttagcgaattcggcagtacagggaatcggaacgttccagggagtggatgagggggtacaaacctaattagcttggatgccttacacgtcatagcggaaaggtggggtaaattgccccctaaatcgccaaattgcctatccccttgtagggtacctgggagcctgggggccgtgggaccacggagaaccttggaaataatgaatataacccatacaatagacatgcatccctgtcaaccggaggcctgccgcggctatactcaagccattcacaccaggccaccgagggccgggagaccagtggaaaaccggggacagtttaccatgtaacaagggacagaaggccatgaggacaaaacgcactggccactttccacatccacggccatgaggacaggtgccaacgaggaaagagtacccagtcactcgttccgggagaaagaaaaaaaaatgagcctagcgtgcaaagcggcatgcccaaatgcccaatggggaacaggagcggacaaccaagaccgaaagggaacaaacaaagcatccggactgggacatgatactcggcagtcaccacacgaacaatcagtcacaccacaaagtgatgggtgacagcgaacaaaacgaaacatacacacaatattgatgcgagcgaacacacacgggcagaccaaaacaagaaaatacgtcagaaaaaaaaaatcaaactcgcgaaacaggagggcgtgaacagagccacacaagtagaaaagaaaatacaacagtgatcggtcaacacacatatatttttcctgatagttattcgcc

SEQ ID NO: 659573 - DNA, 333 bp, Homo sapiens
aaagcagtaattctggggtttaacacggtgtccctgtgttttgactgtgtagcgggaggcaaagacagtatcatgctcacacctgtactcccagccacatcgggaggccgaagtgaacggatcacttgaggtcaagagttcccgatcagcctggccaacatggcgaaatcccgtctctactaaaaatacaaaaattagctgggtatggtgccaggtgcctgtaatcctagctactaggtaggctgcagcagaagaattgcttgaacccaggaggcagaggttgcagtgaactgcgattgtgccactgtactccaggctgggtgacacagcgag

SEQ ID NO: 659574 - DNA, 261 bp, Homo sapiens
  misc_feature (248)..(248): n is a, c, g, or t
gactctacaggatctcaccgtcatatgtcacacatccaatcaacggacataacattagcacgtgtaacatagtaacccacttaaaatttagaataaattaggaaatttcaatctataagtgtcaaacaacaaatgagttataatatttttctaataagaaaaatatcacctgggaaactatggagatactaacatcctatgatctaggctggccacccattttgagagaccaccacgagatctcaagngcatagagactac

SEQ ID NO: 659575 - DNA, 121 bp, Homo sapiens
tgggcgatctagaggatcccaaatgcaataaaattatgaactcgtgatcatgtggaggctgtcttcctcatgctgtatatttacattctcacctcatccttgcaatttctcatccttggga

SEQ ID NO: 659576 - DNA, 374 bp, Homo sapiens
  misc_feature (54)..(54): n is a, c, g, or t
  misc_feature (167)..(167): n is a, c, g, or t
gacagcggttgcacgaagcgctcatgggccaggcgcaacagggcgagcaccagngccggcaccaagacatcgatcaacacgaccgaagccggcgtctgccgcgcatccgagcgcaactgcgcacagcgcaactcggcgttgtcaagcaaggcatcgcgcaaggcgangatgctgttcattggcggcacgaacttcgcggcgaagtcagccggagtcatgccaaaccggccatcgtcatgccccgtggacaggacagactgcaccagcgcggcagcatgcacgaagtagtcctgttccatggcggcatggacctagacgagacggtcggtctgctccagcaggctcacgcgcaaggacagcagatggcgcagctc

SEQ ID NO: 659577 - DNA, 820 bp, Homo sapiens
  misc_feature (284)..(284): n is a, c, g, or t
  misc_feature (301)..(301): n is a, c, g, or t
  misc_feature (343)..(343): n is a, c, g, or t
  misc_feature (388)..(388): n is a, c, g, or t
  misc_feature (392)..(392): n is a, c, g, or t
  misc_feature (399)..(399): n is a, c, g, or t
  misc_feature (413)..(414): n is a, c, g, or t
aattcgcggccgcgtcgacgcgagaagacgacagaaggggggctcactgagaaccatcccggtaacccgatcaccgctggtcaccatgaaccacattgtgcaaaccttctctcctgtcaacagcggccagcctcccaactacgagatgctcaaggaggagcaggaagtggctatgctgggggcgcccacaaccctgctcccccgatgtccaccgtgatccacatccgcagcgagacctccgtgcctgaccatgtcgtctggtccctgttcaacaccctcttcantgaacaacctgctgccntgggcttcatagcattcgcctactccgtgaagtctagggacnaggaagatggttggcgacgtgaaccggggcccaaggcttatgctncacngccgtgnctgcatctgggccnngatttgggcatcttcatgaccttctgctcatcatcatcccagtgtggtcgtccaggcccagcgataggatcaggaggcatcattggaggccaggacgctctgcccgtgactgtatccacgtacttctatcttacaattcctctgcctgcccccaagaggcaaggagctctgcccttgaccttgttatccagtactccaccttccattactcgccctgtccccacagcgagtcctgcatcagcccttatcctcacacgctttctacaaatggctcaatacgtgttcatgtctgccaaacaacacacgagacaacacaacaagttggcgcgcccccaaacatttcatcacactgtggccgggcagatgttgcgccgtcagcgctaagaacgcgcaaggggttcaaaac

SEQ ID NO: 659578 - DNA, 267 bp, Homo sapiens
ttttaaaaaaaaaacccccccagaagggtggggggctttggcctgtgggttaatttaacccccccttttgtttttttttccgccccttgtttccccccccgggggccgggaacaccccttttgcaaaggggggggttttgggtttcttttaagcccccccttttttttcccccctttggttgcggcgggcggcaaaaaaattttgttccctcccctgggggccccctttttttttttccaataaagggtttggggggggggggttta

SEQ ID NO: 659579 - DNA, 257 bp, Homo sapiens
cagaacaacgccataagatctcctttccaagaagtagccccttttccccccatgcctgccccttcccctgttttggggccccccctttcccccttgggtcagccccctaaaggtaagtccccccttgggggcctttttggaaccgtgtgtgagtgagtggtccccccccaacattgtacccaaagtctgtccccaaacattgcccctggcgctgttaggccggaattaaaatggctttttgaggtttggtttttcca

SEQ ID NO: 659580 - DNA, 338 bp, Homo sapiens
gaagatcagagttttgttttttttttaattcgttctatttcagtagctttagaggggtagaaatggtttttggttacatggatgaactgtatagtggggaagcttgtgcttttagtgtacctgtcacccaaatagtatacattgtacccagtacccttctgagtctctagggtcctccaataccactctgtgcctctgcatacccatagcttagctcccacttataagtgagaacatgctgtatttagttttccattcttgagttacttcacttaggataatggcctccagttccacccaagttggctacaaaggacatttcattcctttttatggtt

SEQ ID NO: 659581 - DNA, 1572 bp, Homo sapiens
  misc_feature (1254)..(1254): n is a, c, g, or t
cactactttttgtggtgtgggagtgttgttgcctcactatcacccacgcggtgtgttgtgtgctcgtcgttgtgtgttgatatctctctggctgcatcactacccgggcggcgcatgctattatttgttgtggggggtctcgttttctctgtgtgagggggtgactacctcacctatattagtttcggtggggcagtgggtttgtttttttttgagatcacgccaacaccaccaccacaagaatggtgcgccctctttgagatccaacgctgggtgtttatatatgtgttgactcttgtggtgattgattattacctgtggaggttgctggctgtgcgattggttgtgggcaccacaccatcggcgggggggggtgtttaactaccaaaccaccgcacacgcccaccatgcgggtgggttggtttactcaccccgctcagtattagttgtgggtgttgcgctttcttttttatcctcgggggaggagaacaatgagggtgttggagacccccgcactacttcgtcggcgttgtgtggcgctccctctgtgagccaccacactgtgttgggtgttttgataaggtgcaggccttcgtgggagacaccaacgacagggggggtaccgaaaaggacccccccgcgcgtttgtttgctgtgtttttttcccccccgagccgtggtgttgtggtcacgaccgaccgctgtccccaccactggtggggaggtttatcatgattagggggtggttactaccaccgtgtaattacatcccctcttgttagagttctgccccccatcagggtgtgtgtaaaaatggaccccgctcggcgtcgtttgtatggtgggtccccccaccgtgtgtgtgtctgttggcgtgtgtggtatcgctgagagtgagtccccgctgctcacaccccccgtgtgggggggcccagcagcacagtgtttcttctcacgccgtgggctgctctcctcttctccatatatatgtgtgtggagtaggccatattttgtgcactttgagactctttcccccccaccacaagaaatgtttatcttagggggtgtgtaataacacacacacactttgctcctcacacacaccgcccaacactctctctattatctctttctctctatagagagagacaccctctctccacaagtgtgtatcacactttccgcgcacaccccgcacaccacaggtgtgtgtcccccccgtagagagagagagagttcacacccctctctctntgagagagtctctcactcacacaggcacagaatgttgcgcaccgccacaggggcccccgcggacgccccctgtgcacagagggtggcgggttttctcactgaggggagggggccccacaaccctctgttgggcggaccttccctcgaggcctcgtttgagggggccaccccccttgtgcacattcacggcttaggcccctcgggccgggagtgccaccccctgctcctttcgcgagagaacttccctctacccctccctggtcccctggctttagactcacccccttttccccacattaaaacccttttgcccaccca

SEQ ID NO: 659582 - DNA, 289 bp, Homo sapiens
ataagaatgcgcgctacaatgctcagtgccaggagacctatcctcgttactcaagccctgcacccccgagaccatagcaaaggccacatctaagaacgggaacgcaatggacttcacgccatgccttgatgcccttgagcccctcgtgtcacattgggcctggcccacgccctccctctcccaggcccgatatgtgacccaccagtgccttctgtctgctcgttagctttcatccatcatgccctggctttgtccctctcactccccagccccaccccgtcgggtggag

SEQ ID NO: 659583 - DNA, 385 bp, Homo sapiens
  misc_feature (197)..(197): n is a, c, g, or t
  misc_feature (235)..(235): n is a, c, g, or t
  misc_feature (256)..(256): n is a, c, g, or t
  misc_feature (283)..(283): n is a, c, g, or t
gatggtcacagtggctcatgctgtaatcccggccctttggaggccgaggcgggaggatcacttgagcacgggagttcgagaccagcctgggcaacacggtaggaccccatctctacaaaaaaaattaaaaagttgggcaggtgtggtggtatgtgcctgtggttccacctgctcgggaggctgaggtgggaggattnggcccaggaggtcgaggctgcagtgagctatgatcgtnccacttcacttccagcctggncgacatagcaagaacctctctcaaganaatataaaataagccttcatttatgtaatgatcaaaataagcctaatatgaaatgaaaatgagtgaaaactgagtgcaaatgttatgctaacagagagctga

SEQ ID NO: 659584 - DNA, 200 bp, Homo sapiens
tatagaggatccgatcaggcgaataatgtggaatagggagctgtctaagccatcgagtcggaggcttcattcactgatttcccctattctcgaggctacaccctagcacgaaagctacgccaaaatccatatcactatcatattcatctgggtaaatctaactaacttcccacagtctcgccggatgggtaccgaggctc

SEQ ID NO: 659585 - DNA, 298 bp, Homo sapiens
ctcatcacattgagagtagttcccataggttcctagagttatagtcctttagtgctctgtgttgatatagatcgatcacacttagattagtatcttcaattggggccccagtattttaacagaaattttgactaaacagatcaactctaaaggaagtagacccattcttcaacactcgctcactctggtgtcaccttggttatgataccctcctctacttactatacctttgttagtgttgtcattctctgctttcaatgtgtctcttatctccttctcctgccgagtccgctgcatt

SEQ ID NO: 659586 - DNA, 397 bp, Homo sapiens
  misc_feature (342)..(342): n is a, c, g, or t
ttcaaccactgaggcagtgaaaccaacacagctggtttctcttaaacacatacatgttcatgctcattataaaaaggcacacaccagagagaacatatgaaagcacaatggtcttttatctcgagaataaaagagctggtatatttgtacatgtgtgaaagaaagtctgtctgtggttatttcctgaacattgtttgtaatcacaagagaagaaaactgcccagatgcccatcaggagggactggcttgatggcattatgaagtatccattccacggaatacctagcaccacgaaaaaggaatgatgtggtactttatgaactgatatagaatttctccccnaaaacaccactaaataaatgtgcagaacagtatatagtatactgctacttgtgtt

SEQ ID NO: 659587 - DNA, 577 bp, Homo sapiens
ccatcaccaccgcggatctagggttccagcaccagccacgcacgctcctacaagaggaccttgggcacttcgccccaatagttacaaccaagaggggagtgggggtgaccatgctcccactctcctggctgcacggtgccagacacgctgcatggagcaaagcggagaaagcagctccagcacagggcccttgtgcccccaggcagaaggcatgacccagccacaagagtaagtcctgacacctccacagctcccagtcggcgggtgcccctccctccccacggagacatagggcggggcagatctaggcgccgagactcccagccatacccgacagcgggctttccctagcacctcctcattgccaaggaggcggaaacccggggcctgggcggggtgcagggggggacggccaaggggagtggcatcacggatcagtacggcccctccggccaaccggatcccaagaaggcggaggaactcagacttcacgccccctccctaaagcgccctgaatctacacgcgggagacccccccctacccctccccgaccccagcaggccagagcgcggccgc

SEQ ID NO: 659588 - DNA, 348 bp, Homo sapiens
aagttaagggttttaaggaaaaaaaaacccgggggtttcccttatcctaaaggtgccggtgaaagaaaaccccgggttgggggggggggtcctaaaaaaattaaagcgggttttccccgggtttttaagcccctggttcgggttttttgattcaagttttgggcccatcttttttttggccctttcccatttttccccggggggttttgggggggccgaatttcccttcgggggttgggccaacgtcttaaaaagccctttgggatttttttaattcccttttttggggttttttagggccaaggggggttttttttttttttttttacccttttttttggcccccca

SEQ ID NO: 659589 - DNA, 683 bp, Homo sapiens
tgcaccagccatttttttccattccattccattccacccgggttgattccattccattccattccattccattccattccactagggtggattccattgcattccattcctatccattccattcctttccattccattccactggggttgattccactccatttcattcctttccatttcattccattccattactctcgggttgattcaattccgttctattccatgccattccattccattcctttgtattccattccattacattccattatggttaattctccattctattccattgctttccattccattccattccactcgagctgattcaattccattctattccattctattccattccattccattccattccattccattccactcgggttcactccattccattccattccattccattccattccattccattccattccagttgattcaattccattctattacatgtcattccattctattccattactttccattacattccattccattctattccagattattcaattccatactattccattccattccattccagtccagtccattccattccatttcattccattgcaatggagttcctttcattccattctattccattccattgaattccatcccgtccatcctccattcgtttgtttctt

SEQ ID NO: 659590 - DNA, 146 bp, Homo sapiens
accactccaagcaacatttattgagggtggcgggagccgcgctggacaggggtcggggctgccctcggcgtccagacgcttgtctttatggaacacgtatgtacaggcacggggcgtgatggtttgagacgctagctggggactgc

SEQ ID NO: 659591 - DNA, 154 bp, Homo sapiens
gttttttttccctttttgttgggggggcccccccccacctcggggggtcccccccccccggttgttttttccccccccccccccccccccgggggggggggctttcttccttttttgcccggggggtcctttctttttttttgggggcccaaca

SEQ ID NO: 659592 - DNA, 119 bp, Homo sapiens
  misc_feature (1)..(1): n is a, c, g, or t
  misc_feature (111)..(111): n is a, c, g, or t
  misc_feature (117)..(117): n is a, c, g, or t
nttttaccctttggagccgaggtggtggccaagttcctccacaagcacgacttggacctcatctgccgagcacaccaggtagtagaagacggctacgagttctttgccaancggcanta

SEQ ID NO: 659593 - DNA, 858 bp, Homo sapiens
  misc_feature (220)..(220): n is a, c, g, or t
  misc_feature (415)..(415): n is a, c, g, or t
  misc_feature (459)..(459): n is a, c, g, or t
gctcctcctcctcctcctcctcctgggccgggctgatcccctccccgctgccgcctcctcctgtggctgggcccgcggttgtctcagtcccctccgcggagccgttcctgctcgccgccggcgcgcgcctcctacaatcatccgtcgtgcaccataaggcggcacaaggcaccaagatgtaccaacgcgagtggtcatgccgagaagccagtcacgccgnggagctgggtacacagcctcaggacacgcagctgaaatgcacagctagaagggtgggcttatcacaaagtacgagtctacaacaaagacctgctaagagccattatgtgccccccgatgcagagatataacgtacgtgtgggtcttagtgctgcccatgcttaataagacaagtggatcgcgtctaattacccgngagaaattttcaatccttgggccttctacatcaatgtgcccctnctctcgagtgtgcacttaccagtgtggatatatatacggacacctctgtatgaccttcgtattgaccaaaagatttacggagaactgtggaagacaaggaatgtttgaacgcatgtctctgcagacagcactgaagatgaacaccagtattgaaatgcattgtgccttatacagctaaagccatggaaagccataaggatgagttttaccattattcctgtacttggtttggagcctctgagtgagtcaaaagaacaggaaattcggaaaaactcttcagtaaatatctagcggatctagtaatctctttggggatcttctgatttctgcattggggtcaacggtccgttacagtactatgatgaatccagggggagattatagatccttgactctaca

SEQ ID NO: 659594 - DNA, 172 bp, Homo sapiens
gggttagctgtgggcgaagtgcgcgaagagctcttcgtcgcttagtccgagtccggggtgcggtgtgggcgggagggaagaggacgcgggtgagggcttggccgtcggcggctgtgaggagtgggcctgggtctgcgagtgagagcggtggtgttggtgctgatgctgggcg

SEQ ID NO: 659595 - DNA, 84 bp, Homo sapiens
agcggagttctgtgtcgctaggcttctgcccggccgccgccgcacataagctgcgaggaggagctttacgacttcccggtcttc

SEQ ID NO: 659596 - DNA, 1246 bp, Homo sapiens
  misc_feature (41)..(41): n is a, c, g, or t
  misc_feature (216)..(216): n is a, c, g, or t
  misc_feature (224)..(224): n is a, c, g, or t
  misc_feature (690)..(690): n is a, c, g, or t
  misc_feature (733)..(733): n is a, c, g, or t
  misc_feature (766)..(766): n is a, c, g, or t
  misc_feature (861)..(861): n is a, c, g, or t
  misc_feature (871)..(871): n is a, c, g, or t
cccatctcgacgaggccgatctcggtcgcccgtatccaccnccgcctccgcgccgtcgtcctccatcccgacgacgccgcgccgtgcgtctcaccgtaactctaaacccgcacagcgattcgtccggagcgaatttcatgtgtagccacatcagcccatccgtggtacacagccatgtatcgcagcatcacagactcggctacacaccctctcgcngcagtacngagagcacgcaccgcatactctatcccgtcctgatcaagcgcaccgcaagtacaagcacagcataggcaagcactgcgtcgccaccgtcacgcttgcacgccctacccgctcccaccgcaagcgccagcagcctcggcaagcaacacaggggctcacgctcgcacgcacgccgcgccgcagcagacgactgcgacgcagcacatgtaggcgtagccctcgccacatccatcttaggccatagcgcacctgccgcttccccagaactcgtccccaccgcccgccgtcgctgcgctcgtgactctaaaccctgcacctcccccgaacagcggcccacacctctctcggtccgcacactcggcaccaccgccaccggttactctccacgcacgctcctgtctccgtcccccgtcacctctcgtatgccacttctcatactccactacgcactgtcctgcggcgccgccnaccgccgtctcctctctccgacctctcccgcatgcatactccnagtaagcacacgcctcttttcactgcttccccncactcgcccagacgccttcccccgttgtccgatctattcgccccacatccgtccggcatctcgcgtatgcgccgcacccgtcctgcccggccagnacgccgccgncagtgacccgccaatacccacgtccgccatctccgctatccctccgcatcatataatatccgtcactccccgtcgtatcccgtcgcgacgtatcccgatgtcctattttcttccttcccgccgcgtccgctcacgggaccgccctacggtatccgcgctcccgtgttccgccatattgccctcctcccttatcctctatatccaatcacccaattgtcctcatgccgtccagtgtaggtacaccctccccgccccccactccgccccacgtatccccgctgtctccgccctcacctacttcccgcttgccctccctccaccataacccccgtcgcacccatccctccccgccacccagttccacggtgaccccat

SEQ ID NO: 659597 - DNA, 473 bp, Homo sapiens
cagagatatatcatgaatatccgggaagtcttaccatattttagccctaaaaccttttttgaataatttagtgctatccacacatctgacaaatgttccttgttctctatgggacacacgttgtgggtccatagtgtcaggggcttcctctatctcccccctgtgagagcatgcaccttagcccttggttcgtattttaaaactcaagggacttaggtcctatctccagcctagatttactacctcttctacctggactatgcacctcccactcacacctccatctgattatccctggacatctggaagaacccaagcaagttctttcctaactagcagggtcttggccaaagctgttttcaggaatgtgctgtccacacaacctgtacatgctcatccctcccaaaaggcaattcctagaacactttagttaaaactactaggacaagaccaaccttgaacctgagtctcaa

SEQ ID NO: 659598 - DNA, 158 bp, Homo sapiens
ttcaccctcaaccccaaatcttacatctcaattcccatcctacagaagcactcatacgtatatgcatccccgcagtacacacacaggacacacagcacacgcatgaacacagcacacacacgagcacagcacacacacgagcatacagcacacacacc

SEQ ID NO: 659599 - DNA, 1315 bp, Homo sapiens
  misc_feature (14)..(14): n is a, c, g, or t
  misc_feature (32)..(32): n is a, c, g, or t
  misc_feature (34)..(34): n is a, c, g, or t
  misc_feature (95)..(95): n is a, c, g, or t
  misc_feature (120)..(120): n is a, c, g, or t
  misc_feature (152)..(152): n is a, c, g, or t
  misc_feature (164)..(164): n is a, c, g, or t
  misc_feature (168)..(168): n is a, c, g, or t
  misc_feature (179)..(179): n is a, c, g, or t
  misc_feature (183)..(183): n is a, c, g, or t
  misc_feature (352)..(352): n is a, c, g, or t
  misc_feature (368)..(368): n is a, c, g, or t
  misc_feature (404)..(404): n is a, c, g, or t
  misc_feature (423)..(423): n is a, c, g, or t
  misc_feature (1192)..(1192): n is a, c, g, or t
  misc_feature (1199)..(1200): n is a, c, g, or t
tgcctgagctccgnatatttctcctgttctgnanacagtgagaagtgaaagagaaatggctgcccctgcaccacttaccgcgaaggaggctcaangctggggggcccctctgccttccantgaccgcccgtgtcacatcctgacccgctcancaggagaacacngcangtccctccgancgcngtcggcctctccagcctgccatgcctctggccatgaggcgacccgctggagtgatggattcccgtcactaccacccacagggcgagggggtgcattggtctgcttgggccgctgtaacaaaatgccacagcctggatgagtgactgacattgcttccccaccgttctgnaggctggaggcccganatcgaggtccctgacactatttcagtgatgccagancccaggaggagtcgaccangccccagcgtggccataagcaccttcgcaggaccacggagtcgctgcaggtgttcagccctgttgagagtgggagtcggtgtcgatggtcacagctcagtaactcatcgtcaccagcgagtaccacagagcagacacaactgcacttctctgtagagcctccagtcgatactgagagccactggggcgtctgacacccaagggtgcagacattcactccaagtccagagaccgcgccctttctaaggccctgtctcacagtcgccccgtgctcattgtgccggatgtttccacagccacagagacggtgcgtgaaggtgaggtgcagcctagtgcatatgactgacagaaacgtgaagccacagtgggacgcctggatgagacacagatcaccttccaaatctgagtgtggccttgggaccaaccaggcagccagggagaaggcagagaccagagggaacccaggtgccctcaatcccagcctcctctatcccagcctcccaatcccagcctccccaatcccagcctcctaatcccagcctcctccatcccaggacccccactcccagcctcccgatcccagcttctctgatcccagcctcccctaaaacccagactctatgaatcccagcctctgaggtgggaactgttagtaaccccactccatggacaagaaagctggggcctggcgaggctaacagactatcctgatggtgtgagggagggatcggcctctgagggctgcttccacccattcttcaccagtgggntgcaggnntccaggggccacttttccttgcagtctatgctcattccaagccatcctgcagctccagaagctccggagccgacagcactgacgagaagcgatggagcctgcaatgcagggtgag

SEQ ID NO: 659600 - DNA, 409 bp, Homo sapiens
aaaatcagttatttaattatatactgccttgatataccagagttcaaagtttgtaggactattgctaatcatctaaatcaggagtctggtaaactatggcccaaataattaaacttggccataaccatttaattatctttttttttttttttttgagatggagtcttgctctgttgcccaggctggagtgcagtggccctatctgggctcactgcaagctccgcctcccaggttcacaccattctcctgcctcagcctccagagtagctgggactacaggcgccgcaccatgcctggctaattcttttgtatttttagcagagacagtgtttcaccgtgttagccaggatggtctcgaactcctgacctcgtgatccacccacctcggcctcccaaagtgctgggatta

SEQ ID NO: 659601 - DNA, 935 bp, Homo sapiens
  misc_feature (1)..(1): n is a, c, g, or t
  misc_feature (42)..(42): n is a, c, g, or t
nactatcaatccacgcacaagcaatatctatatgtactcttnatcgctgctaaacactataataccatatgcactaataattcaagactccccctccatataccgctccctcatattaccaacttgcacaaccccctcttagccctgacattattacatttgggaagccaccccccttcttattaaaaactgcccgcccccctgggaaaattccaacccaatttgagcttcgcgaaaaaactaatttcaaacgttcctttccaccagagaactttttttgtcacccccctcagctaactgataggtttccaagagccaatacacccggtgtttctacgaggcgcctatccacctgttcaacttcaacccccatctgggagtgtcttcttcccccgacccgggtgtcgtcggatttcccccgggagcttccttctgcccacccttcccgcagttctcctccctttcttggcgccccttgggtctcggcgccccttttccagaaaaaggttctcacccctgtgtcactcgagccccccggggacgcattctctcccggcgggggtatatcccctctctttctgaaaacttctccccacaaggaactcttcgtgcctccaaaataacgtaagtatgttcaccacctccatgacatcacattattactccacttgtataaactccccacgcttcccccgcctctgaatgaaacatctccctcggcacgtgaccgcaaaataattctttttaagacgcggaatatattcttgagggccccgcccgcacaagcacaaacacactcgcatctggcccccttctgtcctcggattgaagaatacacacaccaccaaacggcttacacatgcttttttacaaacccgggcaatcctttaaaaaaggccctttcccccccggggcaaaaaacaaaaaacaaaaca

SEQ ID NO: 659602 - DNA, 684 bp, Homo sapiens
  misc_feature (78)..(78): n is a, c, g, or t
  misc_feature (455)..(455): n is a, c, g, or t
tatttttattatatcttatacaaacccactgaatcccacccccacgagcaagcttctgggaacatctaatctctgagnatgtagaaactaaacagtcagacctccaggactaagatgaagtgagcctagaggagatcgtatcataagaatgcttctgtcgttagccgggtgcagtgctgtgtgtatctagttccagctacttgagaggctgaggcaggaggattgcttgagtccagaaagtggcagttgcagtgagtggagatcgcgccactgctctccagcctggttgtgtagagcgagaccctgtctcaaaaaataaacaaaaaccaaaatgccttctggccagttaacaatctttattagaagggtttttagcttttttttcttcactggaaggtaaagtgggtggccaatgcaaaataaccgtctttattaatccttttttttttgaaaanaaaaaaacaaaggcctaatttggactggccgttgtggcctcgacggcggatgccttgagggcaggttccattatgaggcccaattactgatcctctgtcactggctccctgccttcggccagcgggcttaggtaagtggaaggaccgtcactcagaggtcggcataacgttgtgcacaaaattcgggggaaaacgcatgaaaaaaggttctgaccagggcgccaccacg

SEQ ID NO: 659603 - DNA, 787 bp, Homo sapiens
  misc_feature (362)..(362): n is a, c, g, or t
attctcgccgcatcgcaacgcacacattccaccgccaccacgtatgacatgctcggcatctaatcgattcactatagcactttgccctcaggtccagaattcggcatagggcggcagtagctgcaacaccccaaccaggcccagtaagtacacgagaagctccgagcatggctgaagtccaacgtctctgatgcggtggctcagagcacccgtatcatttatggaggctctgtgacttggccaacctgcaaggagctggccagccagcctaatgtggatggcttccttgtgggtggtgcttccctcaagcccgaattcgtggacatcatcaatgccaaacaatgagccccatccatcttccntacccttcctgccaagccagggactaagcagcccagaagcccagtaactgccctttccttgcatatggatatgatggtctcctctgctccctcctggggcatcatcctaactgattcttccttcactgtttatatcatcaccatgttatgatgggaacgaggtcgcaagcgtcagcacccagtcaaatggctgtgcccaaccgtcaccaaggtggcttctccttggctgagagatggaaggcgtggtgggatttgctcctgggttccctaggccctagtgagggcagaagagaaaccatcctctcccttcttacaccgtgaggccaagatcccctcagaaggcaggagtgctgccctctcccatggtgcccgtgcctctgtgctgtgtatgtgaaccacccatgtgagggaataaacctgcctac

SEQ ID NO: 659604 - DNA, 194 bp, Homo sapiens
atatctgggggttccattggtctcaaacctgaggtctttgtacatctgggagtctgtatagcttcattgttctctgtaagtcatatttctgctcagtgagagaatttcacttctaccaattttctggggtttagtgatcgatgaccagtatctgcatgtggctatgggcttaggaggaaccactcccgcggtat

SEQ ID NO: 659605 - DNA, 179 bp, Homo sapiens
accccccccccccgtttttgtaccgggtttttccagtgtttaacggacgtgttaatagtggttaatagttaaagcctgtccttcccttaatgttaaaccctttgtccggggtaagggcgcccccgtcacctgtccccctcgccccccttttattaatttggcttttgccttgcctccca

SEQ ID NO: 659606 - DNA, 691 bp, Homo sapiens
gaagaaatgaagaatcgagtgtatatagtatttgaagggagaagaagggcaggatgctggcgggctccttgcgggagtggtatatgatcatctctgcgagagatgtttaaccctagtgtatgccgttgttaccgtatcctcacctggtgatcgagtcacctacaccagtcaagtccagtcattcccactgcaaggcccaagccagcctcagtcgtagcgttcaaggtgttgtcggaacgcagttggtggaccaagagccgtgtatcatgacaatccggtcgtatctgggagatgcgtagctgttagcgtcggaatcgctgtatgtacagaatccagcatgctgtgggacataggtcaggtcgatgatatacgagaatagtagggaggagttgaaggagttaaccaattgtgctaccgaaggctcatgggtattatcgtgctgtgaaaaaggatggtgatgccaaaggcttagagcttagtgaacctcgagctatcagtcactagcaggatcgcaatgaagtcatggacgttctggtgaagttgcgtgacctcgagaacccaaatgggagccaacgtcgtgggtaaccacaggaggaataacgaaggcgtatgtacgaccgggtatgccacgatgacgacactgacgggagcccagcacgcaatgcagattggcggcactactgttagaagg

SEQ ID NO: 659607 - DNA, 336 bp, Homo sapiens
cagaggatcccccaacgctctcacaccagccagaatggctatattaagaagtcaaaatggccaggcacagtggctcatgcctataatctcagcaatttgggaggctgaggtgggcggatcacttgaggccaggagtttgagaccagcctggccaacatggtgaaaccccatctctactaaaaaataaaattagctgggcatggtagcacacacctgtaatcccagctactcaggaggctgaggcacgagaatcacttgaacctgggaggcagaggttgcagtgagccaaaagtgccactgccctccgggctgggcaacagaatgagactctgtccc

SEQ ID NO: 659608 - DNA, 235 bp, Homo sapiens
cttgccgcgtgtctatgtatggtcatgtcgtcctaatatgggatctctagagtcggacctggaggtgtgtgcagtgtggaaactggcggtctgtatgacactctcgagactggggagatggcagtagccaaggtcatgcagaaggacagtgagaaaaacatgtccctcaagaaacttactggacagtacgtggaccgccttggtgtgtactctctccaataacgctctgtgggcc

SEQ ID NO: 659609 - DNA, 717 bp, Homo sapiens
ccggcctttgatatctggacgatattgtgcccagaaaaactattcccatgagtactcccagggtccagccacgctgccaccaagccccagggacctgctacagtgccaccaggaccggaatgctcaacggcaggagggagcccacggaggctgcagcacctgccagaacagggctggaagaaaacccgctgggaaatctctggcctctgaagcgtccatcttcagacccagcctcaacggaggcagcccagagggtgaatggcagagcccagaatggcgtggacccaccattccgggcccatgtatagatgggagattcatggcccagcatagaagaatgccagttgggagtttctctccttccctctaattctccccagacaggctgcgggtccacccaaatagccgaggagcacgggctgaggcacgacagattccggggaagaggaagaggaggttcatcactgtgagacaagagggccccgcgaccccgagctagccctgggaccacccagcagggaccggtggcccagccccatctccagcccagtgcccccatacgccctgcgcagacagagcagcctcccagggagcagcgtggcccagaccagcctgatttgaggacgctgcacctggagagactgcagagggtcaggagcgccaggggcaacccgccagcaaggagcagcaggcctcagggcagcaggaacttccaga

SEQ ID NO: 659610 - DNA, 81 bp, Homo sapiens
ttcttatcccaatgggccgctagccaaactattgccagaggccctcttttaccaaaaacatcacctctcgcatcaccagta

SEQ ID NO: 659611 - DNA, 498 bp, Homo sapiens
gaccgaggtcgcacgcgtgagacttctccgccgcctccgccgcagacgctgctgcgatgcgctacgtcgcctcctacctgctggctgccctagggggcaagctcctcccccagacgccaaggacatcaatggaagatcttggacacgcgtgggtatcgaggcggacgacgacgcggctcaacaaggttatcagtgagctgaatggaaaaagacagttgaagacgtcatggcccatgggtattggcaagcttgccagtgtacctgctggtggggctgtagccgtctctgctgccccaggctctgcaggccctgactgcctggttctgcccctgtctgaagcagaggagaacgaaagatgagaacgaaggaggagtctgaaggagctcagatgatgcaccatgggacttccggcgcattcttggagtgtaaagttcctcgctctccctggcaaagtagacacggccttttctacacatctgatgagggacaagacagaac

SEQ ID NO: 659612 - DNA, 197 bp, Homo sapiens
  misc_feature (63)..(63): n is a, c, g, or t
ggggggggggcccccccccctttttttttttcaggggggcccccccccccctttggtgcgggngccccttttttccaggggggggccccccctttgggggggtgggggttttttttttcccccccccccccccccccccgggggttttttttgtttttttggggggggggggttttttttttggttttttttttcca

SEQ ID NO: 659613 - DNA, 423 bp, Homo sapiens
gcaagtttatgggctacccaacgaggacaaaaatgaaccaggctcctgaaagcaggaatctaacctgtgctacgtggccttcccagtcacgaggcgtgagagtacattacacattgccaggtggactccaagggttaaccaaggcaaaacctttggggaaacagggactccaggcccaaatccagcctgagaccctcaaagggcagatccgctaacctcaagttttcagaagatctgaacccactgggggctcctgctcctctgcctgccccatgccagactaggattccagtgacataagcgccctctacagactcagaaggacagagaaggttctgctggaagtgggctcctcagcaaaccagcagataggggttcctttgatatttataccccaggttttttcactctcacgtgacatct

SEQ ID NO: 659614 - DNA, 309 bp, Homo sapiens
ctcgaactatacggtttctctgtggcggtgacggggctgtgtgtgattgtgtgtctgtgtgtgtctgtgtatgtaatggtagtgtctctgtgtgcggagagggtgtgtgtgtgattttgtgtctgtgtgtgtcttactgtgagtgtctgtgtatgtaatggtgtgtctctgtggactgcgagggtctgctgtgtgattgtgtgtctgtgtgtgtctttctgtgtatgtgtgtgtaatggtgtgtttctgtggccggaagggcgtatctgcgattgcgtgtctgtgtatgtactggtgtgtctctgtggc

SEQ ID NO: 659615 - DNA, 313 bp, Homo sapiens
tcgtccgaagtgtctgacatgggagttaagaacacaataggccagggctgtaatcccagcactttgggaggcaaggcaggaggaaggcttgagctcaggtgttggagaccagcctggaagacatactgagatctcatctctactaggaaaaaaaaaaaattaacctggttgtgaaaatgctcgcttgtattcccaactactcggaaaactgaggtggaagaatttgtttgaccccgggagtttgaggctgcagtgacccattgatttgtgccagtgcactcaagcctgggttgacggaccaagacgctgtctc

SEQ ID NO: 659616 - DNA, 867 bp, Homo sapiens
gtccggaaatatgtaactgtacactgaaaatatttatacaatcgtaatgagcgtatcccaaatgactccatcctgtgaccattgctcactaccaatttctaatctggtacatatcaatagataaaacccatcataacccaaagagctctttgtcttcgctcaactaattttgtaagggatcgctcagggatcttgaggccacagaagttccgacggaactactgaattatgcaattacgctccgagtcaacgtgacatgctgagccatgtacaggcctctatcccccttcactcacgaatacgagagggaaccctctgggaatctggtggcttttcccccaggaataactatctcaagaggtcttatggtaggctacagcaaagtatggtaaggccaaaacagttgtgcagattgggtaccatgtcagctatcagctgtctctactttgcctgtggcacataacttctcgcgcaaatgtgcccaactgtctattgcatagcacctctgttcactaaatggccccactgtggcatgctagcagatgctctctgtgagggaaagggacgtgcttctctagtatcagcagtaagactctctcctttgagtgaccagtgactgactgatgttgtaactctgttgtgcctgaaacaggccctgctcctggtttgcctcctcaatactgcagggggctcacttctgtaccccgccacttcggaaggcgaggcggctgctggcctgacgtcgggaggcccacccgctcccaggtggtgaaccccgctccattccgtgcgacctgccgggtgggcggcccgtccccgctctggagcggggggcctgttgcccgggccggtggggggcccacgcct

SEQ ID NO: 659617 - DNA, 463 bp, Homo sapiens
  misc_feature (41)..(41): n is a, c, g, or t
  misc_feature (81)..(81): n is a, c, g, or t
  misc_feature (86)..(86): n is a, c, g, or t
tttttatttagccaggcttgttctgaataggaattaaaganagtaaagaatgtgtaacagaaactcagttctatgtagaanacccnacttcccccgaaagagctctttctctttaaatattaactgcctgtttttctgtggctagtgagccttatctctccctttcccaggcattgtaaagaccctgtttctttagctgtgcgctgcaaggtcactagacagataaactcaagccattaagacacgtttttccttgaaaagtaagaaatgatgtaatgcatgcctcaattaattaaataactgtctttgtttcttgcttctgtaacatgcttctccctgcacagatctcccccaaccccataaaatgcttaaaaggtaacttgactctttgttcggggctcagtcctttggatgttaatccgactgggccggtgcacctaaataataaatcctcctcaacctc

SEQ ID NO: 659618 - DNA, 368 bp, Homo sapiens
  misc_feature (82)..(82): n is a, c, g, or t
cagcaaaaaaggagaggaggtctggacccacctccagagcggcccaagaagctagtactcatcagccacctgaatccaagtnccaccctaaccccatccacctccctgaatccccacgggtttcactctgaggctccgcctccaggctcggtgacaatcgctatccccaggcaagcacctgatgaccgctgccacctgcgccagccagggcggctggaagagaagggtggggctggctggggtggggacctggccagtgcaaaccagcagggccggctggaggctgcggtgactcgcccgggcagattctgccgccggaggaatcacgggctgggggcgcgcctttgggcggcaggtgcgggcggccg

SEQ ID NO: 659619 - DNA, 1089 bp, Homo sapiens
tcaattccattgcgcatcatgtttttcattttcgtcaaatccaaatcatcatctcaattttggcaaccatgcagcatcattcatcaaactccaatgaggtttattcattttcaagcccaacagtcacaatcacatcacaacatttcagtccaacaaacatttccacgagtcaatttcacatttcatatatggaggccatttcagattccaatcacacacatcccatcacagctcatgcaacggcatgcgcttcagcaagtcccaattattccaagtgtattcatatataccttaatgatatcctatggtttcatcgcttgtgcctaaattaccgagctatctgaccaacgaacggtaacaactgtacttaactacgaacctggatatgtaacgacaccatcttactttcctactactgacttacttaaaagaaccaaaaacgaaacgttatgagaaacttttgtccacggacactgtctcacatcatatcagtcttgacacttcggttccccagtttcacaaacacggtaacaaaccccatttctattacatttggggcacagacaaacacatcagagaaaacaacttttactagtgggacatcataccacagggttcctcaaatatcaattttaagaaccaccaatattcacatttggtatgtccacacatattcaaaactaagacattcttacacaaaccttcaattataggtaagcagcgaccacatttcgggtaacaattggtatatttatagacacttggtttacgcagggttgttcacaccaagcatttcatagaccaaagcaggagacagaccttccaacctgtgccatttagacatacacagtacaacacctggccactgttggcacttccggaacagtggctaacttaaattcgatccactatctggtgaggcacttatattaaacgctatgtggcacctccatttaaaagaggtcttacatttcctaaaatccatatacattaggactgggtgaaagcaatagcaatacggtgccgggattctaaccatgacccacaatgtatatgcaaaatctcgccattgaaagtcccccggtaagg

SEQ ID NO: 659620 - DNA, 1337 bp, Homo sapiens
tacctgggactacaggtgtgcgccaccaggcccagctgatttctggtgtcttcggtgctacagatggggctttcaccaatagtctggcgcagtatggtctccgatctcttgcatctccgtgatccaaacacacctcgggctcccagaagctgctcgggtattgcagcgcgtgtagccatcacgccttggactccttattgtaacacttatttatcacttgaagatcctcaagtttatgccgcaggtcattttttctagaggcaccactggccttgactagccacacggcacagaaattctacaacacgcagtacacacgacacgaggcaaacacacagcactatttcatctacacgttcacaattaggttctcccttttcacaccaccaaaggcattactttttcaattccagggctggggcacgcacacctcattctcgaggcaccggttttctgagttcaccagtcctccgtgggtatatggcacctgccatggctgggaacttgtatacaccttaaccccttgctggcgctcccaccaaccacaccaagccgtttctgacacggcccacactccttgggacctcaggacccacaatgtttcacccaattgcttacatcttgcacacacgtcgcacaccacttctcttgccaccttacccgccttgctacactcactaacaacccacgacaccttttgcttgcccaccacggcaacacctctggagcaaacgcacaacaatttatcacttcctccgccattaaaacatctgcatctgccacattttcaatcttcaaatggccctggtattctttcaccacgacccccccccttctcaagtcacacaacacgccaaacttaatttcccccacgcaactttcttcttccggcaccacctttcttacactttcccacgtttccaaccatccccactttcccctttctcttcggaggcgcaacacttcatttccaccttcccccacagcaaaacgccacaaccacacatcatcaacgaaaccccttctatcacgtaaacccccccacgggacaaaagctaaatttcccaaacgtaatttttcccctttgccaaaattgccccttcgggaaaaacagacgtgccccaagcccttgggtctgggcctttacaccgttggggggcagtgctcaagttccctcaataccaaaatcgcgttacaccagctgctcttcaaaatcttcgtgcccaatccacagccgcccaaccctttcggcactgcgtgaatcagctgcaccccaccaaagctcctacaagtggaccgcattgatcccctactaccctgctcttctcacacagcca

SEQ ID NO: 659621 - DNA, 789 bp, Homo sapiens
gtggcccaaggagggagtggaatggtcgcggtgtggctcgatgcagaagaggcgacgctgagatggcgtgcagcttcagtcggacggcgatctcaggagctggtcgctgtcgggtaagcaagattggagctactcgtctgtccacctccagctcgcgtaagggtggctgtgcgacgtgcggcagttttgtggatggaacagcggtgaagcaagtgatcctccccctgttgtgcggggcatggacagctgctctctagagattgctaactgtgaggaaccaccaggagactctcaaataccagtttgatgccttctatgggggagaggagtactcagcatggacatctatgcaggttcagtgcaggcccatcctaatggcacttgctggaagggcagaatgccagtgtgtcttgcctatgggacccacagggagctgggaaagactgcacacaatgctgtggctagcccagagcacacctggggtgatcccggggggctctcatggaccttcctgtcagctccacaagggatggagggtgccgaggtccgtccatgggcccttttctgtcaccattgttttacctagagatctaccaggagaaaggtattaggacctcctggagccttgctttcgggacgaccctggtaatccgagaagactgccggggggaatagttctgataccggggtctctcccagaaaggcccatccggtagctttgctgcattttgagcgggagattcctgccagcaagtacgaaatcggacttgtaggaagccacccgggtca

SEQ ID NO: 659622 - DNA, 618 bp, Homo sapiens
  misc_feature (5)..(5): n is a, c, g, or t
  misc_feature (41)..(41): n is a, c, g, or t
  misc_feature (65)..(65): n is a, c, g, or t
  misc_feature (77)..(77): n is a, c, g, or t
  misc_feature (79)..(79): n is a, c, g, or t
  misc_feature (124)..(124): n is a, c, g, or t
  misc_feature (142)..(143): n is a, c, g, or t
  misc_feature (158)..(158): n is a, c, g, or t
  misc_feature (164)..(164): n is a, c, g, or t
  misc_feature (169)..(169): n is a, c, g, or t
  misc_feature (172)..(172): n is a, c, g, or t
  misc_feature (187)..(187): n is a, c, g, or t
  misc_feature (196)..(196): n is a, c, g, or t
  misc_feature (218)..(218): n is a, c, g, or t
  misc_feature (223)..(223): n is a, c, g, or t
  misc_feature (250)..(250): n is a, c, g, or t
  misc_feature (267)..(267): n is a, c, g, or t
  misc_feature (355)..(355): n is a, c, g, or t
  misc_feature (358)..(358): n is a, c, g, or t
  misc_feature (366)..(366): n is a, c, g, or t
  misc_feature (372)..(372): n is a, c, g, or t
  misc_feature (378)..(378): n is a, c, g, or t
  misc_feature (393)..(393): n is a, c, g, or t
  misc_feature (402)..(402): n is a, c, g, or t
  misc_feature (409)..(409): n is a, c, g, or t
  misc_feature (418)..(418): n is a, c, g, or t
  misc_feature (433)..(433): n is a, c, g, or t
  misc_feature (442)..(442): n is a, c, g, or t
  misc_feature (451)..(451): n is a, c, g, or t
  misc_feature (453)..(453): n is a, c, g, or t
  misc_feature (484)..(484): n is a, c, g, or t
  misc_feature (494)..(494): n is a, c, g, or t
  misc_feature (504)..(504): n is a, c, g, or t
  misc_feature (549)..(549): n is a, c, g, or t
  misc_feature (614)..(614): n is a, c, g, or t
taaanaagtaagcctttatttccttgttttgcaaaaaaaantggctaagttggttgctttttggngattagtcaaananaccaaatcccaaatcctcgtccgactcccccgactcttccttggnttcaaccttagctggggnngcagcagccgcgggngcagcngtggnggnagccgccacaggggnagcagccanaaaggcagaaggatcagccaanaaggncttgaccttttcagcaagtgggaaggngtaatccgtctccacanaaaaggccaggactcgtttgttcccgttgatgaaagaatggggtactgatgcaacagttgggtagccaatctgcagaaagaaactggnaanattgcggncacccnccaggnagcgagaattcagantttcctctnttaaaanaagcacttnagggttgtagatgcngccattttngaacacctncnggatgaccagcccaaaggagaagggggagangttgagcatnttcaacagcntggcttcgctggctcccactttgtctccagttttgatcagctgcncaacacttaggatttcaatggtgcccctggagaatttagtggtgaaacctaaagcctggaaaaangagg

SEQ ID NO: 659623 - DNA, 397 bp, Homo sapiens
aagttctgtttgtcctgcatcctcagcagcacttggtattgtcagtctttttgattttggccattctgttgcggatgtgttgatatcttctgtgaggttttaaaaatgctttttagggggctgggtgcggtggctcatgcctgtaatcccagcacttggggaggctgaggtgggtagatcacgacgtcaagagatcaagaccatcctggccaacatggtgaaaccccgtctctactaaaaatacaaaaattagccgggtgtggtggcacacacctgtaatcccagctactcaggaggccgaggcaggaaaatcgcttgaacctggcaggcagaggttgcagtgagccaagattgtgccactgcactccagcctgggcgacagagtgagactccatct

SEQ ID NO: 659624 - DNA, 150 bp, Homo sapiens
ggaagtagagccagtagaggcattagaggcagagacagccaaggcaggaacctgctgacttccctgttgagcaacctgaagaccattaaatataaggtattagatttcacaggagctttacatttcggttctcatgtcaaacagggtaag

SEQ ID NO: 659625 - DNA, 863 bp, Homo sapiens
gaaaaaatcgtagcctgtctccactttcatagtacaatcatagcgactcactaatatgattacaaatcggcgatctacatccatacccatcatcctagcattcctgcacatctgtacccacgccttcttcaaagccaatcactgatttatagtgcatccggcgatcccagtccactcccactacagcccttaaccacagtgcacacaatcatattcgaaccatatatgcatcgcactactctacaaccatacctctcacttcaatcctccctcaccattggacagcctagaccttagcaggaatacctttcctcccagcttactactccaaagacctatcattcatcgaaaccgaataacagtatcatacgacaaacgcctgagccctatctattatctctcactcgctacctccctgatcatagcgcctataatcactcgaataacttcttctcaccctaacaggtcaacctcttcttccccgatccttactatcatttcacgaagaataaccccaacgccttactcaaacgcccaattaaacgactctggtctagccggtaagccatattacgctaggatttctcatctatctaacaacatttcccccgatatcccccttccatacccaacaagtccccctactatccttaagactcaacaggccctcgactgctcagcttacctagtgagcttctgaacagtcctctagacctcaatgtacctaagcaaacaaactttacatatatcaatccccagtatgcagcatttggatttctccaacaatactccggattctaccctagcatctcaacaccggacaatcccctattctaggcctttcttacgagcaaaaactgtcc

SEQ ID NO: 659626 - DNA, 159 bp, Homo sapiens
gggaaagcttactagtgtaatagtgtaatcttacattaaagctatagaggccaggcgcagtggctcacgcctgtaatcccagcaattctctgcctcagcctcccaagcagatgggattacagatgcccaccaccacacctggctaattttttctatttt

SEQ ID NO: 659627 - DNA, 1488 bp, Homo sapiens
  misc_feature (531)..(531): n is a, c, g, or t
  misc_feature (541)..(541): n is a, c, g, or t
  misc_feature (646)..(646): n is a, c, g, or t
  misc_feature (649)..(649): n is a, c, g, or t
  misc_feature (722)..(722): n is a, c, g, or t
atagtggatcttaaaatatttaatagtctttctttaaaatccaaaaggtgattctttacaagtttagtgtgtgccacagtgaaagcgagggtgtttatttattggagaaaagtgcgagggtgataacgttgaaaacacatagcacgtggaggatatttttatattttataaaatgtgagaggaaaacaagagtcgtggcactcttaatttattttatcacatttctcacacaaaacagcgtggcctcagcgtggcgtgggcctctttgtgggcctatagagtttagagggtctcgtgacatcacctgtgacacaagagagagtcttgtgggaaaagagagcgagacaaataatgagtatacacacgcagagtgttatatacaacagctctagtgccaccattctaatacacctgtggggaattagagtggactataccacagagcaagagagagcgccgtgagagtgtggagaggtatgagcgctatatacaacacccacaatttgtggcgacatttctctctccccctcnaaaagagggnatatagctctttgtgacaaacacacgagggtgtgtgtctaccccatatgtgtgcgtttacccacccaaaattttaaagagtgggcgaatatattctacaactcgnggntacaccaaaaaacggatgctcccacacatttcttttattccaacacgttatctgtgcgtttttttctcccaanaaacctattataccattatgaggcgggttcaaggtggcagaaacatttcaagagaggaaacacctttatattttttttatggccacccgcgtgctgtgcacaaacccccaattcctcaattattaatttctccgttctacaagggggcggttgtattatgtgccccacaatttccacgaaaaaatttttccggcggccacgaacaaggcaaccaaccccatactgtggcgcgcacaaaagtggcgccttattacgcggggactcccttaattaaacaatcccactctctgggggcgcttctcccccaacttttacaaaaacttctttgtgggcgcctttgtaaggcaaacaagggggggtgaattctccttttaatattcctccaagaggaaactccacaatttaaaagcgcccggttgttttataagaggcctcacccacacgcgcgggtgtgcggggaacgcgctcaacaccagttgggctgggcgagcgactaccattttctaacccttcttctcacaattttctcaacaaaacccccagaagaaaccccaagcgtcaccattagaggggccacggcccattggtccagagaacatctatcccacttgtgggggaacaccacccggcagagatactttttctagcgagacaattgtggcgccgcggccgtcgttcacaacaaccttcaccacccgtgggcttccaacaccagttgggtgtatctacgcgacaaaccaagccacgggtctggcagacccacgga

SEQ ID NO: 659628 - DNA, 278 bp, Homo sapiens
gcgggggaatgagcctatcgggttcattcttgctaccatgtcgatggtaccataaagaagagctccttttcctgtatctctccccacagagccctccagaggattaaaggggacacagagaagctggtctgagactgctgaccgcactctacgtgcctcgtgtatgtggttggggtgctgtgcacccacattctgtctttgcaggaatctggatgtgggcagcgtgcaagtctgacgcagcccttggagaggctgcacctcatgacaggcggcctagg

SEQ ID NO: 659629 - DNA, 732 bp, Homo sapiens
  misc_feature (408)..(408): n is a, c, g, or t
tggcacttctgaggctaaatatgtctgggctgaaaatttggatgtgggtcccccccttaagctatgcgtccggttaataataggtactggtactggggctcggggtaaggtgtcgtgggggataggaccttaatattttaaatactgtggtcccataacattttcatttatactagcgagaaaactcttggtgatttcatttatattcgttgtggtaattctagaacactagaattgtggtagttatagccattaacgtgagtgtttttataaaaggggatattattttctctgtgggcacgagtgtgtgtctcaaacaaagaagacaagtttctcagtctccctcaagtgcgtggctccttgtggggtttatacagggtaacaagttttctcatagcctcagaacanacacttattgtaaaacagcgtggtagaacttattctctcagaggggtatataactctcgacagaacccctcggggggggctaaggggcgtggtaatccaataagttctacggggcagaagtgggggacgtgagaagtgggctacagtgtggtgccacagtacgggggttcacgggagccgtgaacagaaacgtggggcactcttccgtgggtacataaacagtggctcactttggggttctccaaaagtttaaacacagggcttatagttcacaacaaaattaagcgggtcaatttctggtcaaaaaacaaaaaaaaattccgg

SEQ ID NO: 659630 - DNA, 2044 bp, Homo sapiens
gactccgtctgtcggcctgacttcagttctgcaattgaatgacagcttgagattcatagctaggtctccatacgagcttgactcaacttgtgcgtagactatcatctgcacttcagtgatcgtgagcctatgcgtagccttcgtcgcgcaagtgtcgcagcccatatgagcactcgtagcggcagcgattaatcagtgaaggtccacatcgcgtgtcagagtaattgttagccaagtactactacggtctggggtgaggcgagagattcagtgtcgctactcgggatgtgaggtgagttgcaatgccgtaggcgtttgtcgaggtccgcccccctaggagttggttacccgtagggagagtttacagtgtctgtgccggtgtcctcgtatctcgctacattttcagtaagctcatgctttactgtgatgatcgcgcagatcgctcattcgagatacgcgcacggatatgctcgcagttgatggaaaaggctcgctgcggaaatgacacggataggcgaggccatttcgctggaaggattcctggaaggcgccgaaagaaggtcagagcggcggataaccatttggcatgagtattcggctgccgcgacgggacaccgttggtacacaccacactaagacgtacggagggcgcaatacttggcagtggggaccccggttttgcaataagagcgtgccgggcgataacccatatgctgtccaaatagagcgcttcctcattagtttggcggtatggccgcccccacctactgggtgactgcaaactaaggaactattgcgacgctctggccacgttgcattccggaacgatcgttggcccccacctgcgccaaactacagccagagttcccatgagttcaacccgacgaaaattttgcccaccgtgatttgcgcattgaatcaccttaactcacgtcatccgcttaagaaacgcggcgtgaactaaaaccccctagtcttataacggcaaaggccactctaggagggagtcggacactctgttctaactctgggtggggcggagctccgcagttaccactagggggggaggcgtccttgctccgaaggctgccgttatggtcgccgtggctttgaaccgggacggccaacctgaggtgaggcgaaccctgtgcgagattccgccaacagtgccataaggtcacatactggagatttcaggcgttcgggcaacgagatttccttgaaggcacatataggctttctccctaaacacgtgacatccccaattgggaccgcagatagtggcgccccaatttctttgtgagaagagactaccgctcggaaagtacgaggacccccaattaaagtcctaacagcccgtaacgcgaaaaagtgggccgccctcccacgtgatggcgacgggcgaacccccggagaccagcggctgcaccggggccactacccctggggggcaaccgcggaggggggacacacagcgaaccacgggcagcggagaccgagcaactacgatcccatcgagcggacagacgtccttagtactagcgcagacccaggcaacaacgcagcgctgacctacgcggagacgtgcaccaaagacacgctgccacaccactgaacgtggtgtggccaccaacactaggcagtcccacactccagccataaaacacctgtctgtacagagcgaacttcgtacctggccagcacaccagcataagagtagcagaaaccccgaactagaaagaaccagtgcgcccagcaaccagaacacagtagcccagcgcacgagagctagaccccaacctgggcggggacaagaaacgcgtcactaaccacctagctaccggggcaccttgtgcgcagcacacggtgctcacgctgagagtgagaacctagtaggaaagaaagtcaagctgataaccaccgcggcgacgaacaacagccacccaacgaacgactacaaagcggatcaaacaagacaccagcccacccacaagcgagacgcaacacacacacagcacacacagaccggtcgcacgaccaaccg

SEQ ID NO: 659631 - DNA, 432 bp, Homo sapiens
tgggaggatcacttgagtccgggagtttgaaaccagcctgggcacacagtgagacccatctccacaaaaaattttaaaaagtgggtgaatgtggtggtgttgtgcctacagtcctagctgcttgggaggctgaggcaggagaattgcttgaacccaggaagcggaagttgcagtgagccaagatcgtgcccattgcactccaacctgggcaacaagagcaatactccatgtcaaaaaaaaaacagggacctggtcgggccgtaaaaggaaaaggctcgggtttgggaatctgaagacctgaactcagtggcctcccccaagctctgagaatctccctaggttctttttaccccacttttaaaggggacacagtaatgcctacctcataagattcccgtgagaaataaactgcttaattaccattgtaagtgc

SEQ ID NO: 659632 - DNA, 282 bp, Homo sapiens
  misc_feature (119)..(119): n is a, c, g, or t
  misc_feature (206)..(206): n is a, c, g, or t
  misc_feature (248)..(248): n is a, c, g, or t
gggcagccaggcccatctgacggtgaaggatgagaaaaaccaccatgaactcgatcacagagagagagaatccagtgcgaataactctgtgtcaccctccgaaagcctccgggccagtnagaagcaccggggctctgcggactacagcatggaagccaagaagcggaaggcggaggagaaggacagcttgagccgatacgacagtnatggggacaagagtgatgatctggtggtggatgtttccaatnaggaccccgcaacgtcccgggtcagcccggcaca

SEQ ID NO: 659633 - DNA, 177 bp, Homo sapiens
tgggggggggggcccctttttccccccccgggggcccccgtttccccccccctgggggggggggtttttttttttcccggggggcccccctttcccaaaaaaaaagggcccccccccgttttttttagggggccggggggggctttttttttaaaaggggcccttttttctttttta

SEQ ID NO: 659634 - DNA, 463 bp, Homo sapiens
  misc_feature (229)..(229): n is a, c, g, or t
  misc_feature (257)..(257): n is a, c, g, or t
  misc_feature (428)..(428): n is a, c, g, or t
gcgttgtatggtggatggcaccaccttccctgtggccactacgtctctgggcagcgacgcagcctttaccagtgcgctggtggctgctgcaatggacttggcagcttctggtatctcgctcctcgaagttcaagggactcatctgcctccgttgggtttggccccggggcttcagctcgctctacgctttttcgcgctcgcagcctcaataggatggctgcagctccancagagagctcattctcagacaatgacantgtggtggtcctctggagtctacacacattctgttccctttcatgcgcttcagacagcctggactgagctcagtagacggaaccacgccacacgcatttgaatagctcctgtcaacatgctcgcttcaagttactgggctatggcttctcgcagggtcagcacgtacatgngtccacgcagttccaggtaagccattgcactccgg

SEQ ID NO: 659635 - DNA, 198 bp, Homo sapiens
agatgtactggataacggaaaaaaactataatagaaaactagctgttaaggatgagaatttgatgtactcttagttcaaaatgagtgccaagagcgctccaggtcacttatgttgtagattagatttttaaatgtgaaaactatctatactggagagatttataaccaactaacttttatttagtatacaaaatttaa

SEQ ID NO: 659636 - DNA, 822 bp, Homo sapiens
tattatcctgtgtgtccttacattgcttctgtgagatgtatgttcttatctgacgatgacctttcaggaccttatttgaagtccagactgtgtgctggggcaaacgagcgtattatgccaaatcgtgacttctatgcgaggtgaagagatgctactaaacgttctcacatttaggtgagacggctttctatgctattccaatacgagagttcttgtcttaatagggctatcgatattgacaccaaatggagtggcttctcagcctcttaatgtcttaagtacgtgctgaatatggaatagagaagacctgtatatttctagacacagataaaatattctttgtacgcactctgtaaattgctccgcattatacacagtgaacacgagctccaggtaagtaactgcataggcatgtcgaggttgcagtctgtatattggactacagtacgtatcagtgacatcaggtggatatagaagaagacccttgagatgagaactgccttagtcatgattcgttagtagacctatctatgattcatctgcaatttgcagatacggatggtgagcgtggacattgcttgacagatagtttaatttccttgtatccaaggtcgtatattcctgtgtggcagtgactatttcaacatcattttcatcaagacgcctttcttctaaattagccttggttacaactttggcaccgtatttgcctgcccaccttccggataagcggggtcgacaaaaagggggccccggttttaccccaatcacagcgggctcggaaaaaatgggcttagactgaaaagagttttcctcgcacat

SEQ ID NO: 659637 - DNA, 191 bp, Homo sapiens
aactggagtgtgcatcttgcttgtcacagggacccatactgtgggtggtgcgtgtccttggcaggtgcagtcgcgttctgagtgctcgaggggccaggcgccagagcagtggctatggagcttccagcatgagctggcgtgtctgcaagtgggcagcatgagtcctgccaacatcagagaagaggctgcgg

SEQ ID NO: 659638 - DNA, 282 bp, Homo sapiens
atgttgggctggaaagatcatggcagcatcagtccaggtgtgaggtcatcacgttcacacacatggctgtctccagcaatgactaggtgaaaagaggtttaaagtggagccaaacaggtggacattacagacatcccgcacacgcatgtgtgtgtgtaatgatatgtatgtgtttatttaaaggtgtattgttggtgtttacgtattctcgagaacattaaactcaagaaaaatgggctcctgatgcaatatgtatattgtggtcaaatataaaaaaaaaaa

SEQ ID NO: 659639 - DNA, 155 bp, Homo sapiens
gttgtatagccaaatcctaccaaacatatagtgtaactaataccaatcctcctgaaattgtgccaaaaaatggaggagtgagagaactctccctgactcattatacaatgccagatatatcaccctgtaaaaccaaaaccagacaaagggaaaca

SEQ ID NO: 659640 - DNA, 561 bp, Homo sapiens
aatatcgaggttctgcagaacctggtgtaactgcgggagctgtaccttatccacaatggcatcgagttcatcgaggtcctggagaacaatatcaaactcacgatgttggacattgcatcaaatagaatcaaaaagtttgaaaatatcagccatctaacagagctgcaagagttctggatgaacgacaatctccttgagagctgtagtgacctcgacgagtctgaagggagccaggagcttggagacagtttacctgttagcgtaacccctgctagaaggatccccagtactggctgaaggtcatgctcgccctcctcttccgttcgtcagatcgatgccagtttcgtcaggttctgagtctttcttggctcttcatgtggtccctctcctcggaagaactgcccagccacgggtttttaacccacctgttgctcctgaggtcttcactatatcatcagtcacaaacccaatggctataaaggcactgacgatatcttgctgcggatgccatacacctattttcagatgccgttgcaattaaatcttgccacactgtcaaaa

SEQ ID NO: 659641 - DNA, 388 bp, Homo sapiens
ctagtgtgattatgacgctgaggaagctgcagctgagaagctggggcctacagcgccgaggccacaccctcaccccacgcgagctcacaggtgcatgaagacgagcatctgaggtggcggctggagcgaggcctgcccttgccagccagactctgggtcgcccttgcctgcagaggaggagaagcggctgagtgccgagtctggcctgagtgaagactctcgcccatctgccagcacagtctctgaggctgagcccgagggcccgtcggctgaggcacagggtgggagccagcaggaaaccaagactgctggcgggaagggaggcgccgaagaggactaccaggagcccacggtgcctttcgcagacgtacgcactgctgccccgagg

SEQ ID NO: 659642 - DNA, 460 bp, Homo sapiens
  misc_feature (235)..(235): n is a, c, g, or t
atcactcccggaactgtcctgatcatcctcactgggcgccacaggggccaagagagtggttttcctgaagcagctggacagtggcttgctgcttgtgactgggcctcttgtcatcaacagagttcctctgcgcagaacacaccagaagtttgtcattgccacctctacaaaagttgatatcagcgatgttaaaatccccaaacacctgactgacgcttacttcaagaagaagcantgcgcaagcccaggcatcaggagggcgagatcttcgacacagagaaggagaaatacgagattacagagcagcgaaaggctgaccagaaagctgtggatttgcagattttgccaaagattaaagctgttcctcagctccagggctacctgcgctctcagttttccctgacaaacgggatgtatcctcacaaactggtcttctaaattgttaacctaattaaacagc

SEQ ID NO: 659643 - DNA, 249 bp, Homo sapiens
ttatataccacttaatgggcgaaacctgctagtgtaatggtttaaataactcgtgcctgccttcacccagtgcccgggtgtctcagacgatcatctccagctgccgggcatactcgatgacctgtttgggccagttctgtggagcggaatggtggtgtcttcctggcttcgtgctgctggctggcaacaacgtgtagtacgttgtcgcgggcccagtgacccaacccttcgctttctggcgcgtagctc

SEQ ID NO: 659644 - DNA, 486 bp, Homo sapiens
  misc_feature (46)..(46): n is a, c, g, or t
  misc_feature (66)..(66): n is a, c, g, or t
  misc_feature (92)..(92): n is a, c, g, or t
  misc_feature (269)..(269): n is a, c, g, or t
  misc_feature (320)..(320): n is a, c, g, or t
  misc_feature (447)..(447): n is a, c, g, or t
  misc_feature (469)..(469): n is a, c, g, or t
tggaccagcagctcctggaatgcgctcaaagcccctgggtttatcncttgggatagtttaagcccntgcacctggaactgttcattttttcngtaactgtttctgtacccatttatctttttaactttttgcctgttctgcttctgtaaaattgcttcagctaggctcccccctccccttgtagactgaggtataaaaggaaatctggccgggcgcggtggctcacatctgtaatcccagcactttgggaggccgaggtgggcgaatcncgaggtcgggagatcgagatcatcctggctaacatggtgaaaccccgtctntactaaaaatacaaaaaattagctgggcgtggtggcggcgtctgtagtcccagctacttgggaggctgaggcaggagaatggcgtgaccccgggacgcggaggttgcagtgagctgagatcgcgccnctgcactccagcctgggtgacncagcaagactctgtctc

SEQ ID NO: 659645 - DNA, 394 bp, Homo sapiens
agtcatgggacagccaggcccatggatcacgcacgaccccagccggccatatgctgagcagtaccgcatagatgcccggaagtatagcacaccttgcttcagctagtctcgccctggacctgcggggccaacacggagatcctcgccgaaaggacgtacaggctcttggatgacaacatggaccagctcatcgagttcaaagcgtttgtgagctgcctcgatatcatgtataatggagaaatgaatgagaagattaaactattatacaggcttcatatccctccagcactcactgataatgaccgagacagccagtcgccgttgaggaatcctctgttgtcaacatcgagacccctggtcttctgggaaacccaatggtgatgcagttgattat

SEQ ID NO: 659646 - DNA, 268 bp, Homo sapiens
tgtatccagcagtgacgaactgacacgacgcggattgacgaacgaacttgccttcgatttcacagttcttcgtgatgcgctcacgataggaaacctgaggcttaccgatgttggcttcgacgcttgagtcacggtcgcatcctggtcaaccaggatgtccaagctgcagctctgcccactgccggcagatgcatcgtttgaccagtctcattcatacagtcttgaccgcggaaagactggctctatcctgagacacagcttgcccaag

SEQ ID NO: 659647 - DNA, 913 bp, Homo sapiens
ggggcagagtgcctaccaataccctcctcctcctcgccctcctcctccttcacgtaaatgaaaccccttccagatctgatatgggactattaatttttatgctgtaatggtatacattcacgaatgcagttgaaagggggaaggctccaactggatgctggtggactaaggcctgaaatgcttgctcatctgtaagaatctattactcgaggttatgttgttccttttaaaattcttgaggagagagggatggtttctgaggggtgctgaaagtattattcaatgtgcagacatacaggtaggtcttcagcataagctgaaatatatgcgtgtagaaaactttgacatctttttgggtagtcttgccactttcttcttaactttactatctcattttggtgccccccccatcttacagaagttggaggtctatgggcacgaatggtaggcacagaacgtaacctatggaccaactgtctgtgctttcagaagccagatgtgtgccccccaatcgcgaaaatttgtctaagcgcggggccagtctgttgtgggcatggttttctacaccaaattctgggtttgctgctactttcttgtgacgtagagggtacacctgcaggatgcatatcctcgcagtctgaaagctcggtcggaggcaagtcctggaccacgtggttttgggttggtggtccttgtgcactggcactggtcctacattaccagattccagtctacattatatgcctggcaggaacaccagttaactctgccgagtcgggctacacggcggggggtcgccatagcagcaagcttcgttgtcgggaggaccgagggcggaaagggccacccaaggggtgaaaacggggggcagcctgggcaactaaataggcaacagcgttttacaagagccacg

SEQ ID NO: 659648 - DNA, 158 bp, Homo sapiens
ctggaaggactagagatggaatttatgctggcaaaccagttactcttcaacagggcttaatcaaggttatattaaaggtgcagaagtcattttaaactatggacgactccgaggaacattgagtgataagatctactggcgtcacctttataataata

SEQ ID NO: 659649 - DNA, 160 bp, Homo sapiens
taaggaacttacagtaaatcatgtaatgtggaccatagctccggatgacatctacactctgctcaagtagtgatggtccctggcttgcaaacatgtagctctaccagtgttccaaggaaggctgttgttcaacctggtatataccttatgtacgcaagtt

SEQ ID NO: 659650 - DNA, 1149 bp, Homo sapiens
tgaaaactccgcaaattccacgtctccaccgggcaaatagtaaaatttgacaacgggcaattggtgaaactgcctagggcttttcttcagagtggatccttgtgtagtgctacacaagtggaacaatgctgaaccagtcagatatgaaccagtctcgcctttcgggaaaggcgctaaaaactgctatcatcattggactaactggcttctacttcagaaatcattcgaatacggagaaattcaatgtattattataacctatcttaggtgtaatgggcacttagattgtgatcaagtcacgcactttggttctccttttcacaagttccaagaccttatacaagctttcacgctgaaagttgtatgctatagatggaatagagccaaaaatttggatcttgttagctaatttcatttgacatagctggatagatctagtgcaagtctgtagtccatgctgcattcctgtggtagcaaaagcattacacttcacaactgaggagatagctcaagtccgtagcagcatgatagacgcctgacttgtaccaaccaatagataatggtaatgatgtgtcgacagttcagataacatggatcataggcacttagatttgctaccacatttgttcccttcacttgaattgaaatctgtaagataatcataacaccttctaaggcagcctaagcataatacttttaatgaagccatgaaacggcaagattgccagagataaagtctgtatacttcagcctactttggagtaatctcgtgttttcgcacataatgtaaactcggagatgtcatttcgaaaaattttcttcacacgttaaaacatgctgtcgacaacagtggagttccgttctgcatggatgtctttgctagggctctatgaggagatgatagtggtgtgattgtgcctactaattcttgctgagaattcttattcagcgaattcaatagtgatttcagcaatatgtactaagtattccaaggcagttaatataatgtataaaggatttgagcctgtatgtgtaagaacgaaactctctcttcagtcatatttcctagaattcagagtaagtacctcgctgatttagcactggagttattcattgaatgtgtaaatattaatgctggggtctgacctt

SEQ ID NO: 659651 - DNA, 727 bp, Homo sapiens
  misc_feature (16)..(16): n is a, c, g, or t
  misc_feature (26)..(26): n is a, c, g, or t
  misc_feature (46)..(46): n is a, c, g, or t
aacgaagacctcaagnttgggtcaanaaacacgcagggcgtttatnaaacgacgcatatatacgtcctaggacagctggtgcgatcgacgaggggcatggctctgagtcacttgccctgtaggctctagcctggctgctccaaggccactagcagagcaagtgccctccgtcactacacccagtctcatgcctcgagggctggggaggaggggctcaagaaggggggttcatgtacatatttatcacccttcacatagcccaagactttgtacatgtttacagggtgccctcccaaagtccctcctggttattaaacctcagactggtgctgtgttcctagcctctggcctctctgtggggaaaggggactgcaggggaagagccgggaagggacagtcaggcttctccctgggaaggtggggccagcaggagatgaccaacagggggcaggacctggggacctgggctggagggaagggcagaagcttcctacttggctgacagcccggttcccccaacatgttcccgttcactctgccccacccccaaaggctcagctctaaatctcagagtccaccactcttaatggtcagtccccttcaccccatttccaagtgcccccaggactcctgggcccttgttcctgaaccctgttctccaaaaccctggccaggggctaaggggtgggcagaagaagggtcaccaatgttccacacacaaaagaag

SEQ ID NO: 659652 - DNA, 219 bp, Homo sapiens
ctttttttttttgggccccccaaaatagggaaaaaaaattgggccattttcctgttttaaccggaactattggcccccctggccccaaaaggaagggccgatttttttagttgattttttttttggaaattaatcccccccagttcttttttatttgggtgaaggtttttttttgtttaataatgttttaaaaataaaaaccgggggtttttggcttta

SEQ ID NO: 659653 - DNA, 375 bp, Homo sapiens
gtgcacaaagcagtctagtgttctcatgacacctgcaacccagatcttagtaagtcaccaaacttggactggccaagaggccccagcttccccttccttgcggcctgtgccaggagccacagtcccacagtccacgctaaggagacctaaagcctgtgcgtccctttggttatggctgcccctaaaagcaagaaccaaattcaatgccacgtgacatgggctgtctcacttcagcaggctgaacagtggatggcaatagtttgcttcaaactctatcatcaatgtgtttgttcatcgttataccatttcttaagtgagttccaatttacatgccaaacaaacccctgaggacgcagcaggagtgaaaaccacagg

SEQ ID NO: 659654 - DNA, 1143 bp, Homo sapiens
gcgcttgcgatacgggataatcctatttattacctcagaagtttttgtcttcgcaggatttttctggagccttttaccactccagcctagcccttagcccccaattaggagggcactgggcccgcagaaggcatcacccggataaatcccctagaagtcccactcctaaacacatccggtattactcgcatcaggagtatcaatcacctgagctcaccatagtctaatagaaaacaagcggaaacaaataattcaagcactggttattacaattttacggggtctctattttaccctcctacaagcctcagagtacttcggagtctcccttcaccatttccggagggcatcttaacgggctcaacatttattggtagccacaggcttcccaagggacttcacgtccattatgggctcacttttcctcactatctggttcaatccgcaagtaatatttcactttacatccaaacatcacttgggcttcgaagccgacgctggatactgggcattttggtacgatgtggttggactaatttctggtatgtctccaatctattggatgagggtccaaagaaattataaactaaaacaaaatttttgggcggtattggcacataagaattttatagcacaattgagtggggcacctggagcgacacagaagagtatagaacaatgtggacaacaggtggaccaaaagaggatcgggcatagaaagtgtcgtggatccaccataaacaaaacgccgggggaacccgcgtgtttggaaaatcccagaggggtcacggagcacaagggtcacaacaagggaagcacagggaggacaaaataaagcaggacggaccgcggggaggtgagtaccccactgaagcagacacagcaaacaagtacaaacagcacaagaacatggagatagcatacacagcagagacagcatacaagtaagcaacggctaaaaagagcgcagacaccagacgagcaacgcgcacgacggaacagaaggcgaagctaagcaggaaagcggcaagctagcacgagaccaaagccgcctgacagccgacacacagcactacgcgaactaactctacgaccgagcaaaggacaaaagacggacgcaagaaccacaacaaggagactaag

SEQ ID NO: 659655 - DNA, 482 bp, Homo sapiens
  misc_feature (276)..(276): n is a, c, g, or t
  misc_feature (295)..(295): n is a, c, g, or t
  misc_feature (415)..(415): n is a, c, g, or t
  misc_feature (423)..(423): n is a, c, g, or t
catccccaagcacctgacatccccgagcactcagcctgacatccccccagcaggcaacacaggcaggaggatgtcccatcccttcctgctccacccacccagctccatgttgtacaactcatctgaatgcggctgctggaccctgaaatgttcgcagaatcagcgccgtggacaatgaccaggggagggaagtggctaaatcagagtctcgctgtgtcgcccaggctggagggcggtggcatcatcttggctcactgccctcccgggttcaagtgnttcgcctgcctcagcctcncgagtagctgggattacaggtgcgcactactgcgcccagctagtttttgtattttgccatgttggccaggctggtcttgaactcctgacctcaggtgatccaccctccttggcctcccanagtgctgngattacagacgtaagccaccgtgctcaactaggttttggtgtttttatagagacagcat

SEQ ID NO: 659656 - DNA, 673 bp, Homo sapiens
atctcgccacctcttttttttagcgcgcgctttctcttttgtgttgtggggggcccctcttccccgcgcttctctctaagagccagcggaaaatagtgtgtgcccccccaacaagaaatgatagccgctaataagatgccccgggagatgcgcgatcacatcttcttagggctccccaacctcctctttttgtaaataagtgtgggaagagtacactccctcgggggggaacaacagcagaagctctctgtcaagaaagaggattcacgacaccaggggccacagagcgcgaaagagtggtgcactattcttcgcgctataacacaactcggcccccgcctcttgtgagggatatttttaataaggaggtacttatagcttatagtgtggcgtcaaaacataggggggtgccccataccacaaacacagaggcgcccataaatatatttgaacatggggccaccacaccaatcgcggaatatatactcacacaggagaggtgccaccacacggcgttatccatttgatacccccggggactctgaacacataccatttagaacctaccccaacaaaaggggtgaaaataaacaccttttcccccccaaattttcccccccaaccctttaaccccccaaattttccctttaaaaaaaattgtggttgtttttta

SEQ ID NO: 659657 - DNA, 219 bp, Homo sapiens
tagaggtcccagttcaggcaggaacgaggagcattcggtggagcggaggagcattggcggagacgaggagcatctgttggagaggaggagcatctcgtggagaggaggagcgtctcgggagcggaggagcatcgggcagaagacgaggagtagcgtctggcggagacgaggagtagtgtctggcagagacgaggagtagtgtctggcagagacgaggag

SEQ ID NO: 659658 - DNA, 285 bp, Homo sapiens
  misc_feature (84)..(84): n is a, c, g, or t
  misc_feature (86)..(86): n is a, c, g, or t
  misc_feature (102)..(102): n is a, c, g, or t
tgtactgtatcacaagcaacagatgctacactccattcccaaggacttcccgtctctgatcttagaagcattgtcaaatctgcntnccgagcctgccatggnagctgcttgcacttgggagtgaaaagcccttgtggagctttttcttattcggtgactgctcataaagtgccttcacctcgcttgccttattagccagtcctgcctccaaattaccaccacttgctcctttcaggagtctcttccccctaaagtccctattactccttctctctgctttcagat

SEQ ID NO: 659659 - DNA, 182 bp, Homo sapiens
  misc_feature (36)..(36): n is a, c, g, or t
  misc_feature (72)..(72): n is a, c, g, or t
gaatagtggtacccaggttgttgttttcttcctgcncatgccacagcgctcatcgacgcaatgcaccggttnggcatacaggcgccggaagtgattgcggatcaggttctgggcaatcccgcacatccaggtgctgagggtggcctggccgccgaagcggtcccggttacgccaggcctcca

SEQ ID NO: 659660 - DNA, 991 bp, Homo sapiens
agctaagattctaatttaacactattctctgttcttgcatgggcggaagcagatttgggtaccaaccaacgatattggactcacccattcaatcaaaccggcgtatgtatttcgtgacgattacgtgccaggcacaccagtgatagtattgtcatcgtgtaccatagaatactgtgaccacctgtagtacggtaagaaacctcaaccacagcattcaaaagcccccgtcccgcatgcttacgatacgcggagtacatgctaatcgataggccttgcatagtatctacacatcataactggctaatctccaaaggtgagccctcatcgcattaggatagccaataaaggctatccacgcacttaacagttacatagtacatgaggagtcattgtgccgtgacatggcaacatctaacaggtcaacatgtccctttcatcgatgacccaatggagtgaattccctacctcagtaatagggcggtctgcttttgtacgacaagaaaacacatatataatccaaaaggtgaaaaggacaatgaagctttgtgtgagtgggccaccaagttactcgttcgcagatagaacttctctcacgggggactcaccacttgaattggcaagcgcgtgcgtgcagagagcccaccacacacttgagacgcaagggtgggacaagacagagaggtgtccaccttaagggacagcatgtcgcccagagagaagaattaccaacgggtggtgggccagatcaccctaagagcgcggttcgtgccaatgtacaacttccggccatgtggtggaaaacaaaacgagctccccggacgactccgccatggtactatcccagcgtagacggttagagcatacacttgcgagaacaggcgatagactggacctggcctggacctcgcttacgcggcgaactatcaaaccataagggagagtcgcctcactgaagctggtctggggagtgttcaaacgatatgtacgaccc

SEQ ID NO: 659661 - DNA, 504 bp, Homo sapiens
tgggcggatcacctggggtcaggctggtctcgaactcctgaccttgtgagccgcctatctgggcctcccaaagcgctaggattacaagcatgagccactgcgcccaccttgtattttcatgaacatacttgccacgtgtgtgtatagcgttgcatcaggagacagcttcgctggagtgtgattataacttggaaactcagctccattgctgtttcttatagctcttcctcctcccagaaagacacgtgctgagctcatgaaggcaatcgattttgagtactatggttacctagatgaagatgatggtgttattgtgcctttggaacaggaatatgaaaagaaactcagagccgagttagtggaaaagtggaaagcagagagagaggctcggctggcaagaggagaaaaggaagaggaggaggaagaggaggaagagatcaacatctatgcagtcaccgaggaggagtcggacgaggaaggcagccaggagaaaggaggggacga

SEQ ID NO: 659662 - DNA, 696 bp, Homo sapiens
  misc_feature (316)..(316): n is a, c, g, or t
  misc_feature (318)..(318): n is a, c, g, or t
  misc_feature (383)..(383): n is a, c, g, or t
  misc_feature (447)..(447): n is a, c, g, or t
  misc_feature (511)..(511): n is a, c, g, or t
gtaactgattccaaactgtcagtaagaacataatttatatttttctccaattcaattaaaagaaaattgacaataaaaagctgatcaatacgtgtagctcaggaggtagagcctgctttgagatgcagaagtgtttttttttttttagatctatattcttgagtaaagaaaaaatccatctttctttcctagaggggaagagtttcagagctgggcttggcaacagcctgactatcagaggctgaattaaacaaatagatacctccctggagtgaatggtgcgtttctcctgtttggggaaccgtgcttttatggngnagtttgcgttctgtcttggtctccggatgtgtgtatctgtgggtggatgtctgcatgtaaatggnagtgtatacctgtgtgggtgtgtacaaaattcccatgtgaatctcagctttgtggggatctccngttcttgagcccagtagatgccatttgaagaaaaaaatcacttgaaaatgagacagaaagaatngaaactaaatcctagctctaaaggcaccaggctgattaaaaaaaaaaaaaaaactcaggttcttctttgttgtggactgtacctacctctaaatgacatttctgtttcctatgagatgattagaatgaaaaagatcctgagcccgaaagagcagatactgtgtgatagtgtgtatatcagggtgt

SEQ ID NO: 659663 - DNA, 397 bp, Homo sapiens
tgggcggatcacctggggtcaggctggtctcgaactcctgaccttgtgagccgcctatctgggcctcccaaagcgctaggattacaagcatgagccactgcgcccaccttgtattttcatgaacatacttgccacgtgtgtgtatagcgttgcatcaggagacagcttcgctggagtgtgattataacttggaaactcagctccattgctgtttcttatagctcttcctcctcccagaaagacacgtgctgagctcatgaaggcaatcgattttgagtactatggttacctagatgaagatgatggtgttattgtgcctttggaacaggaatatgaaaagaaacgtaggtctctgggcatttaatttcataataaatttagggttgatggggtaccg

SEQ ID NO: 659664 - DNA, 175 bp, Homo sapiens
  misc_feature (4)..(4): n is a, c, g, or t
gcanagtactggaaggcagaatgataactgtgtaaagatagccattgtggtcttaatttgcatttctctaatggctaaagatgtaggatatcttttccaagtgcttatttgctgtcagtatgatagagttagtttcttcagtccccatcttgacccttgctgtagcaaagtactg

SEQ ID NO: 659665 - DNA, 362 bp, Homo sapiens
aggctgaggtgcgaggatcgcttgagttaggagtagtgggaggattcttgagccaggagttacgagacagcctggcatcaaaaaaattatgtaaattgaaatgttaaagggtcttgtatattggtggagatggaggagatcgggggaggagatgagaaaggggcaagcataagtagggaacacattgcactatatgccccaagctgcgcagagggcaggaagcagtgaagaactaatacccaattaggaacaaccaggaggacaagatgaagtagatagcagacatctgacgggaaatgtgcacgccacatttctcagccaggcaggatcaagggtaggccaattactgagtgccctgggta

SEQ ID NO: 659666 - DNA, 846 bp, Homo sapiens
  misc_feature (117)..(117): n is a, c, g, or t
cgtggtggcgcatgcctgtagtcccagctactcgggaggctgaggcaggagaatcccttgaaccaggagtcagaggttggcagtgacgccgagatcacgccacagcactctagcctnggctgacagagcaaaaatctctggtctaaacaaaaaacaaaaggcaaggaaattggcaaaatatcacgttgggtggtgtgtggtgtgggccacacacgcttggtgattcccaagttactccaggaggctagaagccaagggagaaatcggttttgaccctggggaggggcggagtttgggcagtggagctgaagatgggttgccaatgcactcccagtgtgtgggccggccagaaggggaagaactccaattcctcaaaagggtacatcattacaatataactcttaaacaacttaacttgtggcccacgtggggtgtttttatttctcagaaatgtgccaactcccgggggaggaccccgaccagaaatattttaacccaccttcttaaagggaaactaattattgggcaggaaacccttctttgccaacctggcggcattataccattggcttctaaagttgcccattttccagtggtcctctacacttgtggcacaaaacctttatttttggggcgaaccccagacatattaaaagttttaaaaaccccacaaatttttgggtgcgaacacacttacttaccaacacttttttctttccaacttttgggaacgtgggggtgacacattcgcgcctagaaaaggaaccaaaagaggtcctaaatatttaaaccaattggttacattgggaccttcaataaaggttacacaatcacaacaacaaaaac

SEQ ID NO: 659667 - DNA, 160 bp, Homo sapiens
  misc_feature (53)..(53): n is a, c, g, or t
  misc_feature (114)..(114): n is a, c, g, or t
cggcacgaggggacatggttaagatgccactctgcaaggaggagaagataatnttacctttagacatttcaaaattaaaagaattttttttttctttgagacagagttcgctcntgtcgcccaggctggagtgcagtggcgtgatctcagctcactgcaa

SEQ ID NO: 659668 - DNA, 301 bp, Homo sapiens
tgcaagtgggagtctcatagttcagggtatagctctacggactccagagaccatgctgttatgtaactggctttgctaggctggggattgaactaagtaaatgaagccgaaggagtagagatctagatcgcagagaagtaagtctcattctaacacattgcaactactgctagagtccaccccatgaagctagtttcacattgtgtatcattcagaactgaattctatgacgtttatgttgttcagactaagacatatgtagctagctaggttggctgtgctagtctcagtaggacgttga

SEQ ID NO: 659669 - DNA, 142 bp, Homo sapiens
  misc_feature (32)..(32): n is a, c, g, or t
  misc_feature (49)..(49): n is a, c, g, or t
  misc_feature (64)..(64): n is a, c, g, or t
  misc_feature (79)..(79): n is a, c, g, or t
tgcatcatgggccaacatatacagccccacangatacgggtggggtgtncgcggcttcacatcnggctggtcaaagacnacaggttgcgtgacggggatcgaaaatgaggccttctcgttgatgcagcgccgctcaatttcg

SEQ ID NO: 659670 - DNA, 362 bp, Homo sapiens
gtacgccatgtatcccaaaatattttcttgtttttcttaaagaccatgtctgtactgtcaccaggctgagttcagttgctcagggatagctcactgtggcctcaaactcctgggctcaaaccatcctcctgcttcagtttcctgagtagctgggactgtgagcacatgccaccatgtttggttatttatttatttatttatttatatcttgaagaaatgagttgtttcctgtggcttgaagataggcatttgaggctggatacgtggctcaccatctgtaatcccagcactttgggaggccaaggcaggccagatcacttgaggctaggagctccagaccagcctgggacacatggcgaaaa

SEQ ID NO: 659671 - DNA, 338 bp, Homo sapiens
  misc_feature (157)..(157): n is a, c, g, or t
tggaatagaacttatatatttttatgggaataaaggagaagcatgaaatttcatttaataattaccttaactctcactctcaaacaggtaaaccttttcctcttctaatatttaagctttctacttcacatttgggtagttttgggactcaggtganactagttatgtactaaccctgttttctccaggtgcccaagcacacactaaatatgagaatgaagaagtagtgaggaccatggaccagcacaggggaccagaaactggcagcccaggggctacatctttgggtaacatattaaccgggggggtaccggaggcttcgaaattcgtaaatcatg

SEQ ID NO: 659672 - DNA, 401 bp, Homo sapiens
ataagcagcattacacaaacgcagctctatgttaaccatctaagcgctggctctttgacacagtatctacagcacagacacgtggggcacagaaagcacagaaagcccgcaatgtgtgcgcacagtgtgtgcactcaccaagcacgggccacttgtgtgcctatctccacaagacctccctccttgtgacagctgtgcacatcggggccccttgaccctgcggcacatggtccctccctgccctgtctggcacgcggtggacagatatgtccagccctctcttgtcttccggtcctgtcctccaggtactttcacactgttccgatatgggaaaagagaaggtgcagtctgctcacaaggcacaacagcaggtggcacatatcacagggtcccctcctccc

SEQ ID NO: 659673 - DNA, 409 bp, Homo sapiens
  misc_feature (58)..(58): n is a, c, g, or t
  misc_feature (63)..(63): n is a, c, g, or t
  misc_feature (232)..(232): n is a, c, g, or t
  misc_feature (344)..(344): n is a, c, g, or t
gtgatggtattagacggcctttgagaggtgataaggtcatgaggatgaccttcatgantaganttagtactcttataaaagagatctcagagagactcctcatcccttccaacagatgaagttacagtgagaagacagcatctacgatgaactgggccctcatcagaccccaaatttttcacgcccaaatcttggacttcacagcctccggaactatgagaaataatatttnttttgtttctaaaccactcagtctatcatattctattacagcaacctgaacaatataagacagaaaattgggacaggaagtagtgtgatgctgcaacaaatatctaaaaatntggaagtggtttgaggaacagggtggatgggtagactagaagaggtttgaggtgcatgctagaaa

SEQ ID NO: 659674 - DNA, 572 bp, Homo sapiens
  misc_feature (249)..(249): n is a, c, g, or t
ttgtggggagcccgggggggggggcccgagagcaacaaaattgtcttttggttcttcccgggcggggttcggggcaaaaacagtttgcacgagtggggcccttcaaggggcaaacaaaaagtggtcccccctggttggccctggggaaaaaagggggaaatggaggtgttcaccacgccaagtgtgggtgcccgcccccccgtgttccaaaaaaaggaaaaagacagcgtggggcaaccgggttttttngcccgtttaatccgtgggatttgaagggccccccgccggggcccccaatttaaggtttgtgagccccccccgtccatggtgttaagggggccggggtcccaaagggcaagcaccgttgttcattgggaaaacgcctggggctggcccttttccagttcttcccagggggtcccggaagcccgggcccccgcccagcccaagttttcccagggccctcggaaggtggccgggcctccctccccctgaacccatcccaaggttcttgaccaactgggcccctgagttttggagcaacccctgccccaaaaaaggttttgacccca

SEQ ID NO: 659675 - DNA, 703 bp, Homo sapiens
  misc_feature (8)..(8): n is a, c, g, or t
  misc_feature (15)..(15): n is a, c, g, or t
  misc_feature (17)..(18): n is a, c, g, or t
  misc_feature (20)..(20): n is a, c, g, or t
  misc_feature (47)..(47): n is a, c, g, or t
tccccgantggtccngnngntgtcgggtttgcaccaaatgaaagccnttcaacgactagcccgttagcgtagtgaaaatccatctacatcgactcgatcgaaaccacttccacaaatcggaattttttccgtaccaccctagtcgcttcttgctcagctaggaaggtgctcaacgtatcggcctcatgaatcatctcgtgcgtcttgccttcaaattcattacccacccgaagcgtgactttcagcctaggcgtaaatgctttcgcaatcttctttttctctgccaccttcgccgactgcgtgatcacgatatccgcgcgaggcttttgcacgggaggcgtaatgtcctgcgcaaccggctcgtcagcaccgaataacgcccggcgcatatcttcttcagttagttctaggttcatgccgattctcggagggatgttagcgtgcgagaacgattctatcagcatgatggatttcttcagtagcgagtctccttttgatcagctgtagcacctggcgaccgtgcctgaaggatttaggttcgctgtgtattgatgccgccactggagaccgaaccaaagctgactgaggcgacagcggcaatcggccgattctgttgaaaaagtcggccatggtttccacggcagaaaagtacgcgtttgagattgaaatctttacttgagcagggcaggacccattcggtccg

SEQ ID NO: 659676 - DNA, 271 bp, Homo sapiens
  misc_feature (174)..(174): n is a, c, g, or t
catgtggctgaagaggatatcagtaaagaattgcgtgatctatagcgcgatccacgctgctcactgttcagctggacctgtgcgagatgacttgtccaactggcaagccactattatgagggcctccgtgtatagcgcatatcaagggtggagtgcttcattattctcagctgntctcgattttgccgcagcagattatccgtttaaaccaccaaagacttgcgtttcacaacagaaacttgatcatccaaagataaacagtgatggaagt

SEQ ID NO: 659677 - DNA, 1291 bp, Homo sapiens
taaaggagggagaaaaaaatgcacacaaatgcagggaatagtaggtctaaactcatgggggggtaatttaccctatagaactctcctataacttttccaggcatagttgtgaggaaactataaggaatgtgccttcccaatatatttccaaccctctcaaagcctcacacgtgcccccgagaaaaaacaaaacacctcacccccaatctccaatgtggaatctcattctgtgcattagaaaaacacagagagccacagcgagggcctatgagggaaggaggcggaagtgttgtgtggtgccctctccttctatagccccacatatacatagttctcaggtgggatagtgtgtctcgtggccgaggccaggtggtgtggaaggccctctcagagaggcctctcacttgagggaaatatataaactcagcgtggaggtgtctcctccttctcccacaatctgctgcggtatatacattctttacacacacaattgtgcggtgtgtgtgtgggcacacaaggtgtctctcacaacttttatacccatctcgagggcacccattctcttatgaggctctccagaaaaagaaggcacgaaacatataaaggggcgtcaccttctatatacatagtgcgctctatacagggggtttggggcgtccccctgtgtggggccgatatttctcccccccccctttttctgtggcgcccaatctccatcgtctatctctttagagggggagtcatcgccattatttatcaacccctttcatcaggggaaagtggctctcctctcccctctttacacacacaccaaaccttccatatctaccacacgaggaaacacgacgccacttcacaatacgacggcaacttcacaggtgggcgcacttctctactcacttgaggccccaatttataaatttcccccacacatcaagacaaacaagcggcccactattaacgagagaaagcaccaacaacacgcggccacaaagaacaacacccctcggtggcccccaaacgcgatcggacaacgcccaacaacacacaacacggggggggccctacccaccaacgacacacccaatatttaacggcacatcgtgcgcgccataaacacaacggcgttggctggcaccacgcacggcggggaacaccctcgtgtggggctccagagaaagacgacacaaccccggtggcgtacaggaagggccacttataaacacgtccccccacataaaacacccccaagggtggcgaaccacgggggggggcgaccacacaccatctg

SEQ ID NO: 659678 - DNA, 1084 bp, Homo sapiens
  misc_feature (543)..(543): n is a, c, g, or t
  misc_feature (580)..(580): n is a, c, g, or t
  misc_feature (590)..(590): n is a, c, g, or t
  misc_feature (595)..(595): n is a, c, g, or t
  misc_feature (602)..(603): n is a, c, g, or t
  misc_feature (638)..(638): n is a, c, g, or t
agcgggccggcaagctctggagcttctatcatttaccttctgcggaggcagatccgctacggtaattcagtaccaaactgttcgatatgatatcctaccccttatctcctgtgtcccggaatcggttagcccaggtgaagaggaagatcctggtgctggatctggatgagacacttattcatctcccaccatgatggggtcctgaggacccacagtccggcctggatacgtcctcctgatcttcatcctcaaggtggttaataaacaaagcatcctgtccggttgtttgtacataagaggccccatgtggatttctgtcctggaatgtggtgagccagtggtacttgacgctggatggctgtttacaagcaatgcagtggagatctatggctctgctgtggcactataagacctggacaagtatgcatgaaccgcattctttatgatggtagatacttacaagacagcactgcagtttggaagttgggcagctacgagtcaagggagctctctgtggtccacagtagacacatcgtccagcanttgtgatcctggataactccccaggggcttacagganccatccaganaatgncatcccnnatcaaatcctggttcagtgaccccagcgacacagnccttctcaacctgctcccaatgctggatgccctcaggttcaccgctgatgttcgttccgtgctgagccgaaaccttcaccaacatcggctctggtgacagctgctccccctccacctgagttggggtgggggggaaaaagtatccgagacctagttgaggcagattctgaccagattcatctgaggactgcctgggcagggtctgccactcccacccataactgccctgggagccctacactccacttgggagtctggatatatatatgtgctagtattcaggcgtggaaatgttgtcacccctcgtgttcacactccatggaaaccccatactgggacacaggcggaactgagggagagccgaatcagtgtttgtgaagaggccagactggccagagtgacagacatacggtgatccaggaagctcaaagagaagccaagtcagc

SEQ ID NO: 659679 - DNA, 944 bp, Homo sapiens
  misc_feature (297)..(297): n is a, c, g, or t
  misc_feature (403)..(403): n is a, c, g, or t
  misc_feature (440)..(440): n is a, c, g, or t
  misc_feature (450)..(450): n is a, c, g, or t
  misc_feature (455)..(455): n is a, c, g, or t
  misc_feature (462)..(463): n is a, c, g, or t
  misc_feature (498)..(498): n is a, c, g, or t
ggagatcagcgagctggctggatcgccgatcgcgagtgagggagccgagcctgcccgccgccgcacgcctccgcctcccctccgcgtaacaggagcctcggtgccggggtccctgtgcgatcgcctgcccacagcccgttcgcctcgtgcgtcaggtccgcgatgggtaagcgcagcgcgagcgagcgagggggaggggagagcgagcgatgcgccagtggtagtgaggcgtgctggagccgagactgggacgcgccgcgactgtgtggacgtgaaggcgtgaacgcactgcgttgntacctgagcggagacatgcacatgcagcgtttgcgagctttgggcagcgtagcatcaacggagccatcagtctgatggatccaacatgtgaccactcgtccagcanttgtgatcctggataactccccaggggcttacagganccatccaganaatgncatcccnnatcaaatcctggttcagtgaccccagcgacacagnccttctcaacctgctcccaatgctggatgccctcaggttcaccgctgatgttcgttccgtgctgagccgaaaccttcaccaacatcggctctggtgacagctgctccccctccacctgagttggggtgggggggaaaaagtatccgagacctagttgaggcagattctgaccagattcatctgaggactgcctgggcagggtctgccactcccacccataactgccctgggagccctacactccacttgggagtctggatatatatatgtgctagtattcaggcgtggaaatgttgtcacccctcgtgttcacactccatggaaaccccatactgggacacaggcggaactgagggagagccgaatcagtgtttgtgaagaggccagactggccagagtgacagacatacggtgatccaggaagctcaaagagaagccaagtcagc

SEQ ID NO: 659680 - DNA, 865 bp, Homo sapiens
catctctgtcgcggcccacaaatcgcggttttcccttctgcccggcaaaagcttacatgtgcctgttctagcgcactgcttttctggttacaatgtctcataggtatctcccgattctgatactctgtgggccacgggagcccctctccgattgtcactaggacctattcccgggggcttctttctgagggactcccataatagtggcgtgctcccgactcaaagataatataactgcggtggtggacgacgatggctcgctattcagggtactacctccctggcagcgtctggcacaatgcagaggcatgcccacgcacggtcaccgcacgagcaggcagtaccccatgacaatcccggggaaccaacccgtcgcgcggagggtaaaccacggcggggtccacacaaggcacaggtcctacggaagcacagtcgcaccccgagggcacccccggggataaaaaacctccacggacacccagccctggtttctccgtggcataagtaacacagtgggatacgaaatacgtcaatttccgggtgtactccgggtgcatggcaaaaaacatgcatattcccagtggcggggagaccatcaaccccggtgtaaacgacccccgtaggggcgccaacaccgcataccctacccataaataggcggacagccggcacacgaagcgtggggggccccccccgataagcccccacacggggagcgagtggtccacagatgaatgtcgggaggacgtttccttgcgcctatgcgggcactcaccaataacgggacccgcccccccgcctcaatgactcccagaggagcccctgccaacccatgtcagcgttttttgcccccccacataacgaa

SEQ ID NO: 659681 - DNA, 2511 bp, Homo sapiens
ccgcttagcacagcagaatttggaaacacttaaaaaagcaaaagggtgtacaatcatatttacagaccgttctggcatgagtgcagtgggccatgtgatgctaggaacaatggatgtccatcaccactggacaaaactttttgaaagattgccaagttattttgaccttcagaggaggctgatgattttagaagaccaaataagctatcttttaggtggcatacaagttgtttatattgaagaattacagccagtattgacacttgaagaatattactctcttcttgatgtgttttataatagactgttgaaaagtagaatactatttcaccctcgaagtttgcgtggtttacaaatgatccttaacagtgacagatatgctccaagcttgcatgaactcgggcattttaatattccaacactctgtgatccagcaaatctccagtggtttattctcaccaaagctcagcaggcaagagagaacatgaaaagaaaggaagagttaaaggttattgaaaatgaattgatacaggcatcaacaaagaaattttctttggagaagttatataaagagcccagcatttctagtatacaaatggtggattgttgtaagagacttctagaacaatcactgccttacctacatgggatgcacctctgcatttcacatttttactctgttatgcaagatggagacctttgtattccttggaattggaagaatggagaagccattaagtaacacagaaatctgttttatttttttaagagataagaaaggaacttaaattaaaaatatttaaatccacaatttgatataacagtattatttacataagaacaaagtttctaactgctgtttaaaagtagacttttttaaaaaaattaatttctgctaggagaggttttatatgccaggcgtggtggtcatgcctgcggtccagtacttagggaggctaagataggaggatcacttgagccaggaggccaaggttgcagtgggcccagattgcaccattgccctccagcctgagcaacagaacaagaccttgtctcaaaaaataataatgataatttaaaataaataagtaactaataaaaagattttatatcccagtcttatgatgttggttggcaaggctagataaaaagatgttagaatgaaagaacatatttttagtgatatgtaaatgaaggattctacaatagtcatatatttttatatgaatgaatgttgggttgggctggagaggtatgtgtgtgtaaatataaaggtctcacattcagagtatagctctgaaataatggaactcatgtctacaattcaacatgcatctgtatagttacatctcatgtaaatatacacagacatattttgcagccagtaattgacagttaatgtccaaaacaggtgattgataggtaacagaaattagataaccaccaattttgcccaagagaaagactagaaggactaaaagcagttgaatgtatggtactgacattgtcataagcagtctgataaccagtttattgaaacgtgtgcattaacagagaatttaattttaaacccataatttctcctatccattaaaatattataattgttagtagtatgaaaccaacaggaaatgttttttaatcatttagtgaggtgattcatttgtttcatgggcaaacactatccaggaaaagccttgcttgcctgtttcccaaagagctctaagaaatagaatcaagtgtaaaatggttcagaccattcaggatttcttgtcactcttctcaaccccgatcttcctgttattactgatgtttgaaaccctgtcattagccccggcctggttaaagcccctcagagtcacctctcattcatagcaatagaattcaaccccaagtggttgatggtgtccccagcacagccgagagacctgatctctggattcagtgcttttagctcttcgagtttaccctaagataccttcgggcaatatttttaaccaacccaaaagctcttcaggtcatttctgaagaggacaaggtgaatcttggcttggaacaccatttttgggctcttgctactgaatgaatcagaaaggaattttttctgaagagcattagaaagtaaaggagatgttaaaataagttcttgaagtatgttttatatttatctaaaacactgattttaaaagtttacattcaaatgtgtattcaaaagaagtactgatttgtaattattatagtttgtgtgtatcatcccttttaaccgtgcctaacaactgtacttaaattttgttttctagtgtaacaaatgtttcccataagattttctagagccaaataatgggagtgaaaaattccttaagtgttatataagaaaatatattagaaaatcagctttggattatacgatttctaaaatatactaatacagaatcctcagtaatatgttttgaattggattttttctcagaactgttacataataaataatacatcaaccagaaaaaaaaa

SEQ ID NO: 659682 - DNA, 2344 bp, Homo sapiens
ccgcttagcacagcagaatttggaaacacttaaaaaagcaaaagggtgtacaatcatatttacagaccgttctggcatgagtgcagtgggccatgtgatgctaggaacaatggatgtccatcaccactggacaaaaactgttgaaaagtagaatactatttcaccctcgaagtttgcgtggtttacaaatgatccttaacagtgacagatatgctccaagcttgcatgaactcgggcattttaatattccaacactctgtgatccagcaaatctccagtggtttattctcaccaaagctcagcaggcaagagagaacatgaaaagaaaggaagagttaaaggttattgaaaatgaattgatacaggcatcaacaaagaaattttctttggagaagttatataaagagcccagcatttctagtatacaaatggtggattgttgtaagagacttctagaacaatcactgccttacctacatgggatgcacctctgcatttcacatttttactctgttatgcaagatggagacctttgtattccttggaattggaagaatggagaagccattaagtaacacagaaatctgttttatttttttaagagataagaaaggaacttaaattaaaaatatttaaatccacaatttgatataacagtattatttacataagaacaaagtttctaactgctgtttaaaagtagacttttttaaaaaaattaatttctgctaggagaggttttatatgccaggcgtggtggtcatgcctgcggtccagtacttagggaggctaagataggaggatcacttgagccaggaggccaaggttgcagtgggcccagattgcaccattgccctccagcctgagcaacagaacaagaccttgtctcaaaaaataataatgataatttaaaataaataagtaactaataaaaagattttatatcccagtcttatgatgttggttggcaaggctagataaaaagatgttagaatgaaagaacatatttttagtgatatgtaaatgaaggattctacaatagtcatatatttttatatgaatgaatgttgggttgggctggagaggtatgtgtgtgtaaatataaaggtctcacattcagagtatagctctgaaataatggaactcatgtctacaattcaacatgcatctgtatagttacatctcatgtaaatatacacagacatattttgcagccagtaattgacagttaatgtccaaaacaggtgattgataggtaacagaaattagataaccaccaattttgcccaagagaaagactagaaggactaaaagcagttgaatgtatggtactgacattgtcataagcagtctgataaccagtttattgaaacgtgtgcattaacagagaatttaattttaaacccataatttctcctatccattaaaatattataattgttagtagtatgaaaccaacaggaaatgttttttaatcatttagtgaggtgattcatttgtttcatgggcaaacactatccaggaaaagccttgcttgcctgtttcccaaagagctctaagaaatagaatcaagtgtaaaatggttcagaccattcaggatttcttgtcactcttctcaaccccgatcttcctgttattactgatgtttgaaaccctgtcattagccccggcctggttaaagcccctcagagtcacctctcattcatagcaatagaattcaaccccaagtggttgatggtgtccccagcacagccgagagacctgatctctggattcagtgcttttagctcttcgagtttaccctaagataccttcgggcaatatttttaaccaacccaaaagctcttcaggtcatttctgaagaggacaaggtgaatcttggcttggaacaccatttttgggctcttgctactgaatgaatcagaaaggaattttttctgaagagcattagaaagtaaaggagatgttaaaataagttcttgaagtatgttttatatttatctaaaacactgattttaaaagtttacattcaaatgtgtattcaaaagaagtactgatttgtaattattatagtttgtgtgtatcatcccttttaaccgtgcctaacaactgtacttaaattttgttttctagtgtaacaaatgtttcccataagattttctagagccaaataatgggagtgaaaaattccttaagtgttatataagaaaatatattagaaaatcagctttggattatacgatttctaaaatatactaatacagaatcctcagtaatatgttttgaattggattttttctcagaactgttacataataaataatacatcaaccagaaaaaaaaa

SEQ ID NO: 659683 - DNA, 154 bp, Homo sapiens
cgatctaatgcgtgactgacaagacctgaaattcgaggaggcacgagatgaaggcacacagttccggatctgtaacgaagctgcaactgttcctgattcacaggaattggcgcagactttacatctgatgcggcacgagactatcaaactgtac

SEQ ID NO: 659684 - DNA, 702 bp, Homo sapiens
aaaaaaaaataaaaaaaaaaaataaaaaaaaaaaaaaggaaaaaaaaaaaaaaaaaaaaaaaaaaaaaaaaaaaaaaaaaaaaaaaaaaaaaaaaaaaaaaaaaaaaaaaaaaaaggaaaaaaaaaaaaaaaaaaaaaaaaaaaaaaaaaaaaaaaaaaaagggggcccccctgggcccaagcgacttaaaacccgggaaagttaaacaaagggccccaaaatggggcaaaaggggcaaaaccccccaaagggggggggaaaaaaaaaaaaagggccggggttaaaaaaaggggggccgggaaaaacccgggggtccccaaaaaaaaagccctgggaaaaaaaccccctttgcccaaggggggaaaaaccaaaagggccccaaccaggggcccttccaaaaaagggccccacccaaagggcaaagggaaatgggaggcggaaaaattggggaaaaaagcgggaaaaaactggggaaaaaaaggcaaatttaaaaccaaagggcccaaatcggaaaaaacccctaaaaaccaaaagaaaccaccccgaaaagggctcgaatgttggccccaagtgggaacaaggggcccccttttaaaaaaaccgggccccaacacgcaaaaggggaaaaaaaccccttagggggacaggccccccaatcggggaacccatcccctcgagttctgggggcaccagggccccac

SEQ ID NO: 659685 - DNA, 135 bp, Homo sapiens
ccaaagtgctgggattacaggcgtgagccaccgcacccagctgaattttccattctttcattagttatatatgattatttttttcagaaattactttttctcgtgtgattattatattgtgactatgttccgtta

SEQ ID NO: 659686 - DNA, 743 bp, Homo sapiens
  misc_feature (5)..(5): n is a, c, g, or t
  misc_feature (123)..(123): n is a, c, g, or t
  misc_feature (134)..(134): n is a, c, g, or t
  misc_feature (171)..(171): n is a, c, g, or t
  misc_feature (201)..(201): n is a, c, g, or t
  misc_feature (204)..(204): n is a, c, g, or t
  misc_feature (230)..(230): n is a, c, g, or t
  misc_feature (234)..(234): n is a, c, g, or t
  misc_feature (258)..(258): n is a, c, g, or t
  misc_feature (275)..(275): n is a, c, g, or t
  misc_feature (289)..(289): n is a, c, g, or t
  misc_feature (300)..(300): n is a, c, g, or t
  misc_feature (325)..(325): n is a, c, g, or t
  misc_feature (390)..(390): n is a, c, g, or t
  misc_feature (449)..(449): n is a, c, g, or t
  misc_feature (470)..(470): n is a, c, g, or t
  misc_feature (474)..(474): n is a, c, g, or t
  misc_feature (482)..(482): n is a, c, g, or t
  misc_feature (498)..(498): n is a, c, g, or t
  misc_feature (500)..(500): n is a, c, g, or t
  misc_feature (512)..(512): n is a, c, g, or t
  misc_feature (518)..(519): n is a, c, g, or t
  misc_feature (524)..(524): n is a, c, g, or t
  misc_feature (529)..(529): n is a, c, g, or t
  misc_feature (560)..(561): n is a, c, g, or t
  misc_feature (571)..(571): n is a, c, g, or t
  misc_feature (651)..(651): n is a, c, g, or t
  misc_feature (659)..(659): n is a, c, g, or t
  misc_feature (706)..(706): n is a, c, g, or t
cagcntcaaccggccaaggaacgggattatgaagactatgcggacttctatatagtcttcatctcaatgtgtgtataaagtatttagtttcaataaagcatttgtaccaatggctctggagcntggaggaagantaaaggaatgtgtagtgattctgagtaagaagtaganctacgcagcagagcaatgggggagaagaanaanaaagtccttacttctaaaaacagganagtnatgagtagcagttccaaccaaaangtcaatagggctaaaangccccctgtgtttntgaacaatganaatcttgccccccccgggtggagcnaaggagcctgcaactgggagtttgcagtaaataagcaccatgacacagtcatttctgaaccctcnatccagccgtggttaaaagatgaagcaaaggaggcaagaaaatgcataaattagcaganaagagaatggacagtgttatncttntctgttcnagccattgggtgatgnancacttttcagcnccatgnngctanttgtntcccttcatatcccgtttccatttatgcccnncagttatggnctagaatcaaacaattctaaacctcagtgtcttatgaagctgacacttcaaaacctgcagaagcagggggcctttgaggnatttagtnacaccaagtacaactagagctgttatagacagtgtaggtttgcaganatccacctccttgcttactggcaattagggagtgaat

SEQ ID NO: 659687 - DNA, 313 bp, Homo sapiens
  misc_feature (50)..(50): n is a, c, g, or t
gagatccgtcgactcaggtattgtgactgagttggatatacacttctgtngtattcttaatgacaagatactagctacgaacttcctatgaactagggaacctatgtgttcctcagtgtggttcctgaagccagtgatatgggcgtagataggaagactttctcggtaatgataaggagaatctctttgttccctcccacctgtgttgtaaagataaactgacgatatacaggcacattatgtaaacatacacacgcaatgaaaccgaagcttggcgagcttgggcgttggtcttgcaaaagtgcttcccaaa

SEQ ID NO: 659688 - DNA, 174 bp, Homo sapiens
gtgagctggtccagtaacccccgacgtccacacttctcaaaagaagacatgctgccattcctgactctttacaatagcaattctgattggtgtgaagtggtatctcattgtgggttttcgatctgcacctccccggatgatcagtgatgctgacgtttttattcatagtgattg

SEQ ID NO: 659689 - DNA, 166 bp, Homo sapiens
cacgtctgtgggcattttttttttttccttttaaaattgaaaggcttttaagaaaaaggcaggttttccttgaataggtaagaaaagctccccatttgtcccgtccctttttgagggagcagcccctatggaaactcgttattggtgcccacagaaatcctctcgg

SEQ ID NO: 659690 - DNA, 213 bp, Homo sapiens
atccccggttctgggtaaggggaaggggcactccccaggcggcacccaccactgacttccacgtcaggagtcagaagtgccaggaggagacgctctgaaactttcttcccagagtgggtgctcatggagttaagccacaacttccataaaagatgagcactcagcaaaatgacaaggcagctggacgtggtggctcatgcctgtaatctcagc

SEQ ID NO: 659691 - DNA, 296 bp, Homo sapiens
ccgatgtgtctcacttcagtgggatagtatctatccacgaacacacggcgagtttctcacttcagtgggatgtatctatccacgaactcacggccgagtgtctcacttcagtgagatgtatctatccacggactcacggccaagttgctcacttcagtgggatgtatctatccacgaactcacggccgagtttctcacttcagtgggatgtatctatccacgaactcacggccgagtttctcacttcagtgggatgtatctttccacgaactcacggccgcggcctcgtgccgagt

SEQ ID NO: 659692 - DNA, 931 bp, Homo sapiens
agcgggttgaaggcgctgctgtgcgcggctggcgtgctggctgtgctggcgtgtgggtgcgtgggcctgtgtgcttgtcagcctgtgcctaggagtgcaggaaggagcctgctgggctgtgcagttgtgaggggctgggacccggtttgcctggctggtgggtctagcttgggtggagggtcgggccatgctggttggtgctcattggccggcttggtttgcccgccttgtgtggcccctgctgagctgctgtcaggccagcccagctgagtctgtcgttgcctagctttgcactgactgccggcaagttggtcgcgcccgcgcggctaccgggcttccgtgacggggaccatttccgtcgcggtcgcgcgcctcggcgcgttgtgctctctctcgtccaacggtcccggaaccgttcggcgaacgactcacacctttacctccttcttcacctcgcacgaattaacacggccttggttacataccaaacgaccattggggcaccttgtttgcacacagttaggccaaggaacacgaaacgtggttgcacccgttagattacaattgggtttcaccctttgtacttggagtcacccgttctgggctaagttgcaattacacgggggcgcgaattttctcaactgttcttggacatcggaacttttggacgccccattcaccaccccttaagagggggcttgacgaaagatttttaggaacgcccatgaagctgaaacccaggttgggtaagagacctccgcaagtggatttgagcaatttgcgagcacggttccacggttggaacgctatcgctggacagctacatagcatgaggagttgaggcgtagtactcatattcacaccacatttctggagtgcgtgtccacccttggtgagtatcatacttgatggcagaactggggcaaacggg

SEQ ID NO: 659693 - DNA, 145 bp, Homo sapiens
gacgtggataaaacctggacgatcgtacacttccactttccaccaatccttgcttggtgctgtatgagtaatgcgtacgaaatatctcccttctgtcatggtagacctctcggaggactctatctcctgcatttttattatttct

SEQ ID NO: 659694 - DNA, 841 bp, Homo sapiens
ggcctcgggccccgcatggacgccgcgtctcctcgtctcgggctgttggccagagcctctgcctgtctttgggggttctggatggaggaggccacaccctgtaccctggcgccgggtgctgcctgagccgggtgcggagggcctgggtcatccccccgatcaggtatccgagaaccacaagcgtctcccctaccccctggttcagatcaagtcggacaagcagcagctgggcagcgtcatctacagcatccaggacccggcgtggatgaggagccccggggcgtcttctctatcgacaagttcacaggggaaggtcttcctcaattggcatggtggaacgggaaaagaatggatggtcacgggttaaaaggtttggcctgtggaccgggggaggatccacctgttggaggaccccaggacctggagattgtagttgtggatcagaatgacaaagcggccagcttcctgcaggaggcgtccactggccgcgtgctggagggtgcagtccccaggcacctatgtgaccagggaagaggccacagatgccgacagaccccgagacggacaaacgcagcgctgcggtttctccaatcctgcagcagggcagccccgagctcttcagcaatcgaggagctcacaggagaatccgcaaaagtgcaaagtggggctggaccgcgggggtggtcgcggtgtacaatctgaccctgaggtggcggacatgtctggagacggctcacagccactgctcagcatcatcaccttgatgacatcaatgacattgccccgaggtcaccaggaatgagtcttcaggaggcctaaagccgcagggagtgaatgtggc

SEQ ID NO: 659695 - DNA, 1347 bp, Homo sapiens
gtaagaggaggatatggtggtggaggacctggatatggtgaccatgatggaggtgctactggaggctggttattgactaactatgggaggaggaagagtctgagtggaagtggcaaagttacgaatggattgtgggaaattgactaaccaggaagcttctaatcgtacggtcacaagttgaaagagtggaaactttggggtgcgttagcacggtaatcagtggaggagtgatccgatattgcgatgtgacgtgtacaattatggctccaggagcgtcagctcgcgcagagcaagatggtggcgtgtcatggcggtggagcgtagtccgtactatctgagcctttcttccatatttgggccactggtgcctttcatcttgttattacagagtaggcgatgagcgcatttgaagatgccctcaaggacgtgctagacctacgtaaaacgaagccttttgctagagttttcgtacagcacagaataaccggagtgctatgagcggagagaactcttgtattttcggggtatccaggtagcgaggtagatattatatgccaaggtgtagttatttgggtcagaagaggacgaactgatggatgtgagaactgtaaagtcagtgagctccaagtgttgtgtgtggattcatgggaatcgggtaatttaggtggtaaagctaaaacctagttaaccgttgtacatggttgtgcacgcgcacatggattctggccagagatagccaccacacagttggcccttttggggaggagacccacggctctgccatataagacttatctttttaaaatatgtggatttcggttgaccatctttctaaagggtcggggccctctttcggttcgagatagaagtgctgggtagtgaaaccggccaattttggcgggttcaatcttggggggtgacagtgggcttgtggcaaagtttaggggttaacagaatttggtcaagaggaggtagactgggtagttcgaaaaccccgcctttttagggggaaagggaaatcgtttaggtgttcccaaaaaaggtttggtgagggcaaaatgccgtaatttaaggcgctaaaggagatcagttggggggtgggtaaattaaagggcatcagtgacacgggggtgtgttctccccctttttaaatcgataaaagcagtttgtcccagtttgcaagccttttgtttcgaaacgctttacaacgaaaagccctagggtggttcccagatgtctccacgtgactctcatgatacacgagaatatatccgcgaaaaaaggcgcaacctataaaacgcatgggaacacccgagcacataataattacccagaaggatcccacat

SEQ ID NO: 659696 - DNA, 117 bp, Homo sapiens
gtatctagagatcctcttatccgggagtgataatggtgtcattggatgtagaaaactttaacgcagacaaagaggactgtcacacaagtggaccggcaacgctgggagtagagccac

SEQ ID NO: 659697 - DNA, 904 bp, Homo sapiens
agcggaagggcttgattagtttgagaatgatgcacatttcactgtattccagtatgttctattactctatctgtggtgcgttgcatcagaaatgtctggagaataattcttcgatcatgactgttctcaaactaggaagaatctggactgtttgattcatcatagaatgatgatttagaaagattgaggctatattgaatcgtatagggattttctacaaggtattgcctgcgcatttgcagaaacagatatcggtgaattagaatcatcgaatttctgagtaatctgatcgtatctgtacaagctagatggaaaatgatttgtcacctctgaggccaagtgttatgcttgagtgtgttaacgagtagaggtttgaatccgatagataggtctattgtgtctcctagatatagatcacataacatgaatgcaccagtcatcagctattcagatggtgaacgcttccatggtagacacaaggagcgaggctaagaacacgagtgttgaagagcctgtacaataggctcccagattttcaagtctatattcctgcttgctttgtttcaaactctatgtgggttaagagatacatacacaagagaacgtccttgagtggggtttttcaccatggcgacagcggagagagaattgagagctacgctacccctggtgcgttccagggtttcgtaaaagcagacgattggtagatggtcctcttttatcgctccgaataagtggggggtattgaaagataccataatgtttaggagcggatggacttcgttactagaaagccctcttgaggagaaaacaagacggttttcgaaataacgtttgttagtttcaagaaaccccattaatatacatagaagtaaatcctctccaagcgattgcaattacaagg

SEQ ID NO: 659698 - DNA, 150 bp, Homo sapiens
  misc_feature (39)..(39): n is a, c, g, or t
  misc_feature (113)..(113): n is a, c, g, or t
  misc_feature (146)..(146): n is a, c, g, or t
gtttatttaaatcagagagcctctgaaggcacctggttnctgtctatatttttaaggcagtaacgtggcaactgtacagggagcatgatgggtaagaactgggcatggggagntgggagggggacatggagagcacagaggacgangcgc

SEQ ID NO: 659699 - DNA, 797 bp, Homo sapiens
  misc_feature (24)..(24): n is a, c, g, or t
  misc_feature (174)..(174): n is a, c, g, or t
  misc_feature (180)..(180): n is a, c, g, or t
  misc_feature (182)..(182): n is a, c, g, or t
  misc_feature (184)..(184): n is a, c, g, or t
  misc_feature (199)..(200): n is a, c, g, or t
  misc_feature (207)..(207): n is a, c, g, or t
  misc_feature (213)..(213): n is a, c, g, or t
  misc_feature (225)..(225): n is a, c, g, or t
  misc_feature (228)..(229): n is a, c, g, or t
  misc_feature (231)..(231): n is a, c, g, or t
  misc_feature (236)..(236): n is a, c, g, or t
  misc_feature (240)..(242): n is a, c, g, or t
  misc_feature (244)..(244): n is a, c, g, or t
  misc_feature (248)..(248): n is a, c, g, or t
  misc_feature (257)..(257): n is a, c, g, or t
  misc_feature (259)..(259): n is a, c, g, or t
  misc_feature (269)..(269): n is a, c, g, or t
  misc_feature (286)..(286): n is a, c, g, or t
  misc_feature (327)..(327): n is a, c, g, or t
  misc_feature (334)..(334): n is a, c, g, or t
  misc_feature (341)..(341): n is a, c, g, or t
  misc_feature (349)..(349): n is a, c, g, or t
  misc_feature (352)..(353): n is a, c, g, or t
  misc_feature (355)..(356): n is a, c, g, or t
  misc_feature (361)..(361): n is a, c, g, or t
  misc_feature (387)..(387): n is a, c, g, or t
  misc_feature (423)..(423): n is a, c, g, or t
  misc_feature (486)..(486): n is a, c, g, or t
  misc_feature (497)..(497): n is a, c, g, or t
  misc_feature (503)..(505): n is a, c, g, or t
  misc_feature (507)..(508): n is a, c, g, or t
  misc_feature (510)..(510): n is a, c, g, or t
  misc_feature (536)..(536): n is a, c, g, or t
  misc_feature (540)..(540): n is a, c, g, or t
  misc_feature (547)..(548): n is a, c, g, or t
  misc_feature (552)..(552): n is a, c, g, or t
  misc_feature (559)..(559): n is a, c, g, or t
  misc_feature (564)..(564): n is a, c, g, or t
  misc_feature (568)..(568): n is a, c, g, or t
  misc_feature (595)..(595): n is a, c, g, or t
  misc_feature (613)..(613): n is a, c, g, or t
  misc_feature (621)..(621): n is a, c, g, or t
  misc_feature (623)..(623): n is a, c, g, or t
  misc_feature (628)..(629): n is a, c, g, or t
  misc_feature (631)..(631): n is a, c, g, or t
  misc_feature (646)..(646): n is a, c, g, or t
  misc_feature (671)..(671): n is a, c, g, or t
  misc_feature (678)..(678): n is a, c, g, or t
  misc_feature (686)..(686): n is a, c, g, or t
  misc_feature (695)..(695): n is a, c, g, or t
  misc_feature (697)..(697): n is a, c, g, or t
  misc_feature (704)..(704): n is a, c, g, or t
  misc_feature (715)..(716): n is a, c, g, or t
  misc_feature (727)..(727): n is a, c, g, or t
  misc_feature (730)..(731): n is a, c, g, or t
  misc_feature (734)..(734): n is a, c, g, or t
  misc_feature (742)..(742): n is a, c, g, or t
  misc_feature (746)..(747): n is a, c, g, or t
atctttgaaagcacacaaaaacanagttttacagggtacaatacaaagtgaactttgatgatgttcttacttgcatttactaaaaatctgagaaagactgtaatcagtctctaaataattatcttgcgtaaagagaaaagtagagcacaatatatatatatcacaaaccaaatnacactntntntaacattacaacatnnaatttanttaatnaaaaataaaagnaanntngttantaannntntatnatttttttntnaatattacgntaatttctatttttggnatgaattattaaccttttccattagtaggcaaatgtgctcngcaaatnctcgganggcaccanggnnannattanatttgcaaatgtatccaacagccttntgggcagtagaacaggcatcagcaggggcgccactnaggcccactctcttcaagcactcttcatcagacacttcatttccaagatatgccacttctttncagcacaggcncatttnnntnntncattcatctacaactgctagcttgtntganacactgnnttcnattttgnaatcnagtntttaagaagacagcgtctgctttgaanaggccctttctgagattngcctcacntnaatannanttttatttaataaanttatcccaatagcatcttttacatnataaganattatttntttttggtntnctgatanataaatgtggnnattggtgaganatnnatnaatattgnaaannaaaagttttatttccttaagcttctctttgccaaaatagccatatcttaa

SEQ ID NO: 659700 - DNA, 1097 bp, Homo sapiens
atttccagtgtgcctcaccccggctgcgtctcgttcccccgggtaccggctcctgtcatcctgggttcttcagagtcgactcgctcacatgctgtcatccgtgttgccttcaatgccatgggttctttcttttgtacaccctttgcttatccatatgtatcatgggtatgaggtcctgtttttcgtgtttacttgttttgatgtaggaacagaatgtatgatctgtgtgtcctatgagaggtaggcctaacggtgattctgccctgttgctattgcgtaaaaaccttcttaagcttcctgtcccacgtttctctgacaagcccaatgtagttccctccaagttcttcttggtgtgtaggccttgtaggcattattgaaagcttgctgcctcacgtctagtatcgtctggggcccagcacccaggcaataactcttataatgtttcttaatgcgttatagcctcctgagactttaaatggtaaaatcagaattattaggaaatcttgagagggtagtcctcaagtttgtattgctttgctgtcgctctttgggaagaagggtacgacctggaggacacaggctcctgtgtgggtcttcatcctgcctgtaccggcagatcttcctcgtacaccttgggcaaagtctatgcgaagatggtttcttagctctccatttgccatgatgttcctcccagtcatcatgagggagtctctcaaaccaggagtttatatttattttgtagaaaatacacacttttcaggagtaacctgagcatgattttggattctccacctcccccctagtctctgcacctgggattcagctcaaggattcagtgtcttcagtgcttacaaaagttcccccaagaaatcagcaaccagcctctgtttcatctgggagcccctcctttggcccctgggtttgggggtgactgcccatacatgggaacagcgggggtctgtcaccacgtctgatgcctgcaccacacatgatatggatgatcaagaagagcatcccatgagcgtcgtgtcgtgcctatcgtataaataacaagtttcagaaagtaatattatctttcctggtgacctgtaacactt

SEQ ID NO: 659701 - DNA, 946 bp, Homo sapiens
tttcgccaaaaccaacgggttgcttgctgtcccagtggggccccctcatcatcgtcgctcatgccagggagatctgtcctcgaggaagctgtggctcccactctttcgaagtgacccaatacgcaccgtcgggccgcaaggtccggttcccgaccgcaatttcctggagtaggactcatgggggcattctctgctcctcccactcatcgggaaccttttaccccgaggtgtgcaacctacagaatgcattgggcaagagcttggcaaaggttgggcaccaagaaatttgcccaaggaggcaatgtcagtttggatggccctttcaaattagcccagctgttggagggacccaatctttgcccttgggaggcagggatagtcacgtggctttacaaactgtgtggaatgatgcccacaggaaaaatgttcacccctttttcccccatttcattccgatgactacggaaattcggggacgctttgcacatccttgtgggggcattttcggggtctcccaaggcaaacaagacgggattgaacaggggcattgctttgtgacagctcgtggtggggggctcgggattggggtcctgattaagaaggctggacggctgtctaatcttttacccagggtacccagtgccacgcaccttcggatgcagattctccagggtagtcatcctcctctccaagcttggacaggctcgacaacacaatggtttgcacccccagtttgatgggccacggatgggcgatacgtgtgatggtccttccaacattccttgatgaagagcaaaaaatttcccgaaaggagtcttcacaaagaggtcccattttggaggaatatctccgttaacacccagcatagtctgtggactgtgtgtccagagtttgtgccatggttctcgcatccatcattcggccagcagtttgggcacaggctacg

SEQ ID NO: 659702 - DNA, 201 bp, Homo sapiens
tttaaacggagtgactgacgaagaggacctccgttatcccggaggtggtctattcctgagatcacacttctctctttcttgttgatcagactgcctctcactgtgactaaaggtcaggaaggtgggtgggccacagaagcaaagggagacagaaacggaggcctttcctcactacagaaatcttattgctggcgtctcact

SEQ ID NO: 659703 - DNA, 828 bp, Homo sapiens
caaagtgcctggtttgtgcaaaggtggctctgtagcataatttagggcatcgcaggagctggtggttgtgacactctacaagatgggttttccggaagccgcgagttcctgttagacctcatcatatagaagctgttccaaactagctcttgcaagttgatggatcttaaggtgaatctttgtcttaaagggagatggagaagaaactttgaaggagtgaaggggaactagtttgtgaagaaaatcgggggtattatggctgcaaggtgaaatgattggtccgtggtgggctaacatgaggcggcagctgtatggagaatgtgacaggaatggtgaaaggatcagtggtttctaactcagataagagggatgatgcagccaatcacaagtggtgactcaagatatcctggttgaatgactgggtaaaatgaatcctcagtggggcttcgttcaaggtcgaattgagaaatcatggcagcatgggtctcgctaatagaagttaacaaaatcttgcagggttgagccagggaacgggaagtgctgaagagatgcctttggtacttgtgccatcgagatcgaagcaatcttcgatatctatccagacctccatgtgcagaattgagactgaaactactccttgggaagtagggggggcaaggatgtgttcttactgggggtgaccgcccgggatgcaaatgcgctggtgcaaaagagccgagggtaccaggtcggggaatggtcacggccttacacgccatgggatttgggtggggaacaagggaccacaaaagggggaccccgaatgttcaaaacgggggcaggttaagc

SEQ ID NO: 659704 - DNA, 586 bp, Homo sapiens
  misc_feature (17)..(17): n is a, c, g, or t
  misc_feature (110)..(110): n is a, c, g, or t
  misc_feature (113)..(113): n is a, c, g, or t
  misc_feature (116)..(116): n is a, c, g, or t
  misc_feature (134)..(134): n is a, c, g, or t
  misc_feature (136)..(136): n is a, c, g, or t
  misc_feature (155)..(156): n is a, c, g, or t
  misc_feature (158)..(161): n is a, c, g, or t
  misc_feature (163)..(165): n is a, c, g, or t
  misc_feature (188)..(189): n is a, c, g, or t
  misc_feature (244)..(245): n is a, c, g, or t
  misc_feature (247)..(247): n is a, c, g, or t
  misc_feature (253)..(253): n is a, c, g, or t
  misc_feature (255)..(255): n is a, c, g, or t
  misc_feature (274)..(274): n is a, c, g, or t
  misc_feature (292)..(292): n is a, c, g, or t
  misc_feature (298)..(298): n is a, c, g, or t
  misc_feature (308)..(308): n is a, c, g, or t
  misc_feature (320)..(321): n is a, c, g, or t
  misc_feature (329)..(329): n is a, c, g, or t
  misc_feature (334)..(334): n is a, c, g, or t
  misc_feature (336)..(336): n is a, c, g, or t
  misc_feature (338)..(338): n is a, c, g, or t
  misc_feature (350)..(351): n is a, c, g, or t
  misc_feature (355)..(355): n is a, c, g, or t
  misc_feature (374)..(375): n is a, c, g, or t
  misc_feature (377)..(378): n is a, c, g, or t
  misc_feature (398)..(398): n is a, c, g, or t
  misc_feature (577)..(577): n is a, c, g, or t
acgtgccccccaggttngaggggagctaagagatgagagaaggggacagaggaaagaaaagatgttgcatcagagaaagcatgagagagccagggagtgagggactgaanganaancaaagaaaaaatacaagnanaaaaaaaaaaaaaaaaaannannnnannngaaagagagaaaaaaaaaaaaannaaaaaaaaaaaaaaaaaaaaaaaaaaaaaaaaaaaaataaaaaaaaaaaaaaaannanaaaatntnaaaaaaaaaattatttggngcggaaaagctctgcggnaggagngctcaggccntcagtccgaggnntggtaggnagggntntntagagggttgtnntttntttgtttggggatattttnntnnttattttcctctttgttttntttatttttcttattttcatctttgtcctcatcatcctccttgtcctctgcctcctcctcctctttgcgtttcttgtcttcttcctcctccttaagcctctgctcctcgtcctgtttgtccttcatttgtttctctgctgcctttgttacgccccacgtctcgttgccaaactcctcancgtatgcct

SEQ ID NO: 659705 - DNA, 664 bp, Homo sapiens
aggcaggattgctcggtggtgagaaggttaggtccggctcagactgaataacgcaagagataaaatttgccttaaaacttacctggcagtggctttgctgcacggtctgaaaccacctgttcccaccctcttgaccgaaatttccttgtgacacatgagaagggcaatacggtctgatgacccagcagtttgacggatgggagttatctcagggttcagcttcatgggctcccaaagcgacatatcgtcagggatgagatggcccagggtgcggcgactgggcaactttaaggagagctgggatacggagtcccttagggttcaggaacgcttctgtgcaagctgtcgaggactggcttgggcccgaagggttgctctgccccgcctgcgctagctgtgagctgatgcaaagccctgggcgtcatcatgcaccctcagatgcctgtggcttcaggtcctgcgtcgtgtgccacacattcgaaaggatcgctcagtgatggcttttaacggaaaggtgacattggcttggattcttcatgagcacatctgatatagctctttttccgttatccttgctcattgcgtcggcggaagcaactctgtctgtattgggatctgtcgaacatctctgcgctcagacagttacgaaataaatgtctgcggg

SEQ ID NO: 659706 - DNA, 587 bp, Homo sapiens
tttaccgcgggcataggcgacctcccgctccataatcatagctatcctcaccgactgtgcagtgctctgagccctaggattcatctttgtttccaccgaatgaggtctgtctggcgtggaattagcctacccgtcactagacatggaactacacgactcgacctacgtcgacgctaactgcccctatgtgctatcaattggagctgtgttcgacataataggagggtttattcactgattggccgtattatcaggctacaccctataccatacctacgccaaataccatttcactatgatatacatcggcgcactactatctttattgccacaacactatctcggtctatacaggacgccctggcgctactcggactgccccgacgcatacaccacaagaaacatgctatcatctgatggctcattcattcatctaacagcagattcattaatattacacatgatttgagaagccttcgcttggaagcgaaaggctctaataggagaagaaccgtccatatacctggagagcctatctggatgccgcagagactatcagacattcgaagaacctgcatcatataata

SEQ ID NO: 659707 - DNA, 693 bp, Homo sapiens
  misc_feature (386)..(386): n is a, c, g, or t
cccaaaaagcccaataaaacatggtccccaaggttggtcgccccttaaaaccgcacttaggtgggtaacccaataaataaattttttatattttttaaaaaaaagaaagcttgtgaaatttatgtttttaagcctaataaaccccctggtaatacggggaatcaatatttgatccccaaaaccacagggggaaaggagggccaccgtggttttacaaccctgttttaaactctccattccttaaataataacctttgtttcaacgtaaatgactctccttaggctaagagcgcaaatggactcatcgtggctctttcactgcaagccgcttcctcaaggacttacctgtgcaagtggattccaagcacatccaagaatgcaattanttgataagatactgtggcaagctatatcggcagttccaaggaattcgtccaattgattacaccccaaagccccgcgtctatcaccttgtaataattttaaagcccctgcacctggaactattaacgttcctgtaaccattattccttttaacttttttgcctactttatttctgtaaaattgttttaactagaccccccctctcctttctaaaccaaagtataaaagaagatctagccccttcttcaggccgagagaatttcgagcgttagccgtctcttggccaccagctaaataaacggattctt

SEQ ID NO: 659708 - DNA, 543 bp, Homo sapiens
caattgcaggctggtcctgccctgggatttatgggatggctggaggctgctccctgtgaccggtgacgcatagtcttgcggaccctggtccgcctgagtgcgtgcaccgcgagaccgcctggctgcgcactgctccggcctgcgcagcccggccctggccatggctgtgccccccgcccgtctcccgcgatctccgtttcgtgtctcgtgctccggctttattacgcccctgcagaagaagttctggccctgtggtggccccaaatgcccaaatgtgaatcccttcctggcccggtggacagctgagcctccccctgtgcaccctgtgtggcccatgctgctgcacagatgggccgggtgggctgagattccccctgtaaggagcacacctggtacaaggaagataaataccaccatgacacatcaccagacaataacaccttataccatgactaaaatggcaacacagaaagcacacaaggtgagctgacacataagaagaagaaatagaactataacagaatggcaaacaaaacaacaaag

SEQ ID NO: 659709 - DNA, 346 bp, Homo sapiens
cggctgagtcatactataggaccccaactgtcagtgctgcctgcaggacctctggtatgggttcaccattccagaataaagctgtgtctgccagccagccagcctgatctctcctcttcctcctggaaatcgcaagtactctcccctgcttcccttaaactcacttgcatttctgaagaacagtaataacccttatgagcctaatatatcccttcattctattaggtctattcatccttaccctactttttgcaacagggctttacacagtcacccccactacttggactgtgccccaaaaacttgtcatccctactatcttctgtctagtcatactcctattcac

SEQ ID NO: 659710 - DNA, 457 bp, Homo sapiens
gatcatcctaggcgaaagttttttttgtttgtttgcttttaaattaggttatttctaaatcttagtcttccacatttttagaggccccctgacacaagtccctgtatttgaagtctagcatctcaaggctgatctggaagtgtgctagtatgctccctagtggataacttaatcttttaaaacaggtccgtcattcccctcttgttttcagaaaagaaggtggctacagccaggcataacatatcccctgtgtgcatagagggtctcttcccgttgatgcttggccttccctcagctttctttaagtctttgctcaagttccaccttaaaatgatgttaggccacaggtccccgtcagttccctctattttccccccttttgctccccagccatattgggccgattagtgggactgtttgactcccgtgtgtgatccaaataaaggtagctgctgga

SEQ ID NO: 659711 - DNA, 305 bp, Homo sapiens
aacaatatgtctgagttatccagaaaactagaataagctgagagagactgtttttaggaaacggtttctttctttttttttgagacagagtctcgctctgtcgccaggctggagtgcactggcgcgatctcagctcactgcaacctctgcctcctgagttcaagcgattctcccgcctcagcctcctgagtagctgggattacagccatgcgccacccacgcccagctaatttttgtatttttagtagagatggggtttcaccatgttggccagtctagtctcaaactcctaaccttgtgatcca

SEQ ID NO: 659712 - DNA, 1048 bp, Homo sapiens
ggcagttcggaggtccctccgacatgcctccttgctcatcagggtgtaggacagaccagcagatccgcgggactctcattccaacctccgaccgatcctccgatttcctctccgtttgcatatcttccggggaccattctttctcggccatctcacttgccttctgggaccatgccagactcccggtatgttgttggtttagctccttcttgccagcccaatcagtgatgctcccattagttcaatctcagaatttatgaccacccgatcgtgggagagcatgcgcgtcaaacaagcgcatggatctaatgtcgtgaccgtgcatggcgcttctcttacatactagcttctctctggttcgttcgtatttctcagaacaccggcgaatcgcattgtgggcgtcttgagaagggcagtgatgccgaactttgttcgccgcagcacattgggccgtagtgatgaagcgcagtagatcttggaagaatccggtcttccttgtcgagaatgtctaaagacccagactggtagtgttggatcgccgacatcatcctgaccaagagacatgctggggaaatgccgcaggcttgacagtattgactgtgagggaatccaaaaacccgctgacgcctttggtagaagcatggcaacatgcgtcccttggtgcgaaaggatatctcggtgacaaagggccgttgatgggaattcttcgattgacgcctgggctttctggcaccgctatcgttaaaacctccgcatgtcttgtgtgatcttaaccgtgatgatttcactattcgcgtacgattagtaggcaagtgtacagcgttattctaagaaagataggggtgtagcaaaccttgtacaaagttctgctacaggctggggaaggcaccctcatggctagtgctaggttcgagaacactacacagttacaaaagggctcacattcttcacatgcacgaactcactaagccttctggaggctcagacggaattctgaacagggcccttgccaaaagaatacgggttgttgctgaagccttctcacatc

SEQ ID NO: 659713 - DNA, 203 bp, Homo sapiens
ctaccctaggcgcacttctggcgtttgattactttctagcagcagttcacacaactcagcgcaaacatcttatacgttacatttatagtgtttcaactctaaaatcccctgtgcagaaaggcttagctcgcgcctgcagcactgaaacagaacccatttagtgtgaggatgccgtcgaaggggcatgtagaccaggaccaaat

SEQ ID NO: 659714 - DNA, 877 bp, Homo sapiens
  misc_feature (126)..(126): n is a, c, g, or t
aactcgtgtaacgtcgatatcatctgttggcacctatgttatgctaccagcggccatattcatagttgccgtgatgcgaggaatcctgtcgggtcgaagtgaaaagctctctatactagtacaaantaccttatcaggagtagatccctggagtgacgtatagtgcttctgtacggcgcaactctaccacataatttcgatacaggcaagtttacactaacattcatagatgaaactggggaaatggtccctcgtcacggcgccaaagggtggctttgaagccgtgcccatcgcctgccaatgacgtttccccaaggaattatgacattgctacttgagtgtgaagcagtgacctggacaatactgatgataagcatatctactcttaattgtgagacagacgtttccctttattgaggtaccacgccatgtaatgggtaacctgtggactttacctacacagggaacatgcgttggagtcaacaaaaaataaaagagcgcccgggtcagaaacccgttcgtccggcgcgaccacactcccagaagaagtcttgtaagcgaccacaacgggtatggacacaccgacacacttcacggaaatgcaccatgttccaatttgttgcccccaaggaaggaatcgggcaaatgaatgacgcgctcggagacttcccccaaagaacacagacgcgggaaaccacgcgcttctgaacccaaccccgacagggaatacgaaggccacgcgagcacttacaacagaacacaggaggagaaataacaaagccccccggggaagatgccaaacaaacgtacaagccaagccaccaaggatactacaaacgacagagtataaaaacaccgagacacaccgcttcgtacc

SEQ ID NO: 659715 - DNA, 210 bp, Homo sapiens
tagtaggcttaattccactttatttatttagagatagagtcttgcagtgtcacttgtgctggagtgcaatggcatgatctcagctcattgcaaccttggcctcccaggttcacacgattatcctgcctcagcctcctgagtagccacgcgagctaattttttatatttttagtagagacgggatttcaccatgttggccagactagctgc

SEQ ID NO: 659716 - DNA, 147 bp, Homo sapiens
atgtttaaagggggggggtttcccccccccccccccgccccccccttgggcccccccaagggttttttccaggggttaaaaattgaatttaaaaaaaaaaattttgaaccccaaaaggggttttaaataaaaaaattttttttttta

SEQ ID NO: 659717 - DNA, 193 bp, Homo sapiens
  misc_feature (173)..(173): n is a, c, g, or t
cattcaggtgattcggctcaagtatgacctggccgcaccgaagcgaagatcaggtgatggttgaccacgccaataacggcgagcactacgaccagttgatcgccgccgacaatgaaaagggcaaccagatcgtgcgtgactctgattgcgcgctctgtgtacaagcgagaccngtgctcgatcgagggctgct

SEQ ID NO: 659718 - DNA, 377 bp, Homo sapiens
acgactctctactgcggtccatgtacacaaggaactgggtgtacatgctgattattgtaaaagcagtcgatagtcatgcttgcctcgctgcaccacatgcagaaacagctacagcctcctcaacctggcagaagttcgcagccaatactgcgaaagccaaggagatgccaatccccaatcttcctcccttggatcctccatctccgagaacttcctcattatggagctctctgcaggcatattctgcacacggatttatgaataattaaaatggaaggccacagaaaaggggaaaagaggaaataatacagtcactcgttaatccagcaaaaagaaatgagaagggaaaaccacatagaagggtaatcccggaaatg

SEQ ID NO: 659719 - DNA, 154 bp, Homo sapiens
ctctagacgatcgcttactaaatggctgtcacagtttactggcatcagttcagatgaagctcctgcagttcgtccctgtgatccttttccaatctgatccttctattacccttctttcttacccccgtgtaagtaaggaaacgttactacggcc

SEQ ID NO: 659720 - DNA, 203 bp, Homo sapiens
ggcctcgagatctggcggactttttctctgctgtaggcaaggttcgcgatgtacgtatcatctcagatcggaactcacgtcgtactaagggcatttgctacgtggaattctgtgaaatccagtctgtgccactggacatagggctgactgggcagcgtttgctgagagtgcctatcattgtacaggctacagtgccctggggt

SEQ ID NO: 659721 - DNA, 336 bp, Homo sapiens
gggggggcccttttttgtttacctttttttaggtattgtttagggggggggtttccctttgtttatccccccccctgggctaaaggtggtttttttccgtttcctttggggggccccacccccccttacctttttgcccgccccttttaaacctttttttttccaaaaattttattgggttcctttttttttaagggttttttaaaggggggggttcggggttttggtttttcccctttttttggggaaaattcccgttaaaaggtttatttgggggtttttttttcctatttttccttttttttttcgggttcccgtttttttaaaattttttta

SEQ ID NO: 659722 - DNA, 311 bp, Homo sapiens
acgaccaccttcacctgaacgccgccggttacctcttgacggccttcgtcgtgttctgtctcgtatttgccgctccaaatgtgatcgcgcccccgaccctgaggatcgatgatcgcgggatgacctggaaatcctggcgacgttcggcgacgtatttgtggtcagatatagataaattcttggttggacgcgcagtgcgtggcggaaaaccaaaaattgcgttcgattttcttcctgggaaaaccccatctcaagtgaatgcgacggcgttaaaccgatcagttaacggctatgatcgttccatggccaat

SEQ ID NO: 659723 - DNA, 115 bp, Homo sapiens
gctcatgtctaggcaacatagtgaaaccccgcctctactaagaagtacaaaaaaagttagggaggcatggtggtccatgccgtgtgatcccagctcttattgcccaggctggagt

SEQ ID NO: 659724 - DNA, 133 bp, Homo sapiens
actcacctcggacctgatagtgagattaaatgttcctgattgttgaatcttaaaagtgccataatggacattgatgtcccagatgtggaggcttcaacggcccagactggcacctgaagatgccctttctggt

SEQ ID NO: 659725 - DNA, 259 bp, Homo sapiens
ttaaaaaaattagcatttatcactacttgacattatagcacatctatttgataatgtgttcattctcttctctacctactctagaatgcaatagaatgataataatcacaataataatatctgaggcaatcattaaatgattgctaagaaaccagagaagtcctctagaacacttatacaggccttaatatcattacaatcttcatagacaactaaaatatactttaggtagctattagaagacttctaacaactagag

SEQ ID NO: 659726 - DNA, 346 bp, Homo sapiens
tagcaggacccgcccatttatttaatcataatacatgaattaaattaatcaaataaaggaacagcaatttagaaagaaacacactttaaaaaatcaaaattctcaattcaggcagtctgttcctatcattgggtatcctactcctttaaaaatctcatatggcccaacaaaaagtggttatttttactggttttgggagatgactgaacagatgaaggcatcagatgcctccatcagctggtatttggcctaagatctatttaagataaccttttcttatatttttaacttaatattgggcataatcgtatcattcaagataaagtctgggtcatttctttgataa

SEQ ID NO: 659727 - DNA, 1059 bp, Homo sapiens
gggatacacatagcgagttatcatccgcacgtggactcttgccggtgcatagaaccgactcacatgatatgtggttgtcttgtgtgtgatgtctagtgtgtgtctgcggtgcataggcgagaccgagtatagtcagtggttccctaaggtctgttggtgtttgggacagacgcgcaatcggtccgcgaggtgcgacatgaggtgatgttgtgatggcctgctggctccgctgaacacgactatgataacctccgttctgatctggtgctgccaattgccctacgaggagcaggacccactgcacacatcttttgtgagcatacttccctggtgacaccacgacagcggagagtcctgttggacggcgtattggaaagaggtggcatgcggctgttgagacgttggttgcagttgacgtctggcatggtgacctctgcgcgtcccttgtgaagcagacttccctgtggtctaccttattcgcaccgtgcatgcaagcgtgaaggtctgaggaatcaaggtcggcagatcatgtgcagaggactacttgcatacgcgcaggcgtcgccagaaattctaccttgagaaatcggccatccgggggttctattctgttccctaggtggcatttcatagcggagttgtccatctgcacggtgcctctacaaaggatgctgcgctggtgcgtcctctgggccaggaggtccgactacctggccgctctaaggaaagtaatcgcgctttggtcgtgtgctgacgagtcgacgtctaccgtggatagggggctgtaccattcgcaagctgggagaggagagagatcacgctaagcagcgtgatcctgtgctggacagatgattctccgatgtggagggagaactgggcggcatagagcaggggcgcttgtcggtggcgcgctctggttgctgtggaccggggcctgcccaagcttcctttttctgagggggcccccttcgcttggtcgggcagcagcggggggccgttgtgcgcgcagtgccgggtgccccccttgtgggcaccccgttttcccagattttccaccgc

SEQ ID NO: 659728 - DNA, 239 bp, Homo sapiens
ttgatttggggtttgtctttgatggtttctatctgcaattatcgtcatggatatttaagggtctgttataaaaaaccccccccccctgtcctgtaaacttttttcagtgtccagactttttgtaatcacattttaattgccccctcgtatttcccctctacatttgaaatctggggtctgtttcaaaccagtgtgtttttttttcgttttgtaataaacagcccggagaaaaaaaaaaa

SEQ ID NO: 659729 - DNA, 320 bp, Homo sapiens
ataaatccatgtggcggcgaggttgaaagggacagcaggactgtatcgtatgtgcgttatagccacattcagagtgggctgtgaaagacagtggttagggactattcacccagtgggtagagctgagtgatgatgcttgtcactacactgttgctcagaaagaaaagtggcccatagctgggtgcagtggcgtcgtgtctgtaatcccagcactttgggaggccgatgtggtggatcacttgaggtcaggagtttgagaccagcctggccaacatggtgaaaacccgtctctgctaaaaatacaaaaattagctgggcgt

SEQ ID NO: 659730 - DNA, 444 bp, Homo sapiens
tataatagtagagcacaggattttgacaagttggccaagcttgtctcctgggctcaagtgactccacccaccttggtctcccaaagtgctaggattacgggcctgaaccaccccacccggcccaatcttattattactggaagtcgccttgattacaaacaaacattctacagtgcctcctggaccactccttctggacttttctttcctagcccaggatcaaagtgggccttcgagaagaaccctggaggagcacccccctcctcttcaattccacccttctctcttccaacccctggaaatcagctttctgacctcagaatcccagctgtcttctggactcaggtgacaagtcaactaaagtacagatccaacatgaacttaatgaccaatcactctgctcctcctggctacgcgcccaaaccaacaaagccgaacaggctg

SEQ ID NO: 659731 - DNA, 558 bp, Homo sapiens
  misc_feature (128)..(128): n is a, c, g, or t
  misc_feature (460)..(460): n is a, c, g, or t
gacatgatacaatcgagtcggtaccattcggccggggaatgtgggtcttttgggtgtccagtatgaagcttgaagtagtttaattgcaattgctggtgaagaagacgttggtagcttgatgggaatgngattgaatccataaattaccttgggcagtatgggcattttcacgatattggttcttcctatccataagcatggaatgttcttccatttgtttgggtcctcctttatttccttgagcagtggttggtagttctctttgaagaggtccctcacatcccttgtaagtgggattcctaggtattttattctctttgaagcaattgtgaatgggagttcactcatgattggggtctctgtttgtctgttatgggggtataagaatgttggtgattttggcatattgattttgtatcctgagactttgctgaattgcctatcaggttaaggagatttngggcggagatgatggggttttctaaatatacagtcatgtcatctgcaaacagggacaatttgacttcctcttttcctaattgaataccctttatttat

SEQ ID NO: 659732 - DNA, 443 bp, Homo sapiens
tctagtagtggagcgaacatctgtctgctcatgctatggagagactgagtacaagcagacttcccaatactcttccttcagttcccacgactacagtctgtattcctgtgattgtggaattcatcaatgagatcctcaacatacgtaccaagggccggacatggtacattctttcactgaccctctgccgtttcctggcctggaattattttgcacaccttcgtttggaggttttacagctgacccgccaccctgagaactggaccctgcaagcccggtggcggcttgtggggctgcccgtccacttgctctttttgcggttctacaagcgtgacaaagacgagcattaccggacctatgatgcctactccactttctacctgaattccagtggcctcatttgtcgccatcgtctagataaactgatgccttcacactcacct

SEQ ID NO: 659733 - DNA, 431 bp, Homo sapiens
ggcatccctggtttggggagtcggaattattggtgatggccctgggactacggttgttgtattgaattgataacaactagactgtgacatagcgagtaacggaaaaataaaggtataataggtctaagaattgggacgactcaggacatctgattagagagtggctaaggacattcagcatagccctgccaggtaagattattcatctcacttcaagagttcaagaatggcagtttggggatagcatgaggcaagcgtgatcagggtgaggaacaggaaagaaggaaatatggggaaatggggtgaatatcaggtggatcagagagatacagtcatgagggtcaggtgtggtatccggaataatgtgggaggccggattgaagtccgggccaggaacaatggtaattgtgggagactcaacaaagagtgag

SEQ ID NO: 659734 - DNA, 294 bp, Homo sapiens
  misc_feature (4)..(4): n is a, c, g, or t
  misc_feature (12)..(12): n is a, c, g, or t
  misc_feature (109)..(109): n is a, c, g, or t
  misc_feature (111)..(111): n is a, c, g, or t
  misc_feature (167)..(167): n is a, c, g, or t
  misc_feature (189)..(189): n is a, c, g, or t
  misc_feature (213)..(213): n is a, c, g, or t
  misc_feature (274)..(274): n is a, c, g, or t
catnggggcttncttggggatttcaccacatggctgagctgagggacgacagagaggaaagccattcagctccagggtcctgacaaaaagttggttgaccctgtagatntnagcagaactctcaaagtcacatcacccaagaggaaaactagtgtttctgctactgnttcagtgagcgcaactaatctnatcagcatggtccagggacagttnagagttcttgggcaagaggggaatctgctgctgcatcgggcagcccatccagtatgctcgntccacctgcgaggccggcgt

SEQ ID NO: 659735 - DNA, 315 bp, Homo sapiens
  misc_feature (293)..(293): n is a, c, g, or t
ccagcagcgagaggctttgctctttggccagcatttcctctttatcgctccattcggcggccagctcatttttttcttctacctggatgaaaatgttccggtcgcgcaactgcatgaggcaatgattcctggcaaccatgtagagccagcttttgatgtataccactttgtattttgccagttcggtaatggctttcaggaatatttgctgcaccgcgtctttggctgcttcttcatttttgaggtatttcatacaaacacccagcaataaaaatgtgaccgctggggaaatncaaaaggaccgagctgaattga

SEQ ID NO: 659736 - DNA, 195 bp, Homo sapiens
gctgaagatcctggtgtcgccatgggccgccgcccgcccgttgttaccggtattgtaagaacaagtccgtacccaaagtctcgcttctttgccgaggtgtccctgatgccaagattggcatttttgacctggggccggaaaagggcaaaagtggatgagtttcccattttgggcccatgggtttcaatgaatatg

SEQ ID NO: 659737 - DNA, 224 bp, Homo sapiens
gaggaccccaacgctatatacttctcaagcttatacttcctcaacgcttatacttctcaacgcttatacttcttaacgctttatacttcctcaacgctttatacttctcaacgctttatacttcctccaacgcctttatactctctcaagcgctttatactctctcaacgcctttatacattctcacagcgctttatacattcgtgcgcgcgtttcgcctcgca

SEQ ID NO: 659738 - DNA, 139 bp, Homo sapiens
cacttgagtgcaatagtccccagttctcaagggcacatctgtgtgggaggtacggtagagcccttgagcgctcatggaaagcacatctctcctctagcgggttcctgctctttgtactaccagggagcgccccgggaga

SEQ ID NO: 659739 - DNA, 342 bp, Homo sapiens
  misc_feature (239)..(239): n is a, c, g, or t
  misc_feature (250)..(250): n is a, c, g, or t
  misc_feature (330)..(330): n is a, c, g, or t
  misc_feature (340)..(340): n is a, c, g, or t
tgatagatacaacattttatttttcacagccataaaaaagaaagaaatcatgtcctttgcagcaacatggatgcagctggaggccattatcctaagcaaattaacacaggaacagaaaaccaaatattgcatattctgacttacaagcgggagctaaacactgggtactcgtggacataaagttggcaacaatagacagtggggactactaaagggaagaggcggaaggagggaaaggnagactaactgnagggtactatgctcagtaccaggatgatagatcattcgtacttcaaacctcggcatcatgcaatacacccatgtcccagnacgtgtcctngt

SEQ ID NO: 659740 - DNA, 180 bp, Homo sapiens
  misc_feature (36)..(36): n is a, c, g, or t
  misc_feature (40)..(40): n is a, c, g, or t
  misc_feature (122)..(122): n is a, c, g, or t
tggtgttcgtgaaggtccaaagaagtaaagccagtnaggngaaggtagagccaggcaccgaagagagccgcgggccttgtcacagagtttggttggtgcttgagagctaagcataggctctnaggagccataagtagcccagggcaggcccaggctgcattctgcagctgccagcgcatt

SEQ ID NO: 659741 - DNA, 139 bp, Homo sapiens
ccactccataaggaaccttcactaccatgccgatgcgtggaataacctgctcctgaatgatcactgggtcaaagataaatcgagatggaaatgtaaaagttcctcaaactgaatgacaattatgatacaacctatcaac

SEQ ID NO: 659742 - DNA, 1150 bp, Homo sapiens
gcatggaccgaggtggcttcggtggacggaagacgatggtggccctgcgtgggtgccccccttgtgtaacctttgatgtgaccagtactggccaggaagtaaggaggaggaccgtgggagcgacctggcaagaacactggcatagaaggctgatgcactgtcgtgggagacgccagatgatcgggcctacctagatgcatagaccccgcaagagatgcacttgacttaccagattaatccttcttaataccatgacaccctgtgttacaattggtatagatttccgtagttttataattgtgggccacaaagtcatgattattcctgtgtgctggaactttgagaattctttcaccaattttgtgaggaaaaccttgaaacactcatgtgtaaagtggccagctgtgcgggacgtcaatattgctacctactttcctaggaattggttggtgccaagaactttaaccgatgggaacccccgttgtggaggcatgctccaggtaatcagtggctggagacccgaagaggggccctcttagctggtaacgcaagtgttgcacagggggtgggtcgactggtttggacaggggcgtctaattgaaagagagacaagggtcccagacttggttgttgatcctatgcaactaattgacggcaaggaccagcttaccacgacccaccaattattgggctacctcaattatgacactgggatcgagcagagacaccacgaatggaaccaaagacacgcattgtccttcggggcgtcgcccgcacagagtagtaaataaaaacagtggcttagaagaggcgggccagcaatgataagagagagctcagcaatatcagccggtgaaggcacgtagacaggtagctgggtgactcacacaaaaaacgcgcgggcgcgcggctgaaaaaccaagcgtggggaaaggtaccagcgacttaaccgaccggcggcgtggagctacagttagctcagccgcacgacgatacgcatcgcgcggctagcaaagacagcagtaggcccaacgcacgcgtaccaagacaccacaaaggcaacagacgaaacacaacaaggcaagaggcagtcgcaacgccaagccggcagcacacagcgagcagacagtcaagacgaggaacggaccaa

SEQ ID NO: 659743 - DNA, 661 bp, Homo sapiens
gtgggtggccaccctgtcctttgttgttgctggggggttccaattgggttgtgagtccttcctcgcaagtgtgggcggacgttctcttgccgcccctctctggtgtttgcatgggggaggccctggggccccccttcttggaggaattggttgtccctctgtgcggcctcccgcgacaccttccttctcgggggtgacgtacacaagcatggggtccgactcatccaccggtgactcagcgaggtgtgggccactcccctcgtgcgtcctctcctcgcgcccccctcgggcgcacccctcaccgctgggactcgccttcccccaaggggcccccctcatgtgagtacacggcgtggccgccctccaatgtgagccgcgcctccgctccccgccccgtgcgtgtgcgtcccttctatgggagcagctttcggccgcgtgcacagtgttgcacgaactcttctctccccgcctctcagcgttctttctccggccgcacgcagccacagagatcatgtcggtcattgcaggggtcacctacttgtcaccttgtcagaagtgaggtgaggtggacattatgtgttgtcagtgaacacaccccggtgcttttatctgacacacgacttggggggagcaccaacaggcccatcaatagatacgagaa

SEQ ID NO: 659744 - DNA, 959 bp, Homo sapiens
gggcaacccgctccggtgtccttccatgctgtggaggctctgtgtttcgctctttctactgcttactcttcgggtccacactgcttttatgagctgtaacactcaccctgaaggtttgcaacttgactcctgaagccagcaagaccacgagccccaggaggaacgaacaactccagacgcgctgcttaagagctgtaacactcaccgagaaggtctgcagcttcactcctgagccagcgaggccagaacccaccagaaggaagaaatctgaaacacatccgaacatcagaaggaacaaatccagacgtgccaccttaagagctgttaacactcaccgcgagggtccgcggtttcattttgaagctccggtgagaccaagaaccaaccaattcgggacacaataccaactctttcatgccaggagaagcctcctttaaaaaatttcggtgataacaagcagccacatggtcaaaatctcctgaaagttgagccaggggagctgtaggaagaatcctcctttctcgcagatgaaatctttttgatatagcaggggtactggccaagaaggaaccacagaggagacccaccgaacattcaaggacttaaattccctttccacttagccacaggttgttcttccatcaataatgtactggatcaaagccgccctcagaggttgaggaagtgccgtccaccctagaagatgttgccctctcccttgcagatgggactctcagcggaacaattggaccaaggctactctcactggaccagagggcaaacttctcgtggggcacggaaacacacacgcgacacggccaggacgagtgcattttgtccgaggagacctccttgtggtccgcacacacgtactcgcgagagagagagccatatagtggagcggactagctttctgtcgcatttcgttgtatttattctctcttctcccgttgtttgga

SEQ ID NO: 659745 - DNA, 1229 bp, Homo sapiens
  misc_feature (324)..(324): n is a, c, g, or t
  misc_feature (402)..(402): n is a, c, g, or t
agcgggtgtcccgcctgcccgcttccgtgtctccccgtatttgctgcgttcgccgcgtaaccctggttgtgtttgtcctgctcctgtcgttggtcgagtcgtgcgtgttcccgccgagtgaaacgagttctagtactagttcataacatcaccaggcctctgttcgttcttccgaactggactttggcctataccaagagagtcgtatcccctacaatgtctgtattgtcccatggtgcttctcctggtgacacgtaggactcctttcttgtgccatggaactcgacagttggcgctaatcctgtgtgtcaatcgtccatacgngagctagcctgttcattgcgttgactgtgtagatagtggacgttgatactagaaactgtgcctcttactcgcgcacangtgccatggtaggttcactctattcggctggcacgcatttcagtgcaagcacaattgtcgatggtctgcctttatgcacgatccgtgtagaacgacgttgttgtcgtcactagttccccactttcaccttctcatttagttctctccgttgagggagatagcgtctcgtggttagcttctttgagcagagtttcgcgtgcttccactacgcgtgaaagcgtgagaggagcagcatgtctaatagagtgggcttacgcggggcacaagcgggcccaagaaccgttgccagggtgatgttcttggagaggggaaccgccgtgttattccagcgattctacccctttgttacggctcccaagggcccttcgccgcgcattataaattcgggccccttgacttttttccgaaaaagggaaaaagagtagctctgcaacttggtattgccatccaaggttttccctaggttgccgccccttcggcgtatcccattaatttatccctccatttagcaagggtcttaatggcgggaacagcccgaatggtggaaaacgcggatattagggaatcgcacgtgggccccgttccttattgtcacttcttctccccttggatagaagcgcgttgggcaagatgggcgtgggcgtttaaccacatttggcaattcacttccttccggagaggggcccattattggcccagtggattacctttccgcgttcccacccttgaaaaggtcccacacttcctttagatgcgcccacacaggggcgaaacttccatagttgtaccactccccccttgggaaattttggcgacattcacgtttt

SEQ ID NO: 659746 - DNA, 251 bp, Homo sapiens
acctatatacagcgaattttgttcttcaccaatgaaggagaaataaagtatttcccagacaatcaaatgccgagaaaattcattactactaaactcaagggagtcctacaactggtggtgaaatgatgatagttactatcatgaaaacacatgaaactataaaactcgcaagtaaagcaaacacacaaaggaggaggagaaaggactcaaatgattctactacagaaacccaccaaaacatggtaacaaat

SEQ ID NO: 659747 - DNA, 216 bp, Homo sapiens
cgctcgcttcgatcgcgtggatacccggtaggagcgggtcgttgtacagatcgaacggcgcagcctgcatcacggtttcacccccattcgtcccgtttcgcttggaaccgagttggcttcggcgctaccggagagcgggatgacttggcttttctgtgcccaaaattcgagccgtggtagcaataacgcgtagctctcttccaatagcgcatagag

SEQ ID NO: 659748 - DNA, 726 bp, Homo sapiens
  misc_feature (156)..(156): n is a, c, g, or t
gaagtggctggaacccgggggccgagggttccctgggcccaaggtgcgcccatgcaaatccacccggggcacaagagccaaaccggttccaaaaaaaaaaaaaaaaaagaaagaaaaataaataacaaggagctacctgggaacgtagagccgagncctggggccagctcctccacctcgcagtgatttctgacagttctctaggaacccaggttggggtgtggccctgtgggctggggcctttgctgtggttacctcttctggctcataagagggctctgctgaagaattgctttggagctctttgtgcagagagaccctgtcagtgccctttgctgtgacacctgcgagtggggacctaggatgtcacacctgaattagtgggggtgtgcttctgatacccactaaggtaccatggagcccagagatgcatctgccagcatccttagttttttattgttgtttgttcatttgtttgagacagggtcttgctctgtactcaggctggagtgcggtggcaccattacagctcactgtagcctcaacctcccgggctcaggcagtcctctcacttcagcctcctgagtagctgggaccacaggcatgcaccaccatgcccagccaacagccttagttttggctttttaccaataagactttttttttccttataactttgaacaagtggactccagaagttcggggttccagtacttaatgtgtcct

SEQ ID NO: 659749 - DNA, 1388 bp, Homo sapiens
gaggcgatcggaagccgcgttggggctgctgagaggctcttcctcgctctagggcagattcttcaagcaagtcactatgtcacacagacacaggtgtgtcccgttccttcatatgaggacagatcagggatcaaaactcattcgagaaggctaaaggaggcaccatttcgtagcccgttggaagtagcggggtttggcgagcaattgttgcactagtggacttactagtaaagctgcaggagcaggggaagattactaaaatgtcgcactgcatcgtgagtcctacagtgcgatgttgcgcagctcgcaagggctatgggttaggtacggacgcaagtgacttggtcaggaagtggagcgtattccaatgtagtcggagcaattctgggctatagaacgctaagacgctttagaagaacgacgatgcctgtcgtgtgggcctgtggtttggaggacgcttgtgcttttaggtttaggactgtcttactttagttaatagtgtagcctagtgactgggtctggaacggtaacactaagtttggtaatgggggtagtagactgggtaagcatgggacactttggcgacactacttgagagagtttcccttttcttggcaagggctttgattttggactgaggttgacccggaatttacgtaagtggactagtttggacttaaccctaagggttcacttcaaaggcaagtccagagtttaaacttgagactcctggtcaagcctaaaattggcacttggactggttgtttgcacatgtgtcccacctttccttacaacgtctctgaacgaatcggaactttaagtgtttcaacacagaaagataaactagcggccgaaatccctggaacgggtacaccccctgggtttcgcctggcagcaactgtgcaccacacaatcagggggccgcatggcagcaaacggaagggccccaatattgtggcccgccggctataatatcacaaccccttgttggtatgaaccagcgtattcttgtggtgaactagcgaccatggtccatccgtttgttaacacatcttgtctcacacacagcgtagcggtgaagtaaatacacagcgtgatgtgcttgcccgacaggagagaaccaaatttcgctaggttggtagacgacaccatcaccaaggtatagcaaatcgacagctggcagttattagcagaaccaacaccacagctgtcgcacgcataacatcgataatctagcatagtcagtcaacgcagctatgcagatgtacacataaacgtcaaatacagctaagtcgccgcagcactacaggttaagatcataggatacactagttggtatctatttatagttattaagttcatatatcattagatcaagagcagagaga

SEQ ID NO: 659750 - DNA, 541 bp, Homo sapiens
taggtggtgagtagataagtagatagcaggaataaaatagataagcctttgctttcaagacaacactcagttgctaaacccatttccttttttttaggatattttcattgtctccgaattttagagctgaaaagtgccttagagatcatctagttcaacctctccgttcaaatggagaacctgagccactaagattcacaggagagtaagataattgagcaaacaactccaagtaatgacagaaaattataggagaatcagtacaaattgtgagaatttactatgttgttagcatcctaagtatgagtttagaaaaggtagaagttataagaaaagttaaattgttttaatatgaatggattccactgttaccttcaagataaaatgaagacatacttttttctttagtattatagttaaacgaatattgtatcctgtagtgactaaattcataaatattttttctgcttatagacttgagtttcaaaagcagctgtacagatgatgctgttaatgagtgtttaggtagtgttgattaaaa

SEQ ID NO: 659751 - DNA, 364 bp, Homo sapiens
tcacgtctcccatacgggattgtcacgctcccggaggggacgtcagctcccagtacgggctgtcgccctgagtcgtctcgcagcttccgctaggagctcgacatcttccgtctgatcgtaccttctgctcccggtggacacagtcagctcccggaagggacagtccgctcccggagggcaaagtcagctcccggaggggacagtcaactcacagaggagacagccagctcccagcagaggggacagtcagctcctggcagaggggaccagtcagctcccggaggaaacactcagctgccagaggggacagtcagctcccggaggggacagtcagctcccagaggggatagtcagctcatagagg

SEQ ID NO: 659752 - DNA, 1330 bp, Homo sapiens
ggcacgaaatatcaaggtctcagatccaaagctttttgaaatgattaagtattaggatattttcattgtctccgaattttagagctgaaaagtgccttagagatcatctagttcaacctctccgttcaaatggagaacctgagccactaagattcacaggagagtattgtcttctaagaactctgaagcaatgtcagacattgagggaagctctcattgctgcaggaaaagagattatatggcatgggcggacaaaagaagaaccagctcattactgtagcatttgtgaagtggaggtttttgatctgctttttgtcactaatgagagtaattcacgaaagacctacatagtacattgccaagattgtgcacgaaaaacaagcggaaacttggaaaactttgtggtgctagaacagtacaaaatggaggacctgatgcaagtctatgaccaatttacattagctcctccattaccatccgcctcatcttgatattgttccatggacattaaatgagaccttttctgctattcaggaaataacccagttctgcaccactggtttttgtagctatctcgtaaggctgctggctgaaaactgtgtctatgcaaccttccaagtgcggagtgtcaaccaactggacgggagagagtactgctcctactccaggactctcacaaagctgatgagctgtacttcagaaaaaaataataatttccatgttttgtatatatctgacaaaactggcaacatcttacagactactgacttgaagacaacctcttttatatttctctatttctgggctgatgaatttgttttcatctgtcttttcccccttcagaattttccttggaaaaaaaatactagcctagctggtcatttctttgtaaggtagttagcaattttaagtctttctttggtcaacttttttttaatgtgaaaagttaggtaagacacttttttactgcttttatgtttttctgtcttgttttgagaccatgatggttacacttttggttcctaaataaaatttaaaaaattaacagccaagtcacaaaggtaatggattgcacatagactaaggaataaacttcagatttgtgatttttgtttctaatcttgatgtaaatttacactatttataaatacatatttattgcttgaaaatatttgtgaatggaatgctgttattttttccagatttacctgccattgaaattttaaggagttctgtaatttcaaacactactcctattacattttctatgtgtaaataaaactgcttagcattgtacagaaacttttattaaaattgtttaatgtttaaa

SEQ ID NO: 659753 - DNA, 123 bp, Homo sapiens
tccaccccactgtgtagaaagcatgtacctacatcagatctaaccttggacccagcaatgtggattccctcttctacgctggcccaggccagccaggccctctcaggatagggaggtgttgga

SEQ ID NO: 659754 - DNA, 249 bp, Homo sapiens
  misc_feature (157)..(157): n is a, c, g, or t
  misc_feature (231)..(231): n is a, c, g, or t
gactagaggatctcttcccttttggcatctggcttgcctccagtcttaggtcctttagttgttctgtaagcacgggaacactgctgagggggctcttccctcatgtatacttcaagtaacgatcagaatctttgtgaattatagaaattactatgtnatgcttgatggaattttttctgctagtgtagcttctgaaaggtgctttctccatttatctaaaactacccatgncattaaaaggtcgtctca

SEQ ID NO: 659755 - DNA, 1215 bp, Homo sapiens
ggcacgaaatatcaaggtctcagatccaaagctttttgaaatgattaagtattgtcttctaagaactctgaagcaatgtcagacattgagggaagctctcattgctgcaggaaaagagattatatggcatgggcggacaaaagaagaaccagctcattactgtagcatttgtgaagtggaggtttttgatctgctttttgtcactaatgagagtaattcacgaaagacctacatagtacattgccaagattgtgcacgaaaaacaagcggaaacttggaaaactttgtggtgctagaacagtacaaaatggaggacctgatgcaagtctatgaccaatttacattagctcctccattaccatccgcctcatcttgatattgttccatggacattaaatgagaccttttctgctattcaggaaataacccagttctgcaccactggtttttgtagctatctcgtaaggctgctggctgaaaactgtgtctatgcaaccttccaagtgcggagtgtcaaccaactggacgggagagagtactgctcctactccaggactctcacaaagctgatgagctgtacttcagaaaaaaataataatttccatgttttgtatatatctgacaaaactggcaacatcttacagactactgacttgaagacaacctcttttatatttctctatttctgggctgatgaatttgttttcatctgtcttttcccccttcagaattttccttggaaaaaaaatactagcctagctggtcatttctttgtaaggtagttagcaattttaagtctttctttggtcaacttttttttaatgtgaaaagttaggtaagacacttttttactgcttttatgtttttctgtcttgttttgagaccatgatggttacacttttggttcctaaataaaatttaaaaaattaacagccaagtcacaaaggtaatggattgcacatagactaaggaataaacttcagatttgtgatttttgtttctaatcttgatgtaaatttacactatttataaatacatatttattgcttgaaaatatttgtgaatggaatgctgttattttttccagatttacctgccattgaaattttaaggagttctgtaatttcaaacactactcctattacattttctatgtgtaaataaaactgcttagcattgtacagaaacttttattaaaattgtttaatgtttaaa

SEQ ID NO: 659756 - DNA, 1387 bp, Homo sapiens
  misc_feature (60)..(60): n is a, c, g, or t
  misc_feature (214)..(214): n is a, c, g, or t
cttttctcaactttaaatgttttaatattgtcttcatcaggcctgctgagcattgtcatnttaaaatctgagaatatttgataaattgatgaaagaaaaattatgaagtcatagacattagaatcaagtctcttggcattatttctagttggtatatcttttatgctaaaaatattcaatattcagttgctggtcacaaataatttctcccccncaataggtattgtcttctaagaactctgaagcaatgtcagacattgagggaagctctcattgctgcaggaaaagagattatatggcatgggcggacaaaagaagaaccagctcattactgtagcatttgtgaagtggaggtttttgatctgctttttgtcactaatgagagtaattcacgaaagacctacatagtacattgccaagattgtgcacgaaaaacaagcggaaacttggaaaactttgtggtgctagaacagtacaaaatggaggacctgatgcaagtctatgaccaatttacattagctcctccattaccatccgcctcatcttgatattgttccatggacattaaatgagaccttttctgctattcaggaaataacccagttctgcaccactggtttttgtagctatctcgtaaggctgctggctgaaaactgtgtctatgcaaccttccaagtgcggagtgtcaaccaactggacgggagagagtactgctcctactccaggactctcacaaagctgatgagctgtacttcagaaaaaaataataatttccatgttttgtatatatctgacaaaactggcaacatcttacagactactgacttgaagacaacctcttttatatttctctatttctgggctgatgaatttgttttcatctgtcttttcccccttcagaattttccttggaaaaaaaatactagcctagctggtcatttctttgtaaggtagttagcaattttaagtctttctttggtcaacttttttttaatgtgaaaagttaggtaagacacttttttactgcttttatgtttttctgtcttgttttgagaccatgatggttacacttttggttcctaaataaaatttaaaaaattaacagccaagtcacaaaggtaatggattgcacatagactaaggaataaacttcagatttgtgatttttgtttctaatcttgatgtaaatttacactatttataaatacatatttattgcttgaaaatatttgtgaatggaatgctgttattttttccagatttacctgccattgaaattttaaggagttctgtaatttcaaacactactcctattacattttctatgtgtaaataaaactgcttagcattgtacagaaacttttattaaaattgtttaatgtttaaa

SEQ ID NO: 659757 - DNA, 1164 bp, Homo sapiens
tttttttaagcaatcttaaaaaatggtaaacgtaataacattccaagagtttttgactaattggtgaagaagtatagaaaattgcaagtacactgagtaggataatggtcttagattcttaggaagattggctgaatgggagatagtaaggtaggctgtacttttatgttgcatagcaggctgttgaactttttgagagttatttcccctaacttcacaagcagactatatgtttgtagccatgagctattaacaatttgtatatcaaaataacctaccttacttttattttcaggctcctccattaccatccgcctcatcttgatattgttccatggacattaaatgagaccttttctgctattcaggaaataacccagttctgcaccactggtttttgtagctatctcgtaaggctgctggctgaaaactgtgtctatgcaaccttccaagtgcggagtgtcaaccaactggacgggagagagtactgctcctactccaggactctcacaaagctgatgagctgtacttcagaaaaaaataataatttccatgttttgtatatatctgacaaaactggcaacatcttacagactactgacttgaagacaacctcttttatatttctctatttctgggctgatgaatttgttttcatctgtcttttcccccttcagaattttccttggaaaaaaaatactagcctagctggtcatttctttgtaaggtagttagcaattttaagtctttctttggtcaacttttttttaatgtgaaaagttaggtaagacacttttttactgcttttatgtttttctgtcttgttttgagaccatgatggttacacttttggttcctaaataaaatttaaaaaattaacagccaagtcacaaaggtaatggattgcacatagactaaggaataaacttcagatttgtgatttttgtttctaatcttgatgtaaatttacactatttataaatacatatttattgcttgaaaatatttgtgaatggaatgctgttattttttccagatttacctgccattgaaattttaaggagttctgtaatttcaaacactactcctattacattttctatgtgtaaataaaactgcttagcattgtacagaaacttttattaaaattgtttaatgtttaaa

SEQ ID NO: 659758 - DNA, 1693 bp, Homo sapiens
ggcacgaaatatcaaggtctcagatccaaagctttttgaaatgattaagtattaggatattttcattgtctccgaattttagagctgaaaagtgccttagagatcatctagttcaacctctccgttcaaatggagaacctgagccactaagattcacaggagagtattgtcttctaagaactctgaagcaatgtcagacattgagggaagctctcattgctgcaggaaaagagattatatggcatgggcggacaaaagaagaaccagctcattactgtagcatttgtgaagtggaggtttttgatctgctttttgtcactaatgagagtaattcacgaaagacctacatagtacattgccaagattgtgcacgaaaaacaagcggaaacttggaaaactttgtggtgctagaacagtacaaaatggaggacctgatgcaagtctatgaccaatttacattagctcctccattaccatccgcctcatcttgatattgttccatggacattaaatgagaccttttctgctattcaggaaataacccagttctgcaccactggtttttgtagctatctcgtaaggctgctggctgaaaactgtgtctatgcaaccttccaagtgcggagtgtcaaccaactggacgggagagagtactgctcctactccaggactctcacaaagctgatgagctgtacttcagaaaaaaataataatttccatgttttgtatatatctgacaaaactggcaacatcttacagactactgacttgaagacaacctcttttatatttctctatttctgggctgatgaatttgttttcatctgtcttttcccccttcagaattttccttggaaaaaaaatactagcctagctggtcatttctttgtaaggtagttagcaattttaagtctttctttggtcaacttttttttaatgtgaaaagttaggtaagacacttttttactgcttttatgtttttctgtcttgttttgagaccatgatggttacacttttggttcctaaataaaatttaaaaaattaacagccaagtcacaaaggtaatggattgcacatagactaaggaataaacttcagatttgtgatttttgtttctaatcttgatgtaaatttacactatttataaatacatatttattgcttgaaaatatttgtgaatggaatgctgttattttttccagatttacctgccattgaaattttaaggagttctgtaatttcaaacactactcctattacattttctatgtgtaaataaaactgcttagcattgtacagaaacttttattaaaattgtttaatgtttaaagagttttctattgtttgagttttaaaaaagactttatgtacagtgcccagtttttgttcatttttgaaatctgattatatatattttatatatacttatgtatgtatatataatatatatagaaatctggatatatatgtataaatctttagaacttaaatttttctcgttttaagtttcacatctatggtagatttttgaggtgtctactgtaaagtattgcttacaaaaagtatgattatttttaaagaaatatatatggtatgtatcctcaagacctaaaatgtcagactggtttattgttaagttgcaattactgcaatgacagaccaataaacaattgctgccaaaatgtagtataaa

SEQ ID NO: 659759 - DNA, 602 bp, Homo sapiens
tagcaggctacctagagacccaccctaaaagtccacggtcccaaacaaacactctaaatcactgtagtctggatgttgggtgtattgtcatgtacacaactttagaaagttggcttccggaacaaaaaggctcaccaaaaccccctggctctcaataccctcaagtgaatggcagaggctctggttgaaagtgggagccaggtgcagcttcccagtccactctttgctgaagatcatccatgaggaaagagaaaaatccatgagttagaccttggcaacaggggaagagaaggtgggaaacagggaaaaattctaaagaaaacaaaaacaaaaacaaaaacaaaaaacagccacaacttgaaagctagaagttcaggaggtacaacccacctccaaaaatcatgatgggttaccctgaccccgggaggggcagctctccagcttacaatagacagtgttggagttcttacatctgcaccctgggcgatggatccagtcataacacctcctgcacagcttcaggcatcctttagcaggaggatcacagagtaagccaggtacaatcaagacatggctcccatacacaggtttctagagccgcg

SEQ ID NO: 659760 - DNA, 1941 bp, Homo sapiens
ggcacgaaatatcaaggtctcagatccaaagctttttgaaatgattaagtattaggatattttcattgtctccgaattttagagctgaaaagtgccttagagatcatctagttcaacctctccgttcaaatggagaacctgagccactaagattcacaggagagtattgtcttctaagaactctgaagcaatgtcagacattgagggaagctctcattgctgcaggaaaagagattatatggcatgggcggacaaaagaagaaccagctcattactgtagcatttgtgaagtggaggtttttgatctgctttttgtcactaatgagagtaattcacgaaagacctacatagtacattgccaagattgtgcacgaaaaacaagcggaaacttggaaaactttgtggtgctagaacagtacaaaatggaggacctgatgcaagtctatgaccaatttacattagctcctccattaccatccgcctcatcttgatattgttccatggacattaaatgagaccttttctgctattcaggaaataacccagttctgcaccactggtttttgtagctatctcgtaaggctgctggctgaaaactgtgtctatgcaaccttccaagtgcggagtgtcaaccaactggacgggagagagtactgctcctactccaggactctcacaaagctgatgagctgtacttcagaaaaaaataataatttccatgttttgtatatatctgacaaaactggcaacatcttacagactactgacttgaagacaacctcttttatatttctctatttctgggctgatgaatttgttttcatctgtcttttcccccttcagaattttccttggaaaaaaaatactagcctagctggtcatttctttgtaaggtagttagcaattttaagtctttctttggtcaacttttttttaatgtgaaaagttaggtaagacacttttttactgcttttatgtttttctgtcttgttttgagaccatgatggttacacttttggttcctaaataaaatttaaaaaattaacagccaagtcacaaaggtaatggattgcacatagactaaggaataaacttcagatttgtgatttttgtttctaatcttgatgtaaatttacactatttataaatacatatttattgcttgaaaatatttgtgaatggaatgctgttattttttccagatttacctgccattgaaattttaaggagttctgtaatttcaaacactactcctattacattttctatgtgtaaataaaactgcttagcattgtacagaaacttttattaaaattgtttaatgtttaaaaaaaaaaaaaaaaaaaaaaaaaaaaaaaaaaaaaaaaaaaaaaaaaaaaaaaaaaaaaaaaaaaaaaaaaaaaaaaaaaaaaaaaaaaaaataaaaaaaaaaaaaaaaaaaaaaaaaaaaaattttggggccttttggccaaattaatttttaaattgaaaaaattttttaatggggcccaaatttgggcttatttggcaaaatccccctaaaggggggggtttaaaaaataaatgggcgggttttaaaaaagttgaaattggaaaaaacctggggtttcccaaattaaaaccctttgaaaaaaaacccttttttccaaagtggggaaaatccaaaaaggcccaaacaaaaggccttttaaaaaaatttggcaaccttaaaggcaaagggaaattgtaaacgttaaatttttggaaaaaaattgggtaaaattttgtaaaaaaagcttttttttaaacaaagggccaaaaatgggaaaaacctttaaaactaaaaaaaatcccccaaaaagggttaaatgttttccacatttgaaaaaaaggcccttttttaaaaaaagggggctctaaatgtaagggggccttttttaagggggaagggccacttctggt

SEQ ID NO: 659761 - DNA, 1228 bp, Homo sapiens
ggcacgaaatatcaaggtctcagatccaaagctttttgaaatgattaagtattaggatattttcattgtctccgaattttagagctgaaaagtgccttagagatcatctagttcaacctctccgttcaaatggagaacctgagccactaagattcacaggagagtattgtcttctaagaactctgaagcaatgtcagacattgagggaagctctcattgctgcaggaaaagagattatatggcatgggcggacaaaagaagaaccagctcattactgtagcatttgtgaagtggaggtttttgatctgctttttgtcactaatgagagtaattcacgaaagacctacatagtacattgccaagattgtgcacgaaaaacaagcggaaacttggaaaactttgtggtgctagaacagtacaaaatggaggacctgatgcaagtctatgaccaatttacattagctcctccattaccatccgcctcatcttgatattgttccatggacattaaatgagaccttttctgctattcaggaaataacccagttctgcaccactggtttttgtagctatctcgtaaggctgctggctgaaaactgtgtctatgcaaccttccaagtgcggagtgtcaaccaactggacgggagagagtactgctcctactccaggactctcacaaagctgatgagctgtacttcagaaaaaaataataatttccatgttttgtatatatctgacaaaactggcaacatcttacagactactgacttgaagacaacctcttttatatttctctatttctgggctgatgaatttgttttcatctgtcttttcccccttcagaattttccttggaaaaaaaatactagcctagctggtcatttctttgtaaggtagttagcaattttaagtctttctttggtcaacttttttttaatgtgaaaagttaggtaagacacttttttactgcttttatgtttttctgtcttgttttgagaccatgatggttacacttttggttcctaaataaaatttaaaaaattaacagcccacatcactaagctcaatcgcgagccatcagtagaccgacggacagacctccagacttgcagagtcctgcagtgtcgaactctagatgatcaccctagtctaatgacacaacgaaggtatacgtaggtcatatctgtgaattcgagactacctgttatacattcccagcacgacctag

SEQ ID NO: 659762 - DNA, 428 bp, Homo sapiens
  misc_feature (57)..(57): n is a, c, g, or t
ctcacaatttgctcagaaggaaattcctagtgaatagatgacagacagaactcaagnttatctctctgaggctcacctgagacaaatgcagatctgtttgtttcctctgccctattgttaattttaaaatgcagattcactgagccaggctaaattgtgtattcagtgggagacttatcaaggactcaaataaatttattattttttctcttatctacttatgacgtggaagccccaacctcaagttttcctgtcttacctgaccacaccaatgtacatcttaaacatgttattgatgtctcttgactttctaaaatgtattagaagactgtaccccaaccaccttgggcacctgtcatcaggacctcctgaggctgtgtcacaggctcctacttaaccttggcagaataaactttccaaatttattg

SEQ ID NO: 659763 - DNA, 327 bp, Homo sapiens
agtcgcaatccgaagcttatctgtcagatatgcatactgaggctaggaacctttctcaagagcaagtgggcttccaaagcgtggaaatggacttgtgcctggagattggaggggtgtggtgattctccggccgggtatagtccagccggacagtcactgcaccagaagatggattccagcccccttgcaaatgtaagaggtgcagcgggccacccccctccgcgccttggggggcagaaacccaaagcggttcaggtttgcgggaccctagagttagagcgatggagacgtgagcgccggaatttagtagtagtagtagtaggcggc

SEQ ID NO: 659764 - DNA, 208 bp, Homo sapiens
gttggtgaaatcgcctttgcatgacaattgatgattcctcatccactgatgaaattacatttccactgaactccccagtccctcaggcaatggccagcagagtgtcagagggcacaactgaatgtgcgagagtcagcatagtgcatttgctgcagggtggaagcttgccacgaggaaggctggcaataaatgtacattattatgtctc

SEQ ID NO: 659765 - DNA, 464 bp, Homo sapiens
ctccaagaggtcttagaggtggaagaggaggaagtggaggaaccagtggacctccctcacggggaggacacatggatgacggtggatattccatgaattttaacatgagttcttccaggggaccactcccagtaaaaagaggaccaccaccaagaagtgggggtcctcctcctaagagatctgcaccttcaggaccagttcgcagtagcagtggaatgggaggaagagctcctgtatcacgtggaagagatagttatggaggtccacctcgaagggaacccgcttgccccctcctcggttaagaaggaattgtttattttgtccccagagagatgcatggcgtaattctaactaaaaggacagcttattcaacgcacgagattacccaagttctcgtgatactaagagattatgcaccaacaccacgagattatacttaccgtgattatggtcattccagttca

SEQ ID NO: 659766 - DNA, 187 bp, Homo sapiens
tacgagatcccccctggtcgctctggtctgtgcccggtcagcctgttccagagtgagctggtacagagatgccaactactgctgctctgcgcttatccactctctccgattcgacaatcgacacagagttaagaagaccattggagggccaccctgcgattccagtccagtgacacttgtgcactgt

SEQ ID NO: 659767 - DNA, 294 bp, Homo sapiens
  misc_feature (30)..(30): n is a, c, g, or t
  misc_feature (39)..(39): n is a, c, g, or t
  misc_feature (59)..(59): n is a, c, g, or t
  misc_feature (77)..(77): n is a, c, g, or t
  misc_feature (261)..(261): n is a, c, g, or t
ccagtctagcttttttggtcttgttttttngtttctganacaggattttgtgtttttcntctgtctcagacagctcngttgcccagactggagtgccagtggcatgatcacagctccactgcagccttgacttgttgggctcaagtgatcctcccacctcagtcttctgagtagctaggaccccatgcatgcaccaccatgcctagctaacattttcgaagagacgggggtctccctttgttgttcaggctggtctcagtnaaactcctgggctcaagcgatccctggtctttg

SEQ ID NO: 659768 - DNA, 209 bp, Homo sapiens
gactctgatgcagtggtccgcgatggacttgagattctagatttcaagcatgctgcaggagatgcaatcctgaggttctataagacactctgaggctggcacggtggctcatgccttatatcccagcactttgggagaccgaggcaggcagatcacctgaggtcaggagttcgagactggcctggccaacattgcaacacggtctctca

SEQ ID NO: 659769 - DNA, 249 bp, Homo sapiens
  misc_feature (161)..(161): n is a, c, g, or t
acctaaacacacaacagtgcagaatccactacacgactacattcagtcttcaaaacaaccaccaccatcaattaggctgccttcagctcaaacacctaatggcacagattatgtagcctcaggaaaatccatccagtaccccgacagtcacataggcactnctgacacgctgacattatggtgataacaatggtggcccccaccagtctgtgttgacatgatatctctaaaggggtacccgagctcgaa

SEQ ID NO: 659770 - DNA, 82 bp, Homo sapiens
ctagaagattcagcaaagtacttttgtgctcttggggatcccacctctggtatactgggggagcttgacagcacaactcttc

SEQ ID NO: 659771 - DNA, 1315 bp, Homo sapiens
ggagagaactagtctcggtttatgattttatatttggcatacaaaaagctttatttccatttggtccaaggctgtgtcaggatagttaagaaagctgcctattggctaggagggagaggcttaggcatgaagccctataactattgcaaggggccttcagaaagtcgctagggctcagaaggctctaaagtacgtagctatgaacagtgagccttatcgaagagatactcgcccaagcccagcctacgcgggaccaacccagaccgtgtgtggaggtttggctccaggtgtggtccacacacaatctctcgtggacataaagctctctcacatctacctcaatactaggaagagtgtgcagttactaccacaggagaagctccacgagaagaaaatgggggggactcacgactgaccgtgacacaaatcaaaccgcgagtggccaattggaaagtaacttccaaaagagggggccccgtggattacaaggacttcttatatacctccagagggggacccaattgtgcacagacaattaacaagtggcacgatcatgggagggtttataaaacccccaaactttccaatttcttctcaggctgtgggacattcacgtgaggacaaggtcacgtgggagaaaaaaagtggcgagcccagcacaacggcgtgggattaagcgacgaacacatacaacggggaagcaccgcgtacgaaaagccccatcgggagcaacaccgactgcggccacaaatgacgagggggcaaaaaaagggtgggctacacaggcctattcacgagaagacccaagtatctactcgagagggtgcgaaacaataggagagcccaagaaagagaagggaagcgtagaaagagaacgagcccatgcagggataccacaacttgggacccaagggacatcgtaacgaacccagactgccccccccacacggatgccggacgcgaacatataacgtacgtggcagagaaactccgtggggagacagcaccaaaggcaagcgagcatgcagcacagaaagtgagcgcgtaaacaccacacaaataaaaaaccgagtctacgtgagaagagttcccccaagacaacgcagaggagaacatgtggcccgaaaacaaagaaatgtgtcccacggagaggagtactgacaacagcgcggaccagaagaacaaactacggagaaggggacggccagccagaaagcgcaccggcaaacaaacaaacgtcccccgcggatatcttgttcccagtccgcacgaaccgcgttcgggtgcacgaccaggaggacagcgaaacccgggg

SEQ ID NO: 659772 - DNA, 726 bp, Homo sapiens
tggtaaaaccccgtctttactcaaagtacaaaaattagccgggtgtggtggtggctgcctgtagtcccagctacttgggaggctgaggcaagagaatcacttgaacccgagaggtggaggttgcgggagccaagattgcgccactgcactccacgcctgggtgacagcgcaagactccatctccaaaaaaaagatgaataacttggcgtaaagacacacaaattagtaagtgtagagtctggtaatggaacatctcagcccatgatcttgactgctttcctgaccatgcgtccagaaacatgtgcccagcaagaagatatcggtctctctggaccctttccaagatgtaacgttctaactaccttggcacagttctgaaattctgcattctggagtaagttggataggaccagcgtacacagccttctctggagccaaccagaacaccagaccaatgcaacataccgctcattctgtgagacaggatagctaaaccttacgatcacaatgggattccagatacacccagtgtgacctgcacaacgccaatcccaacctagccacgaacacagtactacggcggacattgggaaacaaggaagacacccagatcccacaccaaaaaggaccaacccggaatcaagcaatgccggaacacacatagaacgacccgagaagaaaagggggacaggacagcggcaagaggcgcccagagaggccaagagg

SEQ ID NO: 659773 - DNA, 136 bp, Homo sapiens
tataatctgggtcctcaccccttactggaacataagagaattcataccagagagaaaacctacaaaggtgaagaaggtggcaaagcatatagccaggccttcaaaccttactacccatcaagggggtatcgaggta

SEQ ID NO: 659774 - DNA, 459 bp, Homo sapiens
  misc_feature (2)..(2): n is a, c, g, or t
  misc_feature (18)..(20): n is a, c, g, or t
  misc_feature (48)..(48): n is a, c, g, or t
  misc_feature (95)..(95): n is a, c, g, or t
  misc_feature (160)..(160): n is a, c, g, or t
  misc_feature (230)..(230): n is a, c, g, or t
  misc_feature (236)..(236): n is a, c, g, or t
  misc_feature (251)..(251): n is a, c, g, or t
  misc_feature (254)..(256): n is a, c, g, or t
  misc_feature (258)..(258): n is a, c, g, or t
  misc_feature (263)..(264): n is a, c, g, or t
  misc_feature (274)..(274): n is a, c, g, or t
  misc_feature (358)..(358): n is a, c, g, or t
  misc_feature (402)..(402): n is a, c, g, or t
  misc_feature (405)..(405): n is a, c, g, or t
  misc_feature (422)..(422): n is a, c, g, or t
  misc_feature (424)..(424): n is a, c, g, or t
  misc_feature (455)..(456): n is a, c, g, or t
gnctgctctgtatatttnnncccttttataatgtgctttttcacactnctgcaaaccttagttacatcctaggaaaaaatacttcctaaaataanactaaggtatcatccttacccttctctttgtctcacccagaaatatgatgggggggaattacctnccctaacccctccctcaataaatacattactgtactctgggaatttaggcaaaaccttaaatctccaggntttttnaagcacaaaatatanatnnngntgggnnagtaaaccanaattcttcagattgttcctcatgaatatcccccttcctctgaattctccagagtggtacagatgggtagaggcagctcaggtgnattacccagcttgctctcaattcattcctcctcttcctctcaanggntgagggagggcctttcnancctcacaacctgtccttcactagtcctcctnncca

SEQ ID NO: 659775 - DNA, 204 bp, Homo sapiens
  misc_feature (198)..(198): n is a, c, g, or t
atctgaagtgggagaatcgattgaacccgggaagcggaggttacagtgaacggagatagcactactgcactccagcctgggtgacagagtgggaccctgtctcaaaaaaaaattatggcagaggcaaagggagagcagcactttctcttttttattcttttctctcttttttgccacactaaattgtaatgtgttttnacaaac

SEQ ID NO: 659776 - DNA, 166 bp, Homo sapiens
ggccctggatgaggaatgtgaatgtgtatgccatgtctaatggtcatagcagaatggggataataccagtgcagagggagatgcagctttaatttcatggattggatgagtctacatacatgcgcatgcaaaacacacacagtgctgacaaccccgaacacggata

SEQ ID NO: 659777 - DNA, 133 bp, Homo sapiens
tgggctgggatgcagggtgagaaccaggacggagaactggggtcccatgagcccacagagagtaggggacgggctggggctaccagtgcaaaaacctgggtgaggggctctcagcagacacagtctctcccca

SEQ ID NO: 659778 - DNA, 103 bp, Homo sapiens
gctgaagctgccgccgttgcctccgccgccaagagtgagcgagcggacccgcgatggatacatactgaaatgtggatgaagtgttaggtcatgtaatttgctt

SEQ ID NO: 659779 - DNA, 246 bp, Homo sapiens
caggtgtgcgtgattgtgctggtagtccaagctactcaggaggctgaggtgggaggatcgcttgagcctgggaggcataggtgcagtgagccaagattgcgccgttgtactccagcctgggtgacatagtaagaccctgtctcacaatgaaaataaaactaaaaataaaaagaaatacacttaacttttactcttttctttgaattttcatttcgttttatatgtgttctagaatattcattcata

SEQ ID NO: 659780 - DNA, 544 bp, Homo sapiens
tatcccctttcctagtgaagtacctgtgctttctccgacaagcggatgaacacaacccttcacacgaggccctaacgagttccgggcccccagccgcatattctggcggaccgtgctgaggtatgctagccccacaaaaccaagcgaggccaggacgctctggaccgtctcaaggtgtaagacggcatcccaccgacctacgacaaggtgagctatgccaaaccccacaggctgcggccttacctgtggcgtccatgatgtaccgcaacatacctacattgttagatcctcatgaaagcacgcactggctgagccgccaagtccagacgacctccttccctgtctgtccctcccgggctcttacagcccctctctttctctaacagaacaagcggatggtggttcctgatgccctcaaggtcgtgcgtctgacgcctacaagaaaggtgagtcccagcttacgctgcaacatctacttgggagatcacaggactgctgacggacctggggacatggagcctggcagctgatgtacttatctcag

SEQ ID NO: 659781 - DNA, 375 bp, Homo sapiens
  misc_feature (277)..(277): n is a, c, g, or t
  misc_feature (374)..(374): n is a, c, g, or t
tttcgagcccgggctgagcgcggttccttgcgaaatgcgcgacaactgcacgtagcggaagccatcggtactgggaccattcggccatcagcgcctcggtgccatcggtgctgccgtcatcggcgacgatgatctcccagccggtgcacaacgccgacagccggctgcgcagcagtggcagcagcacgcgcaggttctcgcattcattcaggcacggaatgacgcaggtgacgcaggcgtcgtagggcacgttggcggcggccgtcccccagaccgnttccacgggaaacgctttggtcaggacttgctgcccctggggctccggacccggaattggatatgcatggtgctctgaaattggaatgcgggacgtna

SEQ ID NO: 659782 - DNA, 819 bp, Homo sapiens
tggtcaaatgatcctttattgaaatgtttccctttgtgctaaactgggctgggcttcccacagccccactgtggattgtcatcgatgatgtcatgaggatgggggccatcaacattacatgcccactggactggggcagtccccaggatctctttaatgggtcaccaagagagttctcgggctaaggtgatctggtgccgcatctagtcgagcaatggtttgacaatctcatcaaaaggtagatatctcccactggtgtaaatggttttctctggtttcttatcgtggtctactagggtgggttccctatgaagagcgctctatggtgacttggatcacggggcaggatgtgcatagatacgtgcgccccaccctgcaatcgtgggggcctagttacttgtatcatagaatggtgtcaatgtatctcacttgcgtaaatgcctacagggctctcttccaatgtccaccctgttttgctcttgtggtcaatgtgctcatacacccaaacactattctcttgtggggacagaacaggaaacccaggggagcgccagaatcttaggaggggcgcccagggtggcagagcacatgtgagggaccgctggactttacacctctcgcggtgtgtggcaaccccttacaagtgtatataccggacttttgtggaattctacgatgtggcggtgctccagacacttatcgggacgcgctataggcgttcgcaacggctgctgatctggatatgtcgggtatagaaaaccctcgggaattatcctggagacagcgaaccccggaaaggagatatgtctcgcccacttg

SEQ ID NO: 659783 - DNA, 320 bp, Homo sapiens
gtgatcgtgtcaccatgatcgacctcatcgaacgtcgtccgtgcatgctcctggactcgagttagatacatgctcgggtgtcactctggaagctcaacggtcttctcatcacttatcacctgggaacaaccactccctccccactttgtagccagcagcctttggggaaggtgggcactcgtgattactgtgcctggaagaatgtcctataatcctggcgtctggctgctcaaaaaacagtgtccccttcccatctaagctgccgcagccttgagaccttggtttacccagtgcaaaaccgcccatgatgatccagttga

SEQ ID NO: 659784 - DNA, 214 bp, Homo sapiens
taaacgaggtggcggtcatgctttggctctcctagaaaagttatatctctcgatatcccataatgtcagatggaataggggttatgaatcctgtatactatcacgatcggtcatatgcttatacaaatatctcagccgtaggtactcaatcatctatcgggcacaggctataaatcacctaattgaaatcattccatcacacctgacatacaaa

SEQ ID NO: 659785 - DNA, 209 bp, Homo sapiens
cagcgctaatgtgaagcatgcattttctcagaaataaaagacatcttcctaaacaaacacaaaaccattatcacaactggagaagttaacagttctctaacatcatctaatatctacccatattcaaattttctcaaatgtccccaagatgtctcatgctttctaaaatcaggatccaaagattatacattgcatttgatttgttgcta

SEQ ID NO: 659786 - DNA, 207 bp, Homo sapiens
gaccgggaggtgacccctgaccagaactgctgtccaggcgactcctgaccaagacacaggatgccacggttgggccgagcgactatttcctgccaatgttgctaactcggtgtacgtcctggaggactctatttgtggacccacagattcagaccatgactacctacacctggaacataacccacgcccgcctgatggtggtggagg

SEQ ID NO: 659787 - DNA, 166 bp, Homo sapiens
tatgcgttctatggtgctgctgatcaggcttgatctcgcttatgggttctagatatttcttgttcatcagaactctctgccctgtgtcagattcactacaaagacatcaggcatgatgtcatggatccttgcttgaagaaacttcaggaaataaaagcccatgggc

SEQ ID NO: 659788 - DNA, 1763 bp, Homo sapiens
gtgggggtgtgcagtacagaccatcgtgggtttcgtggtctgtgtcgcgctcgagcatgctgtcgtagtgggctcgtgggtgtcccgcgtgctctgttgtgtgccgcaccacagtggggggcctccccttcgcagcgcagccggcggtgttcgtcccttcgaggaggtagtctcgtgttgggggctcggcgcccccttctgctgtggtttggttggtcccctccttcctctgagttggtggtgttctctccccccgcccccagccgccaacatttgggggggggggctatcatatctctatggggggggttctaccctcacggggggtgttccctccctcggtggggtcccccagcccgattttgtgggcccccgcctcgtaggtgggtctgtggtgctgccgtgtgtgtggcccacccggcgtcgtcctccctcccccgggtggacacgggggggcttctcttttttcgtggggtggcccattgggggtgtctctttcctccccccggggagtggtgtgcctccttggggggttgttggtggggtctccccaccgacgggcggttgtgtcaccggcgccattttgctagtggcgccgaccacatttgggtggggctctacctgccgtgcttcctgctggagggggggcgcaatgtagtacacacctggggcgggccacgcggtgttggtccgacacgcgtcgtcttttcgcggcgcccgttgcttgcacacacgcgggggcgtcctcccgcgcgacgacacactgggctctttgtgagggcgcgcgccccctctttctctcgcgcgccccgcgcgcgcgccccccagagtgaccccctctcggggcgacactcctcctcgctctctgtgggagatatgctcgccccatccacggaggggtttttccaaacggaggcgggggcgcgtctctcccctctgttccagcacacgctctgctctctccctctgtgtgtgtgtccctctctgcgaggcggggacacgcacgggtgcgccccgcgcgtgcgcagcacagcgcacacgcgcgcgtgtgggctactcctcgtgtgtgtgtcgctacgctacccgcgccccacacacagcacgtcttgtgtgtgtggctgcgctgcggggcgtctgctccctgctgatgagcccccacccccgccgcgtgttgtgctgctccgcagcagcagcagtgttgagtactacccctctgcgcacgctgtgctctatactcggctggtgctactctgctgcgcgtgagcgcgcgcggggggcagagagagggctccagcgaggagacacgcgcgccgcgagtgtgtgccacccacggtgctctgcccgcagagacacagagagttgcgcgagagcacgctctctctagagaagagacacgattctcgcgcgcagcgcgcgcgcgaggctcttgggagtgtatctaattggtagaggagagagagaggcgtggtaagagaagagaaagacacagagaggattataagtctctatacacacacacccacacactgtgtgacaccgccaccctctctttcttctgcgaggccacagggactttgtggtggggcgccagacaccacccaccgcgcactctcctttgagcgctttgtggcacaccatacatggttgtgatccctggagcacacctagctttgcaccaagggaacccagttattttttccccctgactggccccataggacgccaccacccacacactctctaaaaccaaaaccaccaggacc

SEQ ID NO: 659789 - DNA, 345 bp, Homo sapiens
tggatttcgcgtacaggcgacaagagaaaacatagataagtaaacttcatcaaactttaaaacttttagctaggaatggtgatgtgcacctgtagttccagcaatgcgggaggctgaggcaggaggatcgcttgagcccaggagtttgggactagcctgggcgacacagcaaaaccccatctctaaaaaatgagagtggcaaaggccttgagatgtttccctaaagaaggtgtacatgtggccagcaagcacctgaaaagatgctcaccatcactatcgttacggaaatgcaaatcaaaactacagtgagggcaggcacagtggctcatgcctataatcctagca

SEQ ID NO: 659790 - DNA, 203 bp, Homo sapiens
gggatcttatcgatccgctgatccagcacctacctggtcctgggctctgtcaggcgcccagctacggcgcccggccggtcagcagcgcggccagcgtctatgcatggcgctgggggctctggttccctggatctccgtgtcccggctccaccatgcttcagggtgcggcatggtggtccggggggcctggccaccgtggatag

SEQ ID NO: 659791 - DNA, 144 bp, Homo sapiens
ctgaggatcccgccacctacacacatttcaccactatccctgacttcaatggcccgcccagccactaaggttcggcttttctgcccagctgtccgtctcttccttggtctgggtgtcccaggcaccgccacggtataaggtggg

SEQ ID NO: 659792 - DNA, 139 bp, Homo sapiens
gggggggggaacccccccccccccccccttttttttaaaaaaaaagggccttgggatgggtgggggggttcccccccccaaaaagggggtttaaaaattttttcccctgggcctcccaaaaaaaaaacccctgggttta

SEQ ID NO: 659793 - DNA, 521 bp, Homo sapiens
ctttttgtggtgtgaataaatcttttatcttgaatgtaaaaaaaaaaaaaaaaaaaaaaaaaaaaaaaaaaaaaaaaagggggggccccccaaaatttccccccgggggccccaatttccctacccctttttttgtttcaagggggcccctataggagagctccgttatttaaagcctaggcaccggagccgccgcgttttaaccaagcttccgtgattgtggggaaaacagcggctcaacactgggagaattcttgggagaagggaaccacttatcttgcgtgggggggtgcaccatatttgggaacacaaatctaccctagcagagagattttataaggccgctaaagggggaaaatatttaacaattttttaaaggtgtgattatggtgtgtgtgttaaaaacaatagcggtgacaatattgcctggcggtcttgagaaaatttgtggcttatagcggggtatttagattatttgaaaatattttttattacacaggagactagtgataaaaagaagt

SEQ ID NO: 659794 - DNA, 871 bp, Homo sapiens
gggatggaaatgtcacccgtaggtatggcaatgccagtggaacatgctgttgaggctctggaatgatcctaccaccaattcgtccaagtgacaatgcccttgggcttgcctctccaggatgtctacaaaatgtgggtggtattggaactgtcctgttgccgatgtggaagactggtgtctcaaaaccggggtatggtgggtcaccttttgctcacagtcaactgtttacaacggggacgttaacacaaatcttgtcggaaatgcacccattgaaagctttggagtgaagctcttcccgggggacaaattgtgggggctccactggtcaaggaattgtgtcttgtgcaagggaattggtccggtccggtggggcaaagcgttgggctcgggttgcacagggcaagaaaaatggaccccacccaagttgggaaaggccagctggccttccaaactggctacagcgtgatatatccttgaaaccaataccaggccaaaataaagcggccgggtaattccccttgttatttgggatttgcgccacgagggggttcaacatttgtccttggcacgtttggcgtgggcgtggacgggcaaaaaaggtatggatcggcgcgtcctggtaacaacacgcttggagaattgggccctagaattctttgacagttctggtgtatgcctgcaattggttggatatgggttcccttggcacagcccatggtgtgttgagagcttctcaggactatccaaccttggggtcgcttggcggtcgtgatatgacaccgacagtggcggtggggtgtcatccaaggctgggccacaacaggctgttggcactgggacgtccaccaagttttgccaaaagcagaaggta

SEQ ID NO: 659795 - DNA, 1548 bp, Homo sapiens
  misc_feature (990)..(990): n is a, c, g, or t
  misc_feature (1055)..(1055): n is a, c, g, or t
  misc_feature (1059)..(1059): n is a, c, g, or t
  misc_feature (1064)..(1064): n is a, c, g, or t
  misc_feature (1068)..(1068): n is a, c, g, or t
  misc_feature (1080)..(1081): n is a, c, g, or t
  misc_feature (1087)..(1087): n is a, c, g, or t
  misc_feature (1089)..(1089): n is a, c, g, or t
  misc_feature (1099)..(1100): n is a, c, g, or t
  misc_feature (1102)..(1102): n is a, c, g, or t
  misc_feature (1114)..(1115): n is a, c, g, or t
  misc_feature (1121)..(1121): n is a, c, g, or t
  misc_feature (1135)..(1135): n is a, c, g, or t
ctgcctcgacccatcaattacttagctcgcgtctcatcttatatttggcgttactacacgaggagagtaattttattaagagaaccaacagtgcagaaaaaacagtcgtggtgtgtagcttatattttaatcgccgcctttatatgcaccacagaagtggggctttgtttgtctattatcccctactaaggaggtgttctctgttggtggttcgctcccgctccgatgaagccccccccgcttggggtgttacatgaagggcggcgattatattcctccttgggttaaaaggcggtgttgttttcgatacgaccgcaagaccacacgcttccccccgggggttgtcttctcgggtagtgagggagccccctcgtctctcctaattttgtggtcgccagatagcgtggcttcttttttgtggtgtgtggtttggggtcattccctctttggaacctctgcgcttttgggccccacggtgtctacttagggagaaaccaccaggggccttgggtttgaaaacgtgtgttgctcgccttataacaaatgtttgcccgaccccagagtggtgtccacgattgtgcccacattgcaccttgtgagccggggaaccaggaagtgtctttggccttttgggggtgaaacaacagagaattttgtgtgcctaaccacacaagggttatgttctccgcccctgggcaacagtgttatagacgcttttgtggtgccttcgctcgctgtgatatccttcggcttgttctgggagttctcgcgcctgtccccacagaacacacagggcgccattatatgtagatagccacggcgttatatccacggcgtatccccacttgagagggctcgggagattttggggtccacagtactttcgtttgagaggtttcgctgagactattttgggcaccacagttatcagagtgttcctagagacctctcgatatagccttggcccacacttcacaacacaactctttncgagagttcgcttgggcgctgtgcagtgttatgaacctggagagttctgccttgagacacccacnaagngagcnacgntatatttcttcnncacatngngctatattgnnangagacacacacnngtgggncgtgtatatatatnatatagcggggtgttataaggggggagatatattctctgagatataacactggaggccccacgcacaagagttatcacaaaggtttgaggaaatgcctttctcttgtcttcacatgttctgtcaagccacgcacccacaagtcccttgtttgtggcacactatatcacgggctgaatggagaaagagatctcacagagacacatcacgatgccaagctgagaaagaggagttgtaaccaaattttcttggctggagatttgaaagcttaaaactcctgtggagttcaccactcacaaataccacgttcacgttttgtcacttgttttagtaaattagttccatttgtaaaagggttactttcatactccttatgtacagaaatcacatgaaaaataaaggttccataaagcca

SEQ ID NO: 659796 - DNA, 124 bp, Homo sapiens
acgggggggaatttaaagggggaggtttaagggggatttttttcaaaggccagatttcctcgggttggggtatatttccggttcccccccgggggggtttttgttaggccctcccctcccccca

SEQ ID NO: 659797 - DNA, 657 bp, Homo sapiens
  misc_feature (334)..(334): n is a, c, g, or t
aagcatggtatcaacccagagtgccattactggcggggttcattgggacattggaaagttcacaattaatgcaaaattttcgttggaaggccggttaaagaaaccgtttttaaagtttaacttttatttcgcttaaatttgttccaaaaatttaccattaaccaaattttctttttgaacggaacattaaaagttgtgtgggaacacctttgtggccacgaaccaccgttggcgttttgtgtagactcccacacaaacaaccccaaggtcgcactaaagggtcggacaacttttgtggagcctttgggaggggttaccccacacgggtcccccnttttttttcaaaccacagggggcttttgggccccacaaaggattttcacattttttcgttaatttttgacagcaacattttgaactttaaaaacgggcgggacaacaacaaacctttaagggcaaacacaacagaagggaacaactttacaccgacggggtttttctcaacaaacgccccccccttttttgtgggtctgcttctcaaacaaacagaggtggggagttccccaagaagcaaacaactttgcggggctttcggtcaacaacagccacgtgggacaacctacaagggggacgacaacggcgtctttacacattctt

SEQ ID NO: 659798 - DNA, 811 bp, Homo sapiens
ggctcagcatttggggacgctctcagactctcggagcacggtccagcttccttgcaaaatgtctactgtacacgaaatcctgtgcaagctcagtgttggagggtgatcactctacacccccaagtgcttatggcgtctgtcaaagcctatactaactttgaactgctgagtcgggaatgctgtgaatcggttgataacagccatcgagaagaccagaacagtgtgtgtaatgaggtcaccgattgtacaactacttgtgtagccacaaccgtcagcacatgcacaagagacagggatatagccttcgcctagcaaagtaagaggacctccatagcaggcaacttgcaatctagctactgacagtcaagccttatcatggctcgaccatgagtagcacggagtgaatcttggggacctattggaacgtacaccattgcgtcaagtgtatgaacgcgttcgtgaagtcctacaagcttccaatggaagggggcttggggatcccgaatgagtgactctctcatttgagatcactctgctccagaaaataaccaggagtctgccaggaaaacttaaccagagttcgtacctaaggacatatgtgaccaatgacctgctcctggggggacagtgaccatttaattttcgtgacactagtctggttgaacttccagtaaagcctagatggttctggccctgggcgaagcggtacaagatgagtccagagggatggggtctagacattctgacttactcgaactggattgaccaaagatgcttcggagatcttcttatgaccgcttgggaagtgaaa

SEQ ID NO: 659799 - DNA, 1433 bp, Homo sapiens
agggaggaagaggagggcatctcgacatggagtcctcgagaggagcgagcagtgaccccatgcgtgccgccttgctcctcactggaggaagaagattcacttcgtgggactggacatggctttgctccagatcaacagctggacaaaagaagaaattaactcaaaagagaagaaagacaactaaagaacacgaacagacaggatacagatgaagtacccaagtaaatcaatagaaagagaagaagaagagagaaggtagaagtaggagagagaagtacaaacaaagaagaaagatagagaaaaggcataagaaggaggaggagacaacgaaatagacagtaatggagatatatgcatagtcaaagaaagaagtaatacagcagaatagtgagcaaagatagaattagaccaaaaataatcgctgctagatagagaaaaaaaagaaaaaaaagaaaagtagaaaaaaaaaataagaaaatgtaagaaataaaaacaaaagggaaaaacaaatattaaaacaacaaaaaagagaagaaataaaaaggaaagaggaaatgaagtagtaaataaaagagaaaaaacacaaaaaggaagaagtaagaagtaaaagaggtaaaaaaaacaaaaataaggaaggaagaggtgagccgagaggaagcgaagaagaacgaaccaagcaagaggagggggcacacaaaaagacacgagatgggggaagaaacaaacgacagagacgagacagaagaaaacagaacatgaaacaaaacagcagacagcgaagagaacaggggagacgacaaaaatgactgaacagcgaagatggcaaacaaacacaaaaagagagcaggacaggagacaaaaacaagaagaaagacacaaaaagagagacagaacgagacgacgaggacagggcaaagcaagagacagagaaacagagaaacaacaaacacaagacacgtaagacaagcaatcgtagaaggagaggaaagaggagacaaggaggagaggaagaggagaagaggagaaacagaaacaaagagagaagaggacaaagcaacgagcacgagacgcacaccaaacaggtacaaaaaacaagagcagagaggcgaggaagacaagacagaagacagagcgcagcagaaagataggagacacgaaagagcagagaaggcggcaaggcagcggtagagtagaaagagagagcaggaacaagacagtcgcgcgaactacacggaaaaaacagcaacaagacaaggcacaaggagagaagaagagaacgcgaaaagcagcgaagagagagcagcgccgagaggaggcccgaagcaaacacccagccacgacgcagacaaacaagcaagaaacagaagacagccacagagggcagagagaaactagaagaaaggacaaagaagaaacacaatcacagaagcaga

SEQ ID NO: 659800 - DNA, 210 bp, Homo sapiens
aaactattttatgtttgacgcataaaacttcaaagtattttgtaagtatcactcccgaaattttctttctcttatatactttatgctcttactatactactgatgtaattaaaagagcagggttaaaaataattagtatatgtattcattgtgaatcctgtagcttttctagttcacaaaaaatctctttctaaaataactcttaatccc

SEQ ID NO: 659801 - DNA, 312 bp, Homo sapiens
tctggcatatttatcaacgatggcaaaaatcacacaacttctaaacagcgcacaaaaatatttacatttgagccatttacccactttttaatgaccatcaccatgaagaacagaaccctcagactgaattaaaatcgactttttttttatctatttagatctatagcgatctttggtgagtgctggtcctaccaaatcttggccagatttgcaaaggctttcccttaggaacccatccttactccagctaatcttccaggcaaggcaaggatttccaaaggccttcataaaagtttggcctcctggaatatt

SEQ ID NO: 659802 - DNA, 287 bp, Homo sapiens
cggaccggatgtgtgtatggccagctgtcgtgaattcgatgccatttcctgtatttctgttactgatgcggtaggtacatcaatgctaatcacccatgctttcctttgatgaaaaaccattcccttcagtttggaatcaagtctcctcggcccagctgctcttgagtgttctttccaagcataagctaatatttggcatttcaatttgagcacttgcaagatcatggtcacaaatacccacgagtttgacttgatcaaggagctctggcctacatcacatgccgtgt

SEQ ID NO: 659803 - DNA, 438 bp, Homo sapiens
cggctcgatcacagagaaggtataatcatcagttactacctaatatcctgtagaatcagcagcactaggagtctccagatctgtttctcagctctgtgtagcaagccaggctggctctcgtgcattactgtctatgggtgtggaatgtacgtcatagcttgttcctggtgttaaaacagatgggctaactcctcatgtctagtcatgctggcagggctttccccacatccatgcttttgaaattagtgtgagtgtacaggtttgtgtgtgcatgtatacgtgtgtgtgcacaggaagcatttccacttgagggaaatcctgccccatcatgcctacctccacaatgaaatcactcgttttttggtgtttgctcgcctaactgacttgaaccccattttatttatttagtttttttctcatggcaaagtagaatacgta

SEQ ID NO: 659804 - DNA, 596 bp, Homo sapiens
cctcttcatcgccttgccctcgcctgctccgacgcactagtgttaaagtgagcgcaagaaggcagccaacttccgccacgagacttttacgtttccacgcgctaccgctctggctggcattggcgtagtgtaccacgtagcctaccgctcggcctgcacagctggcttgccatcagtccctgtcgccacctggtccttcatgaagaagcacgacacttagaggctggtcgggaatagtgggagagtcgccacctgaggaggagcaggccgttgagttccaagccagagttcccgtccctggcgcctggagtgcacaacacgcccagtctggcaccataggttgcgactgagaaatgccaaccctgtcttatagatcatctcgggtccccaccttagaagggtccccgccttagatcaatcagcgtggacactaacggcacgttttagagtctcttgtcttaatgattatgtccatccgtccgtccgtccatttgtgttttctgcgtcgtgtcattggatataatcctcagaaataatgcacactagcctctgactagccatgaaggctaaaattccgttacatgtgggttacgtgg

SEQ ID NO: 659805 - DNA, 678 bp, Homo sapiens
ggaggcaaggccgaggataaggagtggatgcccgtcaccaagtggggccgtcttggtcaaggacatgaagatcaagtccctggaggagatctatcgtctatctaccctgcccagttaatggaatcagagatcattgatttcttcctggtgggcctctctccgaaggatcggaggtttatgaagattatgccaggtgcagaagcgaggacccgatgccggaccatgcgcaccaggtgcaaggcggtatgttgctatcggggactacaatggccacgtcggtctgggtgtaagtgctccaaggaggtgggccatggtccatccgggggggccatcatcctgggccaagctctctcatctgtgacccggtgcgcagagagctacttgggggaacaacgatcggccaatgccccatatcttgtcgccttgcaagggtgacgtggccgtaagagggctctgtgcttggtactggcctcatccctgcacccagggtgcgcatggtcatcgtctgcgaacctgtgcctaagaagctgctcaaagatggctgggatcgaggactgtacaccatcaagcccggggctgtatgcaacctgggcaaatacgcaaggcaccttagatgccatttctaagactaaaggtactgacccgactctgggaggagatgtatcacaagttccttta

SEQ ID NO: 659806 - DNA, 337 bp, Homo sapiens
cgactaccttcctctactacccgttctgtatttccttcaccttcagccagcacctcagcaggtcttggctcttttcctggaggattgacccataccttcattcctgatgggtctgcgtcctttgtcatcctgcttggattaggctgttgtagtttcccattgactttaatcacaggacatggtagtactaagagacgccctaagggatctcctgcactccagacataatcttgcttaccaccattgtgaagaggtaatccaatttccccatggtaatctggatctatcacccctcctaacactgttattccttttttagcctgttggttgtcgacgc

SEQ ID NO: 659807 - DNA, 541 bp, Homo sapiens
aggagcagagtcttgcccagtctcatccctctgagacatctcggacattgggacgtggactgtcgtatcgtcactggaaagagctcagacatggccgacgctgcgggaagagtcatacacctcgagagctcgaggacatcgagcggagaccagcgaacggtagcggacccacacacacagggatccagaggatcctctcgagagctctcgacaggcccagagccgctaccgaggatcgaagagacgtcacgtctcccctatcatagtacaacttccagagagagaccctttcaggctggggagacatgatattagctgagactggcggagggagcacacgcgaactctaagaaagtcatacagcgctgaacaaccttcgaactactcgaggtacgtaccacgggggagcgcaccgaccggcaagacgggggggcacagatcccccggcaagacactgaagaggtccaccgcgcagcagacactgccgcaggagccagccaaggagaccacgagcacgaaagcacacaagggacgcacacaa

SEQ ID NO: 659808 - DNA, 975 bp, Homo sapiens
gggctgcacgggccagtttccttcaaaagtgtctacgtgtgtcacgaaatcctgtgcaagctcagcttggagggtgatcactctacacgcctccaagtgcatatgggtctgtcaaagcctatagctaactttgatgctgagcgggatgctctgaacatcgaaagcagccatcaagaccaaaggtgtggcatgaggtcaccagttgtcgaacatgttgaccgaaccgcaggaagtgcacagagacaggatattgccgttcgcctaccagagaaggaccaggaaggaacttgcagtcaagcacgtgaagtcagccttatctggccagctggagcacggggattctgggcctattgaagacacctgctcagatatgacgcttctgcagctcaaaagcttccatgaaggggctgggcaaccgcacgaggacctctctcattgagatcatctgctccagaagacaagcaggagctgcaggaaacttaacagagtctacaacggacactgtccaagactgatctggagacggaccattattatacggacacatctgggtgactttccgcaagactgactggttgccctggcaaacgggggtagaagagccagaggatcggctctgtcatttgatgatgaacgtgattgcaccaaggcatgctcgggatctctatgacgctgggagtgacgccggaaaggcactgctgttcccaaagtgggcatcagcatcatcgcacgagcggagcgtgcccacctccagaaaaggacaagacaagggtcacagaggagtcacaagggccgtcgatgcacagtggacgggaaacagccttacaggacaacgaggttagaacggaagcacctggaaaacaggcatacccgtaacaccggggcacaactgaggaacaagaacaagacccgggattaagcggaacgaatgcatacagccatgaagcgcaagggagaggaaatacggacagaccc

SEQ ID NO: 659809 - DNA, 483 bp, Homo sapiens
gaacatttttgccggtcatggtagctcacacctgtaatctcagtgctttgagaggctgaggtgggaggattgcttgaggccgggagttcaagatcagcctgggcaatgtggcgagaccctgtctccacaaaaaataatcagaaaaattagccaggcattggggtgcatgcctgtagtcccagctgctaagaaagctgaggcaggaggatcacttgaggccagaagttggagggtagagtgagttaggatggtgccactgcacggcagcctgggtgacagaaccactgtgtctggcccaactggattgcatcctccacctcccgagttcaagcggttctctgcctcagcctcccgagtagctgggattacaggcgcccaccaccacacccagctatttgtttttttatttttatttttagtggagacagggtttcgccatcatggccgggctgatcttgaactcccgatctcgtgatccacctg

SEQ ID NO: 659810 - DNA, 374 bp, Homo sapiens
  misc_feature (44)..(44): n is a, c, g, or t
  misc_feature (50)..(50): n is a, c, g, or t
  misc_feature (210)..(210): n is a, c, g, or t
  misc_feature (264)..(265): n is a, c, g, or t
taagtttcccccgggtggcaggacgtccagcatattttgctctngctaantgggagcaaaagcgacgggcagggagatagcgtcagtgagtttgtcatttttatagtcggaccatactgttgatttcagcgcagagtcatattttcctgtctgcaacatatcctggtaaacaataatcgctttctgatgtccttttgcagccacaaaacnagtgcctgcatccagttcatattctcagcactggcaacatcctcgttctcattnntatctttgtttttgttacaagtcagaggcttttgcctgtccgggataccagagaatgtggaaacagtataatattttcgcatctcctcctgcataatggtttccggtgc

SEQ ID NO: 659811 - DNA, 413 bp, Homo sapiens
cgtcgacaggatattgactgtgccatgggatagctctaagattgctaccatcattcactgtgaggaaaatttctgaggtagtgaagaaggcttcctcggtggcagtttcctctttaaagtagggactgtgggagagaaaatgtcataggcatatttctttgtccaacattttaatgtgattgtgtagaaaacgaacgtattaagatctcctctgctccatcagtaagtataaaggtgtgaagtgtgaggttaaggtacaagggttgcagcatagttaatgggcactatagagtaagacacatgtgagttgagatcccagcctagtcatctcttaggcggcccaaggcaaaaacaaaaacaaaaacaaaaacaaagcaacaatatcgatgtcgagcgatcgcgcgcgtcgacgc

SEQ ID NO: 659812 - DNA, 740 bp, Homo sapiens
  misc_feature (18)..(18): n is a, c, g, or t
  misc_feature (97)..(97): n is a, c, g, or t
  misc_feature (102)..(102): n is a, c, g, or t
  misc_feature (104)..(104): n is a, c, g, or t
  misc_feature (124)..(125): n is a, c, g, or t
  misc_feature (149)..(149): n is a, c, g, or t
  misc_feature (210)..(210): n is a, c, g, or t
  misc_feature (264)..(264): n is a, c, g, or t
  misc_feature (273)..(273): n is a, c, g, or t
  misc_feature (300)..(300): n is a, c, g, or t
  misc_feature (303)..(303): n is a, c, g, or t
  misc_feature (369)..(369): n is a, c, g, or t
  misc_feature (393)..(393): n is a, c, g, or t
  misc_feature (564)..(564): n is a, c, g, or t
  misc_feature (566)..(566): n is a, c, g, or t
  misc_feature (591)..(591): n is a, c, g, or t
  misc_feature (609)..(609): n is a, c, g, or t
  misc_feature (620)..(620): n is a, c, g, or t
  misc_feature (650)..(650): n is a, c, g, or t
  misc_feature (656)..(656): n is a, c, g, or t
  misc_feature (666)..(666): n is a, c, g, or t
  misc_feature (704)..(704): n is a, c, g, or t
gggggcacgaaggcgcancattcaaaaaaaaacaaaataaaaaagtatgaaggcgaagattaaaaaaattttgcataacataatttacacgaaagcnatgcnancacctcccctgtgtggactnnggagaggactgggccattctcctnagagagaagtggggtggctttgaggatggcaagggactccctgtgacaatgcatctcaaanttggaatgactatcaaaaaaacaacaatgtgcaaccaaagtcctcggccacatngtgaacctngggggatgcccgccccaaccgactccngtnaccttcaccgtcccagtttttaaatcctgagttaagccaaaaaaaaaaaaaaaaccaaaacaaaanaaaaaaaacaaataaagccatgcnaatctcacctggtttcctgcgcaagtaaggttttgtcaagaaagggtgtaacgcaactaagtaaaagtccgcctagaagcatttgcgggggacgagggaggggccggactcgtcaaactcctgcttgcggacccacacctgcgggaagtgtggacagcgaggccaggttgnanctgccgatccacacggtgtactctncgcccaggtggagcaatnttcttgatctncattgtccggggtgctagggcagttatctncttctngcatcctgtnggcaatcccagggtacatggtggtgccgccagaaagcncttttttggcgtacaggtctttgcggatgtccacgt

SEQ ID NO: 659813 - DNA, 165 bp, Homo sapiens
caataatgtgcaacacatgatccatctgatttggtcacaaactctgctaaacacaattctctacgttcactgttcccaagggtcattctaaacagtggtggcaccaccccttcagaagcaagagaaaaagaaaaaaggcaaataacatgcagaaggccagccagg

SEQ ID NO: 659814 - DNA, 92 bp, Homo sapiens
ggcttttttaaaaaaaaatttggtttctattttaaaaacctgggttaggccaaggtttggggttcgcccttttttgaccccttggcccttca

SEQ ID NO: 659815 - DNA, 135 bp, Homo sapiens
ggatgggcccctggggggttttggtttttacttttttaaggtaagtcccagtctttgtaattaattattgaattgtgagaacatttttgaccaatttccctgtcaataaagcagaagacggcagttttaaagtta

SEQ ID NO: 659816 - DNA, 559 bp, Homo sapiens
  misc_feature (10)..(10): n is a, c, g, or t
  misc_feature (24)..(24): n is a, c, g, or t
  misc_feature (491)..(491): n is a, c, g, or t
  misc_feature (505)..(505): n is a, c, g, or t
  misc_feature (518)..(518): n is a, c, g, or t
cccctgcccnaatgattgaagtcnaaccccaggcccaatgtaaatcaaaaaccccccagatgtggaagccccccaggtgaaacttcccccggtcggtgaataacacatcaaatgtgcctgaaaaggatggtgccgccctgaagggacacagaagtgtcatctgtgggacgctcctcagagtttcccactatgcgtctctgcttttgtcccggtccttaacttttgtcagtgtttttccttatgtaaaactgtagtgaaagtatcatgcttggtcgagaacagtggctcatgctggtaatcccagcacttgggagaccgaggtgggaagatcacctgaggtcgagggttcgatgccagcctggccaatatggtaaaaccccctgtgtctactaaaaatacagaaattagctgggggtgatcacttgtaatcccagctactcgggaggctgaggcaagagaatcgcttgaatccgggaggcagaggttgcacntgagccgagatcantgccacctgcacntccatcctgggcgacagagcgagactccacaaataaaaaaa

SEQ ID NO: 659817 - DNA, 434 bp, Homo sapiens
  misc_feature (28)..(28): n is a, c, g, or t
  misc_feature (63)..(64): n is a, c, g, or t
  misc_feature (289)..(289): n is a, c, g, or t
  misc_feature (371)..(371): n is a, c, g, or t
gaagaatggagagctaaagagccttcgnagaaggtcaagccgatctgacagccaggtgcgcanntgcgggagaagctggacgagctgaggagagcgagtctcccctacctcccctacctaagtggcctgctgccccccagccacgagcctcccaagctgaatccagtggtggagccgttgtcctggatgctgggtacctggctgtcagacccgccagaagttggtacctttacgacactgcagcccttccaagtacctggaaggaaggtgcacatctcccacgtgggtnagcctatgctcaacttctcgttcaactccttccatccagaaacacacaagccaatgcacagagagtgtggcttcatccgcanaaagcctgacaccaacaaaatggcctttgtcagtgcccagaacacaggggattgtggaagtaa

SEQ ID NO: 659818 - DNA, 475 bp, Homo sapiens
tctcgcctgtagtcccaacactttgggaggccaaggtgggaggattgcttgaggccgggagtttgacaccagcctgggcaacatcatgagacctccatgtctacaaaaataaaaaataaagagggaaactggctcctgattctaagaggaatttatcatgtggacagtatctatgtacaatccgtgaacagagcattgagtctgtaggggctggaccacctgcaattcaagagtcctcctcatgctgattcctttgggtctgacctcctgccacatcacaccctcctgcttgttgccctcctcctggactgcccttccttctctgcccattgcctcctacattccaaagaccagctgggacctgtcattccttcttcaaagcctttaattcccaagcagaattacctgctttctccctgaactcccagatcactgttatcaaagacataacattgtattattcaaaaaaaaaaaa

SEQ ID NO: 659819 - DNA, 110 bp, Homo sapiens
gcatgggccgcgcagattcagccatcataaaggtgggccataacggcaaaagctcaccttcaggagaaaaacgatgacgatcaaagttcggtgacaacgctgcgcgggac

SEQ ID NO: 659820 - DNA, 495 bp, Homo sapiens
gattttctcactaagcacactctggtctcttctccacccctgaaacagtccctgcaaaggtagagtgacgaatctgatctgtaaattcagggagaataattgggcatgcttagctcagcccatacggtccacttgacgacaggccatgaagatactgagttcttttctactcttccatgtatggtttctcacttgggaagccaccttgcccagtgactgctggtgattctgcctcattctggggtttggttgacagctccacacaccttcactctaagttaccacctccaacctggcctctatcagtaattaacatggcatttgagttctctattggccacatgatgaatgccccttgagcacactttgtttcatacttgttcagaatccagccagcaaagggggaagctgttttgggagaccttctcagaaatccccaacattaccgaccgagagaaaaacatagggtagagagaattcctgtgtattttaaat

SEQ ID NO: 659821 - DNA, 448 bp, Homo sapiens
gtcctccaggtttatatgggaatcgaaacagtttgttaatctgattgggagagttccatgggcagatttcccttcctgaaggccaagacggagaactgctctctttgattattgcaagagtcaagaccaagagggtgctcagcatcacactacatctcaaaattaatggtgccgacggaattttgtgcatttgtgtcagaatgtttagtgtacaaggtggggggcgggctttgcgtcgagaaggaaacgtgagaccatttttttattgtttaaagctgcggtgagcgtcaaaattaccttggtaacttttgatgacttacgtgtgtggacagagcgaatagtggttttttaaacagcaccttgggtgaacatgactttaaagagattaatatattgaaaacgtggttgaacccttatttgaattgcaccattaaaacatttgacttag

SEQ ID NO: 659822 - DNA, 383 bp, Homo sapiens
gggcccaaacaaaagggtattttaaaaaaattttttttggggttatggagggggggaaaaaaaaaaggtttttttttaaacaagggattttttaaattcccaaaaaccaaaattataaaatgtttaaaatttgggccggtttttaaaaacaggggggcctttaaaaggggaaaaaaaagtttttttaaaaaaagccggaaaaataaaccccccttttaaaagttttttttaagaaaagtttttttaaaaatttggaaattattttgccttccccaaaggttaaggttattggattttaaaagaatccccacaaaaaaaaatgggggtttttttttggggggcccccttaaccaaaaaggttttttattaaaaattggaatgga

SEQ ID NO: 659823 - DNA, 321 bp, Homo sapiens
gcgatgctgtgactttggggctgaaggatgaatagagcggtctgtgaggcagtggcgggaacaggcttagatacgtcctgatcttgctaagactccaggtgtgctctgtggaccagtggcttgggcactccgcgggagggtgcttgttatgaaatgcagatgctctgttcacaacccagagccagagaatcaggacgaacattaccatgatccccaggagttcagtgcatacgtctttgggaagcagcacgctaaccaactcctttgtcccagtcagggaagtcaggtgtgcaaggaattgcgcggggcccctatcccctc

SEQ ID NO: 659824 - DNA, 163 bp, Homo sapiens
cgctatgctgtaagtcatagtacaaggatgttccacctgtatacttaaaaaaaaatagagacgggatctcagtatatcgcccaggctggtcttgaactcccggtgctcacagtgatcctcccacctcagcctcctgagttagctgggattgcagggttgagcc

SEQ ID NO: 659825 - DNA, 100 bp, Homo sapiens
aatcagaggtcccttcgctctcccatctcaggcagatcttcgtgagactgacgggtaagacatcactctcgagttggagccgagtgacaccattgagaat

SEQ ID NO: 659826 - DNA, 238 bp, Homo sapiens
ccgtgctcccccaaaacctatttgaaataaattagtttaaaaaaaagaagaagaaaagggggaaagaaaaaaaagcaaggttttttatggtggacttatttaattttttatcccgggttgataaatcaagaggggtttttcaaatttattattatgtttattcatttttcaaatcctgggtttttttttgcaaaaaaaaaagtagtgaaattttactgggtaaaaaggcccccgtcca

SEQ ID NO: 659827 - DNA, 356 bp, Homo sapiens
  misc_feature (257)..(257): n is a, c, g, or t
  misc_feature (287)..(287): n is a, c, g, or t
  misc_feature (341)..(341): n is a, c, g, or t
cttccggcattcgatgtcactgaacttgccggtgatgctggcccggtcagccagataatgcagtcggttgccttcctgcaccagacgggctcccaggcgcagtgtaatctcccgctgcaggcccctggtagggttgctcattacagttctccactattgtcagttcagggtgatgctcatcaggcaggtatagggcccattgcggtcctggcggcgttcggcgtataccgcgagactccggcgatatccggaacgtncctgccggtgtaatgacagacgctaccgtnccactggtatttgccggtgcagttagcgaaagattcgggacttcagggatgctnggcggtatatcgtac

SEQ ID NO: 659828 - DNA, 164 bp, Homo sapiens
gccgccttgagctcctctgtctcccatctcagcgtctgagtagctgggccccaggcatcaccagtcacacccgcgggcttaatctttttttttttcacaagacataattctcactcttttgcccaggctgatcttcaacttctgggctagaagaaatcctccca

SEQ ID NO: 659829 - DNA, 406 bp, Homo sapiens
cctggaccctctctcacagccacagtcaaagccatgcgggatccgagcttcgtctgcgacctacaccacagctcacggcaacgccagaatcttaacccactgagcgaggccagggatcgaacccacatcctcatggatcctagttgggttcgttaacccctgagccgtgacgggaactcccaagacaagcatttaagtgaggttagggcaggtaagactggaaagggaaggcaaccagtacagggtgtattctcacatcagctaccacttgcatatcttatctttaaagctggtgattcttgcttctgcgggtgggtggggctgtgatctgataaccagcaattcaggaacctctttttggaatgtctattctttattctcccctactttgtagagagggtccagg

SEQ ID NO: 659830 - DNA, 525 bp, Homo sapiens
  misc_feature (17)..(17): n is a, c, g, or t
tgttatcgatgccaccngcactgtaccaggctggagtgcggtggcatgatctcagctcactgcaacctctgccccctgggttcaagcgattctcctgcctagcctcctgagtagctgggacaacaggtgcacgccaccacgcctggctaatttttttgtattttttagtagagacggggtttcaccatgttggccaggctggtcttaaactcctgacctcgtgatttgcttgcctcgggctcctaaagtgctgggattacaggcatgagccactgcacccggcccaaagtaaattttaatggtatctcgcaaacatatgtgtgaagatagtagtatttaatgtatactagccatgttagcttggggaattagtatttatgcatgcccttactaagctttcttagcaggtgtcttcatgcttagaaaagtcaacttgcaacccgtgtgtaagacaaaacatttgtcacgagttcagtacttgtcaagtgggatgtacattctcagaggtcaatagtggcatcgata

SEQ ID NO: 659831 - DNA, 128 bp, Homo sapiens
cgtcggtaccaacgctgactctcccctatagcactcattccttctcaggtggctggtgaaatgacacctcagaaggaatgagtgctatagggcaggcaggtcagcgttgtggaagaggggagcgttgt

SEQ ID NO: 659832 - DNA, 563 bp, Homo sapiens
gtgacatcagactatatatgctatttatacaagtcacactttaggtataaaaactgagaaagcttgaaagtaagatgattaaaaatatatgccaggtaaacactaaccagaagaatcagaagtatctcaattgcgtgaaaagttaaaaaattaatttataaatacacaaaggataaaaaagacgtaaaatggacatttaaaaatattttacattaaataaaaataaagcaaacataagaatgcttataagttggaatttattcagtgcttacagaggaatttgcagccttaaaaccataaattagaaaaccatacaggctgaaaagtcaatgaattaaactttagcttaagaaaatacaaaacgaccaggaggatctaacctacagtaggtagaaggaaggaatattaactgggaacagttataacgtaaattacataattgtgtgacaggaatcacaagctctaagttggtcttgtaagatataaattgttatgcctagcaaactcattagatagggggtaaagccaagttcagaaagaattgggcagtctcaggctttttt

SEQ ID NO: 659833 - DNA, 786 bp, Homo sapiens
atgacccaccaattcacatgcctatcatatagtaaaaccgcagcccatgacccctaaccaggggccctctcagccctcctaatgacctcctggcctagccatgtgatttcacttccacctccataacgctcctcatactagggcctacgtaagccaacacagctaaccatatagccaatgatggcgcgatgtaacacgagaaagcactatgccaagggccgatcacacaccacgctgtccagaaaggccttcgatacgggataatcctatttattacctcagaaatgattgcttcgcggattctgctgagccttttaccagctccagcctagctctctatccctcgccagattgagggaagaggaccacttgagcacgcgccagtcgaggggcattcaccaccggctaaaagtctccccttagtagagtacccgactctctaaagcaactttccgtattactcgcgatcaggagtatcgaatcagcctggaagctcgagacataagtgctaatacgaaaaactgccgtacaaccaaataattcaaagcaactgcttatgaccgaccatttatcctgggatctcatatttatatcgcgtccatacaaagggcctcaaagataaccttcgaagtgtccctatcaccagttatcgaagggacaatctacctggctcaaaaattgtgtttgtagccgacggccattccaacggacagttcacgtcagtaattgggctcaacttgacctcactaatctggttatgtcggcacatattattacgtttacatc

SEQ ID NO: 659834 - DNA, 230 bp, Homo sapiens
attggcttcctgcgtctgactactctgttgtggatactggtacagtggcagtggactgcagatacatgctcagatgtctagatccaggatgattgggatgttgagtctttcagcagaccgatgtctactccatggctctggtgctctgggaaatgacatctcgctgtaatgcagtgggagaagtaaaagattattgagcctccatttggttccaggtgcgggacccccct

SEQ ID NO: 659835 - DNA, 714 bp, Homo sapiens
gcactttaggaggacaaggctggcggatcacgcctgtaatcccagcactttaggaggacaaggctggcggatcacgaggtcaggagatcgagaccatcctggctatcacggtgaaactgtctctactaaaaatagaaaaaattagccaggcgtggtggcggacgcctgtagtcccagctacttgggaggctgaggcaggagaatggcgtgtacctgggaggcggagcttccagtgagccaagatcgtgccactgcactccagtctgggagacaaagcgagactctgtctcaaaaaaaaaaaaaaaaaaagggaaaaaaaaaccagagggaaagggaaaataggggctcaggaaaaccaaattctagaattggccatattgagtaaattcgagaaacaaattacaaattgggggcccgggtgtgcagtgtggctcattaccgtgttaattcccagacatcttgggagaaggctgagaagtgggggttattccccgtagaggcctcaggaagttccgaagcccgtggccaagaaatatagcgaaagacacccccaaagtctttatagcgtggagacaaatcgaccagaaaaattatagccccagaggggtgtgtgttgcggggggacatttggctttcaagaacatcttcccctatagaatcagccgtgggagcatttacgagcaaatgtgggagaggctcggcccccgtggacct

SEQ ID NO: 659836 - DNA, 414 bp, Homo sapiens
ccagaagcgtaaacctcacagccactctgaagatgcactcatcttggtatagtgtatgagcacagcaacccaagagctattccatagactcgatggtttatctcgaaatccacacacaatctgccggttgtcagatgataacgccacacttcagcacatcctctctctggcccacaaatctgcctcctcgtgtcgctgcccgttgtcgcgatcccagaggcgccgggttccctcccaggagcctgtgcacgggcaatctggccatcttaggcgattcccccgtcactcgcaaagtgggagtgacctcgcagagctacgctgtgtcaatccattgttggtctcatccctggtcagtttccccatcatgatggtcttctctcgagaggcggatcggatcatctccgggcactgcgg

SEQ ID NO: 659837 - DNA, 148 bp, Homo sapiens
gagtgtctcgcatgctgatcacaattctgggcacggtgaagcccaatgcaaacagaatagctttagatttccaaagagggaatgatgtagccttccactttaacccacgcttcaatgagaacaacaggagagcctaaggggggacact

SEQ ID NO: 659838 - DNA, 253 bp, Homo sapiens
  misc_feature (215)..(215): n is a, c, g, or t
  misc_feature (228)..(228): n is a, c, g, or t
ggcttgctgctgctggtcgtctctgaggttcccccgcgagccgcccggtctgcagttacatgcggctgtgcaggctctggccccggcttgtagggacatgtttgccacacgtagccagcagccaggtatggtggctcacaccttgtcctcccaagcactttggtgaggccgagcaaaggtggatggctacgagcccagcgagttccacgacccantctgggactatantagtcagaagccctgatctgctagc

SEQ ID NO: 659839 - DNA, 188 bp, Homo sapiens
gtcggttagttgtagggagagtggagctggttataattatgcgtcatagggatagtacaaggaaggggtaggctagtgtgttttgtcatggggttgagaatgatgtgtgaggcgtattataccatagccggctagtgtgaagagtactgcggcaagtactatcgacccagcgatgggggcttcgacat

SEQ ID NO: 659840 - DNA, 109 bp, Homo sapiens
tgtatgcgaaacctcataccggatcgacctgctcaaagatgctgccgatcaccaccgtgctgcgttctacgaccgagtacctgggtctatcacgtgctttgttgttgat

SEQ ID NO: 659841 - DNA, 168 bp, Homo sapiens
ataccaggtagtactccacggtgctgttcatctaccatgatgggagcctcctactgggggaacgtactttctggctgggttgacggttgtgattcttaaggcactccttcagcaggccacgctcggacagggtgcgcctcaaggacttctttctgatggagaccggct

SEQ ID NO: 659842 - DNA, 376 bp, Homo sapiens
cctatcccaatacaaatacaaaaattaactggacgttgtggcactcacccagctactcagtgaggctgaggcaggagaatgtcctgaactgaggagatggaggttgcagtgagccgagatcacgccactgcactccaacctgggcgacagagcaatgcccgttaccaatgcgcgagagagcatgcaagcaggcggatgactggctgggcatcccccagggtgatcatccccgattaagattgtggaccccaacgtggacagagcactctgtcatgacctacctgatcccagttccccaaggccaagcttgaagccagggtgttcccttgcggcccaaaactgaccccgaagaaagccacgatgctacgaggcccag

SEQ ID NO: 659843 - DNA, 341 bp, Homo sapiens
gttctagtgatctagagatccccacgcgacgcggtcaaactggctccccatcttaccttgtccctgcagtgcgaaaatacggcaccgcaacttccttatgcgtgcaacgaaacaaaaagaaaagccattgtgcagaggatcccagcctagatttccgaaataatcctaccatggaagacttgggaaagctgcaaccattgttggcatctaatctctgctcttgatgtaccatcttgtccctcaaaggagtctttgaggttgcaaggggtcttcagcaaggcagacagtccttaaatctcatcctctctaatctcagtcctataaactccgagctgagttgt

SEQ ID NO: 659844 - DNA, 636 bp, Homo sapiens
ggctcggtaccgattacgctcctagacggcataacagacaaacagagacaaatcatgagtgaactcccattcacaattgcttcaaagagaataaaatacctaggaatccaacttacaagggatgtgaaggacctcttcaaggagaactacaaaccactgctcaatgaaataaaagaggatacaaacaaatggaagaacattccatgctcatgggtaggaagaatcaatatcatgaaaatggccatactgcccaaggtaatttatagattcaatgccatccccatcaagctaccaatgactttcttcacagaattggaaaaaaccactttaaagttcatatggaaccaaaaaagagcccgcatcgccaagtcaatcctaagccaaaagaacaaagctggaggcatcacgctacctgacttcaaactatactacaaggctacagtaaccaaaaaggcatggtactggcaccaaaacagagatatagaccaatggaacagaacagaggcctcagaaataacgccacatatctacaactatctgatctttgacaaacctgagaaaaacagcatggggaaggttccccgtctagagcttatcgggatctctaggtcgactgtagctgcagctggatgccgc

SEQ ID NO: 659845 - DNA, 787 bp, Homo sapiens
gagattgtgccactgcattccagcctgggtgacagggtgagactccatctcaaaaaaaataaaataaagataaaatcataaacactcaaaaaaaaaaaaaaaaaaaaaaaaaaaaaccgtgtgtgtgggcgcgcgcccggggccccgcgggagaaggctttccggagacaccacgcgcggagtggcggccgcgggggccaccagagaggaggctaacgagggaacacagggggccaaaaagcgtgtggtctcaccaagagaggagaacacgcgggggcacaagtgagaaagagagggcgagggaattctccaccacacaatatacaaaaaaaagcgccgcgcgggggaaaaagcgcggaggcgtctgtcgtgagaacaaaaaatctcccagagagagagagagtatcccgagagaggcactacatataagggggggagaactctaatatctaacagacgaggggagggccgctcaccaaaaagagggagaagcgccgcgcgagagtaaattacacaaaacaatattatagcgagccgccccaggaagaccccgcggggggggccagacgcacaaaagagaccagagaagacagcaaacaccacaagaaagagcagaagaacacaaaacgcaaacaacgacgcaagaaaaagcaaagacaccacacaaacagccaatcaaagacaacaccagcgagacagaaaagaacgagaaaccagacaagagaagacagcagaaaccaaagaagagacacacgcacaagcgagcgaaagacaaccacacaagaac

SEQ ID NO: 659846 - DNA, 105 bp, Homo sapiens
ggtgtctagaggttcccgagatacacgcattatcgcctgatctactcaggagggctgaggcaggaggatagttggggtccagagttcaatgctgcagtgagctgt

SEQ ID NO: 659847 - DNA, 146 bp, Homo sapiens
gatgtcccccaagtatactatttcacagcctccagcttcagctgtttatcaaatatacaaaagaaaaaagtagaggttgtctttcgcgatggcaatctcggacccgttgcaggctgagtggagagaaagctatatcacacacagga

SEQ ID NO: 659848 - DNA, 185 bp, Homo sapiens
ctgtgccaggacaggagatgcaaatctaatttatctcactgagggcctttgagaaaaacgcttctgggccaggctcagtggctcatgcctatatatcccagtactttgagaagctgaggcggcagatcacttgaggccaggagttcgagaccagtctcgtcaacatggcgaaaccctgtctctac

SEQ ID NO: 659849 - DNA, 118 bp, Homo sapiens
  misc_feature (1)..(1): n is a, c, g, or t
ntggagcaggaactagagctggtctgatgtggtcagtgacgtgaagtgactagacatgctgtagggggacagctcacagtagcgatacattcacaggaactgttggtgtcagaaaagg

SEQ ID NO: 659850 - DNA, 1001 bp, Homo sapiens
  misc_feature (94)..(94): n is a, c, g, or t
  misc_feature (108)..(108): n is a, c, g, or t
  misc_feature (232)..(232): n is a, c, g, or t
  misc_feature (249)..(249): n is a, c, g, or t
  misc_feature (251)..(251): n is a, c, g, or t
  misc_feature (255)..(256): n is a, c, g, or t
  misc_feature (258)..(258): n is a, c, g, or t
  misc_feature (275)..(275): n is a, c, g, or t
  misc_feature (304)..(305): n is a, c, g, or t
  misc_feature (311)..(311): n is a, c, g, or t
  misc_feature (313)..(313): n is a, c, g, or t
  misc_feature (316)..(316): n is a, c, g, or t
  misc_feature (319)..(319): n is a, c, g, or t
  misc_feature (321)..(321): n is a, c, g, or t
  misc_feature (331)..(331): n is a, c, g, or t
  misc_feature (335)..(335): n is a, c, g, or t
  misc_feature (337)..(337): n is a, c, g, or t
  misc_feature (340)..(340): n is a, c, g, or t
  misc_feature (348)..(348): n is a, c, g, or t
  misc_feature (351)..(351): n is a, c, g, or t
  misc_feature (365)..(365): n is a, c, g, or t
  misc_feature (374)..(375): n is a, c, g, or t
  misc_feature (378)..(378): n is a, c, g, or t
  misc_feature (384)..(384): n is a, c, g, or t
  misc_feature (400)..(400): n is a, c, g, or t
  misc_feature (408)..(408): n is a, c, g, or t
  misc_feature (412)..(412): n is a, c, g, or t
  misc_feature (416)..(416): n is a, c, g, or t
  misc_feature (418)..(418): n is a, c, g, or t
  misc_feature (421)..(421): n is a, c, g, or t
  misc_feature (427)..(427): n is a, c, g, or t
  misc_feature (431)..(433): n is a, c, g, or t
  misc_feature (435)..(435): n is a, c, g, or t
  misc_feature (465)..(465): n is a, c, g, or t
  misc_feature (483)..(483): n is a, c, g, or t
  misc_feature (489)..(489): n is a, c, g, or t
  misc_feature (552)..(552): n is a, c, g, or t
  misc_feature (591)..(591): n is a, c, g, or t
  misc_feature (715)..(715): n is a, c, g, or t
  misc_feature (790)..(790): n is a, c, g, or t
  misc_feature (819)..(819): n is a, c, g, or t
  misc_feature (896)..(896): n is a, c, g, or t
  misc_feature (969)..(969): n is a, c, g, or t
agtgccagccgccagtggtcgcacttggagggtctcgccgccagtggaaggagccaccgcccccgcccgaccatggccgaggagctggtcttanagaggtgtgatctngagctggagaccaatggccgagaccaccacacggccgacctgtgccgggagaagctggtggtgcgacggggccagcccttctggctgaccctgcactttgagggccgcaactacgaggccagtntagacagtctcaccttnantttnntnaccggcccagcccctanccaggaggccgggaccaaggcccgttttnnactaananatnctntngaggagggtnactngncanccaccgtngtngaccagcaagactncaccctctnnctncagctnaccaccccggccaacncccccatnggcntttntntcntcatcntttnnncntccactggctaccagggatccagctttgtnctgggccacttcattttnctcttnaacgcctggtgcccagcggatgctgtgtacctggactcggaagaggagcggcaggagtatgtnctcacccagcagggctttatctaccagggctcggccaanttcatcaagaacataccttggaattttgggcagtttgaagatgggatctagacatctgcctgatccttctagatgtcaaccccaagttcctgaagaacgccggccgtgactgctcccgccgcancagccccgtctacgtgggccgggtggtgagtggcatggtcaactgcaacgatgaccagggtgtgctgctgggacnctgggacaacaactacgggggacggcgtnaccccatgtcctggatcggcagcgtggacatcctgcggcgctggaagaaccacggctgccagcgcgtcaagtatggncagtgctgggtcttcgccgccgtggctgcacagtgctgaggtgcctgggcatccctacccgcgtcgtgaccantacaactgcggccatgaccagaacagcaactt

SEQ ID NO: 659851 - DNA, 139 bp, Homo sapiens
gcgctcatgacataaaggcagatatatagagcaatggaggccgggtgtggtggctcacgcctgtaatcccatcactgggggaggtcaaggtgggcagatcattaggtcaggagttcaagaccagcctggcctcatgagg

SEQ ID NO: 659852 - DNA, 868 bp, Homo sapiens
  misc_feature (94)..(94): n is a, c, g, or t
  misc_feature (108)..(108): n is a, c, g, or t
  misc_feature (332)..(332): n is a, c, g, or t
  misc_feature (350)..(350): n is a, c, g, or t
  misc_feature (356)..(356): n is a, c, g, or t
  misc_feature (419)..(419): n is a, c, g, or t
  misc_feature (458)..(458): n is a, c, g, or t
  misc_feature (582)..(582): n is a, c, g, or t
  misc_feature (657)..(657): n is a, c, g, or t
  misc_feature (686)..(686): n is a, c, g, or t
  misc_feature (763)..(763): n is a, c, g, or t
  misc_feature (836)..(836): n is a, c, g, or t
agtgccagccgccagtggtcgcacttggagggtctcgccgccagtggaaggagccaccgcccccgcccgaccatggccgaggagctggtcttanagaggtgtgatctngagctggagaccaatggccgagaccaccacacggccgacctgtgccgggagaagctggtggtgcgacggggccagcccttctggctgaccctgcactttgagggccggcctaactgaggagcagaagacggtggagatcccagaccccgtggaggcaggggaggaagttaaggtgagaatggacctgctgccgctccactggctaccagggatccagctttgtnctgggccacttcattttnctcttnaacgcctggtgcccagcggatgctgtgtacctggactcggaagaggagcggcaggagtatgtnctcacccagcagggctttatctaccagggctcggccaanttcatcaagaacataccttggaattttgggcagtttgaagatgggatctagacatctgcctgatccttctagatgtcaaccccaagttcctgaagaacgccggccgtgactgctcccgccgcancagccccgtctacgtgggccgggtggtgagtggcatggtcaactgcaacgatgaccagggtgtgctgctgggacnctgggacaacaactacgggggacggcgtnaccccatgtcctggatcggcagcgtggacatcctgcggcgctggaagaaccacggctgccagcgcgtcaagtatggncagtgctgggtcttcgccgccgtggctgcacagtgctgaggtgcctgggcatccctacccgcgtcgtgaccantacaactgcggccatgaccagaacagcaactt

SEQ ID NO: 659853 - DNA, 153 bp, Homo sapiens
tgtacatgcagttcctggaccccatcgctgggggagagaaatacttgctgctgtcttccagcctccccatcagatgtttgagatgccatatcctctagtgtccatataggaggtgatagacatcgctgtcctgatgtgtgtcatatcaccagt

SEQ ID NO: 659854 - DNA, 132 bp, Homo sapiens
acccccgccgcctagcaacttccatgtgaatctgtgctcctatcatgatgctataatgaccttctgaaacttacaagggtgccaaagctgcagatattttcagctgtatcagccctggttggaagttgctag

SEQ ID NO: 659855 - DNA, 321 bp, Homo sapiens
  misc_feature (96)..(96): n is a, c, g, or t
taagtccacagaattattatcaaaactaaaacaaacgtcagtgtacataaagtaataaactttacaacagctgttagagaaagtcgtgatgtacgntatacatattaccgaaggcagagaggacaagcaaaggagagctcccgttggaatgttgattacattcatgcagcttcctcttgatttaaacactcatgacacattgaatgaaatcatcatatgggaaattcacaacaccttgctgagcagtatccagtcttcgaaagctgtctgtaagagccctcagtttgacgcagcaggcgatgtagtcgtcgaaggagatct

SEQ ID NO: 659856 - DNA, 318 bp, Homo sapiens
  misc_feature (20)..(20): n is a, c, g, or t
  misc_feature (143)..(143): n is a, c, g, or t
tcgtagacatgattgctccnaaaaaatagtgtaacgttaaacgttctacttaagtttaacaacataaaatccgaatttaaactaaaaatacggaaaaaatggacaaaaagacgattatttgacgaatagaaagcatgaagcgntttataaacgaatgaggtttcgctaatgttcgtgtttttcctgtgaggcggctgccaactcatgtgcaggatgataggggcgtaccgacattagccccagattgccgttagatggttgcattacgggttaaatatgctatatagagcatcattaatttaggagtcagcatggtag

SEQ ID NO: 659857 - DNA, 320 bp, Homo sapiens
catacagactctcagacagcggacccccaactctgccagatgtataatttcagcagtttcacgtgatagcctcaacgagactgcgagacaggcatggagaacgaccctgccagccacggactgccgcctgcctcctgaccatccgctgcatggagaatggcaacatggaatgtgtgcccggtccttcacagaagccacattggcagttacccgggaagttccaggctaaagggagctcgtctttgggagatgggctctgagttgcacagatctggccagccgggagaaggagcggctggagcagaagcagagagaagcac

SEQ ID NO: 659858 - DNA, 518 bp, Homo sapiens
  misc_feature (93)..(93): n is a, c, g, or t
  misc_feature (105)..(105): n is a, c, g, or t
  misc_feature (273)..(273): n is a, c, g, or t
ctgcgcctactactaccagtcgggcaattcccctgcctcggctcccgggtggctgggattgcaggcatgtgccagcacacccagctgattttngtatttttggtnggagagggggtttcgccatgtttgccaggctggtctcaaacctctgggctcaggcaatccacctgtctccacctccaaaagtgctggaattacaggcctgaaccactgcacctggcctagtgcaatgttgagtagtagtcggcggcaggcgtaatgtgggcttattgncaactcccactctcaggttcgggcaattcccctgcctcggcctcccgggtggctgggattgcaggcatgtgccagcacacccagctgatttttgtatttttggtggagagggggtttcgccatgtttgccaggctggtctcaaacctctgggctcaggcaatccacctgtctccacctccaaaagtgctggaattacaggcctgaaccactgcacctggcctagtgcaatgttgagtagtagtag

SEQ ID NO: 659859 - DNA, 130 bp, Homo sapiens
atatcgagctcgccctcttatataatctagtattatttacttgtataagtttgcaaaggcccataactttcaaatgttgtttcctcaacaaaattagaagctacttaagaataaaatctgtgtgttctaa

SEQ ID NO: 659860 - DNA, 916 bp, Homo sapiens
gtgcccgtcattaacatagaatgtattacaacactgttgaccatcatctgtgcataggcaatagagagatgagtagtctgctcggcatcgcatagatctgcctgaattctgcctagtgcgggcataaattttgactcgagttttgacagtagaatagacgtctgtcatccaataacactcgctagccactcacgtaccctcgttagtccatctctagattggcatagtagccagtacgtaactctatgccgccggtacaagaaagcgccatggtgcagtgagcctaaaatactcacattgctggaaagcgtatgggctgattcacaatctatggtaaagaactaaactcttagtccaatggctagttcacagtccgttgcccacccttattttgtatcccagatcatggcaccattgaactgtggcccagcatatactgaacaagaaagaagcagattccctgagggctgtgtgcagaacggacatatgaagacaaaaaatcagtgttttagagaagaaaacttacctgaaaaaagaaaagctattgcagagggttagggcacggaaaaccacacggagaccagtttcttctccattttgaaaatgcgatgccaaataccaggaggcgcttactagagctagaagcatgctgaggcaaaagcaacattgagagatcacaggtatgatacggtccatctgcaggaggagcctgaagaacaaaacagaatctccttgggtggttggcccagctgtgcacacaagacggcggtacactacatacggccaagcaagacctctgacctggtgttggcgacgtcagaaaaccctcaggagaaggactaacctgttgattggggcacagataagagcggatccggttagaggccgaccacgtcttcgttacggccgctgcctc

SEQ ID NO: 659861 - DNA, 439 bp, Homo sapiens
tgcgcgacatcagcagcaggcggtcacgcacggcgccctcttccggcccgagcatggccagattgacgaagaggcgcggcagatagaacaggccggcgaaccagctggtgacgaaaacgatgtgcagggccttggcccagaggtaactgctttgcatggtcgacagggtcaggaggtcgtggaaggagaattcagtgcggcggcgagcacggcgtcgacatcgggccgcgacagccggacgcgcagttcgcgcttcatgcggcggttgtcgagcacgcgcgactcacccatgaaggaaagcgtcatcggcgacagcttctgcgccgcctctgcacgtgcgacgcgcggcgggcgcggcagcgcgaaggcatcggcgacgcggtcgaaatagtcggccatcttgagccgggtgtcgtcgctggcgttgtaggtgcggccg

SEQ ID NO: 659862 - DNA, 165 bp, Homo sapiens
acacgatagaccatgaccgcaggtgctcctgattacttgcgaatatgatattgaatggctcactaattctcagggctacggatgatcttattaatgtgactgggacgcctgtggaatatgccagaaaataatggcctgcatgcaaggtgggattatagtgcaaca

SEQ ID NO: 659863 - DNA, 110 bp, Homo sapiens
  misc_feature (83)..(83): n is a, c, g, or t
tggaagaggataatcacaaaggtctgcatcctcatcatcttccacattgagtgggttgaggaggaggagtagaggagaggttngtcttgctgtctcaggggtggcagagg

SEQ ID NO: 659864 - DNA, 173 bp, Homo sapiens
  misc_feature (72)..(73): n is a, c, g, or t
gctccaccttaccaccagacaaccttaggcaaaccatttacccaaataaagtataggcgatagaaaattccnncctgagcggccatagatataggtacccccaaggggaaagatgtaaaatatgtatatacctagcgatatatatagcgaagggcctataccccctataccct

SEQ ID NO: 659865 - DNA, 225 bp, Homo sapiens
  misc_feature (10)..(10): n is a, c, g, or t
  misc_feature (25)..(25): n is a, c, g, or t
  misc_feature (213)..(213): n is a, c, g, or t
accggcgctnactgggaattccggnccttttctgtctataaaaccaacctcctctgctcagctcattgggacacttgtgctattttgaggaatgaagtcttgcccgattctagaatcatgaatgaagccaattaagatgtttaagtttgttgtaattttgtcttttgacatttacggtcacctcggaggtgtgttgaatattgcaggttcctngacccatcgcca

SEQ ID NO: 659866 - DNA, 216 bp, Homo sapiens
taggaggtggagcgttgcagtgagacaagatcatgccactgaacttccagcctgagtgacagagtgagaccctgtctccataaatcaatagaatgaatgaatgaatgaagaattcagtggttattagtatgttcacagtgttttgcaaccatctccactgtctaattccaaaacatttctgtccccccaaaaagaaactccccacagagagagcgt

SEQ ID NO: 659867 - DNA, 869 bp, Homo sapiens
  misc_feature (408)..(408): n is a, c, g, or t
  misc_feature (412)..(412): n is a, c, g, or t
  misc_feature (567)..(567): n is a, c, g, or t
  misc_feature (594)..(594): n is a, c, g, or t
  misc_feature (603)..(603): n is a, c, g, or t
  misc_feature (606)..(606): n is a, c, g, or t
atgcagatgctgaacgctggacaaggagaacgccatcgagcgcgccgagcatggccgaagccgacaagaagcaagactgtggaccgttgcaatgcagctgtgaggatggagctatgcaggctcctccagaacgaagctgtaatggtgacagaggatgaggtggaaaagtattctgaagtccgtgaaggtaggcccaggagaatactggagcaggccgagaagaaggccactgatgctgaggcatgatgtggcctccctgtaaccgctgcattcagctggttgaggaggagctggacctgggtcccaggagcgcctggctacttagccctgcagaagctggaggaggccgagaaggcggctgagtgagagcgagagacggaatgacggtcatcgaataccgggccatgnaggntgaggagaagatggaactgctggagatgcagctgaaggaggccaagcacatcgctgaggattcagaccgcaaatatgaagaggtggccaggaagctggtgatcctggaaggagagctggagcgctcggaggagagggctgaggtggccgagagtntggggacctagaggaggagtgaaaatngttaccaanaanttgaaatccctggaggcccaggcggacaagtattccaccaaagaagataaatatgaagaggagatcaaactgttggaggagaagctgaaggaggctgagacccgagcagagtttgccgagaggtctgtggcaaagttggagaaacacatcgatgacctagaagagcacttgggccgtgccacaggaggagaacgtcgagattcaccagaccttggaccagtacctgctggaactcaacaacctgttgagggcagccccacccc

SEQ ID NO: 659868 - DNA, 873 bp, Homo sapiens
  misc_feature (408)..(408): n is a, c, g, or t
  misc_feature (412)..(412): n is a, c, g, or t
  misc_feature (609)..(609): n is a, c, g, or t
  misc_feature (627)..(627): n is a, c, g, or t
  misc_feature (637)..(637): n is a, c, g, or t
atgcagatgctgaacgctggacaaggagaacgccatcgagcgcgccgagcatggccgaagccgacaagaagcaagactgtggaccgttgcaatgcagctgtgaggatggagctatgcaggctcctccagaacgaagctgtaatggtgacagaggatgaggtggaaaagtattctgaagtccgtgaaggtaggcccaggagaatactggagcaggccgagaagaaggccactgatgctgaggcatgatgtggcctccctgtaaccgctgcattcagctggttgaggaggagctggacctgggtcccaggagcgcctggctacttagccctgcagaagctggaggaggccgagaaggcggctgagtgagagcgagagacggaatgacggtcatcgaataccgggccatgnaggntgaggagaagatggaactgctggagatgcagctgaaggaggccaagcacatcgctgaggattcagaccgcaaatatgaagaggtggccaggaagctggtgatcctggaaggagagctggagcgctcggaggagagggctgaggtggccgagagcgagccagacagctggaggaggaacttcgaaccatggaccaggncctcaagttcctgatggnctcagaggangagtattccaccaaagaagataaatatgaagaggagatcaaactgttggaggagaagctgaaggaggctgagacccgagcagagtttgccgagaggtctgtggcaaagttggagaaacacatcgatgacctagaagagcacttgggccgtgccacaggaggagaacgtcgagattcaccagaccttggaccagtacctgctggaactcaacaacctgttgagggcagccccacccc

SEQ ID NO: 659869 - DNA, 197 bp, Homo sapiens
tccccgcgtacaattgggcctgtaggcgaagattaggttgtaaaggaaaccaagccacaaacttcccttggtttttgttcagcgttagctggacaggaagagtctaggatttttgctctgactagttggtagaaacgtgtcttcttcttctgtgctgtgtttttaccaatgttgatagtgttctccacagacacagc

SEQ ID NO: 659870 - DNA, 430 bp, Homo sapiens
caacgatggtctcagcttaccgacgtagctaaggactgcaggtgtgtgccatcacacccagcgagtttttgatgtttggggtagaaggagggaaccttgtttcgtagtccaagctggtcttgaattcttgatgtcaagcaagcctctggtctcaggctcccagtgttgggataacgggtgtgagacatcacttggagctctatttactggtctactatgaataataatgtcttgatgacacacgttctctctctgtcacccaggctcgagctccagaggtcctagtctcagctcacgggaatctcatgctcctcgggatcaggcgatcctcgtggctcatgacctctcgtacgtagctgaggaccagcgtagagctgaggaccatcgtggagctgaggaccatcgttgagctgaggaccatcgttgagct

SEQ ID NO: 659871 - DNA, 205 bp, Homo sapiens
ctgggtaagcattgtataccattgatcaagttcgggggaataaagaacagaccacacctaaaactgcctttctgcttctcttcagggagaagtagctctgaacattgtctgaattacatatatttgaatctttcttactattggtaataaaccttaatggcattgggcaaacagtagacttatagtagtgttgggcaatacatca

SEQ ID NO: 659872 - DNA, 366 bp, Homo sapiens
ggatttttgtacattgattttctttctaaaactttgctgaagttttttttattagcagaaggagctttggggctgagactattgggttttctagatatagaatcatgtcagcttcaaatagggataatttacttcctctcttcctatttggatgccctttatttctttctcttgcctgattactctggctgggatttctatgttgaataggagtcatgagagagggcatcaaatctacacatatcaaatactaacctcgaatgtaagtgggctaaatgcccacttaaaaggtaaaggggggcaagctgataaaaagcagctcaatggtatctgtctttgagaccatctcacatgtgatgccaccct

SEQ ID NO: 659873 - DNA, 121 bp, Homo sapiens
aggactgtagcccttatctgctgtaatagaaccttctgctcacatatacaccacttccaccaccagatacataaccaccaccatagggactgcccgaggcttcttaccaccaaaactgccc

SEQ ID NO: 659874 - DNA, 780 bp, Homo sapiens
ggcggcggcggctcggcaggcgggttcaggcttcgggggccagccgccgccatgatcctgctgcgaggtgaacaaccgcatcatcgaggacgacgctcgcgctcaaggttcgagaacgcggccgccggaaacaaaccggaagcagtagaagtaacgatttgcagatttcgatggggtcctctatcatatttcacagtcctaagtggagcacaaatacataaagtgatggtcagtatttctttgaaattctacatacggaacttcaggcacatggtgctgatcgagttattaaagacgggtgtaccgcggacgtttcttggtaaagtccaggaatcaggagtacatagtgtctcttgtgctatatgaccttgaagaatcttatcggcatccgaggattccattgtgcatctaagctggcatgttgatgcgacaatcgttctgcctctgtctttgaacatatacgttccaattccaagaagagggcactgacaggagagtaccagggtcagattatcctattatcgggatgagtgcgaccatgctatgtggaggtctgaataacggacatgcacgtcacaggtagatcttcagcgacaatgtctacaggatgacgacgatgtggtccattggataagcgtgttccaatgcgaggacgtttcacgcgtacaggcacgcagagacctaccagaacagaccccagtagtgtcctcctgttaacctaaagccgaaccttcctcttggactctgcacggtaaccagagagccgctgttgggttgaca

SEQ ID NO: 659875 - DNA, 327 bp, Homo sapiens
aatactgagaaacttctttgtgatgtgtgctttcatctcacagagttaaaactttttttttgattgagcagttttgaagctctctttttgtagaatctgcaagtgaaaatttggagcgcttttaggcctatggtggaaaaggaaatatcttcccataaaaactagatagaagaattctgagaaacttctttgtgacgtgtgcgttcatctcacagagttgaaacttccttttgattgagcagtttggaaacactctttttgtaaaatctacaagtggacacttggagtgctttggggcctaaggtagaaaaggaaatatcttcacat

SEQ ID NO: 659876 - DNA, 208 bp, Homo sapiens
gtgagatgtaatgtcacataagtatacagtctacttactgttgtctacttacactgtggtcattttgaaaagatcatatttatccagcatgaaccttaagtctactaaagaacaaaaggcatgcaatatatgtccatttattttatttaaattatacttaatcatatgaagcctccatccttttcgaaagatgagacagctatttagt

SEQ ID NO: 659877 - DNA, 137 bp, Homo sapiens
gatccgaggatctccaatctccgcttactcggctcagatgttccccactgccaacacgcccatgccccgttcgcaagcagtctaagcgccggtccaacctgttcacttactcgtgaacagggagcgaccctagtaca

SEQ ID NO: 659878 - DNA, 184 bp, Homo sapiens
acgtgcggactcactacggggtgcagacactcctgtagcaatgcaagatacatctcagaccatgtctaaccagatcattgggagaatgatgatatgagtagtcgcattgatgatctggaaaagaatatcgacggactcatgacacaggctgaggtggaagaactggaaagtgaaaacaagatac

SEQ ID NO: 659879 - DNA, 1313 bp, Homo sapiens
  misc_feature (273)..(273): n is a, c, g, or t
ggcgatatactcatacccgggtaaagaggaaggtgttgtctctagcatagtgaagtgcatctcaaacggcttgacgcatgacgtagaggtcttccttcaacatacctcgagtaggactagagtttagtaagaatagtgtcaatcatcgtcctgtgagtatggaagagttggacagtagatttcaccttaccaagaactcgaagtgaagcgaagttagatatttcattgatggttgatactgacacaggagaggactaagaactgatgctaagngtcgaggaaacgggtcccggcggagtagtgtcgggaaacatagatgtgcgtggtgaatgtcaaggaatgagagtttgcggcttgcactagaagtgagtgatagctgaaagctggtgtatttgcgtgcagatagggtggcgcactagaggggtcatgctgtgcacgatattgcgcgcgagagcaagaagtcgtacattgcagttactaaacatcgcatagggaaggtgcatttgctttgtcgcagtgaggaggccgtagcataataggtggttgcctggcgggtatcatcgataggagatgttgggggcgcaagaaggcgtatgggaaggttgtagggaagtcttgggaaaactcacgaggggacgagaaggggctaagtcaccagtgagaaagttttgatcggcatgagcctttgatttggatcccaaacgaaggggggactgagccccttgggtataaaactaccttacaggtttgaaacaccttggcattgatggcgccgaaccggattgtttgcgttcaagaacaacggggatggattgacttgggagacaactctagaatggttgaacaggaatctaatatgctttgcgcccttgggagaaccccacaaacgtgggagtaaaggagttgtggacacacctaaaaggaaaaggcgccgcgttggacgttgaaacctaacggtggagggcatttggtaggggaaagcgcccaaacaaggactgaagaataaacgtgggaccaacgcaatacaccacgagtcattcaagaaatcaaaggaaaggagtcgggaaaacgcccaagaagggacggccacattggcacaataggccgccatggggcaggtacccccaaccgaggagtttaaacaagggatcttcccgttggagcagggtagtatacttaggaggttatgggaatgtttgggtactacttaaagagaccagtttagatagagagtttatggaggaaaacgaacaagaaaacaaaaacacagaagagcagcagagaagacaaaaaaatattgcggaggtgagagg

SEQ ID NO: 659880 - DNA, 688 bp, Homo sapiens
agcggaagagccaaaagcagatcaaagtggtgggactcgacgtctgctggccgcggagacgtgaagctctcgagtgctcctcccgcctgctggtgtcggtcgctcgcccttgcgctctccttcgcggctccagccccgtggcccgcgccccggcgcccgaccatggcagaagactgagcttgatccagaaaggccaagctggctcgagcaggccgagcgtctacgactgatcatggtccagcctgcaatgaacggcatgtgaccgatgcatgggcgccggatgctgtccaacgaggagcagcaatctgctctccgtggacctacaagaacgtggtcgggggccgcaggtccgcctggagggtcatctctagcatcgagtcagaagaccgacgcctccgacaagtaagtttgcagcgtgattgaatggactatcgggatgcacaagctggagtccgaggctgagatccatctgcaccacggtgctggaatggtcgggtcactatttactagccaatgcaactaatccagagcagtaccggtcttcgtatctgaaacctgaagggtgattacttccggtaccttgctgaagttgccgtgtggtgctgatcgaattcaaccgactagctcattcccgaggagcttaccaagaggcattcgatataagcaagaaagagatgcaacccaaaca

SEQ ID NO: 659881 - DNA, 912 bp, Homo sapiens
gatcgcggagtggcggcgcctgcgtcgccggtctccgtgggccgttacacggctgctggatcggtgcccgccggggtcagcgattgccggtctccgtttcctctccggtgttccccgcgcgagaattggcaaatccgagggttggtctgcacggatgaacgagacgctggcgtcggctagaaagaagcgatggctggagatcactaaatggtgcaacacttggtacggtagtgagtcggaagccaagtgcttgcctgtattgttgctagcttagcacctagggtgctgtcacctgttgggaggcccccttgggggcacgtattaggtcatgaaaggaccaagtaatcggacccccttctaaagacgtgcccaagggcggaaacaacacaccacgttccgtttgttcgccttttgggatcccttggtttgcaagatgaatcaagagaaagggaagacatatccgaaagaaaggcttcgttccaccatgcgtgttggcagaacagcgtccagaatcgcggtgttgggagcaattcccgtttccagtggagaaaaaataaggggaagccaacggtgggtatcacaacctatttggccctttggagggattgaaagatttaatttggcaccattggtttgtgctttttatgtgccccccaaaattgggcggaacttgcttgcccacatcgtctatgggtaggggccgtaccatgtgggccataacactagacagtgctaccttggtgatacaccccccgtttggagcggtttttagtactaacacatttgtaacaactacctgttgcggttgagcccaaaaaaaaaaaggttcaggtaagccatattgcaacagccaatgataactttgtcggcctgtgtcattttcaacaaattgttgacatttcagtatcgaga

SEQ ID NO: 659882 - DNA, 320 bp, Homo sapiens
  misc_feature (40)..(40): n is a, c, g, or t
ctctaagatccttcgattggtgcatgactagccgcagaanactgctgaaccctttcttgcctctcagctctacagtggattataatgctgtttttccacttatttatatcaaaagagatgttgtcagcgatgtgtctctagcacatacttaatgtttctcagtctattactcagttatcatgaagcaagggtcattttcccattgtagaggcagctctaagacttccaagaatatcagcttctttctgcttaagtgtgtgaatgcttagtttgttcttaccatgtggcccactttcaaaagtgacatggcacgcgacatc

SEQ ID NO: 659883 - DNA, 236 bp, Homo sapiens
ggggggggggaacccaaaaaaaccccggggcccggggggggggtccccccccccccggccctggggggggggggggggggggggggtttttccccttaaaaaaacccccctttttgttttgggggggtggggggggggcccccccccccgggggggggggggttttttttacccccccccccttttttttttttttcccccccctttttggggtataaaaaaatttttttttttta

SEQ ID NO: 659884 - DNA, 312 bp, Homo sapiens
agaaaaaacatacaaatttacttaacgggtttacacaggaagaatcacagggggattacccacccctcagagggcttcaaaagcttggggatacaatcccagcgacacaggttttgattgggggaagaggaattttggtgggggattacaaaggagaatgaatgtcttagggacccattaatttgtacaacatcttgtgaaagggtctgctcaagtgtgattactacattcttgggcttacagggaggggacaaaaacaattttgttccttgggatggggttaaaatttatcctttggtttggcagaaaagg

SEQ ID NO: 659885 - DNA, 867 bp, Homo sapiens
agacagtgggtctgtgagagaccgaatagaggggctggggccacgagcgccattggacaagcaagtggggaagaaacgagaataaacgaagagcgcaagacagctaccaagggatgactattgatcgttgatgccttggtctgcagcaaatagcaaggagctggctgctgcctaaagaaacagggagccatcgaaacagtcgaaagagggcaaaaagcaaacaaagagacaaacaaaaggcaggcactttgcatgcaagatgcatatccgtgcaaaggaacgtgggaagcacattgtctcttggaaacgctccaagggcatcgaagagctggactagaagaaacgtgtgtgcagtgcaagcccaacagcaaaagcaagtgaagcaggaattcgagcatcaaacagcataaaacacaagagacacaggacagcaacgggcataaaacacaggagtctacgcatgcataagtgattaggcgaagcacatgggaagatcaaagacttcagaacatcaaacaagagactggcaaacgccgacaagctggaaactggtactctggggacgtgcatgcatgatcgatgatgtattaaccagaacttgcctgaaaacaagctcaaagggaacagctcaaataatcaacatacagaagtcgggatggagtcagacggaggactgagggattaccagtaacaagccttaagagagcgttcaccgaactacaatccttctggtgaacagtgagtgatgacatcagatgaatcgtggcaagtctagaaaaaggacgagaacaataaatcagaaaaagcaagcaggttctaagcatagaaagtggggactgaagatgatgacagtatccttcacaaagc

SEQ ID NO: 659886 - DNA, 698 bp, Homo sapiens
  misc_feature (24)..(24): n is a, c, g, or t
  misc_feature (44)..(44): n is a, c, g, or t
  misc_feature (50)..(50): n is a, c, g, or t
  misc_feature (104)..(104): n is a, c, g, or t
  misc_feature (118)..(118): n is a, c, g, or t
  misc_feature (155)..(155): n is a, c, g, or t
  misc_feature (210)..(210): n is a, c, g, or t
  misc_feature (224)..(224): n is a, c, g, or t
  misc_feature (285)..(285): n is a, c, g, or t
  misc_feature (302)..(302): n is a, c, g, or t
  misc_feature (307)..(308): n is a, c, g, or t
  misc_feature (321)..(321): n is a, c, g, or t
  misc_feature (335)..(335): n is a, c, g, or t
  misc_feature (342)..(342): n is a, c, g, or t
  misc_feature (353)..(353): n is a, c, g, or t
  misc_feature (374)..(374): n is a, c, g, or t
  misc_feature (422)..(422): n is a, c, g, or t
  misc_feature (425)..(425): n is a, c, g, or t
  misc_feature (431)..(431): n is a, c, g, or t
  misc_feature (440)..(440): n is a, c, g, or t
  misc_feature (454)..(454): n is a, c, g, or t
  misc_feature (498)..(498): n is a, c, g, or t
  misc_feature (502)..(502): n is a, c, g, or t
  misc_feature (521)..(521): n is a, c, g, or t
  misc_feature (546)..(546): n is a, c, g, or t
  misc_feature (548)..(548): n is a, c, g, or t
  misc_feature (606)..(606): n is a, c, g, or t
  misc_feature (613)..(613): n is a, c, g, or t
  misc_feature (618)..(618): n is a, c, g, or t
  misc_feature (621)..(621): n is a, c, g, or t
  misc_feature (667)..(667): n is a, c, g, or t
cccggtgaccccgcagtgggtgtntaaagggaggacggacaganccaaangccgccggaacaagaggaagctgacaaagcaccatgcgtaaaatcatgcacatncaggcgggccaatncggcaaccagatcagcgccaaattttggaaagtcatnaataatgaacatgggattaaacccactggcagttaccatggaaaaaataatttanaactggaaaaaatnaatatttaataaaataaaaccactggtaaaaaatatattcctcgggccatcctcgtggatntagagccaagcacaatngattnngttaagtctggancattcggccaaatnttaaaancaaaaaatttnatttttagccaaaatggagcngggaataaataggccaaaggccactacacaaaaggaaccgaactggtngantcggtnctggatgtngtgaagaaggaatnaaaaaactgtaactgtatccagggcttccaactgaaccactctntagngggaggcacggggtccggnatgggcacctgctcatcaacaagancngggaagaatacacaaaccgcatcatgaacaccttcagcgtcatgccctcacccaaggngtcaganacggnggnggagccctacaacgccaccctctcggtccaccagctggtggaaaanacagatgaaacctactgcattgacaacgagg

SEQ ID NO: 659887 - DNA, 185 bp, Homo sapiens
  misc_feature (8)..(8): n is a, c, g, or t
  misc_feature (17)..(17): n is a, c, g, or t
accgctcnttcttctcnttctccttctcctccttcttcttcttctcctcctcctctaccaccatctttttctcctcctcctcctccctttccttctctcctcctcctcctgcttcttctccttctctttcttcttgcttattcttcataacatgctggtaccttacagatcttaagattcaatga

SEQ ID NO: 659888 - DNA, 604 bp, Homo sapiens
caatggcgggctcccctcccccagcctcgctgctgccttgcagtttgatctcagactgctgtgctagcaatcagcgagactccgtgggcgtaggaccctccgagccaggtgtgggatatagtctcgtggtgcgccgttttttaagcccgtcggaaaagcgcagtattcgggtgggagtgacccgattttccaggtgcgtccgtcacccctttctttgactcggaaagggaactccctgaccccttgcgcttcccaagtgaggcaatgcctcgccctgcttcggctcgcgcacggtgcgcgcatccactgacctgcgcccactgtctggcactccctagagagatgaacccggtacctcagatggaaatgcagaaatcaccgtcttctgcgtcgctcacgctgggagctgtagaccagagctgttcctattcggccatcttggctccttattctcattacccttcttgagttgtgggctcagacactacaacagagctccgtcacctctttctaaaaagctgggaaattgttattgtcaacgccagccccattttgtagggcacctggtgcaggggaccaacagttagtggggtgcggggcttca

SEQ ID NO: 659889 - DNA, 330 bp, Homo sapiens
cggtaaggtgcagtgcattccagcctgtgctacagagtggactctgtctccaataaaaacaaaaaacaaaacaaataaaaaaaacaggctgggcacagtggctcatgcctgtaaacccagagctttggaaggccaaggcgggtggatcgcttgaggccaggagttcaagatcagcctagccaaaatggtgaaaccccctctccactacaaatacaaaaattagctgggtgtggtggcatgcacctgtggtcccagctactcgggaggctgaggcaggagaattgcttgaatctgggagatggaggttgcagggagccgagattgcgccac

SEQ ID NO: 659890 - DNA, 119 bp, Homo sapiens
  misc_feature (1)..(1): n is a, c, g, or t
ngcccccagattacgatgtcaccagtccttcttttcttcttcctcatcagaaccaacatcttcaatttcaggttatgtctatccgactctttctcttctttttcttttactacttctta

SEQ ID NO: 659891 - DNA, 185 bp, Homo sapiens
gaatgcacgggagacgtgctgatcagctctgggagacgtcaagggcaatggcaaagggggtttagtgctcgctggatggggagccgttcgaggtgaaggggacatgggcgaagacctgggggtgctgtcaccgttgaggctcatgaccttctggctaccagacctcgcacacaatagtcactgat

SEQ ID NO: 659892 - DNA, 709 bp, Homo sapiens
tccccccccaaaatttttttttaaaaaaaaaccctttggtaaaaaaacagcaaaaaaaaaaaaaaaaaaaaaaagagagggtggtggggaaaaccacaacacccacccctaacgatgaggggcggggggaggagaagaaagagatagtggctgcgcaagcaggaggaaggagagggagggggtgcataacaaaaaaagaagaaagaaaaaaaaaaagaggggggggggcgaaataatatcacaccgcgcggggggcgcccccaataggcacccgcaccccacattgttgtttgagaagaaagagggggccgcccccacaaaaggagggggaggcttctaaaataaaaacagcggaccggaggggcggcgcgcgcgctataaaatccaaagaacgaccccggcggaggagagcgagagagaaaacagctgctgatcgcggagagtgacgatagtgggggagaagacacacaccactcacgctgggggggggggggggacaagatgaggcgggcacacacacctcaccgaagagaagatgataaccccgccgcgggggggggaatcaaaacacaacaagagggggagagggtaagggcgtggaccacacaaaacataataagcagccgggggcgaagaagaacgatgcgcccccgcgagaggtaggccgacagaaacaatcatcgagggggcgtaggaagaaaaaaaacat

SEQ ID NO: 659893 - DNA, 541 bp, Homo sapiens
caaagctaatagtgagatgtttacattaatttgactttaatttctccatccgtatgtccatcactgacatctcaaaagtagggatatttggtatatgacagtacgagcaaaccaaaaaccattttctttctttctgtctttctttttgaaatggtcttgctctggagtgcagtggcacgatctcagctcactgcaacctgtctcccaggttcaagtgattctcctccctcagtcatcctagtagctagaactacaggcacgtgccaccacaaccggctaagttttgtatttttggtagagacgtggtttcgccatgttggtcaggctggtctcgaacgcctaacttcacgtgaccacctgcctcatcttcccaaagtgctgagattacatgcttcagccaccctgtccagcctcttagagaaaattttaagaattttttaaaaagaagaaataaaatcagccataaaattgctctacattttaatggttttgttttcagcttttctttaacatccttgagttacactataagctttcggta

SEQ ID NO: 659894 - DNA, 2458 bp, Homo sapiens
  misc_feature (1277)..(1277): n is a, c, g, or t
  misc_feature (1365)..(1365): n is a, c, g, or t
  misc_feature (1398)..(1398): n is a, c, g, or t
  misc_feature (1416)..(1416): n is a, c, g, or t
  misc_feature (1458)..(1458): n is a, c, g, or t
  misc_feature (1496)..(1496): n is a, c, g, or t
  misc_feature (1498)..(1498): n is a, c, g, or t
  misc_feature (1504)..(1504): n is a, c, g, or t
  misc_feature (1577)..(1577): n is a, c, g, or t
  misc_feature (1642)..(1642): n is a, c, g, or t
  misc_feature (1655)..(1655): n is a, c, g, or t
  misc_feature (1765)..(1765): n is a, c, g, or t
  misc_feature (1833)..(1833): n is a, c, g, or t
  misc_feature (2001)..(2001): n is a, c, g, or t
  misc_feature (2165)..(2165): n is a, c, g, or t
ggacttagtgcaacaggttgcaggctaaaacaaagtctcagaacaggtctgaaagtacctcttgcctggcatacctcgtggctccttcagacagctagaagctcagctatactagatgcccctaatctctagctagcagcatttcactagccctactttagcacgcatactttatccaatctttaacggaaaaccccgaacaaacactatctcctggccaagtgctcattgcgttagggaagtgcccacaagtgcactaccgtgtagtgtcaaaagaacaatagttccgttagacaagcactttcgttgtaccgcgttcctttgcgcggcaacttgcccaacggtgcatccagggaccccctggccattgtgaatgcccacttggacggccatcccctggcttggcttggataacccccgtacgggacaccccttgacgaacgaggctagacactgcgcttatcgccctcaccccacttcttcgagcttccaaaccagatgcctgaaacttggtggcctaccctttaacccaagccgatggaccgaatcgcccctcggcggtctccaacgaccccaacaccgcaaaggcttcacaccaccttaacttctcggctcaccaagctgaagatgcactcatcgactttgggtaagcaacccgcacgattccccgtgggcggcccccgtatttacaccccaaggactgccgaaagcgcacctttaagtttgtccccgaacgagcgcaagtgccgttgggccgatcaggccccagagctttcacgacaccccgctgtggcggttcaacaagacgaccaaaacctctgaccgtttgacagctttgggccacatgcacatactccgcgacgtcgcacccactttatctcacccccatttgcgggagggaccgggctaaaaccctccacttagtctgtgtgcacaaaccacaccactatcgtttcccctaatcaagcacgaccgtctggtgcacttactactatcaatacgagggtgccacgccgaaaacaacctccacttggcgcgccgagccctgtgggttcccgcatcacgcgccatcatctgcgttggcggcccgaccagacagtcgcagtgtgagccatcagaatgacataacctgccactagttgccaaccatccagcccgaagcaccgatgtctactatggctcgtgacgcctgacacgggcggcacaaaccatcgtacggaggagctactgctacttgagtcacaagcaagatactgaccatctgggcctcgtgagtnagtactgcgacctgctcggccgctcggcttgtatacgacgccttgctcatacgacacgtctctgctgacgacctattactgaacgatngctcgcagcgcaacgagacagatatctatgtgntccgacgccgcccagcanctgtcgtaatgtagttgagcggccaccccgcgacgtagtctngactgtacgttatcgttacggataggacagcatagctncncatccnccggctgtcaggagacgccgacgttttatcaagcgagccgagctggctacccttctgtcagcctagcaacagngactgcttcatggcatacgaactgctgacgagctgcctcgtgtggcgccatgcgcacacatacgngatgccacgtcantcgacactctgtagttgacggacacagacacagctcaatcactacgcacgcagaggcgtcgacgtctcgttagcacagacgacccaccgaacaggctgcatacttcagtnggcgggcgcgcgccttcacttgttactgtgaccacccgatctcttatataagtgcgctagaatacagngacgagcgacaccgcgcgcttgctggtgcgactaactcacgcagcgtacgtcggtgtgctcaatccgcagatctcaatgacgcactcgtaacgtattctgctcgcacttcctacagcacgacgccacgtatgctagtctagactagcgtgtaggagatcgcatcacgncgcacacagaagacgtcactgcgctccagtcgtctagtaacccggccgccgcgaccacagattgctgagtcgtgtcgaacacgatacacataacgagcaactcgccccgcgcgataagcagtgcgtgcatacagaccacccatctgcgacgcgacgagacacgntacatgtacagtaccgtcgtgcgggcacgacagcccgctcccgattgtcgcaaccgcccgacgagcaggccggtcgcacatacggacacaacaaggccgccgacactcaggacgcaccactaggcaggatcacacgctggcgcccgcacgtagccggacaacaacaccatcagcgccacgcaccaggcacccacacagtatgttccccgcaatgctgacgcgcagctctgtacagcacagcgcacaaaccagacagcgagcacgacattcggcggacaagcgacggggtctaa

SEQ ID NO: 659895 - DNA, 106 bp, Homo sapiens
ctatactttgtacagtggtctcccgatgtctatggaaaagatgcacagagcaaggctttgtggtggtggagaaggaagaactgaacatgattgacaacttcttcag

SEQ ID NO: 659896 - DNA, 322 bp, Homo sapiens
  misc_feature (213)..(213): n is a, c, g, or t
  misc_feature (234)..(234): n is a, c, g, or t
  misc_feature (295)..(295): n is a, c, g, or t
  misc_feature (310)..(310): n is a, c, g, or t
tctgcctcagcctctggagtatctgagaccacaggtgcacgccaccatgcctggctaatttttaaattttttgtacagacagggtctcactatgttgcccagcctggtcttgacctcttgggttcaagcgatctgtctacctcagccttccaaagtgttgagattataggtatgagctaaatttgccaaactcttgcaagaccactataaggnctttgcattggctgttttctncaactctgactttttggttgagtccttcgtttatcccttataatctccagttcttaatcanctacttagaggctanccctatctaaag

SEQ ID NO: 659897 - DNA, 331 bp, Homo sapiens
  misc_feature (245)..(246): n is a, c, g, or t
ggccacacctttatccggatccattcaagggacgggcagattagggttgctggtttaaaagtgattaaaaggccgggcgcagtggctcacacctgtaatcccagcactttgggaggccgaggcaggcaggttgcttgagctcaggagttcgagaccagcctgcctctaaaaaaaatgtttttaattagttgggcataatggagctgtctgtggtcccagctactcaggaggccaagcagagaggnntgcttgaacccaggatacagagattgcatgagccaagatcgtgccactgtactccagcctgggtgatagagcaagaccctgtctc

SEQ ID NO: 659898 - DNA, 205 bp, Homo sapiens
gagagagaccctcacgtgctggggagtccctgccacactaagtacccgcactcatcgactgatatctgccccatcctcagcagtttccatgtagaccccgttgaagaggggaggggcctagggagccagcaccttgtcatgtaccatcgaataagagtacccctgttgcgtcaacccaattaaaatacaagagaaaaaaatgggg

SEQ ID NO: 659899 - DNA, 120 bp, Homo sapiens
cggttactctatgaggactcccggtgctgagtctggggtactggcagagttagtggctcgaatacccagagttctgaggtggtgggactcaccggtctggacatgggtgctatttggaaa

SEQ ID NO: 659900 - DNA, 336 bp, Homo sapiens
  misc_feature (299)..(299): n is a, c, g, or t
tggtagacagaaaaaatggcttctcaaaaacatcctaggctggacacagtgctcatgcctgtaatcccaggactttgggaggccgaggtgggcagatcacttgagtttaggagttcaagaccagcctgggcaatatggcaaaacccttgtctctactaaaaatataaaaattagccaggtgtggtagcacatgcctgtagtcacactacgcaggaggctgaggtgggaggatcacctgaacccaggaggcaaaggctgcattgagccattgatcatgccactatactccagccttgggngacagaatgaaacccttgtcttcaaaaagaaaaaaaa

SEQ ID NO: 659901 - DNA, 110 bp, Homo sapiens
aaaatttaattttatcatagccctctcacaggtatgtgttattatttaagcccatttacttatgtagtagtttgtctcttggtgacataatacaagttatagtttctgtt

SEQ ID NO: 659902 - DNA, 136 bp, Homo sapiens
gccccttcccggagtttggtttagggctgcgtgctcaaaagtctggtttggggctgggttttcccatcgccctggaggaggcttttgtctcatttcatgattcccattaaactctgtgccatgaagcttagcctga

SEQ ID NO: 659903 - DNA, 152 bp, Homo sapiens
ctggattctgtgagcaccgtgctgacctccaaataccgttaagctggaggctcggtagccgttcctcctggccgctggggctcccaacgggtcctcctcccctccttggaccggcccttcctggtctttgaataaagtctgagtgggcggca

SEQ ID NO: 659904 - DNA, 728 bp, Homo sapiens
gggtgggcatggacaatacagttgacaaaggttgcgcaccggattgtgtttttttgtgttgtgtgtgtgtgctgtaatgtatatatattaaatgttccaatatgccgtgacagtgttaatccagatagactgtgatctgcacaattaattatgtggttattcgagcacttaatccactcaagggttcagtggctctgctctcctccctgccatacgggagctgtggacagagctccctcacttcaagattcctagtgtttggcacaacagggttgtccaagtgagaaagactgagttgcgtgtctgtaaatgtctgcgcagggtgcacatgctgcgaggtctccatcctccgggtctgtccctcccagatgggctgggtctgttgggccctcctcagagtatgcctgggtacaaattctcactgtacagatgggctgtaagttctcacttcagagctatggaatggatttagcacctttaaaaagaaaaaaaaaatctttgacttcaaatttatagtagtgatatgctgacgggctgacacgcagaatggttgggcccctgttcttctgcgctccagctgtagaggcggctgctcacaagaggcacttggcttgtgtatataaagacacgtcgggttgttgtagaaccgctcttctttctaagtgggtgctacaaacgctcgcgaggtttctctgcaaaaaagggggggcacaccaagtgggcacccc

SEQ ID NO: 659905 - DNA, 153 bp, Homo sapiens
cgcagcgcactaggcgcctaccaatgaaccaggtcagccatgcgatatcaacatttatttacaacacggacttactaggcacgtacagaccatggaggaggggatgatgacaagaacttcatccttttccggcaggtggcgtcgatgcatgat

SEQ ID NO: 659906 - DNA, 335 bp, Homo sapiens
atactgatgagggggtgttgttaacataactggaccactatcaaagaatggtgtgtgctgtgtgaaatacaaagactaatgaatgaggaaacacaacgtgattgcctggccattgactgtcatatataccttctcttatttgagctatgcttgaacagacgtgacctagaaaaaactgacgctaaagagaagggggtggcggggctagttttcaagttggggaacctgatagtgaaaagtcacagatggagaaaattgctctcagaacagctgtgtggattgctttcctcttgtcgcacatgtaccatgcatttctcagcttggggtactacatg

SEQ ID NO: 659907 - DNA, 244 bp, Homo sapiens
ccccaagtggcaccccctggcggccaggggcccagcctggtggtggtggcaataaaactgtgcccctcctcagctcctcgcttcccctcccccagccccagccttactcccccatgcggacaatcattttgtacggatcccgggagcaatgctgtacggttttgtaccctggtggtttgtttcctaaaaaaccccttgtgtttttggatttttagcccattactaaaaaagcctttgctttgta

SEQ ID NO: 659908 - DNA, 699 bp, Homo sapiens
  misc_feature (1)..(1): n is a, c, g, or t
ncaaaatattctaaatgccggtattgagccatccttcaagggcatatgttaattcttggggtcctcttgtattaaaatttaatatcccatcttccattgatttaaaccagtattctgcgcatttcacaaatttaattaaatttgggacttgttcatccaatttcataattgctgccagaaaactcataaggagcatataggcctaattgtaaacccaaagcctgccttaagaattaaataattggcttattaaaaatggtaacctatgaggttaatttcatatttgagttaattatgattcaaatacttctttgtttagtgtacctaagtaaatttttctttaagtcagaagcccattaaaattagttacaagcattgaacttctgaagtattatattaatataaaaacatttttgtatgttttattgtaatcataaatactgctgtataaggtaataaaactctgcacctaatccccataacttccagtatcattttccaattaattatcaagtctgttttgggaaacgctttgaggacatttatgatgcagcagatgttgactaaaggcttggttggtagatattcaggaaatgttcactgaataaataagtaaatacattattgaaaagcaaatctgtataaatgtgaaatttttatttgtattagtaataaaacattagtagtttaaacaaaaaa

SEQ ID NO: 659909 - DNA, 766 bp, Homo sapiens
cacgcgctggcctgttggcctgggctggaacctgagaacgcctgggacctgcgctgcgacgctgccggcctgcattgagcctgcctgccgtgtttcctgtctccgcacctacctcaaaggccgcttgttgggcaatggtgggggcttcgccctgctgctacgagtgccactgacacagagactggcagcgcctacgctgtcaaagtcatccctgcagagccgcgtcgccaagcctgcatcagcgcgagaagatcctaaatgagattgagcttgcaccgagacctgaagcaccgacacatcgtgcgtttttcgcaccactttgaggacgctgacaacatctacattatctattggagctctgacatgaccgaaagtccctggcccacatcttggaagtgccctggcacaccctgttggagccagaagtgcgctacatacctgcggcagatcctttctggcctcaagtacttgaaccagcgcggcatcttgccaccgggacctcaagttgggaaaatttttttcatcacttgagaacatggaactgacaggtgggggattatgggctggcagaccggttggaggcctccgggagcagcaggaagaagaccatcttgtgggcaccccaaatatgtggctccagaagtgctgctgagaccagggccccggcctgaggcggtgtatggtcactgggctttgtctgtcaaggctgctctggggagcctcctttgagaggtgactgaaggagtacgtgcgtcagcagtcaacg

SEQ ID NO: 659910 - DNA, 407 bp, Homo sapiens
  misc_feature (8)..(8): n is a, c, g, or t
  misc_feature (167)..(167): n is a, c, g, or t
  misc_feature (309)..(309): n is a, c, g, or t
aatacccngacaaaattatcattcatctgtagtgatgcaagaaaaatttaaataatatacatttttaaaaacctaaatctatccaatttatgagtccatgccttattttgagatcacatccttcctacatttggctattaaagatcctctctttataaaatgatgangacagcagagagtaatgttcttaactggaaaaattaaaacttgacacactgttggtctccccatcactttcgcccaggctggagtgcagtggcgtgatggtggctcactgcaagctccgcctcccgggttcacgccattctnctggcctcggcctcccaagtaggctggggactacaggcgcccgttcaccacacccgggctaatttttgtcattttttagtaggagacgggggtttcca

SEQ ID NO: 659911 - DNA, 299 bp, Homo sapiens
gcttaggaaaaaacctggtagagagagttatactatgtgaacacccactagtaggcctgaataagcagctaccaacttcagaaagcgttcaagctcagacacccactacctaaaaaattccaaacatataactgaactcctcacaccctattggaccattctatcaccctatagaacaactagtgttagtctaatgtaccatgagaacattcttcgccgcataagtctgcgttaggatgataacactgaactgacaattaacagccctatatctactatcaagcaacaagtcattatta

SEQ ID NO: 659912 - DNA, 529 bp, Homo sapiens
  misc_feature (262)..(263): n is a, c, g, or t
gcagtgctcatcagagggctatccacgtagcatgctctgtcacctcctttaagtctttgctcatgttatcatatcggtaaagtgtcttgacaaccctgtttaaatctgtagcatccccaataccagcattccttatccattatttctgaaagcaggaattttttaatgctttttatttaatgcggaatccccgtgcctagaacagtctaggacactgcatgccctcagtaaatattggttgaattaataaaaatagctaganngccactgggctttgtgatgtgtgcgttacgcgcattatctcactggatgcgcacagccatcctgggaggcagcaccgtggcctttcctatttcatagatggggaactgaggctcacagagggagcagcctgtggagacccaggtctctggctccggggcctgccgctaagggctgacctatccccctctccccgcaggtcccgggcgaggcgcccgcgccgtccgccgacccggcgcgtccccacgcgtgccccgagtgcggccgc

SEQ ID NO: 659913 - DNA, 185 bp, Homo sapiens
cttgcctgcacgctggctaaaacggcttttgatgaggccattcctgaacttgatacactgaatgaagactcatacaaagacagccaccctcatcatgcagttgcttagagcaacctaacactttgggcatcagccagtcaggggaaggatgttatgcggccaaagggccttaaacttaatccttc

SEQ ID NO: 659914 - DNA, 122 bp, Homo sapiens
gggcaggtccaaaaaaacctttaatacttttatagtgataggcaactaatgctttctggccagatgcctttggagcaggtgctttctgggctggagctttttgacccttctgtcgtcttctc

SEQ ID NO: 659915 - DNA, 258 bp, Homo sapiens
agctgcgctgaactctacgctctacgctcgatgttgaagaaggcgtcgaacaagacgctggccagcttgcagcgcttcaggacctgcagtgcgatcttcccttcagccctcggcttgaccaggtccagcatctggcagaggcagacctggtagggcagggccttgatggccatgctgtccagcctttggcactgctactcgtagaagtactcgagctcgaacatggacagggcgccgtccccgtcgaggtcaacgcag

SEQ ID NO: 659916 - DNA, 171 bp, Homo sapiens
aaagtcaatcgcgccagacggggcgttgtcgatctgcaggacaatcctggagtctcaatggtggcccaagaatttggtccgcaggtcctggatggtcgtgtagtaagtggctgtagtcgcgggaggggccaggccccttcttctggtaccagtcgcggatcttcacctcta

SEQ ID NO: 659917 - DNA, 958 bp, Homo sapiens
  misc_feature (22)..(23): n is a, c, g, or t
  misc_feature (26)..(28): n is a, c, g, or t
  misc_feature (31)..(31): n is a, c, g, or t
  misc_feature (787)..(788): n is a, c, g, or t
  misc_feature (791)..(791): n is a, c, g, or t
  misc_feature (809)..(810): n is a, c, g, or t
atccgaggccctcactaaaccnnccnnncgntagaaccaggaaggcgctgagcttaaactgaagcaagttcggtggacgccggcggcgccctgatctaaagaaacgactcagggactgcggcgcttgcacgtcaacgggaggtgtgagcccaaagaaatgggacgtcggtcatcagatactgaagaagaaagcagaagcaagagaaaaaagaaacaccgtagacggtcctcctcgagcagttcttcagatagtagaacatacagccgaaagaaaggaggaaggaaatcaagatcaaagtcaagatcttggtccagagatcttcagcctcgttcacattcttatgatagaagacgcaggcatcgatcaagcagtagctcttcttatggctccagaaggaaacgaagtcgaagtcgttcaaggggtcgagggaaatcctatagagttcagaggtctaggtcaaaaagcagaacaagaaggtccaggtcaagacctcgtctccgttctcatagtcgtagcagtgaaaggtccagtcacagaagaacgcgtagtcggtctcgggatagagaacgacgtaagggcaggagaataacgagaacacgagaccaggagaaggatacagggaaggacacggaattacataacatcaaacgtggggaatctgggaaacatcaaagctggattagaacatcttgccaccagttgaacaggccaaagccagactacagctggttcttgaagctgctgcaaaagctgatgaagcattgaaagcaagaaagaaatggggannaangcaagagaagaacggggnnagaccaggccacccggttgcacacggttcacagagttcacacaattggagcttgaacgtgaatccttggtcagagacattcgattcagtagaagtcccagtcgggactttgcggtaacacgcacttccttgggcgcttcgtgtgttac

SEQ ID NO: 659918 - DNA, 111 bp, Homo sapiens
gcggagttgggctgggtagagagtagggggcgttagtcggggctacgtggagaaggagcaggcggcgattcacttattaaattggcgccgaagcaggacccgaagcttaaa

SEQ ID NO: 659919 - DNA, 971 bp, Homo sapiens
  misc_feature (800)..(801): n is a, c, g, or t
  misc_feature (804)..(804): n is a, c, g, or t
  misc_feature (822)..(823): n is a, c, g, or t
ccggacagggcttgctgtgagaagtgtggctatgcaaatacatactcacaaaagaatatttacatatgatgttatatttaagtgtgtaaacaaatatacctctaagtgtggcttaggggacattttcaagtactctgaatattaatgcagactttctggaagttaaagaaatgggacgtcggtcatcagatactgaagaagaaagcagaagcaagagaaaaaagaaacaccgtagacggtcctcctcgagcagttcttcagatagtagaacatacagccgaaagaaaggaggaaggaaatcaagatcaaagtcaagatcttggtccagagatcttcagcctcgttcacattcttatgatagaagacgcaggcatcgatcaagcagtagctcttcttatggctccagaaggaaacgaagtcgaagtcgttcaaggggtcgagggaaatcctatagagttcagaggtctaggtcaaaaagcagaacaagaaggtccaggtcaagacctcgtctccgttctcatagtcgtagcagtgaaaggtccagtcacagaagaacgcgtagtcggtctcgggatagagaacgacgtaagggcaggagaataacgagaacacgagaccaggagaaggatacagggaaggacacggaattacataacatcaaacgtggggaatctgggaaacatcaaagctggattagaacatcttgccaccagttgaacaggccaaagccagactacagctggttcttgaagctgctgcaaaagctgatgaagcattgaaagcaagaaagaaatggggannaangcaagagaagaacggggnnagaccaggccacccggttgcacacggttcacagagttcacacaattggagcttgaacgtgaatccttggtcagagacattcgattcagtagaagtcccagtcgggactttgcggtaacacgcacttccttgggcgcttcgtgtgttac

SEQ ID NO: 659920 - DNA, 244 bp, Homo sapiens
caaaaaaaaaaaccccccccataaaaaccctgggccccctggtccattgggggaatttaaaggttttcctttttccctgggaaaccccgggccctttttttacctttttggggggggggggttccaggaggggcccctgttttttaagagggggtaatttcctttaaaccaaaaaaaaaccctaataggtttcccctccaagccaggggtttgggggtttaaaaaaactttttgtttaaattga

SEQ ID NO: 659921 - DNA, 981 bp, Homo sapiens
  misc_feature (22)..(23): n is a, c, g, or t
  misc_feature (26)..(28): n is a, c, g, or t
  misc_feature (31)..(31): n is a, c, g, or t
  misc_feature (810)..(811): n is a, c, g, or t
  misc_feature (814)..(814): n is a, c, g, or t
  misc_feature (832)..(833): n is a, c, g, or t
atccgaggccctcactaaaccnnccnnncgntagaaccaggaaggcgctgagcttaaactgaagcaagttcggtggacgccggcggcgccctgatctaaagaaacgactcagggactgcggcgcttgcacgtcaacgggaggtgtgagcccaaagaggggtactgggaacccccaaagaaatgggacgtcggtcatcagatactgaagaagaaagcagaagcaagagaaaaaagaaacaccgtagacggtcctcctcgagcagttcttcagatagtagaacatacagccgaaagaaaggaggaaggaaatcaagatcaaagtcaagatcttggtccagagatcttcagcctcgttcacattcttatgatagaagacgcaggcatcgatcaagcagtagctcttcttatggctccagaaggaaacgaagtcgaagtcgttcaaggggtcgagggaaatcctatagagttcagaggtctaggtcaaaaagcagaacaagaaggtccaggtcaagacctcgtctccgttctcatagtcgtagcagtgaaaggtccagtcacagaagaacgcgtagtcggtctcgggatagagaacgacgtaagggcaggagaataacgagaacacgagaccaggagaaggatacagggaaggacacggaattacataacatcaaacgtggggaatctgggaaacatcaaagctggattagaacatcttgccaccagttgaacaggccaaagccagactacagctggttcttgaagctgctgcaaaagctgatgaagcattgaaagcaagaaagaaatggggannaangcaagagaagaacggggnnagaccaggccacccggttgcacacggttcacagagttcacacaattggagcttgaacgtgaatccttggtcagagacattcgattcagtagaagtcccagtcgggactttgcggtaacacgcacttccttgggcgcttcgtgtgttac

SEQ ID NO: 659922 - DNA, 590 bp, Homo sapiens
  misc_feature (22)..(23): n is a, c, g, or t
  misc_feature (26)..(28): n is a, c, g, or t
  misc_feature (31)..(31): n is a, c, g, or t
atccgaggccctcactaaaccnnccnnncgntagaaccaggaaggcgctgagcttaaactgaagcaagttcggtggacgccggcggcgccctgatctaaagaaacgactcagggactgcggcgcttgcacgtcaacgggaggtgtgagcccaaagaaatgggacgtcggtcatcagatactgaagaagaaagcagaagcaagagaaaaaagaaaagccacacctctatttgatagccgccttcttcaccacagcccagaggtggaagccaccccgtgtcccccatggatgaatggataagccaaacgtgtcatgtacataccgtggcatgttactcagccttaaaaaagaagaaaactctggggtgggcaccgtggctcatgtctgtaatctcagcactttgggaggcccaggcgggtggatcacctgaggtcaggagctcgagacccgtctggcccacctggccaaaccccatctctaataaaaataccaaaattagactctacctccaaaaaaaaaagaagtataaagcgttgaggaagtataaagcgttgagaaagtaaagccgttgaggaatgtataaagcgttga

SEQ ID NO: 659923 - DNA, 658 bp, Homo sapiens
gagagagtgaaaagaccgcttacccaatttgaaattggtgagatgttccttgggctggttggtctgaggacctgaggtcataggtggatctcttcacggagtgaagaacaggtggagaggtatgaagaacgaggaacactgcccggggagtttcttcctctgcaaaataagggagtgtgtactgaattaccgtttccagctccaacatccaggatttcagcactacctgcagagtagtgggaggagagatagaggaagaagtgaagataagaaaccactcgaagccggtgtctggtgctgggaccgtggtggctgggacggcagcagtcgtgctgtccatctgctcttccgaggggtggcacatcctagcctctatcttttccccagagaagatccccctcgtctgctcttcccccgtctcagccttttagtgtgtgaacagttctggtgttactcagcaacgcttttgttagcgcctttaccagcaagtacttgttaaacacttaaatcttacaagtggaaagaaaattccgtggtaaatttaagtacaaaagtcaaccaaaattctgagtctcggacaagactggttaaaaatcgttctacaatgaaactaataaattaaatcatataaaactttaaaaaaaaagaataaaaaaaa

SEQ ID NO: 659924 - DNA, 931 bp, Homo sapiens
atacgtatgaacccggagacgcgttgatcgggcgatggcctggccgcatccagctttatttctattcttattttcaaggtagtattaagtgtccatatttctcaagccacattcaaggaaatcatgtcttaactattttggatgttgcctctccttcatcttgtacatgaaactccagcagatttaatattggcatccatcatctagtcaaacctctcacatgttcttcaaatcaatcaaatttgggattctcaacattttctgtgtgaataaaaggtgtggaattagtagattcgatgaagacctgtttttgcttgccacattggacttccacactccatttggattgtgtttagaagatggggaaatttataacactcgtcttgggctgagtctctgacgactggatatgcatatgggagagttaaacctccgcgagactggctgttaactgcagggcacccccacccgggtgggtgggtgcctcgagtcagattagagggacgacgcaaaggcataaagaccgcagggaagagcttcctggaaattccaaggtagttgtccaggtctagtaagggatccctatcgttaggaatagtaatacgtcgatgggggggtggatggcggatcgttagtagcatgaggatgcagttatggtctacgttgaatacagcgcgctatgcgggcagacaacctgagcactagggggatgctgtagtcggtatgcaggtggtaacccaaagacgtcgggatggtgataccaaccgcccggacaggcggtcggaggctggggtggtgggcgacggggatccggaagatcttagcgcttcgtatacgctgtatgttcgatttggttcatcctgacggaggggcaagggcgtgtcggtggttatacaccccggcgctgcccggtagagtggagggaagcgcg

SEQ ID NO: 659925 - DNA, 464 bp, Homo sapiens
gcagttggctggcgttgctgttggcaggtggcatacacaagattgggctgccagaatgaggaagaagtgaagataagaaaccactcgaagccggtgtctggtgctgggaccgtggtggctgggacggcagcagtcgtgctgtccatctgctcttccgaggggtggcacatcctagcctctatcttttccccagagaagatccccctcgtctgctcttcccccgtctcagccttttagtgtgtgaacagttctggtgttactcagcaacgcttttgttagcgcctttaccagcaagtacttgttaaacacttaaatcttacaagtggaaagaaaattccgtggtaaatttaagtacaaaagtcaaccaaaattctgagtctcggacaagactggttaaaaatcgttctacaatgaaactaataaattaaatcatataaaactttaaaaaaaaagaataaaaaaaa

SEQ ID NO: 659926 - DNA, 964 bp, Homo sapiens
tcttaccagatcctagctgctggtcatcacctatactactaacagaccgcaaccatcaacaccaccttcttcgacccgaacggaggaggagaccccattctataccaccaactattctgatttttatcggatcacccatgaagttcatatgcttatcctaccaggtcttcggaatactctcccatattgtaaacttactactccggaagaataagaaccatgtggataccatagtgtagtggtctgaggcatatgatctcacagtggcttcctagaggtattatcgtgtgagcacccaccactactatttcacagataggaatagacgtaaaaaaaacgagacaatattgtccacctcacgataccatcaatcatcgctatgcccaccgaggtcaaggtattaaaggatgacctcgccacacatacccacggtaagcgatataacaatgatcttgctgacaccagaatctgagaccaataaggattcaatccttcacttagtcaccgtagtgtgtgacctgactggcgattgtatttagcaaagtcatcactaagacatccgttacataacacgacatgtacatacgttgaggcccacattgcagtgatgtcctaatcaagtaggagctgtaataggccatagtctaggaaggctaattcatgatttcgcctaatgcacagggatacagccgtagaaccaagctcggcaagacacatgtcactgatcaacgtcaatcgaggaaaatctaagatcatacgaacaacagcggcaaacggagccggaggtagtgaggaccgaagcaacaccaataacacacaacgcggcccataacgaacgagaacaaaaggcgaggaacaaggaggaagcaagaaccccaaggagaatgagcacacaaggagcgaaacgaaagaagcaagaaacgcggaaaaaaggcagacgggaatcacagcgccagctaagaaa

SEQ ID NO: 659927 - DNA, 1026 bp, Homo sapiens
  misc_feature (45)..(45): n is a, c, g, or t
  misc_feature (77)..(77): n is a, c, g, or t
  misc_feature (304)..(304): n is a, c, g, or t
  misc_feature (321)..(321): n is a, c, g, or t
  misc_feature (324)..(325): n is a, c, g, or t
  misc_feature (328)..(328): n is a, c, g, or t
  misc_feature (331)..(331): n is a, c, g, or t
  misc_feature (333)..(333): n is a, c, g, or t
  misc_feature (343)..(343): n is a, c, g, or t
  misc_feature (350)..(351): n is a, c, g, or t
  misc_feature (354)..(354): n is a, c, g, or t
  misc_feature (358)..(359): n is a, c, g, or t
  misc_feature (368)..(368): n is a, c, g, or t
  misc_feature (373)..(373): n is a, c, g, or t
  misc_feature (377)..(377): n is a, c, g, or t
  misc_feature (379)..(379): n is a, c, g, or t
  misc_feature (382)..(382): n is a, c, g, or t
  misc_feature (387)..(388): n is a, c, g, or t
  misc_feature (393)..(393): n is a, c, g, or t
  misc_feature (406)..(406): n is a, c, g, or t
  misc_feature (411)..(411): n is a, c, g, or t
  misc_feature (436)..(436): n is a, c, g, or t
  misc_feature (460)..(460): n is a, c, g, or t
  misc_feature (475)..(479): n is a, c, g, or t
  misc_feature (518)..(518): n is a, c, g, or t
  misc_feature (529)..(529): n is a, c, g, or t
  misc_feature (537)..(537): n is a, c, g, or t
  misc_feature (542)..(542): n is a, c, g, or t
  misc_feature (558)..(558): n is a, c, g, or t
  misc_feature (570)..(570): n is a, c, g, or t
  misc_feature (600)..(600): n is a, c, g, or t
  misc_feature (614)..(614): n is a, c, g, or t
  misc_feature (619)..(619): n is a, c, g, or t
  misc_feature (624)..(625): n is a, c, g, or t
  misc_feature (628)..(628): n is a, c, g, or t
  misc_feature (631)..(631): n is a, c, g, or t
  misc_feature (635)..(635): n is a, c, g, or t
  misc_feature (649)..(649): n is a, c, g, or t
  misc_feature (681)..(681): n is a, c, g, or t
  misc_feature (686)..(686): n is a, c, g, or t
  misc_feature (717)..(717): n is a, c, g, or t
  misc_feature (729)..(729): n is a, c, g, or t
  misc_feature (741)..(741): n is a, c, g, or t
  misc_feature (955)..(955): n is a, c, g, or t
  misc_feature (996)..(996): n is a, c, g, or t
cttaattttattttctttaattttataaaatacactttgtaaganaagtttctaaaagtttatcctttatgtgtgtnaaaattgcaattctatatcagaaatgaaggaaacactttcagttgattaactctctttgtgtgtgtatatatgtgtatgtatgcatgtgaggttttcagggaagggttggttatttgttatgttattaaatcaaaacaaaacacaaggtacggattacttcactgtcctttatcttgattggtttcttacaaaacattttccctctcctccttctatgcagcctggnagcttatcttgtatacnggnntgngancnagtatcaagngtctttnngtnaagnncttacatcnccttnaatntngcnggggnngcttnggggggggggggnagggnagctctttacaacaaaagagctgtngtacaaatctttccttcaattaanaccaatcagactttnnnnntttttaacccaaagttaacaaaaacaggaaaaggctganatcggggggcnattcaggnctcanactctttctgcctgtnctttttcctggnagcttaccaactgaatagctgatgactggngcattctgttatgngatcnatatnnggnganaatnacctttatgttaancctaactcttaacacaccaagataacattgcnaagtnaaatcattttccattagctagagagagcgancagattactcanattgagattcanattcaccaaatctgtttctgcaaaggcagaatacttgtagaaaatcccaatagattcaactagccaatttttaatatcatttgtgatgcttaatgtccaattttcctagtttaaaaaacagtcataatcaaagaattattctccagacatttctgatgcaaccccaaataagtaataaacaaactggaatacatgaaatgtgcatcattctaanacaaatcaagaccttcaaatcacctacgatgactgaatggntaatacccatgaaatgagcaccattgtgag

SEQ ID NO: 659928 - DNA, 906 bp, Homo sapiens
attacttattcggggttgcatcagaaatgtctggagaataattcttcgattatgactgttttttaaactaggaaaatcggacattaagcatcacaaatgatattacaaatgggctagcttgactctatcgggatcttctacaagtattctggccattggaccgaccacagcactcggagcacatctggacattctcaagtctggagcttaatctggaatcgactcccctccctaggcttacctgggaaccacctgacctttcccaccttttagcccccgtggggtacatctcggcgctggctggtttcaacacaccttccaggcgcctcccaaccacttccacacggcgttccctgtctccctcccctccgcccacctccgcatcccacccgttcacccacgccagtcggcaaccacagtccccttcaacaccatctccccacccggtcggcggcaacagccctcccccacggggcccacaacccggcgcgcaagggcgccaacacacaacccaactcaggagcaaaccccctgggacaccaaggcctctccccaagaaatagcccaccagccccaacccccccccggcggcaacagggggaaaaaacacacaaagagaaggcatcaaccgcacaacaccaaccacagcagcacagcccgcagcaaacgggacaaggagaaagacagagatgacaacgctggacaaaaaacaacaaccagagcgctacacaccacgagacagaacgacggggagaggcagaccaaaagagcaatggagggtggaggggagcagccccacgcccccccgcacaaacaagggtgggttcagcgccaaaaaccataaacgccggagcggctgcacatcgagtctacgagagcggccgacaccacacaccaggcagcacg

SEQ ID NO: 659929 - DNA, 1102 bp, Homo sapiens
gagagagtgaaaagaccgcttacccaatttgaaattggtgagatgttccttgggctggttggtctgaggacctgaggtcataggtggatctcttcacggagtgaagaacaggtggagaggtatgaagaacgaggaacactgcccggggagtttcttcctctgcaaaataagggagtgtgtactgaattaccgtttccagctccaacatccaggatttcagcactacctgcagagtagtgggaggagagatagaggaagaagtgaagataagaaaccactcgaagccggtgtctggtgctgggaccgtggtggctgggacggcagcagtcgtgctgtccatctgctcttccgaggggtggcacatcctagcctctatcttttccccagagaagatccccctcgtctgctcttcccccgtctcagccttttagtgtgtgaacagttctggtgttactcagcaacgcttttgttagcgcctttaccagcaagtacttgttaaacacctcaactctaccaggggaactcaccaatcacggataacctaatctaccaacccccacccccttctagctcctcgcacaatgatgacagatcctcgtctctctacgaactactaaatttacttaaatccgacccccccctcacaccacccatctatcactcatgctcattaaataaactcccctacccatcgctatactaagaacccacccctctacccagtcactctctcacccctagtactccaaatcactccaccgcatccggacacaaaagccgccccacgttcagcggtctaccatacacctgctacctatcaccgcccactatacccccccacacaccatctgcgtcatcaccccatatgcctctcggaccgcctataaccatccccacctacacccatatcccctaaactcccacccacaccatacccacatattccccaaccccacaccccagcccaacaaaaattaccacccaccccctaatcattaatcctactatcacagaacaaatctgtaaataaaccagccttcatcaaaccccgagaaatccatagtccccgcataatttctcacccctcaaaccccaccacaag

SEQ ID NO: 659930 - DNA, 472 bp, Homo sapiens
  misc_feature (42)..(42): n is a, c, g, or t
  misc_feature (48)..(48): n is a, c, g, or t
  misc_feature (90)..(90): n is a, c, g, or t
  misc_feature (158)..(158): n is a, c, g, or t
  misc_feature (199)..(199): n is a, c, g, or t
ccccactttaaagtctgtgaagtaaaaaatctgatcaccctnaagganggtgaaaacccgaagttccttcctggaagaaacataattggnaaaataaataaagttaatgtgccctgaatcaagttgtttcggttaactctgtctttttccgttgttgntgttgaagatggagtttcgttcttgttccccaagctggaangcaatggcaccatctcggtcaccgcaacctccgcctcctgggttcaagtgattctcctgcctcagcctcccaagtagctgggattacaggcacatgccaccacgcctggctagttttttgtatttttagtagaaaccggggtttcaccatgttagccaggctggtctcgaactcctgacttcaggtgatcttcccgtctcggcctcccaaattgctgggattacaggtgtgagccaccgtgcctggcctattttgtcttttaaaagctattta

SEQ ID NO: 659931 - DNA, 438 bp, Homo sapiens
  misc_feature (210)..(210): n is a, c, g, or t
ctgtgtgacttgggcagcagcttgcagtctctgagctcttagatccctgatggacgaaggagaaaatgacccccttcccaggctgtggtgaagaagagggaattggatcttggatattaaaatgctgccctggcacagaggtaggagctgagcaacactgctggatgaacaaacacatgtaatgcagggtgaacagaacatttcatctgncacagctgaaggcacagcttacctatgcccatggaaagaactgcgtggaaaattcatttgttgcatttttggcaggttgatgtttgcaaagcagggcactcttctccacattttccccaaaaccaatcagagggagactccacatttgtttcatctcctcccctcaaacaattatcaaaggcctgttgaacaaacgggtgtctgccaactgggaaaggcaaagagcca

SEQ ID NO: 659932 - DNA, 999 bp, Homo sapiens
  misc_feature (505)..(506): n is a, c, g, or t
cttaaggtggttctcccctcaccccattgaacctggtgacttacactctgcccctggtcacctgaaggcacccagcctggccgtggaagggggaacaagatgactgccttggctctggctctccaaggatcagagaacacagagaaacctagagaggccacccacatggagaaggaggaggaagggagatacaaatcccccgtttcccacccaaaagcacagggagggaaggcagggtttgggaaccaaggctgggccacattaggtatttaaagtccaggctgaccagctcttcatccctaggaggcttcactttgagggttggggaaaggacttgggatctgaatgaaccccatctttctacacacaaaaagatacagcaggcacaactctcactttaacacagctccccatgggccaagcaggcagcccaatcagcccagggcaagtgccacatggctcgtggagggtgggtaggagggactgtcacgggacgggaggaagnngaggagtaggcaggatggcacacattttaatgggaaatcagctgtccagggattcagcttctggagccgccagccattgctcacttcctccttctcagtctctgccatgtggttgtgcttgctgggctttccttgtcctactaggagacctggtgtggatgttttcactcctacttctaattggctgggaagcagcatttgccacaggcactgtttaatttcgtttccatcccctgcatctcacaggaaagcaaatggtcaatagttcagattaaaagaatcatcctggtcagctccaaaatatggctacttgcatggtaatcacagcaaagtctgtcaaatcagtgattctttattcctaagaggaagggatttttcctaagcattatggttctaccaaccaagggagcaggcctactcttcaaaagtggctgcaaaggctggcaaaccgagaggcctgctttgggctcagaaactcctgttggtcctgcca

SEQ ID NO: 659933 - DNA, 931 bp, Homo sapiens
  misc_feature (372)..(372): n is a, c, g, or t
taagatcaaattatattttattctattaaaaaaggttttggaaaaaagatacttaaattttaaaagataactataattcctaagtgattaaaaataactccaagcagagagtgaaagagcaaagtgcaaagtgcattaaaaagaccccagagcatggttagcaaaaaggcaaatataatagttaggccaaggcattatatattattcaataaaaggcaaataaagaagggcattaaaggcaaggttgggggaagacgcttattttaaaactggtaaaaattcattgtgaattttataaagagacatttcaaaaccaatatctgtgggtttctaattaaacaaaaaaaaacattttattctggaaagaacggnggtctctgggttgcgtggtccaccccaaagcttgtggagtgcgagggggtggtgaacactgtgggtctccatgtgggcaagccttgggaaaccctcgtgggggttctcaaggcaaatcccctcaccaaactttcaaaccttccccaaaaggtgcgggggacatcttataagaacatttggagcccaaccaatacagttgggtcttacacatttatcctaaatttcgtttaaaaatggtgggctagcgtggtgcgaaatttaaagcttttgtggaaaagagaatatacaagggtaaaaatagaaaattattaaacggtgtgggctttaatagttgggaatagcataaccaaattgtagaaatttataaagccccatctaatattacataagcagaggacttgggaacaatgatcagggaaatacaatggccaccaggcaacaacacattcccaaaggccataagccttagacaaaagggaaacccgggacaccggcggaaaaaatccccaatttaaaccgtcaaattcctccacacacggcgcaaaccacctaacaacgc

SEQ ID NO: 659934 - DNA, 447 bp, Homo sapiens
gggcggggactctctcttcctgacaccactgcaatgtgtccacttctatcgtctgccagcaccttaactcagatcggtagcatctgctgcctgtcctgtgcatctcatggcattattcctgctgtcctgcagaccagtgcggttttgctagcttaggaacatgactgtgtcacccctacagttccgacaacccttcatttcaagcccatctgccttgctgtggttactcaggctctttggactgggcctggcttcctgcctctcttctcctcccctcttgccccagtgtactcctcagcttggccaccctgagctgctttccacttttcacacaaaccaaatcatctttttcctctgcgctgactgctccttcttcctcggtgcctgactagccctcacgcatccttccgtgactcagcttacactcttttctttcagaaacctctg

SEQ ID NO: 659935 - DNA, 119 bp, Homo sapiens
cgtgatgttattgcccaacacagcttctttcacttagtgaacactagtcagcacttcatcactacacttaggtgcttttaatagtgaaatcaccaacaacaaaaaaaatacaaaaatgc

SEQ ID NO: 659936 - DNA, 288 bp, Homo sapiens
  misc_feature (6)..(6): n is a, c, g, or t
  misc_feature (10)..(10): n is a, c, g, or t
  misc_feature (212)..(212): n is a, c, g, or t
ctcgtncgtnttttttctaaaaagaaaaacaaaaacaacaacaaaaaaaaaaatcacaccaattctgtgagcaatggtgtgatttttgggacctcccatctttctgttttgaaaagtgtacagtagtgcagtgttcctgatgtaactttatggcttacaatgttgacatgtctcaggttcatgtgtttcgattggtgttttccgtctcaggncagattgcaaagtgtaggccccacacattggaaaaaataataataaaacaaagcaaaaacaggaaattatggattt

SEQ ID NO: 659937 - DNA, 110 bp, Homo sapiens
ctctctaggatccccttattaaagttgattaagcctattagtgaaagattgcaggccaggcacaatggcttgctcctgtaatgccaattctctgggaggtcaaggcagga

SEQ ID NO: 659938 - DNA, 207 bp, Homo sapiens
  misc_feature (101)..(101): n is a, c, g, or t
  misc_feature (193)..(193): n is a, c, g, or t
gttgatggacaattacataactattgttgacgtgatggcacgccgctatgtcctgaaaggagaatacggaacgaatcctgaagacatctaccccgaggaanccctactgatgatgacgtgagcagcggctcctccagtgaagaggagcagcactttcaggcggttacagtcttttacagccgttttctactgngtcctgatctcgtg

SEQ ID NO: 659939 - DNA, 522 bp, Homo sapiens
ggacaactatcttggccaagaatggataagggtggtccttccctactcaggctactagctcaaagtgctaatctcttcggaaacaccctcactgacacagtcagaaataatatcttagcaagatctgggtatcctgtggcccagtcatgcttacaacataaaatgtaagccatcagagatcctcaaacagcactatctgggtatatccttagaagagagaaaccaagggttcagacgagttacctacgtgtcacaaaagtaagtaaggcaggtaaagcgaaaaatcagtctcgtgtctatctaactcacgagatctaagagcataatgccaagctaagattctgtggaggagataatagtacaaggttaggcccttgctccaagaaagttcctgcagacggagatcagatatatacacatcaaagaatacaaaacctgtattattctatattgactacaacttataaacgaagaagcctagaggaaagacagattcagaattaaacagattccttcattcag

SEQ ID NO: 659940 - DNA, 213 bp, Homo sapiens
  misc_feature (110)..(110): n is a, c, g, or t
  misc_feature (144)..(144): n is a, c, g, or t
atcggcggcgctccaaagtgtggatacaggtgtgagcacatgctaaatactcattttttctaatatttcttattttcttctgagacagtgtttgtcttgtcgccaggtgnagtgagtgcacaatctcagctcactaaacctttngctccatggttcaagcaattctccatgtgcacaggctactctaccttttctaccacccggcagtatctg

SEQ ID NO: 659941 - DNA, 144 bp, Homo sapiens
gtcatgcagcgaccggaacgtgacctgtccggtgcgctgccggaactggctggcggctgattgccggtttctgccactttcgccgatctatcgcctgaagaactcgacctgaatcgccgacgtcctggtcagcgccggcggtgg

SEQ ID NO: 659942 - DNA, 1168 bp, Homo sapiens
gtatctcatgctgataccaagttcagtgatcgatggctttcttgttgcgcctctgtgcccacatgtgtatctggagagatgaatctcaggtctcatatcacaaatgtcctacctgaaatcctcttcgagacttgagattgcaatgatctgtgagtctgcatgaatatagcgagtgcagcaagttcgaaagagcatcacacgggattccgttaggctaggagagaccggataagtcgagaattgaacgagttgtctgactagagacgcttgtgtaagtctctcatagcgttttccgagagattctataacagcgacatttgggatagacttgtcgattgtgaggaggatcgataggacttgccaccacatggctaaggtccaggaaagggtaggctcgtcatccagatattcacgtgcgcacggtcttgtgtgtatattccctgtggcgtctaggaattctagcgattgctgatacatcgcatgagtgtgcttccactgagctgccttgggcgacaggtcatccatgtggtctcgtttggtgcatcatcgtctccgagtgcagggacctcggtttaggaacctcgtcggcgtccacgaagtgcgtctatcacaggaactcgacgtggaccctccgtacagtgtgcgtttgagcgagactttgctgcgacgatgttcgtccgacactcgaagaagcagatctccgatgaaggtagggtgcacaccgtcgaatgcgtgttgtaccgtgtggcggtgcccgtggtggtgcctgggcatagacccttcggtctgtcgtcgcgtcgccttggttcgtagtagccgagcgaaccgtattgcgttcgcgtagctcgtgatctggcatacaccgactggcgcattgattgtcattatgtcagctggtatgaccgagtctctctagatagaccagcgcgttccgtgacgcttcgcttcaacaacattgagtagcggccgtatggacaccgcacttggcttgcccgccaaagcgcatggcgttgacgggtggcttggacctctctgcccgagtcttttgactctggacctaacaggggactgggctggcatggcttcctgggctggactccccttcgtgtggccacaacacggccgcgccggtcctccctcgtcttgggcttcatcccttgttgccagg

SEQ ID NO: 659943 - DNA, 231 bp, Homo sapiens
atatcagtacattaaaagttatactgtctgtatcatattggaagtgaattctttcttatgtgccgctggtgaaagacatctgcgcagttcacgttcctgtagtataggcatatcttggtctgtttctagaccactgcgatacaatgagtcacacaaattggttacccagtgcttataaaagttaggtttacactatcgtaagtgtgcattaacatgtctaaagtgcaatca

SEQ ID NO: 659944 - DNA, 176 bp, Homo sapiens
tacctgatcgtctaaagtcacaggctccagcttaacgatatttggaggtcagcacggtgctcacgtgtcgacggaactatgtacagggaggcatagcacctgcagtggtagaatacacgtctgaccatggctccatctttaacgatatatatggaggtcatgcacgtgttgctcac

SEQ ID NO: 659945 - DNA, 460 bp, Homo sapiens
gaagcagacagaaagttcggagttgaatcaaccttccactgaaagacttcctgagatcattctaatccccttcttcaggtttaatctccagttaaaactcacagaaggaacttcatgaagatgtttacagacttaagtgtttgattagggaaagagggaaaggaggaagaataatttaccattcttaatacaacggaatgatagtagatacaatttgctgtagaccagaaaacagtgtgaaagtaacaaactgtcagaaccatataaggggttgttagactttttcgttattctgttccccttggcaacaaggtcagagctatgacaaaacaatagattgggtgcctactatatacaatacctaggaacacccagttcttatccacatgcagcccacagcctgttgcggaagcacaagaaatgctataatgcagaataaagtgtagatcccaacaaaaaa

SEQ ID NO: 659946 - DNA, 521 bp, Homo sapiens
cagctcggtacccccactttatacctgtgtgagtgaatgaagaggggaaaggaagtggtcctgccacacacggaccatgcagtgcgaggaaacccacaggacgggggcgcagccttcaaggatagcccaatcaataagaacggggatgtgtgtttgggccgaatggggcgagtaccagagagggctgctccaagcttgggggctccgtgatgtgtgagcttggatgttggactggagcggaggccccgtcagtatttctcatcttctgggggtgggcgtgggctgaacaggaaaagtattttgagcgttccctgtagccggcgatgttcaccagcccactggactctcttagcccactcgctggcatgcatccgtcatccctcacctttgggtcccagtagtctggaggatccagacagtccctccatctctgctctctctccgtcgccccacatttgagcctgagagattccctggtttcttcggtcaccgcacatctatccctgagagatcccctgctc

SEQ ID NO: 659947 - DNA, 210 bp, Homo sapiens
gagacagactggccacatggggaaaccccattctacataaaaatacacaaaaattagctggacgtggtggcaggcgctatatgccagataccggcgggctgaggcgggagaatatgcttgaacctaggaggcggaggttgcagtgagctgagatcgcgccattgcactccagcctgggcaacaagagtgaaactctgtctcagaaaaaaa

SEQ ID NO: 659948 - DNA, 173 bp, Homo sapiens
  misc_feature (139)..(139): n is a, c, g, or t
agcagaattcggtacatgactcaggatatgaagttcatcatcaaaaattggtgtctttgcagaagatgtgggttcaaacaaaggtgcaatcacttggactcatggatgggcggtgtagtcatacgcgacagtgatcgtncatcaccattggtgatcgctgaagcaagaaacag

SEQ ID NO: 659949 - DNA, 196 bp, Homo sapiens
ataaaaagatgaaacaaacagttctggcaagctggagagaaaaagaacatgtttacactgttggagggaatgtgaataagttaagccactgtggaaagtagttaaaagatttctcaaagaactgaaaacagaactgccattagacccagcagtcccattaccggatatacacccaaaagaaaaaaaatcattctac

SEQ ID NO: 659950 - DNA, 134 bp, Homo sapiens
ccggtccgccgtaggatccccctactgagtagctctcagatcattgaactagtctgttccattgtatgggatggcggatagtaagtttgtaaattactgtggcccctcataatgatatttgtgcctcacgggag

SEQ ID NO: 659951 - DNA, 170 bp, Homo sapiens
tgagtggccagctgaaagggaagtacatttttatgtaataagtcacagttatttggggtctgtattactaatagttgaaattcatcctatttcattcatctcacagcagaaaactaaattccaggcctagtctaggaaagaaacagcttctaatggattagctttgcaat

SEQ ID NO: 659952 - DNA, 294 bp, Homo sapiens
aggccgaggagggtggatcacctgaggtcacgagttccagaccaggctggccaacatggtgaaaccgtatctctactaaaaatacgggtgtggtggagggcacctgtaatcccagctactagggaggctgaggcagaattgcttggacacaggaggcagaggatgcagtgagccgagatcgcactattgcactccagcctgggcaacaagagcaagactccatctcaaacaacaacaaaaacccaaaaggggacagcagtaaccggagaggccagcatctggacaccccatcag

SEQ ID NO: 659953 - DNA, 102 bp, Homo sapiens
gtagggatgcaggtatagattaccttggagctacataactttagcttttccctaaaaatatatgtcgtatgctagataaaaactattacatttatgggcata

SEQ ID NO: 659954 - DNA, 800 bp, Homo sapiens
gccgggaggcggaggttgcagtgagccgagatcgcaccattgcactccagtctgggcaacagagtgagattccgtctcaaaaaaaaaaagaaaggaaaaaaaaatagcattatacctcttccttgtctcaaccggccatgaaaattctggaacactccaaattcagtgggataatccaaaacaaattttataaggtataaaatatttttacttcttatagtaatagtatactttaaaaagcctcagggtatattatcttctaaacagctacaattcagttgcagcctactttaaccaattatgttctctagttggagaacaattagggcctatttcactggctggtgtagcctcagtggcctaacatggggtgccaaattaaatatcggtagaattacacctggatttgtaaaaaccattcggtttttggtttacaattggccaaaattcctcaaaagcgccggtatttatgtaattctttggaaatcattatttatttggatttctacagtgtatgactggctgggtgtgacttagtcacattaagtactcaagtatttataaaaactccaaataatttgatggattttaacacaaacatccttccctttttctacaaggtcattttttttacaaaatcatgtggggtaatctcctaaataggggaatattttatggggttctaggaaccattgtttcaaatattctgtgggtttattcaggaataaattggttaaatattttccaacaacagattttcataatttccaaagagcattttggacgggggacattggcgg

SEQ ID NO: 659955 - DNA, 169 bp, Homo sapiens
ataaaagggggatcatcgttgagtctagcctggaggactctcagataggtgatgggtgcagtccatatacttgtgggatcgagctggactccatgagaaatctgaaggccagcttggagaacagccctgagggagtgtggagtgcccgctacgccctacagattgagca

SEQ ID NO: 659956 - DNA, 451 bp, Homo sapiens
cgcagcaatataagtcaccatactagaaatagcagacccacttccaaccttcgcacagtccataaacccaggcatacgaaatgattatcaaaagcaattacatacatatctacctacttgtatgtagagaattatttatagtctatctggcgcgttcatgtacaaaattagtctctaaatcatgtacaaaaagctgtaatatcgaaaaagtcaccacatactgtacaagtttacaaggaagagatcccgttattttctctagcatttttggccttgctaggcattgcgtcacattatgagaataattgtgtcaaccttatactcttaaaaaaaaaaggaacaaaataaaacccaacacataaaaatctttccaacttcctctaaatttgctccctatttgaagtcaggaacatcatagctttacttcaatttgaaatacctgtggtaaaaa

SEQ ID NO: 659957 - DNA, 337 bp, Homo sapiens
ggtgaatgggcgtggtgctttactacatgtgtgatcgaacctgctggtctgagcgcgtctattgaattggtaaagtaataccaatggctttatcatttccttcttcccttcaagtttcacttgaatttaaaaatcatggttatttttatcgtttgaggcatcatttctgtcttctgggtccattttttaaatgtttaaaaatatgttgacatggtagttcagttcttaaccaatgacttggggatgatgcaaacaattactgtcgttgggatttaagtgtattagtcacgcatgtatggggaagtagtctcgggtatgctgttgtgtaaacgtgatt

SEQ ID NO: 659958 - DNA, 268 bp, Homo sapiens
  misc_feature (235)..(235): n is a, c, g, or t
aaatgggattccttcgctaggaagagcactcggaataacctgctggaaatgagattccttcgctaggaagagcactcggaataacctgctggaaatgggattccttcgctaggaagagcactcggaataacctgctggaaatgggattccttccctaggaagagcactcggaataacctgctggaaatgagattccttccctaggaagagcactcggaataacctgctggaaatnggattccttcgctaggaagagcacctcagaaca

SEQ ID NO: 659959 - DNA, 203 bp, Homo sapiens
  misc_feature (13)..(13): n is a, c, g, or t
ctaggcgctcagnatgcgtctggcttaccagagggactgcctgaaggaatcacctgagcctgtccgtccctaggagtggggagaaaccccatccagtcctggaggacccgctgctcctgctgctcccggggatggagcaaggccaaggctgcgggaggctgggagccctgccctgaccatccctcccgcaccagcgctgaacc

SEQ ID NO: 659960 - DNA, 505 bp, Homo sapiens
aacacaaatatgcgcaggagcacttcttgggaacacctcgaccactggccccggatacaacggagatcatggagggggcgcagcggatgccccacaatattacctacgaggggatgaccgccctcgccccacttgggcgcatacgcgtgtgaaaacaccgcccacccctggggggccatagcaccccggcagtgcccccacctgtagggacgcggagacactgacaccacgcgacgctttgccaacacaacgcagggaaccaccacggcgtgttgcaccgacgaaaaaagctccgcaaaattgaccctgcccagctctgtggggatgccgcccccagggggcgcaccgcgcacacttaggagaggcgcagagaggggagggaaaccccctcgtagcccgggagaacacaaggggccctctcccaggaagccagtagggactgatggtaagaacacccaagagggggcaaaaaaagaagggaaacccttttcgcccaaaaaaaaca

SEQ ID NO: 659961 - DNA, 183 bp, Homo sapiens
gtccttggtcttctcttctgatccctcttagaactgtctcttagtgctcagttcatgggaatacaggccttttctctcctgtatctccataatctcccagcctctgccagttacctagttccaaacgccacttatataatatcctcagttatctgttatagcaacaatcccacttcgtgagcc

SEQ ID NO: 659962 - DNA, 373 bp, Homo sapiens
  misc_feature (304)..(304): n is a, c, g, or t
gcccgttgtgtgccctgaacaaggcacacagtggtgttgctccagccccctcgccactttcagggccacacctgctccagggcagtgggaggcgcaggtatcagggaaatgtggatgtggaaatggacaggtcaggggttggggcaactatggggctgcccacgctgaccccttaaggctgggccctgtgtccaacacgccagctgaggtggcccacgggggacccagacctggttctgccctcgagggctctgggattggagagggcagctgggcagagagtcccacaagttctcaaaaaacngaagaggcttcccagggcccacgagaagccagcacagtcagggagggcttccaggaggcggtatggcct

SEQ ID NO: 659963 - DNA, 154 bp, Homo sapiens
  misc_feature (119)..(119): n is a, c, g, or t
aattaaaaatattaaacaaaactaccactcctccttattaaagcccataaaaataaaaaacgaaacccgagaaccaaaatgaacgaaaatctttcgcttcattcatcgtccccacaatnccaggcctaccccccatactgatcattcattgttt

SEQ ID NO: 659964 - DNA, 171 bp, Homo sapiens
agcagcctttctataggcaaattcaggtcatttccaggcctgcccagagttattatggggcaaggtgttcgggatagagcgagagggaggcaaattccaactcagacccagggatcatctaggttggtagccaaagccaggttcagtgctatggaaacttctaaaactagg

SEQ ID NO: 659965 - DNA, 200 bp, Homo sapiens
  misc_feature (64)..(64): n is a, c, g, or t
  misc_feature (67)..(67): n is a, c, g, or t
cggcacgaggatgagaatctaatgcctgatgaatctaatgcctcatgatctgaggttgaatagnttngtgccgaaaccatcccccacccccatcccgttaccccgagtccgtgaaaaaattgtcttccatgaaaccggtccctggtaccagaaaggttggggaccactggcttaaaataccaataaatttttggccctta

SEQ ID NO: 659966 - DNA, 114 bp, Homo sapiens
ggaggagggaagcttaactcaagttttggttagtgagttagcaagctctttgttcagtgggaatgtgggaactttttaaaggtaaaattaccctcttccaaattttaaacccag

SEQ ID NO: 659967 - DNA, 448 bp, Homo sapiens
attgggacccccagatcagaccatccaccaataagtggccatcatttgtggtacatgagacagaaaactcacccagatgaactcaacatgaactcatgtcttggggtaatttgttacataatagtagatgacccagaaaattcttcagtcttccccggagcccactgagaacaacgtatcgatggctgaatagaaactgggcttacgaaggctcacatcctgcttaactccatatgttagattcctgcagtattattttagctttcctcaccttttgctggaggaaattgtgtggacgtactgaattctcccagagaattagcttgtttttagaaacatgcttacaattatgagttgtgcaattggctgtgagagtgtccacataaaattattgatttttgagcacgtccatgttttcaactctgggtttagtcatatatatcattca

SEQ ID NO: 659968 - DNA, 154 bp, Homo sapiens
  misc_feature (37)..(38): n is a, c, g, or t
tataatggtccaaggtcaaacttttggagttgcagannagcactcaaaggatattctcacaggagcattgtgggctttcagattagggataagaactgctaagtatacaattgattataggttttggaactgggggccgggcacagtggctcat

SEQ ID NO: 659969 - DNA, 152 bp, Homo sapiens
gagtaagctcgttctgtattttattgatttaatttgtgtatcatcaataacttgtatgttaatgctggaaagaaaaaagaggaagaagaaccatccctgtcctcagtctataatctagtggagagataagaaacgtacaaccaaagctacag

SEQ ID NO: 659970 - DNA, 177 bp, Homo sapiens
tataccgtataattgagttttcagtggggcagtcattatccaggtaatccagatattttaaaatctgtcacgtaggacttggatgtacctgcccccaatccatgaaccaaggccattgaattcttgggtgagggacaacatgacctaaatcttgactcagtcagggaagggatcatt

SEQ ID NO: 659971 - DNA, 129 bp, Homo sapiens
  misc_feature (95)..(95): n is a, c, g, or t
tcagaatctaagctaagattgtgtgaggaaggtaggtttcccacaaggcccacattgtcttatttcacactttcccacagatgctgacttagctntaggatcatcatgcgccgggtgtaccagagctcg

SEQ ID NO: 659972 - DNA, 412 bp, Homo sapiens
tgcatgagtgacatcagttctgatatgacgatgggaacagcccaggagcaatttacatcacaggtacgagaagacacagaagtttcagggatgctatactgagaattgtgggtgaacttgagcagatggtttctgaggacgtcccgctggaccaccgcgttcacgcctgcatcattgtgtgccgcggcgaagccattcgcaaaatcatggacgaattcaaggtggacattcgcttcccacagagcggagccccagaccccaactgcgtcactgtgacggggctcccagagaatgtggaggaagccatcgaccacatcctcaatctggaggaggaatacctagctgacgtggtggacagtgaggcgctgcaggtatacatgaaaaccccagcacacgaagagtgcaaggcacc

SEQ ID NO: 659973 - DNA, 317 bp, Homo sapiens
ccgattctttgcccactttttaacggggttacttgttttttgcttgttgaattaacttcttcacaggttctggatattagacctttgtcagatgcacagtttgtgaatattttcttctactctgtagggtgtctgtttgctctgttgatagtttcttttgctgtgcagaagctctttagtttaattagatctcatttgtcaattttggcttttgttgccattgcttttggtgtttagacatgaagtccttgcccaaaatctccttaagctgataagcacttcagcaaagtctcaggatacaaaatccatgtgcaaag

SEQ ID NO: 659974 - DNA, 151 bp, Homo sapiens
tcctgtactgcctgacctccctgggaaggacaacacggggctatgacctgaagcagctgtatcatcggctcggagggcactttggggatcatcaccacggtgtccatctatgtgtacacccaagcccagggctgtgaaccgtggctttcct

SEQ ID NO: 659975 - DNA, 340 bp, Homo sapiens
cggatatcctctatgttttagttttcctttttttaatatgcttcttaaaattcactaagttgggctaggtgtggctcatgcctgtagtcccagcactatgggaggcttaggtgagaggatcacttgagcccataaggttaaaaccagcctgggcaacatagtgagaccccatctctacaaacagttttgaatccaggtatggtggtgccctcctgtggtcccagctactcgggagttttaggtgggaggtccgcctgagcccaggagactgaggctgcagtaaggtgtgattgcactattgctctctagcctggaaaacagagtgagaccctatctcaaa

SEQ ID NO: 659976 - DNA, 132 bp, Homo sapiens
gacgtagccactgctggagcaaagtgaatgagtgtggttccatgcggtgttggatgtgattataaaataaagcatatcatcagcccgcaacccacacgtgagggcaagcagccttgatcgtggctcctattc

SEQ ID NO: 659977 - DNA, 1632 bp, Homo sapiens
  misc_feature (1136)..(1136): n is a, c, g, or t
cacagccgctgacgcgcgtggtcgtgagcactccctatacaccatatacccatacgtcgttcacgcgccgcctacatatgtctgtctacgatgatgggctctattctgctggagcaactaaactactcatgtttgcggggtgttccccacatagacagtgcacggatccactggcgcggcgggccatcctcaatattaggcgttagcatgtggtgaaatctgcgtccgggtatgaccccgcgcatgttgtgtgcccgcattcaacgcacggcaataaaactgcgtggcaggcacgggcactacgatagtcacaaaagccgccggaagaggtttttgtcccgcaaagacatctcgctcctctggggctgcttgtggtaaacctctccatagcatgtactggtgtacacaaatccaggctacgcgtggtacccaatttgtgttctcagccacgccctaagtgtggtgcgcacattgatctgttgccacgcgctataatagtatttgactacggccactgctacccacctaggtttgtgacacataaactgcgtgaccacgatttgtccgcattatctcgctaataccgccctgttgtcggaaaattactctccgccctacttcgcgtcggggcactcgtcggtgttttctccaccaatacggagcaggcaacacttttgtccgggttgcgacaggaggcctacttcaaacacttgttgttcgcactagtatcttcctgttgggcaaacgttggtggccgagcacttaatccccccgggatattctctagtaatatgccggctcgccctatatgtgtaccccaaatcggtgctcttatagtggtgcgtgctgttttgccgcacaaattttcgggctttctccgccacttttgggtcccttcccattcgcggaaatcattttgcaggccgggtattattacttccgcggacatacaaagtccttccctaaattcgcgcctaatgggacatctcctgcagtggtgcgcaggtcttcggtgccactcctatttcctccaacgggaggaacatttctcctggtcacccaccggtatggcggcaacgataatgggggaaacgcctaacgaaattgtgggtgttccaacaccacctttggctctnaacccattgtggggaaacccactccaaggcccggggaacaagtccagtcaaagggcaactcgtgcacacccactggttggccacctttatggggggaataaagttcgacttcgggttgacatttcacgacggtacatataggacagacatgtccagtgtttcgtagctgattcgctagctagctggcctgcctatttgttgattaatgtgacttgatctttcgtactgattccgttgatctgctcaagaagtgcaacgatgtagcatgacagagggttcccagagactcgaggacgccatgcaaggatcctggatcatacacccctagttgtggacgagtgactcacatgggatgccacactagctctggatttcagcctcagatgccagatcttgggtccactggctccactgagggcagctatagactctacagccagagcggctggaattgaattcctgcctggatctacaataactctccgtcttgtgcctc

SEQ ID NO: 659978 - DNA, 771 bp, Homo sapiens
caccaatggcggggtacttgaagctggctgtgtgtgtccttgtcaggcgtcaagggttccacactgtagggagtcgctgcaagaatcggacaggcgctgagcacctgtggctgacccgacatctcagggacccatttgtgaaggctgcgaaggtggagaggttaccggatgtcgaagcgcctacaagctccggaggtgaacgagaggcaccagattctgcggcccgggcttcgggtgttagactgtggggcagactccgggggcctggagatcaggctggcggtgcagaaggtcaacgccgcaggcacagatcccaggtctcctggttggcgttcgatgctatggggtacgatcttcattgacgatattccccgctgggaaggagcgaacgtttgctgtgccctgctgacgtgactgagccgagaacgcgtcacggagaatcctcgaggtgcttcctggcaggagagcagatgtgattctgagcgacatggtgcgctaatgccgacagggttcctgggaccttcgatctatgacaggctcagtcatgctgtgccttgacccgtgtcttcagttgtgaccccaaggactagtcctgcgaagctggggggacattcctttgtaaaacctgggctggaagtcagagccgtcggttacacgaggagactgacagaggaattccaggacggtaaggactcatcagaagctgaacgccagcaggaaagagtcatcagaagtgtacgtgctcggccacagcagtagcacggaaggacg

SEQ ID NO: 659979 - DNA, 529 bp, Homo sapiens
gtgtcgcgatggtgttgtcccgtaagcatgcaatacgtgcagagcaagttaaacttatcgtgtgaacagctgccggctgtattctgctcccagatgaaatgaagcaactcttctgataacgaagagatacctgtctgaggcaaacgaaacatgggcacacagcacagcctcctcaatccactagatcccaactcatctctcatttatttcggcttctttaatgccaggataaatgtagtgtaacatttgcatgtcttttcgctttgattctgctttagtaaagagcagtatattgagatggacatggcctcttcattgtatttctcatcaagtcattattttgggggttatagcttgacaagcaatgaactttagaatggtagattccgtaactttaactgggtagctttcagtttgcttagaaatatttgtgggcatatgcagataatgttctcatcagtagtaagaatctcagggttctgcttatgccccaatggaggtatgacatagtaatcttttctgcctttac

SEQ ID NO: 659980 - DNA, 983 bp, Homo sapiens
agcgggatgaggcgactgcgcatactgccggagcggggtggttatggcggctccatattaacagacctcctcctcctccgccgccgccgccgtctcctcctcctcctccatatcccatcccaggcagaagacacataaggccaatcgtccgacatacacccgaatgacgccatgccatctgccccatcacagcaaaacacacccatacacacctggtacaaccacagacccggcaatgataggagaaagggcacagagagacatggagaagaaccagaacgagccaaacggacaaacgcccaaaaagccacgaccagagaccggcaggcaggcagccaggaggcaatcgaatacagccaaccgagccggaacctagcacctaaatcagcagcccccggagccagcggcctgcgggaacggacgcacgagcacccatgaagggcgaccaaagaatcggaggacggaaatagagaaagaggcgcgacataccagcgaaagggagtccagaggcgtgcgaaaagcggaggaacaccagcgtggaagaccacaagggaaggagcaggcaaagaagagggaagccccacaactccaccaggggacacgcccagaaggccaaccgaagcacacgccctccggtcggccaataccggcacgaacagccgaatgcaacgcaccacacgaggaagccagggacaaccacggcccgtggcaaaacgccacgacactaccacacaccgagcacaggaagacagaaacacgagaaggatcagcagccgcgaacgacacccaacaggcgccagacatacaacatgaacaccaacgcacaagacgccagcgcccacactgcggcacagccccacgacaccacgacgagcaacacgcgccacaacccgaaaaagaccagacccaaccgacacagaaacaacacaaaccagaaaacgcccagcgaaccaataagcaacaaccaaagcgaagaaaaacaa

SEQ ID NO: 659981 - DNA, 263 bp, Homo sapiens
  misc_feature (55)..(55): n is a, c, g, or t
aatttcttccggcacctgctgaaaaagcagtaggtgttctttgcgatccttgcgngcccccacgcctatctgcaagtgaaaggcctgtccctgcgccagggcaccatcgtcgatgccaccatcattcatgcccccagtttgaccaagaacgaggaaggaaagcgtgatcccgagatgcatcagacgaagaaaggtaaccaatactacttcggcatgaaggcgcatatttgcgccgatgcggagtcggtactgggtcattatgt

SEQ ID NO: 659982 - DNA, 207 bp, Homo sapiens
ctcaaatgtagcaccgtcgtctgcgtgatctgcttggagaaggccaaataccgctgtccagcctgccgcgtgccctaaacagtgcaaccctgaaactcgtcctgttgagaaaaaataagatcagctcttctaccaaaccgtaaagcctgtggaaaacacagatgatgatgactctatagctgaattttctcaatagtgatgaggaga

SEQ ID NO: 659983 - DNA, 1325 bp, Homo sapiens
  misc_feature (240)..(240): n is a, c, g, or t
  misc_feature (1306)..(1306): n is a, c, g, or t
gacaggcctgcttcttgtgacctcgatcctggacctcctagaccgggggctgctggtccatgttgctggtgtacgctctgttccttacgctcgcaggtgggaccggcctgcgtggcgtctggccccgtgatgcagcacaggcacgctgtgcttgcctgttgctcatcgcaacctaggcgtaacgtggctcgatatcctgtcgagcccttgtcggagtcagtactcgcgccgatctcgaanccccccgagggattcagaagggaagagtgccgacgtagatacttgcactctacaaggtacgaccccggcactccgatggagccaagccgtggagcttgagtggggactctcttgtgccaagagggcctagagatctcacctgcgctcgcaattggaactacgcaaggcctgtgcgctctgaggtgggaacgacgcagcacactacctgatgcaaaccacgagcagcgctgcacgttggtaaaccgcccggtttgcctgccatgtaccacgtggtgatcgcacaacgacgtggaatgccgactgccaattcagggaggtgtccaagtcccccccttttgctagtggagggagcggcgctcagagggctagcgataggcgtttgcgcctagattttgggagccatgtcctcgttttctccccgccgaaagttgccttcaatatgatcgcaccatcgcttcgggggaagctttgggggtggcgagttccattggggtattgaccgcacctgggtgcttgtttgtgagtcgcccggggcgtgggttccaaggggggccacccggaagagatggcaaccgttatgcagctaagggcgaaccggcggcgaaacaggggggctgaagcgagggtgagagcgcacatgggaacgttggatgccaggcacttgtggtggcgccgaagaaacagcggaggcaatacggggacggagaatgaaccatgcacctttattagtgcctagaggtttggcgggataggaagatgccttggaaaacgaacttctgggggcggacaacaaaaaaacacccaccctctgttgagagggcgcacattccgactaccacttccgcaatgtgtggcaaacgaactgtgaccaacagtgtgtattacttgggggacccagggctcaaaatggccgaaagataattgtggggcccaggcgacgcaaaggcgcgcatttggttggcgcgccacacagcgcgagagggcccttgtaaaaattcctgcccattactcgtgtggatacccaggtaactgtgaaaaacgctaggccaaacaatggtggagccgncagcagggtactagtgaag

SEQ ID NO: 659984 - DNA, 717 bp, Homo sapiens
  misc_feature (564)..(564): n is a, c, g, or t
  misc_feature (641)..(641): n is a, c, g, or t
aagcctcagtatgtgagagaggcagagagcctccctctgtgactcaccattctattggagatccaagcaacccaggcctagggatagcactttgtttctcccaagcccttgaggtaatttggggagagtcttggagatgctgtgagggaaagacaccgggaaaagctgcaggcattttcccagaactgggaccaagaacatcatgccagttttaatctgggtgcatataaagtcagtcattctttgatgacccagaagtgtggctctgcaggcattttattctcaagccaaagactagagggcttgctcttgaggagagtagggacctccaaagccataattgtggaaagcaccttagcagtatggctggaattgcacactctccctaattgcaagcctgggacaggaggagagctgctacagctgtggtttcttctggctgaggagacttgcagccggggccagcttgacaacctggcactgttctgcatgtgtcattgctgggtgccccagcctgctcccctgaaattgtggtgcaggggggcctctctgatccactcctangcagaactccagggaatttagagtacatactttcctgggaccaagaagcctcagtcaccccaaccctttctgtgaanagatcggggtaaagcaagccctctccactctatgcctaaggcagaactcatgacattcagagcaactgctcaacca

SEQ ID NO: 659985 - DNA, 820 bp, Homo sapiens
  misc_feature (110)..(110): n is a, c, g, or t
taggtcagcgtgtgaagtaggcgctggcaacgcgggttccccgctgttattgaggagtaactggcccagcggaccaacccaggcttgaggcagcggggaaccactcggtntgctgcgataccatggaaggaggccggggaagcggaacaaaaccacaggggattggcggctttttcggagccggcgagcaggttactcgcacgccggatttggggtggcgtcccgctaactggtatgaaccctctgtctccttatttaaatgtggatcaacgatacctcgtgcaggatacagatgagtttattttacctaccggagcctaataaaacccggggcaaatttggacgctgccttccttttaacgacttggcagcgaatgttgcatgacaggggctgacgtttggggcaaatgaatggtcctcggcttaggacttgcaaggaaaccccagaacattggctggtccaaaccaagaaggtgtccagattctgaaatatggtgacctaggcaaggggcccttagtgcataaataacttctaaggtttccccctggcttaggatcccaataagtgcaattgggggtggttcatcactctgggaaaaacaccgaggggtgcagaagattgcccttacaaaccaggacagcagcttgtgaagccaattgaacacggccagtgttggcaatacagtcgtaccaggagtgggactccgagagataagcccagaggtgggtctgacaaggagcctacagcacttacgcagcctcttatggctaatacatagtcggcagcaacgtaaactgcgccttgcccacaggactccta

SEQ ID NO: 659986 - DNA, 442 bp, Homo sapiens
atcagctcggtccagatgtcggcttcgtctgggtggatcgggctcatggtctgcggctggtgtccaggtgtccactagggctgcagtcgtctgatggctgtgctgtggctactggggttttctttccgcagctcactcacatggctgttgtcgagaagacctagttcctagttttttcccctggtgcgactctcctcatgacttggtagctggttctccccacagccatgtgatccatgagagagattgaccgatgatgaaaggtgctaagcttttgattatctaggtgccaaattcatacacgatcatttccgctttatttgttacaagtcctgttactaattccagctccacagtaaagagaagggaaattttgcaccatttcttgaacggagaagtacaagagaatctgtggtctatgttttgtagcatccagaccatg

SEQ ID NO: 659987 - DNA, 582 bp, Homo sapiens
agggtgttaaccaagaacccctggaagtcctagcctttcacatgaagaagcgccgtgaagatgaggggctcaagggaaagatcagcgaggccgacaagaagaaggtgctggacaagtgtcaagaggtcatctcgtggctggacgccaacaccttggccgagaaggacgagtttgagcacaagaggaaggagctggagcaggtgtgtaaccccatcatcagcggactgtaccagggtgccggtggtcccgggcctgggggcttcgggtctcaggttccaaaggaaggttttggtccggccccaccaattaagaagtaaaataagggcctttcccaaaatgctgtttttggtttggagcttcaagactttgcatttcctaggaattctggttggcagttctcaatttcctgtgttgccaaagttggaaattttttggtgaagtactgaacttgctttttttccggtttctacatgcagagatgaatttatactgccatcttacgactatttcttctttttaatacacttaactcaggccattttttaagttggttacttcaaagtaaataaactttaaaattca

SEQ ID NO: 659988 - DNA, 135 bp, Homo sapiens
atttatttttcatattctatagttggtatgtcttaaattcattcctggagtgggtagtgagtgtacttaaagtgtttcaattcctgttatattttttattaagtttttaaaaacttatattggctattcacctgt

SEQ ID NO: 659989 - DNA, 1310 bp, Homo sapiens
gtcgtgtcggcgcgtgggggttggtgggtcggtgtggatgtgttggcgtgatggtggtgtcgtgtggtgctgttcggcgtgtttggcgtgcgtgtgctgcggtggtggcgtgcgtgggagccgcctgttggcgggctgtcgccgtgctgtccgctgggtctcgtgctccgctgctggggcccggccgctatgttgtatcggcggtaggccatcccgtggtgcgcgctagggcccggtgttaggtacatgtgccttgtggagtgcaggggcgtgggactatgcggaacctgccgggcgtatcggcgctgagtcggggcgccaggtgcgagtcaggtagccgcggagcggagtgtcatgatggaaggtcaccccagagccgatcaagtggaggtatcaacaggtgtgcctgaataaatgggcttccggtgtaacctgttccgcccgtgtaggcaacgagcacgagtacaacctctgagttacgcactggccatcattgaccctgtggcacaataatatgatttatctctcacaagctagcaagagaccaagagccggacgccgccgttccgaccttggccgagaggggagtccggaactagtcatcaggcattcaaacatctgaataccgcccagcagggccactcttcagccgcgtattgtttcatagccgaatacacaacattattataataaacaccctcacacagtacaatagtcgctaggaacaacatatgacgcagctctccccctgaactctaccacacacatattttgtcagcgcaagaccctactgctaacctccgctgttcttatgaattcgaacagcataccgccgattccgtacgaccaactcatacacctcctatgacaaacttcctaccactcaccctagcattacttatatgatatgtctccatacccattacaatctccagcattccggctcaaacctaaaaaaaaaaaaaaaaaaaaaaaaaaaaaaaccaaaaaaaaaaaaaaaaaaaaaaaaaaaaaaacaggtgggccgcctgggccaagtggactttagactggagcaggctaaggcaggcggccgaaattggggctaactgggccaattggcccaatagggagccgaataacaattaacgggccgcggtttaacaaggtcgggacgggaaaaacccgggggtaaccaaactaaatggcctggaagaaaatccccttttggcaagtgggggtaaaagcgaaaaggcccgaaccgatggcctttccaaaaagtggcgcagccggaagggcgaagggaaatggaaagggtaaaaatttgggaa

SEQ ID NO: 659990 - DNA, 286 bp, Homo sapiens
cgagataacaagcacacgagctcacagcacacacaccgcgacacagcacacacatgcacaaacagcacacacacgcgaacacagcccacacgacacacagcacacactcgcacgccacacaaaaacagcacaaacatgcacacagcacatgcacacacagcacacacatgaacacagcacaccgcacacacatgcacacagacaacacgcaatgcacagcacacatgaacacagcacacacaaactcacagcacacacttgcacaaacaggacacacactcatgcg

SEQ ID NO: 659991 - DNA, 923 bp, Homo sapiens
  misc_feature (205)..(205): n is a, c, g, or t
  misc_feature (556)..(556): n is a, c, g, or t
gaaaatgtaccaagaattaaaaaataaaaaaaaaaagcattatgaaggggccaccagagactcccagagaaggaaagggactaggggctggatgcgggagactcagcacctataatcccagcacttggggaaggccgaggaagggtgtggatcacgaaggttcaggaagtttcaagaaccagacctaggcaacatgtgggtaaanaccccgcggtttctacgtaagaaatacatacaaaattcagcgtgggcatgtggcagccatgtgtgtgccgtggtaactcccgaggctgtacttgcgggaagagctgaacggccaggagagaagtgtgtgcgctagaaaaccccgagggaggccacgaaggtgtgtggcaaggtgaagccccggagaattgtggagccccactatagtgctctccagaggcttgtggggccgacacagagagacgcaagagaaactctcccggggtctctcttaagagacaacaagagacacacacacaaagagcgcccaagacagtgacagcgtgtgggctctcacagtggccgtggggtnaaatccccagaggacactcctcttatcggggagaaaaggcgcacagagagggtgggagggtggggactcacacaccagaaaggggtcaccagggagaaaagaatctcagagcagacacccagtgctctggggggctctaaaaccaatgggtgtgcagaaacaccttggcacaagtgcgtgcataacctctatgacacacatagtaacaaacaaaaagaaatatgtagagcaccgcgagtgcgccgtgtgagagatggcgcggggtgtacaaccccgtgggttaaggattccccccagggcctaaccctgtgcgagaaaaagggacgtgagagggcccacgggagcaacaaaagtggggcgatgacaa

SEQ ID NO: 659992 - DNA, 154 bp, Homo sapiens
aattttgaagccagcttggtctggatcaaagctgtgcttgaggctgggcacagtggctcacacctgtaatccccaacactttaggaggccgaggtgggaagattgcttgagcccacgagttttacacctgggaggcttagggggaagattgctt

SEQ ID NO: 659993 - DNA, 682 bp, Homo sapiens
gagagtgagtgctgcaatgccgagcggaggaggcaggaaccggagcgcgagcagtagctggtgtgggcaccatggctgggatcaccaccatcgatggcggtgaagctgcaagatccagtgttctgcatgcagcagtgcagatgatgcagaggagctgagctgagctgcctccagctgagaagttgagggagaaatgtgcgggccctgtgggaaacaatggctgaggctgagtgtggcctccttgaaccgtaggatccagctggttgaagaagagctggacctgtgctcaggagcgcctggccactgccctgcaaaagctggaagaagctgaaaaagctgctgatgagagtgagagaggtatgaaggttattgaaaaccgggccttaaaagatgaggaaaagatggaactccaggaaatccaactcagagaagctaagcacatttgcagaagagtgcagataggaaggtattgaagagggtggctcgtaaggtttggttgatcatttgaagggagactttgtgaacgcacagaggaacggagctgagctggcagagtcccgttgccgaggagattggtgagcagattagactgatggacagaacctgagtgtctgagtgtgctgaagaacagtactctcaaaagaagatcaatatgaggagaatcagatctactgataatcag

SEQ ID NO: 659994 - DNA, 80 bp, Homo sapiens
agtaatggactaattgtagacaatgtggagtgtgtgctgggcgaggatggtgaatgtgtgtgtttctgtgatgacgtctt

SEQ ID NO: 659995 - DNA, 385 bp, Homo sapiens
  misc_feature (299)..(299): n is a, c, g, or t
  misc_feature (338)..(338): n is a, c, g, or t
cacgaggagcatcctgaacggcctgcgcaaggcggccgagttcacgtcatggcgggaagtgccgaacaaccgcttctatgaggacgagcgtctgttctcgccggtgctgcgcgtcatgcctgcgcccttcgcggtgctgttcgccctcggtctgccgggcctgatcctgctcctgcgtcggccgggaagcggctggctgctgtggctgccgacgctcaccggcgtggcgaccgtggtcgtcttcttcgcggaggatcgcttccggctggtcgtggtgccgatgttcgcgtttggagcancgctatggctggcgtggctggtccacgcctggagagcangcaatcgggcgttggcaaccggtggactgatggtgtcggttgcgcta

SEQ ID NO: 659996 - DNA, 105 bp, Homo sapiens
tctagccgcgcagtgctgggggttggtctgtgttatctgccacctcaccgtctacactggcgaggctaggacactggcgaggctaggacactggcgaggctagga

SEQ ID NO: 659997 - DNA, 542 bp, Homo sapiens
taaattcgcggccgctcgacggcaagtgcagtcctacctgctgcttactgtaaatgttcatcgccctcagacagcacgctgaggaagtgctccctcccgaatgctcgcctagacccctctggccaccgaccccttcctcctgagctgctgttttctagtttgttttggcgcttgaaatgctctagttttgccaagccagaaggaactcctagatcctcccatgctaccaaggaagaaactgaggccctgggagaagagacttgtcctaacgtctggagcttccggtggctcttgttactgacgccatggccttgaggaggagtcgggatttaggcccacgtgggcacttcccaaacctgtgcttaatgcagcccctcagcccgggcaatatagtgagacctcgtctctatcattagttgtgacagggactcactgtatcggccagtctgcagatgagtgacatgatctcggattactgtaaccttcgccttctgggatacagcgatctccggcatccctttcccagtatgtgtgattacagt

SEQ ID NO: 659998 - DNA, 353 bp, Homo sapiens
ccatccaccatctcagtctggccagtgcaaatgaaaacctgggacccatttgtgttgggtccagcatttgccatgcacaagatgccaggaccggtatgctttagaatagagttctcatcttcaaatttctccccatagatgcacttgcccacagtgccattatggcgtgtgaagtcaccaccttgacccataaccctgtggaataatcctgtaaacgcactccgtgtctttggcaccgtgtctgcaaacgagctcaaaggacacgcggccaagggtctcgctgtccgcgacaatgtcaaagcacgcggtggggttgcccatggctaagagcacgcggttttccgcggctcgtg

SEQ ID NO: 659999 - DNA, 1066 bp, Homo sapiens
  misc_feature (438)..(438): n is a, c, g, or t
gagcagtgatgtcagataccggagtggaccaatgatggggcggtaccttactatgtgtattcttggagtcgggtgtgcatcgaatatgtaggctgtaggctgtctgtccaatctgagcaccatcgagaagtactcatgtggagaatctagcatactcatcgcacagttgaccttgtatgtactagagggaccgatgagtatatgtaggtcttcatgtcccccaatagatcattgttgtccctacatctctcgatcaaatgaactgacaaatatactggctattcacagatcagttattgtcatcgcatgtgcggctactaggacgtctaggtgctgtgatacctctatgcgtctagttagtgtgactgtgtagtggacctacccacgattcgggctttccagattattcttaaagatagagggtagacgcccgtccantatagggatcacacacatcgaggacatgctcacagttgtctctcttagacgcgcagagatagtcgtgatcaccgagtacctcttagagaaaggatctcatagaccatgcgctgggagaaattctagatctatctcagcgatgccacctcgaggaatctcattcggaaatccgagaggagtgcacaggtagtactacttctgtgtcgcatactgtgggaggctccttattgcgattagggcatgcccctttttgcccttttgaatagtcctcctctggagagcatccgtttgtatgctaactggggttacttttcgaatgccttagccctatccagtggacacagcactgtaccataggctagggagcgtggactttgcaatatcatctggacctaatcgtgtacgtcgctttgcggtgtccgatggtgcccacggtgattgtctccagctggaagaaggtagtggattctgtccttgacttgcaatttgctcaatctacgcggagtaaattcatgcccattggtccttttgggaagaaccaagatttccccctacatttccgcggtggcctctttgtgaacaacccggctgaatttcgtggcgattctagtattgcaaaaaaaaatgc

SEQ ID NO: 660000 - DNA, 463 bp, Homo sapiens
cggatcgggtcaggatcacccaactgtagatagaaaatatgcggaaaaagaaatgcacctgtactgagcgtgtacagatcttttttctggtcattattccctaaacgaaaacaatacaacaactatttatacaacatttacattgtatgacggtattataagacaatctagaagatgatttaaagacgtacaggcatgactgtacgcaaggtttactggaacatactaacagtttttatttttttatttttatttgtgagacgacagtgtcacccacgtctcccaggtctggagtgcagtggcacgctcatcggcgcactgaaaacctccaccatcccaggttcaagcaatctcttcgtgcctcacgcctccgtgagtagctcgagattattaggtgcccgctcaccatgcccagcatattttggtagttttaagtaaagacatggtttcaccatcattggcc

SEQ ID NO: 660001 - DNA, 427 bp, Homo sapiens
  misc_feature (268)..(268): n is a, c, g, or t
  misc_feature (331)..(331): n is a, c, g, or t
  misc_feature (338)..(338): n is a, c, g, or t
  misc_feature (383)..(383): n is a, c, g, or t
  misc_feature (400)..(400): n is a, c, g, or t
  misc_feature (410)..(410): n is a, c, g, or t
cgatccccgtaaccaggcgttagcttgttcgccgacgagcgcacgcatcacaggcactacgacggcaaacggtgcctggggttgactgcttacatcttcccgctcgactctcgatctgcgccgaaagtcgttggttccgttgcgactttcgacaatgcaggccgcactggcacactcggttgcatccaccgaatagagcccgattgcaccaacctcggtgaacgcgcaccccgacgtaacgaccacccgatgctcagcatcagcattnatcaccggacactgttctcaccccctgttcagcgcgctttgacgtgcacggatattcaccgtngacacgnggttttcgcaggcaaattggaaaccgaacgttgtaattgaggtcntcattgttattgccgangccgtggttncaccgggggggcagaga

SEQ ID NO: 660002 - DNA, 306 bp, Homo sapiens
ccttcccaaaaggtttttgttttttttattccttttgggttaaagcagaccaagttcccccccggccccccggttgtgggggggcctgttatttttttaaccaacctcccctttccccccggggtcctccccctttccttggtgccaattttttccccccatagggcctttggggttgtttttttttttttgggtataaatggaatgttgggggaatgccccccccctgggggggggggttccttccccttttccccggggccggggtttttttgggggcggggcccgttggggccctttttttta

SEQ ID NO: 660003 - DNA, 973 bp, Homo sapiens
  misc_feature (619)..(619): n is a, c, g, or t
  misc_feature (973)..(973): n is a, c, g, or t
agcggggcggtccaagcaaggagcggcaagctgttgtccttttccacgttgtggtagcttgttctttgttcttgcaatgtatgtattgctgctgctcgttctttgggtccctgccacgtttatgagctgtaatgctcacccggaaggtgtgcagcttcacttctcaagccagcaaggttactgaaccaaggaaactcaggacgagccacttttatgaactgtaacactcactgtgaagatctgcagctatactcctgaagccagcgagaccaggaacacacctggaggaagaaactgcagacatatgtgaagaacaactccggaggagctgcccttaagaactgtagcactcactgcgagggtccgtggggcttctttcttgaagtcagcgaggccaagaacccaccaattctggacgagggagggctaaattgacatataaaacaaggtttacagtcttttgcatgcaaatatttctgtccgttctgaaatggaaagtggaaatcccttagcagctgggcaacagggagagagacaagaactcttttcaggtcatcaataaccttggtcctttggaactgattcttaatactcctagccatcatagggttcatcatgngcagaaatcgttattgcatagacaaaattatgctggtgttcttattatttgggataaaatttttgggacatttgaagcagaaaattgaaaaagttgtatatgggttaacagatccattaatacatttgaaccaatcgaagtgcagttccatcactttatttttccaatattggactaccattcttgggcaacaacctggattctttcaaataaagtttcctggtcatactctaacggagccggatgggggtccagggtaaccaagactggtctccgggaagaaattcccgaaggtcacagggaaagaaagttcccttttcattaatatttaagctcacgttttcagagcttttn

SEQ ID NO: 660004 - DNA, 289 bp, Homo sapiens
ttatccccccctgtgttctgtttgaaggggacgaggtgtattccaccatccggaagcagtgaatacaatgggaagatccctcttttccgccgcatccggggcgagagtgagctgtacaccagttcatactgtacactgcagaacccacacgttcatctatcagccaccatcgatgcaccaagtaccaggccttatcccgacgacacgggtacccgaggcgtcgaattccgtcaatcaatcgcgtccatagcgtgctttctcctagtcgtgaacaaccctgtgccgacac

SEQ ID NO: 660005 - DNA, 345 bp, Homo sapiens
ctagcagtaacatctgggctgctacgacggacagggaaccaagcgtttagatgaagaccaatctcaaattcatcctcatggactgcatggagggccgtgtagccatccaccgagtggccaaccttctgctgtgtatgtatgccaaggagcacgtgggctttggaatgctcaaggccaaggcccaggctttggtgcagtcactggcaggcagcccctccacccaagtggcggccatcttcaacggccattggtggcacagctggggtcagcacacagagcactgcaccatttgccaggggcggggcctcctcacaagcaacttcttcagaaatggggggcaggcat

SEQ ID NO: 660006 - DNA, 844 bp, Homo sapiens
agcgggtccccgcctcgcgcggcggcggcggcgtggtgatgagcctgaggcggcggcggggtgtggctccgcgcgcggtggtctcggggtgcaaaataacatggcagccacgacgaattacacaggagacttttgatgctgtattacaagaacaaatgccaaaggatatcacatggatgccagtggtgaggctgtaagcgaaactcttcagtttaaagctcaagatctcttaagggcagtcccaagatccagagcagtagatgtatgatgacgtccacagcgatggcatgatactccctcagtggaatctgtagtctcactctagtagatgccggaagagaagtgcctgagaagtgacgtatttccaggggccttccttcagatcaagcaacccttccatcagtgatgacagctactttccgcgaagaactgtggccgggactctggcaacttttctcgactctgattctcgggaccaggtcgattggccacgcggacaattggggcattgtccgtgtctcagtgactggaaactttgcgctccgtggtctcttgggaaccacagactttggccatccagtttctcaagagtcctcttggtcacagagagtatacgttgggtccctctgcacttttgggggactctggatcttccaagctgattgacaaagagtgtttggagaacggacagtcgggattatgacgttgaccatcctggggagggcttgactctgtgcttaggcgcggccagtcaaagtccaggccagaaagtcgaaactctaaacatcgttgaccatgaaggttccctcctaggaaaaggcgggaaacccagggcttgctcaaa

SEQ ID NO: 660007 - DNA, 147 bp, Homo sapiens
tttcatgaattaagcttttctagctctggtttctccccatctttgtagttttatctacctattggttttatgatagatggtatattggtagtaggatagtacctattctaggtagatagtatgatagctaatatcctatatctagct

SEQ ID NO: 660008 - DNA, 900 bp, Homo sapiens
  misc_feature (126)..(126): n is a, c, g, or t
ggagctatttatgacaaacccacagctaatatcattctgaatggtcaaaaacgtggaagcattccctttgaaaactggcataagacagggatgccctctctcaccagctcctattcaacatagtantggaagtcctggccagggccatcaggccaaagaaagaaataaagcatattcaaagtaggaagagaggaagtcaaattgtttctgtttgcagatgacatgactgtatatttagaaaactccatcgtctcagcccaaaatctccttaagctgataagcaacttcagcagaatctcaggatacaaaatcaactgtgcaaaaatcacgaagcattcctatacaccaagaatagacagacagacaagtcatgagtaaactaccattcacaatcgctacaaagagaatgaacatacctaggaatataacttacaagggatgtgaaagacctcttcaaggagaactacaaaccagtactcagggaaataagagacgaccccaaataaagtggaaaaacattccacgctcatggcataggcagaatcaatatcgtgcaacgatgggcatacttgcccagaatttatttacgttcccaaagattcaaggctatcccatcaagctaccatggacattcttcagatcagtcgggaaaaaactacttccaactttcatatggaaccaaagaagatcccgcatagccagaaaattcactaagcaaaaagaacaaaggtcgagtcattcatggtaactggacttcaactattcgacaagttccagtaaccaaagaagcttgatctggtgccacaccgatttctgaccctcgggcccggacacacggccccaacttataccccatcatctactcgaacttgacaactgaaaacccgctgggaacggtca

SEQ ID NO: 660009 - DNA, 314 bp, Homo sapiens
gacatcctgtcctctctgagctggtcctgctgggagccgagccatcctgggaccagctcccacatgcacacgcccacacctacacgcagggcagtggggaagggcagtgagtgggggagggcagcggcggtcctgggcccagctgggggtgaccaggagcatggaccccgcttcttggcccaactcccgcagtgccccttggctcctcaccctgcactgtgggaagtcagaggcctctggaccccatccccagcgctctaacccggccatttgcccgtgcagcctgttgcgctgtccccacctgcggggcctgc

SEQ ID NO: 660010 - DNA, 174 bp, Homo sapiens
  misc_feature (68)..(70): n is a, c, g, or t
gtaggttaactggtgactccgcgctacacatatcccagtcggggaaccctggccaaaattaccttacnnntaggacacagccgcctcatcaactttcgcgtcatccgttaagccaaagcggcgcagttggcgaactgacaccctgttattgcagacgccccatcaggcaatccc

SEQ ID NO: 660011 - DNA, 476 bp, Homo sapiens
gacctggaagggcagctactgtctggtcacctgactcaggatcaggtgcgggaggttaagcggcacatcaccgtgcgcctggactggggtaatgaacatttgggcctggacctggtgcctcggaaggactttgaagtagtggactcggaccagattagtgtctcagatctctataagatgggttaaatatatgtgtttggaaaagaaatggaaacttccactgccacaaccattcttcttacccatgtgatatggagcaattcaacaaatgagtgtggtaccatacctctagggtccaaaaggaagcaggatgaaatctctcattgtttcgtttaccaacaccacgcactgaacatttgtaaattcaccattattcctggccagggtttacttctaaatgtgaatggctttctataataactaattataaaaaataacaatcatactaataataaaaataccaattttgaataata

SEQ ID NO: 660012 - DNA, 713 bp, Homo sapiens
tcgttgaatagtcttctagtataagattcctctggagcgtcctgtagcctttgttttagtaaagattctagccccaccaaaccatgcttgaattcaccaaagcaagacatggtctccaagtggcaaaatccaacgttttcttgttcaacgataaactttaaggcatccgaatcacagtcagtagagatttgtaaaagcttttggccattgccagaagtttcacccttgatccagatttcattcctagaacgagaataataaacgccacgacccaaatcgatggcctttgctatagatttcttcgaagaatacaccaaccctagacaacgctcatattggtcgacaactagggtggtatataaaccgtcaggacggtctgtacgtacttcaccaagcacttctttggtcaacatatccttgcttaatttctttatggacacaattttatcttgcgagaatttttgttttaccatgaattgattggagaaaacaccgttctcttccacaacaacacgctcctttggcacattcaattgttcaaccaagtggtcggctgttttagcatcttggctagcaatgaacagagaagaaactccgttgttcaagaaggcaatgatttcatcatcgctgaatttaccacttggcaaggacaaagccaccaatggaacttcttcctctttggagaactggagaattctcttcattactcaggc

SEQ ID NO: 660013 - DNA, 334 bp, Homo sapiens
gtaataggtgaaagtggtaacctgttttaactttgaattcttgccgggcgcggtggctcacgctggtaatcccagcactttgggaggctgaggcgggtggatccgaggtcaggagttcaaaaccagcctggccaagatggtgaaatcccgtctctactaaaaatacaaaaattagccgggcgtggtggcgggcgcctgtaatcccagctacttgggaggctgaggcagagaattgcttgaacccaggaggcggaggttgcagtgagccaagatcgcgccactgcactccagcctgggtgacagagtgagactccgtctcaaataaaaaaaaaaa

SEQ ID NO: 660014 - DNA, 366 bp, Homo sapiens
  misc_feature (257)..(257): n is a, c, g, or t
  misc_feature (349)..(349): n is a, c, g, or t
cttctaacacgcaatctctacaaataaaaaaattggccaggcatggtgacacacacctgtggtcccagcttctcaggaggctgaggtgggaggatcatttgagtccaagaagtcaaggctgcagtgagccgtgacggcaccactgcactcagcctagataacagagggaaatcttgtctcaaaaaaaaggacttgggtaatgttctcttctactacttctactaccgaagccagctttttaggttgcatgcagccanatatttattagcacctattatgtgcaagaagttaccgcgagaattttccaaggtaaatgagctagcaaatgcaagggccctaaagtataccncaagattgcggtgttag

SEQ ID NO: 660015 - DNA, 695 bp, Homo sapiens
  misc_feature (17)..(18): n is a, c, g, or t
  misc_feature (44)..(44): n is a, c, g, or t
atctagacctaggggannctgcacgagggattttaggctccatntattttatagggtatcctttgcccattgcttgtttttctcaggtttgtcaaagatcagatagttgtagatatgcggcattatttctgagggctctgttctgttccattgatctatatctctgttttggtactagtaccatgctgttttgcttactgtagccttgtagtgtagtttgaagtcaggtagcgtgatgcctccagctttgtccttttggcttaggattgacttggtgatgtaggctcttttttggttccatatgaactttaaagtagttttttccaattctgtgaagaaagtcattggtagcttgatggggatggcattgtatctatttaccttgggcaatatggccattttcacgatattgattcttcctacccatgagcatggaatgttcttccatttgtttgtatccacttttatttcattgagcagtggtttgtaattctccttgagaggtccttcacatccttgtaaggtggattcctaggtattttattctctttgaatcaattgtgaatgggagttcactcatgaattggctctcttgttggctggtatttgtgatatgcttgtgattttgtacaatgattttgatcccgagacttgctgaagtgctaccagcttaagaggatttggcttagctgggt

SEQ ID NO: 660016 - DNA, 401 bp, Homo sapiens
  misc_feature (41)..(41): n is a, c, g, or t
tcatctagagatccgctgatcgttagtacaaggggctttgngtgggttccacccacgtcaagaggagacagacatctgtgctactggagagcagtgtggcaggcagtctgctggctgcttacgctgtcgctgggcaggaaacccgtgcatgcctgcgtgtacgcttggttgtgttttgtcctggttatcagcggtttcttaggaaagttccttgtcaaagctccaagtttcgcttggctgatccaagggaaaaagagacttagccgcagttgggtggggaaaccagagtgttcagaggcagtaccaaggtgtacagggctggagccaaggcacttctgggcagcttcatcagctactgttcttggagcaacttcctgagcccttacccatcttgcttaagc

SEQ ID NO: 660017 - DNA, 92 bp, Homo sapiens
ggcttaacaacacacatttattttctctgttctggaggctgaaagtccaagactgaggctccagtcaattccatctcttctgtcgtcttctc

SEQ ID NO: 660018 - DNA, 427 bp, Homo sapiens
  misc_feature (60)..(60): n is a, c, g, or t
  misc_feature (358)..(359): n is a, c, g, or t
gcgcgctcgaggtcctggctctttgtcgatgacgcagcgtgcgccgggccccattggttnaacgtccgctcggtgccatcctggtccctcgtccctcccccatcccggcgtccacgacccgggcgcaggccacatggtcctcggattgccggtcccgggtcccgcaaggcgcgtctacaccagccgctagacccacgcggcgaggggctgggcttctccgggggccacgggttccgaagtccgcccccgtccccgctccggagtcaccgctttgagatccagaactccgtccttggcctcctgcagcagcgacacgaacttggtagtgagcaccccaggctcttctcgtgcctgctgnnccccgccgcaaggcactgtcgctgcgggggcggctgcggcgttgcgctgcggaggagcgcggcggccc

SEQ ID NO: 660019 - DNA, 178 bp, Homo sapiens
agcaggccaaaagcccaggtgaggcccagcaggaacagcagcccaatgcctcctagcactcaagatccaccatagtccaagcaactgcagttacacttgagtacaaatacgctcccgacagcctcatgcagcgacaccctaaaggacacccgaacaccatcaataaccgaatagacta

SEQ ID NO: 660020 - DNA, 171 bp, Homo sapiens
cggctctgctcacctgcactatgcagctacatcagacacatttatggcaggctcggaatacttattaagaaacgatgcaaatccaggatccgtgataagcagcggatacaatgcagttcattattcagctgcttatggtcaccgtctatgtcttcaactgattgcaagtga

SEQ ID NO: 660021 - DNA, 926 bp, Homo sapiens
ttcccgaccaaatttcgccaccaaccacaaggggaccctgagcgccgaccccatatacggtgtgggttcccggtgcaagcagccgcaggaccaaaactggatacaaacccaagtatagggagaccgggaacccttcccaaaagtactccaccaaccagcccagagggggagaacaatataaaacacgattcttcaagcccagacaccaagaaacaagagggtcaagtatcaagatcatctagaaaacacgacctcaccaaatgaactaaataagacaccaggaaccaatgctgcagagacagagatatgtgacctttcagacagggagttcagaatacctgctttgaggagaatcaacataattcaagataacatagagaaggaattcagaattctattggatgaatttatcaaaatttaaaacaattaaaaagaattgagcagaaattctgaagctgaaaagtgcaatagacatactgaagaatgtattacagtcataagataattgacgaagcagaagaaagaattagtgagcttgaagacaggctatttgaaaatacacaaaggagacagaagagtaaaaaagaatgaagcatgcctacaagatctagaaaataaccttaaaagagcagacctaagagttgttgaccttaaagagaaggtagagagagagatgggggtagaaagtttttcaaaggcataataacagaacttgctgaacctaaagaacaatatcaatgttcaagtacaagaagattatagaacattaagcagatttaacccaaataggactacctgaagacatttaataatcaaaaaaggtcaaggataaaggaaggaggctaaaagcagcaagagaaaagaaacaaaaaacgtgcaacggatctccaatacatctgataacgtaacgacgtttcagtggggaa

SEQ ID NO: 660022 - DNA, 482 bp, Homo sapiens
agagtcttcatttaaaggtaaaatttaaggcacacctaacatgataggggcatgaaaaataaagtataaagggtacatttcttatcttagacttctatatgcaccttgtagcaaaaggtactttgatatacaactcttacagagccagcttctttaacctctacccctggctcccctccctgtcccaagagcttacactgaattaagtaaggtacacttttctagggggaaattttttgtttcttttaaaaacttcccatctttaaaaagggcccttcttatttcaaagggattaaacttaataatgggtttaaaagggagaaattcattcttctttacataaggcctttaaaacttgaaaactttttaccaaaaaccccacacccgagctccaccccatttctttgttcagtcattggattgcccaaatcaaaacatttacaattccactttaaggggggaaaaaatctaaaaaataacct

SEQ ID NO: 660023 - DNA, 406 bp, Homo sapiens
  misc_feature (269)..(269): n is a, c, g, or t
ggaatgcccaacccggatacccaggcgcatcagccacagctccagcgccgtccaggtgccggtggtgtcgccccacggtgagccgttatccatggtcatccggtccggcaggccgtaacgctcaaacacgctgaccagctgctgctgcacggtctcgcgccgttcatcggtacagtgcgccaggcacagggaaaaacgggagtggtcgtccagcagggtgagcggatggcagcgtccaccgccaaaaggaaagtggcccttaaaatccnatctccagaggcggttcggcgcgtcgtgttcgaacctggccgtggcgggaatgcccggtgaagcgcccggcagcaggccatggcgggccatcaggttatggacggtgctgaaggcgggcatggtgtgcccctggtcc

SEQ ID NO: 660024 - DNA, 411 bp, Homo sapiens
  misc_feature (287)..(287): n is a, c, g, or t
cggaggttttggccctggtgcttgattttcgaggccatctgctgggccgcctgtcggccatcgtgcctaaacaggcactgctgcgccggacagcgccggtcgtacgttgtgaaggcatcaacattccctgtcaactcctacagaaacacgttgaagtacctggctttcctccgtcaagctcatgaacaccaacacttcccgaggcccctaccacttccggacccctagccgcatcttctggcgttccgcgccaggtatcgctgcccacccaagcgaggctaggtcgntcttcaccgtctcgcagcccgcccgcatcccacccgccctacgccatggacgccccctggtcgctcctcctcctcctcactcccgcgcgctcctgacgctcctaccctcctccgcccctccccg

SEQ ID NO: 660025 - DNA, 623 bp, Homo sapiens
  misc_feature (19)..(19): n is a, c, g, or t
  misc_feature (74)..(74): n is a, c, g, or t
  misc_feature (212)..(212): n is a, c, g, or t
  misc_feature (234)..(235): n is a, c, g, or t
  misc_feature (242)..(242): n is a, c, g, or t
  misc_feature (245)..(245): n is a, c, g, or t
  misc_feature (251)..(251): n is a, c, g, or t
  misc_feature (254)..(254): n is a, c, g, or t
  misc_feature (309)..(309): n is a, c, g, or t
  misc_feature (378)..(378): n is a, c, g, or t
  misc_feature (398)..(398): n is a, c, g, or t
  misc_feature (400)..(401): n is a, c, g, or t
  misc_feature (405)..(405): n is a, c, g, or t
  misc_feature (408)..(408): n is a, c, g, or t
  misc_feature (413)..(413): n is a, c, g, or t
  misc_feature (420)..(420): n is a, c, g, or t
  misc_feature (468)..(468): n is a, c, g, or t
  misc_feature (516)..(516): n is a, c, g, or t
  misc_feature (519)..(520): n is a, c, g, or t
  misc_feature (527)..(527): n is a, c, g, or t
  misc_feature (540)..(540): n is a, c, g, or t
  misc_feature (615)..(615): n is a, c, g, or t
catttatggaaagaattantgtctagatggtctgcagaacgtgtttggggtgagtgggagtgaggggcaatgtnactttttctccctgtagtttggagtccattatgagctgctgctttttcttctcatcttgtcatcttctggggatgtttgaaggctgagttccaacagaattcacaaagggaataaaacaggattgattttgatgtaanggtggtaagatagggcattacnncaaaacnaangctgtnganacatgaaccttttgttttttgaggactatttttgttatctgtaacgctccacctnacatgccacgtcgtgtgagtcaacaggatcagtttggtacacacatgtcgagctgcagcgtctgtctgngtcgttggatgagaaaaacncnncccngcngcctnccatgtnataggcccacccaagagagtgacacacagtgctggccctgagacattnccacaaagtgtcaactctgccttgcatcctaaaactttttgggcatcnatnntgaaaantataggagccttnggaaggcctcttatgtttggaggggaagggtgttgagattgtcaccatccttcaagctgagactcctggtgagcntttgccac

SEQ ID NO: 660026 - DNA, 130 bp, Homo sapiens
tgagctgtggagagcatttcaacatggactgttgtccaccctgcacctccttgttgccctgtgccaagctgcttccagccctgacctctccccccacaacctctactggggatcctctagtagtctgacc

SEQ ID NO: 660027 - DNA, 925 bp, Homo sapiens
gatatacttgcagaatatttgaaatatcgtcaattcccctttcaaagattagatggatcaataagtaggagaactgacggaaaccaagctctagatcattttaatgctgagggactcagaggattttgacttttgctgtccacaagagctggacggtctagggacttaatttagcctctgctgacactgttgtatatagtttgatctccgattggaatccacagaatgatcttcaggcacaggctagagcccatcgaattgggcaaaagaaacaggtgaatatttatcgtctagttacaaagggactcagttgaagaagatattcttgaaagggcgaacacacgcacgatggtttcccgatcatcttgtacttcaaagcctggacacaactgggaagacagtactacatacaggttctgaccccatcaagttctactcctttcactaaagacgagttatcagccattttaaacgttgggatgctcgcacgaactctctttacaggcaccctgacaggagacaaaacaatgagccccaggcaccactggctctagactgacactctctgaacgcgcagctgaacctccctgacaaactgaaccaggtcccttgcaactgtcaggagactgactctgctttccccagttcaacggcttgacaaacttctcacactatggattgaggactgacccttgacgttggacacctgacagacacttcaagacatctgggaaggaaacagtactcccagacagcaatcaccaagacagaccgaacgtcgacgcaacgacagacacgacgaagaggacaactgcaacagaacatcacatactggcccccccacacgcgcaccgggtgccaccacgcgaatcagtctccaacggcgacgcgcaagcacagcccacacaacactcagccacatacc

SEQ ID NO: 660028 - DNA, 1033 bp, Homo sapiens
agtcccgggcgggcgtctcgggaaccaaataacatctgctttgctgccgagctcacaggagacacccgagacccctcccgctagccagagaggctggaggcctgctcatgaggggtgctttgaagatgccggagtgccccgtctcatgcctgttggcagtggtgttcgcatgggtcatggtgctgatggagatgtgtgcttgtgttgcatttcttgagagcacatggggctggggcattgtggcgttatccggtggggtggtcaggagattatcatgcagcggcaattgcaaaaaactggctcaattggtgtgacttcataaggagtggcagcatcacttgaacctatgtgctcgaagcatggcggagcctcgggaactccaacagagacgtcgctggatgggccattgacaccatactgcagagccggacagtgagtggtgaccgcgaacagtgggcggacgccggacatgggccacgatcgtgtacgccgtagattcacaggagggtcaaggcccgtcgcgtgctagtttggagcttcgcggcctccctggtgcgatacttcagtacgtgctgctggccccgtcttgctgtcgactcaggggccacggctcatgccccactcagagatcaaaaccccggtctgctgccgccatcacccagcggaatgggggattcccgctggcatgaacgggaccaagttcacgcttgttggtccggagcgtcccggaaatacatccgtcagtgggacaactcttgatcgtcgacatcaatggtgcttgtttccttcgaccctggtagcaccgcatgcggacacgccaatgacgagatgtggctcgcgagacgggagccgctctcgtgcaccggattcgcctgctggcacttcactcgacgtccgacccttggttccaccccaactgtgatcggcggtcgcgcccacaacacagcacagaccaagacaaagacgctaagatgacgcacacgaccaccaaactcgaggatccaagcgatcacgacatcgtcgtcctagtccg

SEQ ID NO: 660029 - DNA, 385 bp, Homo sapiens
gaccaaagacaatgattgagctcaatgataatgaacaccctgggacgatattcctggaaacagctgatcccgagctggctgctcatggagcgaccttacccaagatggatatacatcatgatgtggactttttgaagatgtctgataccatacgtgacttgctcccagctatgtgtgacagaccatgatacattcaagatactaaccttatactatatgaggaagttagaccgcgtttaccagagagaattctcgactatgacgtgtatcttgatcaagccattgatgaactattggatggagacatcctagtatttcacaacgatgaccctgactatgatatcagtgagttaccgaccgtacaggagtttccgagatctatacc

SEQ ID NO: 660030 - DNA, 481 bp, Homo sapiens
gggacattggtattggcattgcacgagaaaatggtcttcccggccccccaggtcctcaagggactgcacgctatggcaagatgggtgcaacaggaccaatgggccatcaaggcatccctggcattcctgggccccctggtcccatgggccagccaggcaaggttggccactgtaatccctctgactgctttggggccatgccgatggtgcagcagtacccacccatgaaaaccatgaacgggccttttggctgaaattacccacctgcctttggatgaaagactccgtggggaataaatggccaaagcttataggactctgtgacaagttgtgaatgtgcctaattgttgaacgtagagagcaaaatgggtcgtcaaattatgtgtttctgtttgaaacaaaactgctgtttattcatgctgaggtgaagggggggcctgcttcttacaaaagcctataaattgacccctcactataaatt

SEQ ID NO: 660031 - DNA, 238 bp, Homo sapiens
gtcctgctgcagttacccactcactgctaatcttggcccttattcctgctgtcgttggtggctgggcccgacagcgggcctcactcttgaagtcaggactgtgtctgacctggtgggatgccctgccagagtatgctcttttcgaggacggattggccctgtttgaaatgtttatcgttaagggacagccttcagcagcagctcacaccctaccttccccagacttgcactggggtgg

SEQ ID NO: 660032 - DNA, 88 bp, Homo sapiens
tgtttcattgcatgcccaccagcccagtggcatcagtgggtcctgcagctctgcaattctgtcaatccatggtccatcagctgttccc

SEQ ID NO: 660033 - DNA, 328 bp, Homo sapiens
  misc_feature (27)..(27): n is a, c, g, or t
  misc_feature (75)..(75): n is a, c, g, or t
  misc_feature (181)..(181): n is a, c, g, or t
  misc_feature (194)..(194): n is a, c, g, or t
  misc_feature (217)..(217): n is a, c, g, or t
  misc_feature (235)..(235): n is a, c, g, or t
  misc_feature (237)..(237): n is a, c, g, or t
  misc_feature (239)..(239): n is a, c, g, or t
  misc_feature (291)..(291): n is a, c, g, or t
ccaagcagctcaaaagaagcaaccgcnaattcagtcaacggctggggcaaacccagttcgcaatgaaaaagatangatataaatgaaaaaagtgaaagtaaagaaatatgtgtaaagaaaaaggccaaactatgacccactatagaaaccacaaatgagaaggataaaaaatttaaattcntaaagaaagccanagaacaagaagcagaagaatgangaaaaggaggagaattantncnaagaccaccggactacggcagttatacagaacacaataattagtgaaaatgnagaagagaaatagactcaaacatcgaaaaaatagagg

SEQ ID NO: 660034 - DNA, 673 bp, Homo sapiens
  misc_feature (350)..(350): n is a, c, g, or t
  misc_feature (372)..(372): n is a, c, g, or t
  misc_feature (542)..(542): n is a, c, g, or t
  misc_feature (622)..(622): n is a, c, g, or t
  misc_feature (659)..(659): n is a, c, g, or t
  misc_feature (672)..(672): n is a, c, g, or t
acggatagcggatctgcacattgttgtgcaatcatcaccaccatccatctcaagaacttttttcatattccagaactgaaattctgtatccattaaataataataataattggactcatgagacatacgctatcctctcagtcctctgaaaggaatctcctttccttcctagctctttgcttgcctgaatggcctcctttcccccaaactctttgaaaactcagaactgtccaaagatcaagtcttgacaccttgccatcatatccctaccttccttcaagtcacttcattttgacagtttccctttcttgcctgccatgacctctgcagagggctggctgataagagangcagagacaatcctgccacctntcagggatagacctctatttggacactgtggagggaaatatacttctggattttagtagtatgcctgccctgagttcatcatagcctccttggtatgctctgtagttttattacattgtgagcttctgagggaccccaacaaccattggttatagaccattttccaaggncatttctctctgcaaatcctttttcaaatggacccgtcagacatgtgcctgttgtgcaggactacaccttgtgagaagtnttctcacccattgaagccgaatgagctaatttctacntttttttagggtng

SEQ ID NO: 660035 - DNA, 308 bp, Homo sapiens
  misc_feature (41)..(41): n is a, c, g, or t
cggcctgctgctcctgcacggaatggaggggtaccgctgcnaccccgcccccccccgcccgcgcgccccgctgaccgggccaaggagccaggggggaagtgcgtgtgttgggccaggtaggatacgtaccccttgcccagagcagcccatcccaggcagagggtcttccctctgtccaaccactgttttattatttttctaacatggtgtgggcccccccctccggtcctgtccatccccgaccaggcagcagccacccagttcttcctcccctcccccgtgatcccataagcgactgtcccccgtgc

SEQ ID NO: 660036 - DNA, 764 bp, Homo sapiens
  misc_feature (1)..(1): n is a, c, g, or t
  misc_feature (96)..(96): n is a, c, g, or t
  misc_feature (111)..(111): n is a, c, g, or t
  misc_feature (113)..(113): n is a, c, g, or t
  misc_feature (115)..(115): n is a, c, g, or t
  misc_feature (117)..(119): n is a, c, g, or t
  misc_feature (142)..(142): n is a, c, g, or t
  misc_feature (162)..(162): n is a, c, g, or t
  misc_feature (225)..(225): n is a, c, g, or t
  misc_feature (240)..(240): n is a, c, g, or t
  misc_feature (245)..(245): n is a, c, g, or t
  misc_feature (249)..(249): n is a, c, g, or t
  misc_feature (251)..(251): n is a, c, g, or t
  misc_feature (267)..(268): n is a, c, g, or t
  misc_feature (271)..(272): n is a, c, g, or t
  misc_feature (279)..(279): n is a, c, g, or t
  misc_feature (290)..(290): n is a, c, g, or t
  misc_feature (309)..(309): n is a, c, g, or t
  misc_feature (316)..(316): n is a, c, g, or t
  misc_feature (322)..(322): n is a, c, g, or t
  misc_feature (332)..(332): n is a, c, g, or t
  misc_feature (402)..(402): n is a, c, g, or t
  misc_feature (414)..(414): n is a, c, g, or t
  misc_feature (418)..(418): n is a, c, g, or t
  misc_feature (489)..(489): n is a, c, g, or t
  misc_feature (557)..(557): n is a, c, g, or t
  misc_feature (649)..(649): n is a, c, g, or t
  misc_feature (654)..(654): n is a, c, g, or t
  misc_feature (672)..(672): n is a, c, g, or t
  misc_feature (682)..(682): n is a, c, g, or t
  misc_feature (684)..(684): n is a, c, g, or t
  misc_feature (763)..(763): n is a, c, g, or t
naatttctaacagaggcaaaacttattaccatagtttataagtagaaataccattctttatgacaatataagttcactaaggatgcacgatttatnttataattttttaancntntnnntctccctcttcctcctcgatttncccttgttcgtcggcctttncgtcctggtacttttttttttttttttaccatttttttttttttttttttttttttttttttnttttttttttttttnttttntttntnttttattatttcattnnttnntttctcnttaacattttngttaacttctctgatattngctttantatctnctttattttngttctttttcttgattatttttgccgatatctttaggtcgtggtgttttatttttcacacttccgttttnactttgtttgtnattnactccacgaagtatcttcttttctttttcttcacgtttatcatcttctcgttcaccttcttcatggacatncggccccggaaaatgtgcagccaccgtcaggtagctgccgttgcgcggggtcgcaggcgggccatcantgttctttggagtcgaacatctgctggggtgagctcgggcaccgtgagcgcccggtactgctggctgccccggctggtcagggggcgcgaancgggncatgaagaagtgcaggcnagggaagggnancatgttcaccgccagcttgcgcaggtctgcgttcagctggcccgggaagcgcaggcaggtggtgaccccgctcatggtng

SEQ ID NO: 660037 - DNA, 666 bp, Homo sapiens
  misc_feature (279)..(279): n is a, c, g, or t
cctgtctctgccagttccactgcccccttgatctttgaaggagtcctcaggtcccctcgcagtcataaggatgttttgcaactttccagaatctggccctagaaattagggcatctatttccttgtattgtagtagaggttaagcattgctgtgagctttatcagataagagaccgagagaagtaagctgggtcttgtaaattccttgggtgttggtgcgaataagcagtggcaatttgaacaaggaagaggagcaaagagggaatgagtcgtttgatngggcgtgcggcgtgattttggctccgttaaggcggggtttattgggtcccaaagtttgggggatattctaagcggccagcatcgagacctgccgaagtactggttgttgtatttagaccggactggataatctactttgggatatttgttttcctgtcaacatcttggaaagttattacgttaatttagaagaagtactcatgcagatatatatatatgatactttcttcccaagatgcctttttgtgtaatgagacggtcttctatggggatctgcacctccatccttgcatcttgttagacatagctgtttttgctgtgagtcgggtatagagtgggctctacgcggaggttagttaatcagaagtttgtttacagcgttcacga

SEQ ID NO: 660038 - DNA, 580 bp, Homo sapiens
  misc_feature (189)..(189): n is a, c, g, or t
  misc_feature (220)..(220): n is a, c, g, or t
  misc_feature (281)..(281): n is a, c, g, or t
  misc_feature (296)..(296): n is a, c, g, or t
  misc_feature (424)..(424): n is a, c, g, or t
  misc_feature (429)..(429): n is a, c, g, or t
  misc_feature (434)..(435): n is a, c, g, or t
  misc_feature (437)..(437): n is a, c, g, or t
  misc_feature (439)..(439): n is a, c, g, or t
  misc_feature (446)..(446): n is a, c, g, or t
  misc_feature (450)..(451): n is a, c, g, or t
  misc_feature (453)..(453): n is a, c, g, or t
  misc_feature (465)..(466): n is a, c, g, or t
  misc_feature (476)..(476): n is a, c, g, or t
  misc_feature (482)..(482): n is a, c, g, or t
  misc_feature (484)..(484): n is a, c, g, or t
  misc_feature (486)..(487): n is a, c, g, or t
  misc_feature (490)..(490): n is a, c, g, or t
  misc_feature (492)..(492): n is a, c, g, or t
  misc_feature (504)..(505): n is a, c, g, or t
  misc_feature (510)..(510): n is a, c, g, or t
  misc_feature (516)..(516): n is a, c, g, or t
  misc_feature (518)..(518): n is a, c, g, or t
acacccaggacagctatgactataatgcttatgcttctcctttgaagcaacacgaatgttgtctaaatcatcccaattctgcaagtggcataaaatctgattttcattcagttcagcaactgatcctcaaaaacactttgctgaatgcaaaaaaaaaaaaagaaaaaaagaaaaagaaaaaaagtgatngtccaggtaatatcttcccagcaaacagcanttaaagaaacccccagcttttttttctgagaaagagtcttactctgtggcccaggtgcaanggtgtgatcggcaanggtgcgatctcggctcactgcaacctccgcctcccaggttcaagcaattctcctatctcatcctcctgagtatctgggattacaggcttttgccaccacgcccggctaattttggtatttttaagtanagatngggtnncncnatgttgnccanncngttctcgaactnntgacctcagntgatcnancnnctngncctcccaaagtnntgggnttacangngtgagccagcgtccctggcagaacttttttctgtgcttatattttaattaaaaaaactttca

SEQ ID NO: 660039 - DNA, 126 bp, Homo sapiens
tatatctatggtcaagctgatcccttcttcttttcttttctttttttcttagttattatttaattttgttttgttttgggttttttttgagacaggttctcgctccgtcgcccaggctggaatgca

SEQ ID NO: 660040 - DNA, 637 bp, Homo sapiens
  misc_feature (169)..(169): n is a, c, g, or t
  misc_feature (244)..(244): n is a, c, g, or t
  misc_feature (261)..(261): n is a, c, g, or t
  misc_feature (338)..(338): n is a, c, g, or t
  misc_feature (346)..(346): n is a, c, g, or t
  misc_feature (423)..(423): n is a, c, g, or t
  misc_feature (444)..(444): n is a, c, g, or t
  misc_feature (446)..(446): n is a, c, g, or t
  misc_feature (473)..(474): n is a, c, g, or t
  misc_feature (520)..(520): n is a, c, g, or t
  misc_feature (524)..(524): n is a, c, g, or t
  misc_feature (547)..(547): n is a, c, g, or t
  misc_feature (551)..(551): n is a, c, g, or t
  misc_feature (560)..(560): n is a, c, g, or t
  misc_feature (572)..(572): n is a, c, g, or t
  misc_feature (604)..(604): n is a, c, g, or t
  misc_feature (617)..(617): n is a, c, g, or t
  misc_feature (624)..(624): n is a, c, g, or t
  misc_feature (630)..(630): n is a, c, g, or t
ttctttttggggaaaaacagattccagatgggcatgggtgttctattgacccccgggagggatgggggggccccataaatgattttcttaaaggagggttaagaaaggaaaaaatgtaacaaaggtggcaattattttggatctatcccctgtaatcaaaaaggggttntgcttgtcatccacacaacaccaggacttaagacaaatgggacggatgtcatcttgagctcttcatttattttgnctggatttatttggagnggaggcattgtttttaagaaaaacatgtcatgtaggttgtctaaaaataaaaggcatttaaactcatttgagagaangccttttngtttaaggcatatttaaactaaattgatcctgtagtgttcctggagaagctagagcctgattgtaggctactactcntcaattaacttttccagtggngnctacttttggggctggaatataaaaannaatcaaaggttttgtttttgggttgcaataaagggaaagcccatgntcanagcagggccaacatttgaagggngganccttacccntttcttcccctncaacggaagtagttaactggaagagattcccnagagaataaaaanagactcnttcagnggaagca

SEQ ID NO: 660041 - DNA, 1078 bp, Homo sapiens
  misc_feature (273)..(273): n is a, c, g, or t
cgcctgacgtgaggtaggtgagtgctcggtcgccacctatcactaggaggtatgcttatacaccttctcgatgatgcacctgcctcgtcagtaatcactcttgccattactcgtggcatgtccgtaacctctcgtggtactgcactcgttgtccgtgaagctaggtctagcaagcaatgatcgtaccttatagtacttatcgctattcttcacgaacgctctgaggaacctagagaactcgtctgcagctagtcctgctctcggccagtacanttgctctgaaatcctcgatcagcctcgtcgccagactctcataactgacagtccatctgacaatatagcgaggaccgagtggatcatattggacatctcctttccgcatgtaccgcaattgcaacacgtcagacgatttggccaccacagattggtggtagcttgtaggcctacaccgaatgtagacaccctgagcgtaccccgagggggatcgtacaatcctgtgcaattcgtccccatatacattaccttttcgcacctcacttgacctgttcgcgtatcgacatcacaaaggggcccgatccccttggcagagaactacgcgtgtggaacccgttccgacttccacctgcgtgaagggtatccctattctacctcccgcatgttttggacaagtgacacccctatcgattcttcgggtgagtatagggtagcatcgttgtaggcagtttccatgcaacacgaaatgccgcctctacgacgccaacccataccaggtagcaatgttctctgctgtgcccccccacgctaatattttaacgttgcccctcttattagaataaaagccacgtaggttggccagatttgaacacccctgaggtaatctcgcttcggtaacacaatcgccaaagaaatccccaatcgtttttgtccgaaacaccaggcgcttaataaactggataccctggagtgggggattaataacaataagaccgggtaccgaaaactaggcgttgcgtggaaaacaatttcgtatgctaggccaaaggcgagaaaggcccatagggatggctctcaaccatgg

SEQ ID NO: 660042 - DNA, 224 bp, Homo sapiens
ggttctgttctgctcagctccgaagtagctgggatacaggcgcccgccgcacacccagctagtttttgtattttagtacagacggggtttcaccatgttggccaggctggtctcgaactcctgaccttgtgatccgactccctcggcctctcaaagtgctaggattacaggcaggagccaccgcgcctggccaggtttttcttaaactggcatttgaacatctg

SEQ ID NO: 660043 - DNA, 886 bp, Homo sapiens
  misc_feature (722)..(722): n is a, c, g, or t
gggaaacgtccagaaccccgaaatgtggagaaaacaaccttcttttcacgggggcgtggcccgccggttgcagtacgcgaaattggcaaaatgatgtaaacagggaagttcggcagatttcagttcattgtaaacttgccaagggatccgcccacagacacgagagagctgctttgggacagtgaattactcttcttttgagacggtctaatgatgcctgggtggtgccttcgtaggatggtcgtcacacctgaacaagggggtccctggccccaggccccatgctttactgggccctgttctgtccctcttctggcatcatctcccatggagaaaagaatgtgttgaagccaagaagatgctccccccgcaagaatatcatctctgctagaacaggggctggagtgtaacggcatgatctcggctcactgcaccctcgacttcctggattcaggtgatcccctcacctcagcctccctagtagctggtgtgtccggaattggtgggttcttggtctcactgacttcaagaatgaagccgtggaccctcgcggtgagtgttacagttcttaaaggtggcgtgtccggagtttgttccttctgatgttcagatgtgttcggagtttcttccttctggtgggtttgtggtctcgctggctcaggagtgaagctgcagaccttcgcggtgagtgttacagctcttaaggcagcgcgtctcaagtngttcattcctcccgggggggttcgtggtctcattggcttcagcagtgaagctgcagaccttcgtggtgagtgttacagctcataaaggcagtgtggaacccaaagagtgagcagcagcaagatttattgcaaagaaagacaaaggtttcacagtattggaaggg

SEQ ID NO: 660044 - DNA, 208 bp, Homo sapiens
agtcatacgcgaaagttaatcaaggtcatacacgacattcacaaaagaaaagtcaaaaatcatatgatcatctcaatagatgcagaaaaagcatttggacaaagtccaacatccattcatgatcaagaccctcgccaaagtgggtatagagggaacactcctgaacatgatcatagtaacttaggacaaacccacatcaaagataatc

SEQ ID NO: 660045 - DNA, 628 bp, Homo sapiens
cctgcgcctgcgcggagctggagtcggctgggccgcagcgctggagaccggcggttgccgtggggaccggtcgggcccctccctcctccggtcccccgccccaggccttccccaccgagacgcgccggggacctggggcgagtgcagccggtgacccggcgagagggcggcgccgctcccaagatgtcgcagacggccatgtccgaaacctacgattatggttaaggttcttggttattggaaatgcaggaacttggcaaatcttgcttacttcatcagttattgaaaaaaaattcaaaaggatgacgtcagaatcatacaataggagtggaaatatggttcaaagataataaatgtagagtggtaaaatatgtaaagttacagaaatattgggatacagcaaggaccacgaacgatacaggtcctgtgaacgagcaagttattaccgaggggtcggccaggggctactacctcgacgtaatgattttcgccagccgagaaaccttagaatgcgctaacataattgggttagcagattcccgagatgatacgaccagaacaatgtgatcaacgcttgtgggacaagaggacctggaatgcagatcgtgaggtactcacagaagcctca

SEQ ID NO: 660046 - DNA, 456 bp, Homo sapiens
  misc_feature (39)..(39): n is a, c, g, or t
  misc_feature (62)..(62): n is a, c, g, or t
  misc_feature (68)..(69): n is a, c, g, or t
  misc_feature (72)..(72): n is a, c, g, or t
  misc_feature (89)..(89): n is a, c, g, or t
  misc_feature (346)..(346): n is a, c, g, or t
  misc_feature (361)..(361): n is a, c, g, or t
  misc_feature (397)..(397): n is a, c, g, or t
  misc_feature (399)..(399): n is a, c, g, or t
  misc_feature (401)..(401): n is a, c, g, or t
  misc_feature (440)..(440): n is a, c, g, or t
atatatcatggtgcagtgtagttttcatgttttcttganctgttagtttgcatgtgtctccnacaggnnctnttcttatggtaatagtntggacctttagttctaaggagattagaacccggcagctcagattggccctttcctctcttctccctgctcttcagttctcccaactggtcttaggtaaagaaagattaatttgagttgttgggtaggaagagatgggaaggggcaaattctaatggagcgtgatccctagagtggggagatccagggcagccgaacgggtgggcatagccacctcctgggatagaagctttgtagttcatagttcgattagtgtgtncttaggacataggtncagccctacagattagctgggtgaagaaggcaagtntntngacagggcttagtctccaccctcaggcatgggaccattnagggtgaagcctggga

SEQ ID NO: 660047 - DNA, 857 bp, Homo sapiens
cagtcggtcactcctgcttcctctctgcctctgttctagttctcactctgacgtcccgcgtccttttcatttgtctgcttctcgctcccttccgtgtctgtccctcttcctccctcttccctgggcctgttctcgctgtccctgtctttatccttctcatctgcctctttttggctcaccctgtttctcatgccctcccctccgcctttctcacccctctgtcctttggagctcttttggctctgtctcttcattggcctttgtgcactctcaaattctttcatcttcccattcgctgtctgtatttctccataatatatctttcttcctctgtctccgcccacccacatttttctcttccctttctctcttgggggaccctccccaatgctccccttgcccaatccccttttccccttcccgtcttctcatcctccattcccatctttccccagcaattaccagctctgttggtcgcacaacttgtttgacgacgaaaacacagccagttgttcatgcccgtgagagcttcccacacccgtgtttcacatgagctcctggagaacccacacccgccagcagacgaggataacggcaggactcatgctgtccgctggaaaagctgttgatacatacaagacgctggaaaggtcgtggttgccacccagggacccgatgggacccctgtttggtccgctgggacattcgacaaagatttcctttcagatggctccgggggggccaaacctgctaattatggaacgcctcgagtggcatctttgttcccatgggcacaactggtcatgcgccctttgtgcagtacatggtctgtcccctctgctggtttggaaaatgcc

SEQ ID NO: 660048 - DNA, 425 bp, Homo sapiens
cccagcatctagatagctatgttaaggacacttaaataactcaagctaacacagagaaggacattcagaattctatcagcataatttaacaaagagattgaaataataaaaaagaacctagcagaaattctggagttagaaaatgcagttgaaagactgaagaatgtgtgttttttaatagctgaattgatcaagaagaagaaagaattggtgagcttcaagacaagctatttataagagacaaaataataaagaatgaaacatgcctagaagactctagaaaaatgcctcaaaagggcaaatctaagagttattgaccataaagaagtggtagagagaagtagaggtagaaagtttattcaaaaggaaagtaacagagaacttctgagacctagagagagatatcaatatctataactttttaa

SEQ ID NO: 660049 - DNA, 153 bp, Homo sapiens
ctatcatagaacttagcatatagtgtgaaatatatttgggtcatatatctgagaaggctattaggtctcacaaacaagggagcatgtttattcatcactgataagtacctgtcacttagtagatgcttagtaaatgttcacctgaaatgggtc

SEQ ID NO: 660050 - DNA, 150 bp, Homo sapiens
attgaagactcacaatgactttaccaaaagagtagttactaaaacatctacttgaaaatacacattatgactgactcttagagcccatgaggctacaagcatttcaatctattagaactcagtgatttcctaggcagcaggagaataact

SEQ ID NO: 660051 - DNA, 383 bp, Homo sapiens
tggtgactgagtgattcaaattagagtacagcaagtggtctctgatttcgtataagtacagccacagaagtgtgaaagttctgagcttccaggaaccatagaagtcctctactccagaacacagagaccttggtcagctctgacttactctgtgacacaagtatatatgtgcagactccatgctagcactagggacaccttgaccaccaacacaaggttcctcccatcagcaaacttacagataggggctaatgaaagtctagatcccaagcatcttgactccacagcacagtaccctaaaaatctcattctaaattgtgcttaataacacagtatatgggaacaccccctctatatacagagtgcgatgtgtgcctaaggcc

SEQ ID NO: 660052 - DNA, 154 bp, Homo sapiens
gtcagaaagcatgcgccgcatggccttggggcagttgctgtagattttgctgaggtccggggacaggatagccattgcccaccataatagataatctgggtcacggcagccaatgtggctgtaaggcagtgagccagtcatatgctcgtagagc

SEQ ID NO: 660053 - DNA, 1088 bp, Homo sapiens
ggacccactgttgattcctaagttgtgggtgggtgatatcagtggcctcagatgcctgcataaccctcacctgtttatgactgatctacatgtaaccttcctcaggttgagagtgagctgctgtgagccagtgacaactactgcatacaacttgctgttacttgaaattcgtgtgctatgtatggtagcacaggagtaggcgggcgggggtaaaggtgtgggcactaggtaagtgggtggcaaccgagatacttagggaaccattggtgctgaccttatgcctggtcacctgcactgtgccataggccaagtgaatgttacatcttgagaacctgagaccatggagagtggcgaccaacatccctgaggagaaaggtgtggccaaaggaaaatcctgcatggatcctgcatccttcacccttcccatacatttcacttgggctaatgatgtaagccaccccttgaggtaggggatggtgtggagatagctgcaagaaaaccctgataacagacatcccaggacagcactaagggagttgagggtaactcataggagcatcaggactaagggagagaaggtggagtagaacaagaagtgcccgggaatccagccgtgtaagaactcaaccaagggaccccaggacagcaatgagctgattgaagaccaacatgatacttggagaaactagggacgacgaagagagaaaacaatcaaaagatcaaggacatcatggttgacacgaacataaaatagaacacaaaagaaggagaagacgggaaaagacaaaggggggagaggtcgacatgggggatgaaaagacacatagagaggatgtcacaaggggaagagtacacaatgaggatacatcacaggaggagacagatatagagcgtgaaacacaccccgtagagagcagaaaaaaggaacaggagagggaggaaaaaaaccaaaggaaggataatgaactcggagatcaccctgctcgcgtcccctcaggagaagaaagagacagaaaaaaagaacatagaaaaaaaaaataggagaaagaaagaaacagaaaaacaaagagagagaagtaaagaaaaaa

SEQ ID NO: 660054 - DNA, 921 bp, Homo sapiens
gctggacttggtcttggttccagaacctgacgacccggcgacggcgacgtctcttttgactaaaagacagtgtgcagtgctccagtcctaggagctctacggggaccgcctcccgcgccgtgcaaccatgcccaacttctctggcaactggaaaatcatccgatcggaaaactctcgaggaattgctcacacagtgctgggggtgaatgtgatgctgatggaatgattgctgtgggctgctagtcgtccaagccagcagtggagatcaaagcaggagggagacatctttctacatcaaaacctccaccatccgtgcgcacctaggcagagattaagcttcaaggttggggaggagtttgaggagcagactgtggatgggaggccctgtaagagcctggtgaaatgggagagtgacccaatagaatggtctgtgagcacaagctcctgaagggagagggcccctaagagcatcgttggaccagagaactgagcaacgtatggggaactgatcctgaacatgagggcggctgacgtcgtgtgcaccaggtctacagtccggaacagtgagatgggcacaggtagaaccgtggcgaagccacggtgtgcatgctcaccggccatgcttgaagtgtgcgaccttggttggacgggatcttactagaggttaacggtgagtgacagattaccttcaacgaactgctgggaggagctttgggactgacgctggaagggatagtcgttccttggaccttctggacgaatcctggtaaagtagccatgagattggtgcaaagatgccgatatgcttcaggtctctcggggatactagactgcttctggccggaataccaagcggacggtcgggccgggcttcagctctggcgcgggacgtgccgacattccctttggatgtcgtagaca

SEQ ID NO: 660055 - DNA, 147 bp, Homo sapiens
cggacaatgatgtcacgtctctatgtgtctctcactattcgtgtttgtgttgtttctaggttggctcaatggtaagggtgggattgaattgctgagccccctagtgtaacagtcttctgcccttgtgggtaaagagtggagcggtgg

SEQ ID NO: 660056 - DNA, 706 bp, Homo sapiens
gcaggaaccgtggctgctgagcttaacctggtgtggtggctatgaccttgcttctgcctcggttgaaaggacatcgcgtatcttcctgccgcagaacacacttccggtctcggcccggacgggatgttgctgctgctgctgctgctacccctctgttgggcagtagaagttaagagaccccggggcgtttccctcagcaaccatcacttctatgacgaatctaaacctttcacgtgtttggatggcacagccactatccccttcgatcaggtgaacgatgattactgcgactgtaaggatggttctgatgagcctggcacagctgcgtgtcccaatggcagctttcactgcaccaacactgggtataagcctttgtacatcctctctagccgggtcaatgatggggtgtgtgactgctgtgatgggacggacgagtacaacagtggcaccgtctgtgagaacacctgcagagagaagggtcgcaaggaaaaagagtccctgcagcagctggccgaggtcacccgagaagggttccgtctcaagaagatactcatgaggagtggaagacagctcgggaagaaaagcagagtaagcttcttgagcttcaggctggaaagaagtctctggaagaccaggtagaaacgctgcggacagcgaaaagaggaagcagagaggccagagaaggaggccaaggaccagcaccgga

SEQ ID NO: 660057 - DNA, 695 bp, Homo sapiens
  misc_feature (644)..(644): n is a, c, g, or t
  misc_feature (659)..(659): n is a, c, g, or t
  misc_feature (668)..(668): n is a, c, g, or t
  misc_feature (679)..(679): n is a, c, g, or t
  misc_feature (681)..(681): n is a, c, g, or t
ctccccccccagacgaggggggggggtttttttttggggggggggggtggttctttttttctccccccccaaaaaaaaaaagggggttataagaaagaaaaaaaaaaaattttcgtgtccctcttctttttttttttttgggaaagaaaaaaaaaaaccatcctttttttttttttttttttccagggggggggaggaaatttttttttaaaaaacacctccccttcaaaaaaaaaagaggggggggctttttttttttttttttttttacccaccccccccccgtgttggggggttgcggacaacaaaaagaagagagggcgccccggggcgccctccttttttttggggggggagagaggcgccaaaacccccccccccccgggtttttttttttttttgcctctttttagaacccggtttatagcgacaaaatttctccgggggggggggggggcgtttttatacccccgccccgggcgggcccaaaattattttttttgttttttttaaaaagcaccctgtgggtgggttttttcccctccccccccacaaaaggcccttgtggttttttcaagagccaagtgggcccacccaaattgcttatcccagagtttccatattaaatcctccccatccaccantttccagcagggtcnaatttactnctatttttaancnaccaggccagggct

SEQ ID NO: 660058 - DNA, 215 bp, Homo sapiens
cgcgtgacttccgcgcaggataagcagttagccaattttgagacattgagaaatgaagtgtattgatagtatacgagctatgatcattagcgtcacagatgtgctgatgtgttatactcaagatggcccggagcagaggatttatctgagattatgtgatcttcgtcctcaaactgatatgaatgggctgtttcacagcgataatctgtctgtgc

SEQ ID NO: 660059 - DNA, 235 bp, Homo sapiens
taactacatgatgtcaaggccgtggcagtggtgggcgggtgcactctggcttgatgtggaactgtaataatatggggaactcagcaagctggagttggggaagctgccagtgcctcgcatgtaggaggagtaggtgggtgtggccatagtgcatagccatgagtattcacttccgtgttggtggcacacatggggagagtgcctgtgagtgtgacagggcatcacatgcatgggc

SEQ ID NO: 660060 - DNA, 124 bp, Homo sapiens
ccatgtagtcaactccccagtgggctgacagctagggctgcacctcatgtgggtctcctgttcccagtgctacctgcatagcggcctccttcccatgctctggggcagcgcatgaggggtatgc

SEQ ID NO: 660061 - DNA, 4393 bp, Homo sapiens
  misc_feature (4224)..(4224): n is a, c, g, or t
cctgaccagtgggtcactctcatggcagatgcctgggcagatttctgaagtggagcaagagaaatcttctcttcttcacctgcttcagggaggcatcaaagtgccaaacaggagcaggagacgcggagctcggagcgctgagctgacctgccggagccgggcgtgggctgcagcctcggagctcccggaacgatggtgaagttggggaacaatttcgcagagaagggcaccaagcagccgctgctggaggatggcttcgacaccattcccctgatgacgcccctcgatgtcaatcagctgcagttcccgcccccggataaggtggtcgtgaaaactaagaccgagtatgaacctgaccgcaagaaagggaaagcacgtcctccccaaattgctgagttcaccgtcagcatcacggagggtgtcaccgagaggtttaaggtctccgtgttggtcctcttcgccctggccttcctcacctgcgtcgtcttcctggttgtctacaaggtgtacaagtatgaccgcgcctgccccgatgggttcgtcctcaagaacacccagtgcatcccagaaggcttggagagctactacgcggagcaagactccagtgcccgggagaaattttacacagtcataaaccactacaacctggccaagcagagcatcacgcgctccgtatcgccctggatgtcagttctgtcagaagagaagctgtccgagcaggagactgaagcggctgagaagtcagcttagcgggatgggcaagttccttacaatgtgtcacttgcaaataacaaagggactttgagggacatttcattaaatataattactgatactttagaggttactcatttacggtgcaattgcttctgtttgctaatgctgctttgcaaataaaacttgctgccgaccacccacgggcataaaatcaagtgcatttcagcattgcctaaagagctctgacaccacttttcatgttaagatcttcatttagctcctttactgggatttattggatgctgtaaaaaaataaatttacactggatatgcgaagggtttggatctcagataaatgcattttgtggaattgattttctgaaccgaccctgctgtctgcaaaccttcctccatagccatatctagagtgatctctcgctgtgctaagagcaagcctacttcgcatttcttcctcggccatcagcgggtaacagtgctgactgctgccaaggtgcactgtagtaagtaagtggcatagagaacgaggaaaaagacccccccacccctccctgtgctgactcctgagtcggggtgggacggccctgcaatgtggcaggctcggtgtggattgactactccctcccctctgactctggcatcttggtaaggagggaggggcaccacccatctgggtggagacagctggggtttgctccagtgtgtgtagactggcagagcatgtgagggagagggctgggaagagacggccctgggcccgtgaggtgcagaactctccctgcaggtagtctgtctgctctgtgatgtgctgataggaaagagcccccactggccctctggttcacttctattatgaataaatttgcaccaatagccccattagtttttaaagaaatgagctgggtgggaaaagtggaaatgtaatttctggtaagcttgagctactttaatttttattctatgaaactgatatcccttgatgtgggaaacaggcaggaaaggctgtggggtgggggtgggggactggtgtggcaccgtgcaaacaaaatgacaaatttcaactcacaatctttgtaagaaaattgttccagtttgaatcttgatattaaagtttatgtttacaaaactgccagttagatgaactaagtgtgtaaaacaaatagaaaagacattcgcagacatttcttctatgttattgaatgtgttgtttctggtgtacgtgtcaaaagtttcagttttttagatcagaaataaacgacaaatagtgtgagatgtgttgtgaacaggcatggtgaccgtggtcagcgccactcttgtttcctgaaatgtgcttctaagacagaaaatgtattttctcatcaagggtgtctggagacacagaccgtgaccttggcgcagcggtgtgcatcagaggcgtgtgctgagaagggtggtgttaagctgtggaaaatgactcaagagcaataaatcagtgccaaagcttccctgcgcatctgaatagacacaagtgaagcccgtgtgcgcacagtgcagaggccgagcctgtatttccaggtagacgtggactttattgactgtgaattcatttacatgtaacttctgacatttcactctgtgcaaataaagaacatgaggatacctgtgctgcccagtggactgtctgtacacacacgcatttcaccaggcgcagtgcagactgtctcatgcccatgtgggcgctgggatgcttcctgtacagatgtctcatgccttcagttacacataggtgttcctgtttacagttcctggaggtcagaagcacaggcacgagagaagcaggcccgttcttccgtggcccacttcttcctttgaacaaaggctccttggacccagtggcgggaaactggccctcccacaccccctgcctgttctgggggcagcagtctttggaggagtaatgccaggcagcccctcactgagggccccagtctcccctgcatttcttccctgattgattgataggaggtggctgggctgccactgaatttgtcaacttagactcattgacaacacattaaggggctgtaattatatttattagattaacaaggcagatgtgaattttctcttctataatccagtaagtctgtgtattcgttgactcagacagacaagaagccacaaggaaacaaagaagtaatcatttgttgagagacgttattaactatgatcttccctgaagctaccgggatgggaaaggtcagtgtcttcctttgaaccctgagacaattaggggctcttgaggcctgctgtgcccctgctgccaaggcagcctcaagttcaaggagcagctaatcacccactcctgcattcagtctgtcttgcctgatgagggctacgcaggctgcctcccattggtgtgcactgtttcctttttcagctgctaaatggctgaacaccatcggcctggggtatccctttttggggaatacgtctgtctgtctgaactcctttcccttcaaatggcactgtgataaaatctggtcataccatgctccagcactggaagtacatgaaagcacgcagtctgtgagtgcccatgaggactctcgtgctgggcccccgtggccctggctagctgtcgtaccagtcgaggaagagcaaggagaaggagcacatcacgaggaagaagaggatccacacgcggaagccagcgttgtttttaatggcctctcttatgtcttcgttgccttccttgatattttcagttgcccccacaactaactggtgaatgctgtcaatctcagcttcctgttgcaaaaccttttccgtgaatatctcttggagtctggaaatctcaaccactctcccttcgatttgcctcacttcatcaaacaagctgttcatttcaccaattagtcgctgattttcctgttcaaacatttgtatttcttctggggataactcatcttcgcctttgccatctccccacgttcccaattcaggttgtgtttcagccaaaattttttctggacgttcttcagtggcagggttttcttcagagtcttttgaaggactctgtgaaactttctcagaagatgtggattctcttgtctttgtatttggttctggttccagcttagataatcttttcttatccaccactcttttaactcggatggctctctgttctgagtaaagtttacatactcttttcaagtaatcttcaatgaaatccaaaacagcggtcctgtgctccttcacttgctgggaatgtatctccttgtgagcttctgttcgtagttgctgaattgcttctgaacaggtcctcatgaatatctgggcatcctggtctatctggtctcgttctgtgtctgtcatcctcccatattcagacatggtatggctataagcattaatataatctttcctgtgttccagaagaaaatctctcagtttgccaatgtgagaaatcacttcgcgggcccggctggagaagtcgcccttggnccgggggctccggcggaacagcctcgtccaacggctgccatcgaccccgccgcccaccagccactcccagcgaccgttgttccgcgtcttcacggtcattgacgctggcccggaatagcagcgtgatctccaccgccatagcgacccgcaccctcagccccacactagg

SEQ ID NO: 660062 - DNA, 124 bp, Homo sapiens
attcagacacttggcgatgctgacacatgttggcggtggctgtcagcgtcctccgcagctgatgggtctcgttgtgccaaggagcggcacaggaggtcactggcgtgcccggtcgctgtctggt

SEQ ID NO: 660063 - DNA, 3699 bp, Homo sapiens
  misc_feature (15)..(15): n is a, c, g, or t
  misc_feature (3530)..(3530): n is a, c, g, or t
ccggggtggcgcacncgcagccctcccgctccgggcgccctccgccgctccgagaccccctgggggcgcgtcctctcccgctcccctgttccctcccccggctcagggcgggcgcgtggtcccaggggaggctcccgcccagccccgcactcctttgtgcggccgggcgggcgctgcgtcaaggtggaggcgcggccacacgcgcgcacccacccgcgcgcacccagcccccgggagaggcaggaagggaggcggcggcgcgaggaggagggagcggccgtggagcccaatcgttcgctccccttcccgggtccgcgcgcggcgccgcctccgccattgctgcgagcaggagcaggagacgcggagctcggagcgctgagctgacctgccggagccgggcgtgggctgcagcctcggagctcccggaacgatggtgaagttggggaacaatttcgcagagaagggcaccaagcagccgctgctggaggatggcttcgacaccattcccctgatgacgcccctcgatgtcaatcagctgcagttcccgcccccggataaggtggtcgtgaaaactaagaccgagtatgaacctgaccgcaagaaagggaaagcacgtcctccccaaattgctgagttcaccgtcagcatcacggagggtgtcaccgagaggtttaaggtctccgtgttggtcctcttcgccctggccttcctcacctgcgtcgtcttcctggttgtctacaaggtgtacaagtatgaccgcgcctgccccgatgggttcgtcctcaagaacacccagtgcatcccagaaggcttggagagctactacgcggagcaagactccagtgcccgggagaaattttacacagtcataaaccactacaacctggccaagcagagcatcacgcgctccgtatcgccctggatgtcagttctgtcagaagagaagctgtccgagcaggagactgaagcggctgagaagtcagcttagcgggatgggcaagttccttacaatgtgtcacttgcaaataacaaagggactttgagggacatttcattaaatataattactgatactttagaggttactcatttacggtgcaattgcttctgtttgctaatgctgctttgcaaataaaacttgctgccgaccacccacgggcataaaatcaagtgcatttcagcattgcctaaagagctctgacaccacttttcatgttaagatcttcatttagctcctttactgggatttattggatgctgtaaaaaaataaatttacactggatatgcgaagggtttggatctcagataaatgcattttgtggaattgattttctgaaccgaccctgctgtctgcaaaccttcctccatagccatatctagagtgatctctcgctgtgctaagagcaagcctacttcgcatttcttcctcggccatcagcggtgtgcatcagaggcgtgtgctgagaagggtggtgttaagctgtggaaaatgactcaagagcaataaatcagtgccaaagcttccctgcgcatctgaatagacacaagtgaagcccgtgtgcgcacagtgcagaggccgagcctgtatttccaggtagacgtggactttattgactgtgaattcatttacatgtaacttctgacatttcactctgtgcaaataaagaacatgaggatacctgtgctgcccagtggactgtctgtacacacacgcatttcaccaggcgcagtgcagactgtctcatgcccatgtgggcgctgggatgcttcctgtacagatgtctcatgccttcagttacacataggtgttcctgtttacagttcctggaggtcagaagcacaggcacgagagaagcaggcccgttcttccgtggcccacttcttcctttgaacaaaggctccttggacccagtggcgggaaactggccctcccacaccccctgcctgttctgggggcagcagtctttggaggagtaatgccaggcagcccctcactgagggccccagtctcccctgcatttcttccctgattgattgataggaggtggctgggctgccactgaatttgtcaacttagactcattgacaacacattaaggggctgtaattatatttattagattaacaaggcagatgtgaattttctcttctataatccagtaagtctgtgtattcgttgactcagacagacaagaagccacaaggaaacaaagaagtaatcatttgttgagagacgttattaactatgatcttccctgaagctaccgggatgggaaaggtcagtgtcttcctttgaaccctgagacaattaggggctcttgaggcctgctgtgcccctgctgccaaggcagcctcaagttcaaggagcagctaatcacccactcctgcattcagtctgtcttgcctgatgagggctacgcaggctgcctcccattggtgtgcactgtttcctttttcagctgctaaatggctgaacaccatcggcctggggtatccctttttggggaatacgtctgtctgtctgaactcctttcccttcaaatggcactgtgataaaatctggtcataccatgctccagcactggaagtacatgaaagcacgcagtctgtgagtgcccatgaggactctcgtgctgggcccccgtggccctggctagctgtcgtaccagtcgaggaagagcaaggagaaggagcacatcacgaggaagaagaggatccacacgcggaagccagcgttgtttttaatggcctctcttatgtcttcgttgccttccttgatattttcagttgcccccacaactaactggtgaatgctgtcaatctcagcttcctgttgcaaaaccttttccgtgaatatctcttggagtctggaaatctcaaccactctcccttcgatttgcctcacttcatcaaacaagctgttcatttcaccaattagtcgctgattttcctgttcaaacatttgtatttcttctggggataactcatcttcgcctttgccatctccccacgttcccaattcaggttgtgtttcagccaaaattttttctggacgttcttcagtggcagggttttcttcagagtcttttgaaggactctgtgaaactttctcagaagatgtggattctcttgtctttgtatttggttctggttccagcttagataatcttttcttatccaccactcttttaactcggatggctctctgttctgagtaaagtttacatactcttttcaagtaatcttcaatgaaatccaaaacagcggtcctgtgctccttcacttgctgggaatgtatctccttgtgagcttctgttcgtagttgctgaattgcttctgaacaggtcctcatgaatatctgggcatcctggtctatctggtctcgttctgtgtctgtcatcctcccatattcagacatggtatggctataagcattaatataatctttcctgtgttccagaagaaaatctctcagtttgccaatgtgagaaatcacttcgcgggcccggctggagaagtcgcccttggnccgggggctccggcggaacagcctcgtccaacggctgccatcgaccccgccgcccaccagccactcccagcgaccgttgttccgcgtcttcacggtcattgacgctggcccggaatagcagcgtgatctccaccgccatagcgacccgcaccctcagccccacactagg

SEQ ID NO: 660064 - DNA, 232 bp, Homo sapiens
  misc_feature (6)..(6): n is a, c, g, or t
  misc_feature (21)..(21): n is a, c, g, or t
  misc_feature (56)..(57): n is a, c, g, or t
  misc_feature (65)..(66): n is a, c, g, or t
  misc_feature (73)..(73): n is a, c, g, or t
  misc_feature (100)..(100): n is a, c, g, or t
  misc_feature (111)..(111): n is a, c, g, or t
  misc_feature (195)..(195): n is a, c, g, or t
aaaganattttcatggagtgnaagacataaagtggagaccaagatgaagttcaccnnctgatganncttccanagagattagctcacctttctcctaggnaattataattngggaagggggaaggccacttactgccctctgtaaaagatgttaacatttctagttttcttttagtgtgaatttttaaaatagcngttattcaaggttttagaacttaataaatacctagtc

SEQ ID NO: 660065 - DNA, 4334 bp, Homo sapiens
  misc_feature (4165)..(4165): n is a, c, g, or t
cccctccccaacccagcactaaggagcaccctgctctggtctccgccaccacccagcgcctcctggacccatccccccaaacccttgaacgtcctcaggacccccaggctgcagcctcggagctcccggaacgatggtgaagttggggaacaatttcgcagagaagggcaccaagcagccgctgctggaggatggcttcgacaccattcccctgatgacgcccctcgatgtcaatcagctgcagttcccgcccccggataaggtggtcgtgaaaactaagaccgagtatgaacctgaccgcaagaaagggaaagcacgtcctccccaaattgctgagttcaccgtcagcatcacggagggtgtcaccgagaggtttaaggtctccgtgttggtcctcttcgccctggccttcctcacctgcgtcgtcttcctggttgtctacaaggtgtacaagtatgaccgcgcctgccccgatgggttcgtcctcaagaacacccagtgcatcccagaaggcttggagagctactacgcggagcaagactccagtgcccgggagaaattttacacagtcataaaccactacaacctggccaagcagagcatcacgcgctccgtatcgccctggatgtcagttctgtcagaagagaagctgtccgagcaggagactgaagcggctgagaagtcagcttagcgggatgggcaagttccttacaatgtgtcacttgcaaataacaaagggactttgagggacatttcattaaatataattactgatactttagaggttactcatttacggtgcaattgcttctgtttgctaatgctgctttgcaaataaaacttgctgccgaccacccacgggcataaaatcaagtgcatttcagcattgcctaaagagctctgacaccacttttcatgttaagatcttcatttagctcctttactgggatttattggatgctgtaaaaaaataaatttacactggatatgcgaagggtttggatctcagataaatgcattttgtggaattgattttctgaaccgaccctgctgtctgcaaaccttcctccatagccatatctagagtgatctctcgctgtgctaagagcaagcctacttcgcatttcttcctcggccatcagcgggtaacagtgctgactgctgccaaggtgcactgtagtaagtaagtggcatagagaacgaggaaaaagacccccccacccctccctgtgctgactcctgagtcggggtgggacggccctgcaatgtggcaggctcggtgtggattgactactccctcccctctgactctggcatcttggtaaggagggaggggcaccacccatctgggtggagacagctggggtttgctccagtgtgtgtagactggcagagcatgtgagggagagggctgggaagagacggccctgggcccgtgaggtgcagaactctccctgcaggtagtctgtctgctctgtgatgtgctgataggaaagagcccccactggccctctggttcacttctattatgaataaatttgcaccaatagccccattagtttttaaagaaatgagctgggtgggaaaagtggaaatgtaatttctggtaagcttgagctactttaatttttattctatgaaactgatatcccttgatgtgggaaacaggcaggaaaggctgtggggtgggggtgggggactggtgtggcaccgtgcaaacaaaatgacaaatttcaactcacaatctttgtaagaaaattgttccagtttgaatcttgatattaaagtttatgtttacaaaactgccagttagatgaactaagtgtgtaaaacaaatagaaaagacattcgcagacatttcttctatgttattgaatgtgttgtttctggtgtacgtgtcaaaagtttcagttttttagatcagaaataaacgacaaatagtgtgagatgtgttgtgaacaggcatggtgaccgtggtcagcgccactcttgtttcctgaaatgtgcttctaagacagaaaatgtattttctcatcaagggtgtctggagacacagaccgtgaccttggcgcagcggtgtgcatcagaggcgtgtgctgagaagggtggtgttaagctgtggaaaatgactcaagagcaataaatcagtgccaaagcttccctgcgcatctgaatagacacaagtgaagcccgtgtgcgcacagtgcagaggccgagcctgtatttccaggtagacgtggactttattgactgtgaattcatttacatgtaacttctgacatttcactctgtgcaaataaagaacatgaggatacctgtgctgcccagtggactgtctgtacacacacgcatttcaccaggcgcagtgcagactgtctcatgcccatgtgggcgctgggatgcttcctgtacagatgtctcatgccttcagttacacataggtgttcctgtttacagttcctggaggtcagaagcacaggcacgagagaagcaggcccgttcttccgtggcccacttcttcctttgaacaaaggctccttggacccagtggcgggaaactggccctcccacaccccctgcctgttctgggggcagcagtctttggaggagtaatgccaggcagcccctcactgagggccccagtctcccctgcatttcttccctgattgattgataggaggtggctgggctgccactgaatttgtcaacttagactcattgacaacacattaaggggctgtaattatatttattagattaacaaggcagatgtgaattttctcttctataatccagtaagtctgtgtattcgttgactcagacagacaagaagccacaaggaaacaaagaagtaatcatttgttgagagacgttattaactatgatcttccctgaagctaccgggatgggaaaggtcagtgtcttcctttgaaccctgagacaattaggggctcttgaggcctgctgtgcccctgctgccaaggcagcctcaagttcaaggagcagctaatcacccactcctgcattcagtctgtcttgcctgatgagggctacgcaggctgcctcccattggtgtgcactgtttcctttttcagctgctaaatggctgaacaccatcggcctggggtatccctttttggggaatacgtctgtctgtctgaactcctttcccttcaaatggcactgtgataaaatctggtcataccatgctccagcactggaagtacatgaaagcacgcagtctgtgagtgcccatgaggactctcgtgctgggcccccgtggccctggctagctgtcgtaccagtcgaggaagagcaaggagaaggagcacatcacgaggaagaagaggatccacacgcggaagccagcgttgtttttaatggcctctcttatgtcttcgttgccttccttgatattttcagttgcccccacaactaactggtgaatgctgtcaatctcagcttcctgttgcaaaaccttttccgtgaatatctcttggagtctggaaatctcaaccactctcccttcgatttgcctcacttcatcaaacaagctgttcatttcaccaattagtcgctgattttcctgttcaaacatttgtatttcttctggggataactcatcttcgcctttgccatctccccacgttcccaattcaggttgtgtttcagccaaaattttttctggacgttcttcagtggcagggttttcttcagagtcttttgaaggactctgtgaaactttctcagaagatgtggattctcttgtctttgtatttggttctggttccagcttagataatcttttcttatccaccactcttttaactcggatggctctctgttctgagtaaagtttacatactcttttcaagtaatcttcaatgaaatccaaaacagcggtcctgtgctccttcacttgctgggaatgtatctccttgtgagcttctgttcgtagttgctgaattgcttctgaacaggtcctcatgaatatctgggcatcctggtctatctggtctcgttctgtgtctgtcatcctcccatattcagacatggtatggctataagcattaatataatctttcctgtgttccagaagaaaatctctcagtttgccaatgtgagaaatcacttcgcgggcccggctggagaagtcgcccttggnccgggggctccggcggaacagcctcgtccaacggctgccatcgaccccgccgcccaccagccactcccagcgaccgttgttccgcgtcttcacggtcattgacgctggcccggaatagcagcgtgatctccaccgccatagcgacccgcaccctcagccccacactagg

SEQ ID NO: 660066 - DNA, 2611 bp, Homo sapiens
  misc_feature (15)..(15): n is a, c, g, or t
ccggggtggcgcacncgcagccctcccgctccgggcgccctccgccgctccgagaccccctgggggcgcgtcctctcccgctcccctgttccctcccccggctcagggcgggcgcgtggtcccaggggaggctcccgcccagccccgcactcctttgtgcggccgggcgggcgctgcgtcaaggtggaggcgcggccacacgcgcgcacccacccgcgcgcacccagcccccgggagaggcaggaagggaggcggcggcgcgaggaggagggagcggccgtggagcccaatcgttcgctccccttcccgggtccgcgcgcggcgccgcctccgccattgctgcgagcaggagcaggagacgcggagctcggagcgctgagctgacctgccggagccgggcgtgggctgcagcctcggagctcccggaacgatggtgaagttggggaacaatttcgcagagaagggcaccaagcagccgctgctggaggatggcttcgacaccattcccctgatgacgcccctcgatgtcaatcagctgcagttcccgcccccggataaggtggtcgtgaaaactaagaccgagtatgaacctgaccgcaagaaagggaaagcacgtcctccccaaattgctgagttcaccgtcagcatcacggagggtgtcaccgagaggtttaaggtctccgtgttggtcctcttcgccctggccttcctcacctgcgtcgtcttcctggttgtctacaaggtgtacaagtatgaccgcgcctgccccgatgggttcgtcctcaagaacacccagtgcatcccagaaggcttggagagctactacgcggagcaagactccagtgcccgggagaaattttacacagtcataaaccactacaacctggccaagcagagcatcacgcgctccgtatcgccctggatgtcagttctgtcagaagagaagctgtccgagcaggagactgaagcggctgagaagtcagcttagcgggatgggcaagttccttacaatgtgtcacttgcaaataacaaagggactttgagggacatttcattaaatataattactgatactttagaggttactcatttacggtgcaattgcttctgtttgctaatgctgctttgcaaataaaacttgctgccgaccacccacgggcataaaatcaagtgcatttcagcattgcctaaagagctctgacaccacttttcatgttaagatcttcatttagctcctttactgggatttattggatgctgtaaaaaaataaatttacactggatatgcgaagggtttggatctcagataaatgcattttgtggaattgattttctgaaccgaccctgctgtctgcaaaccttcctccatagccatatctagagtgatctctcgctgtgctaagagcaagcctacttcgcatttcttcctcggccatcagcgggtaacagtgctgactgctgccaaggtgcactgtagtaagtaagtggcatagagaacgaggaaaaagacccccccacccctccctgtgctgactcctgagtcggggtgggacggccctgcaatgtggcaggctcggtgtggattgactactccctcccctctgactctggcatcttggtaaggagggaggggcaccacccatctgggtggagacagctggggtttgctccagtgtgtgtagactggcagagcatgtgagggagagggctgggaagagacggccctgggcccgtgaggtgcagaactctccctgcaggtagtctgtctgctctgtgatgtgctgataggaaagagcccccactggccctctggttcacttctattatgaataaatttgcaccaatagccccattagtttttaaagaaatgagctgggtgggaaaagtggaaatgtaatttctggtaagcttgagctactttaatttttattctatgaaactgatatcccttgatgtgggaaacaggcaggaaaggctgtggggtgggggtgggggactggtgtggcaccgtgcaaacaaaatgacaaatttcaactcacaatctttgtaagaaaattgttccagtttgaatcttgatattaaagtttatgtttacaaaactgccagttagatgaactaagtgtgtaaaacaaatagaaaagacattcgcagacatttcttctatgttattgaatgtgttgtttctggtgtacgtgtcaaaagtttcagttttttagatcagaaataaacgacaaatagtgtgagatgtgttgtgaacaggcatggtgaccgtggtcagcgccactcttgtttcctgaaatgtgcttctaagacagaaaatgtattttctcatcaagggtgtctggagacacagaccgtgaccttggcgcagcggtgtgcatcagaggcgtgtgctgagaagggtggtgttaagctgtggaaaatgactcaagagcaataaatcagtgccaaagcttccctgcgcatctgaatagacacaagtgaagcccgtgtgcgcacagtgcagaggccgagcctgtatttccaggtagacgtggactttattgactgtgaattcatttacatgtaacttctgacatttcactctgtgcaaataaagaacatgaggata

SEQ ID NO: 660067 - DNA, 4322 bp, Homo sapiens
  misc_feature (4153)..(4153): n is a, c, g, or t
cccctccccaacccagcactaaggagcaccctgctctggtctccgccaccacccagcgcctcctggacccatccccccaaacccttgaacgtcctcaggacccccaggcaggagcaggagacgcggagctcggagcgctgagctgacctgccggagccgggcgtgggctgcagcctcggagctcccggaacgatggtgaagttggggaacaatttcgcagagaagggcaccaagcagccgctgctggaggatggcttcgacaccattcccctgatgacgcccctcgatgtcaatcagctgcagttcccgcccccaaattgctgagttcaccgtcagcatcacggagggtgtcaccgagaggtttaaggtctccgtgttggtcctcttcgccctggccttcctcacctgcgtcgtcttcctggttgtctacaaggtgtacaagtatgaccgcgcctgccccgatgggttcgtcctcaagaacacccagtgcatcccagaaggcttggagagctactacgcggagcaagactccagtgcccgggagaaattttacacagtcataaaccactacaacctggccaagcagagcatcacgcgctccgtatcgccctggatgtcagttctgtcagaagagaagctgtccgagcaggagactgaagcggctgagaagtcagcttagcgggatgggcaagttccttacaatgtgtcacttgcaaataacaaagggactttgagggacatttcattaaatataattactgatactttagaggttactcatttacggtgcaattgcttctgtttgctaatgctgctttgcaaataaaacttgctgccgaccacccacgggcataaaatcaagtgcatttcagcattgcctaaagagctctgacaccacttttcatgttaagatcttcatttagctcctttactgggatttattggatgctgtaaaaaaataaatttacactggatatgcgaagggtttggatctcagataaatgcattttgtggaattgattttctgaaccgaccctgctgtctgcaaaccttcctccatagccatatctagagtgatctctcgctgtgctaagagcaagcctacttcgcatttcttcctcggccatcagcgggtaacagtgctgactgctgccaaggtgcactgtagtaagtaagtggcatagagaacgaggaaaaagacccccccacccctccctgtgctgactcctgagtcggggtgggacggccctgcaatgtggcaggctcggtgtggattgactactccctcccctctgactctggcatcttggtaaggagggaggggcaccacccatctgggtggagacagctggggtttgctccagtgtgtgtagactggcagagcatgtgagggagagggctgggaagagacggccctgggcccgtgaggtgcagaactctccctgcaggtagtctgtctgctctgtgatgtgctgataggaaagagcccccactggccctctggttcacttctattatgaataaatttgcaccaatagccccattagtttttaaagaaatgagctgggtgggaaaagtggaaatgtaatttctggtaagcttgagctactttaatttttattctatgaaactgatatcccttgatgtgggaaacaggcaggaaaggctgtggggtgggggtgggggactggtgtggcaccgtgcaaacaaaatgacaaatttcaactcacaatctttgtaagaaaattgttccagtttgaatcttgatattaaagtttatgtttacaaaactgccagttagatgaactaagtgtgtaaaacaaatagaaaagacattcgcagacatttcttctatgttattgaatgtgttgtttctggtgtacgtgtcaaaagtttcagttttttagatcagaaataaacgacaaatagtgtgagatgtgttgtgaacaggcatggtgaccgtggtcagcgccactcttgtttcctgaaatgtgcttctaagacagaaaatgtattttctcatcaagggtgtctggagacacagaccgtgaccttggcgcagcggtgtgcatcagaggcgtgtgctgagaagggtggtgttaagctgtggaaaatgactcaagagcaataaatcagtgccaaagcttccctgcgcatctgaatagacacaagtgaagcccgtgtgcgcacagtgcagaggccgagcctgtatttccaggtagacgtggactttattgactgtgaattcatttacatgtaacttctgacatttcactctgtgcaaataaagaacatgaggatacctgtgctgcccagtggactgtctgtacacacacgcatttcaccaggcgcagtgcagactgtctcatgcccatgtgggcgctgggatgcttcctgtacagatgtctcatgccttcagttacacataggtgttcctgtttacagttcctggaggtcagaagcacaggcacgagagaagcaggcccgttcttccgtggcccacttcttcctttgaacaaaggctccttggacccagtggcgggaaactggccctcccacaccccctgcctgttctgggggcagcagtctttggaggagtaatgccaggcagcccctcactgagggccccagtctcccctgcatttcttccctgattgattgataggaggtggctgggctgccactgaatttgtcaacttagactcattgacaacacattaaggggctgtaattatatttattagattaacaaggcagatgtgaattttctcttctataatccagtaagtctgtgtattcgttgactcagacagacaagaagccacaaggaaacaaagaagtaatcatttgttgagagacgttattaactatgatcttccctgaagctaccgggatgggaaaggtcagtgtcttcctttgaaccctgagacaattaggggctcttgaggcctgctgtgcccctgctgccaaggcagcctcaagttcaaggagcagctaatcacccactcctgcattcagtctgtcttgcctgatgagggctacgcaggctgcctcccattggtgtgcactgtttcctttttcagctgctaaatggctgaacaccatcggcctggggtatccctttttggggaatacgtctgtctgtctgaactcctttcccttcaaatggcactgtgataaaatctggtcataccatgctccagcactggaagtacatgaaagcacgcagtctgtgagtgcccatgaggactctcgtgctgggcccccgtggccctggctagctgtcgtaccagtcgaggaagagcaaggagaaggagcacatcacgaggaagaagaggatccacacgcggaagccagcgttgtttttaatggcctctcttatgtcttcgttgccttccttgatattttcagttgcccccacaactaactggtgaatgctgtcaatctcagcttcctgttgcaaaaccttttccgtgaatatctcttggagtctggaaatctcaaccactctcccttcgatttgcctcacttcatcaaacaagctgttcatttcaccaattagtcgctgattttcctgttcaaacatttgtatttcttctggggataactcatcttcgcctttgccatctccccacgttcccaattcaggttgtgtttcagccaaaattttttctggacgttcttcagtggcagggttttcttcagagtcttttgaaggactctgtgaaactttctcagaagatgtggattctcttgtctttgtatttggttctggttccagcttagataatcttttcttatccaccactcttttaactcggatggctctctgttctgagtaaagtttacatactcttttcaagtaatcttcaatgaaatccaaaacagcggtcctgtgctccttcacttgctgggaatgtatctccttgtgagcttctgttcgtagttgctgaattgcttctgaacaggtcctcatgaatatctgggcatcctggtctatctggtctcgttctgtgtctgtcatcctcccatattcagacatggtatggctataagcattaatataatctttcctgtgttccagaagaaaatctctcagtttgccaatgtgagaaatcacttcgcgggcccggctggagaagtcgcccttggnccgggggctccggcggaacagcctcgtccaacggctgccatcgaccccgccgcccaccagccactcccagcgaccgttgttccgcgtcttcacggtcattgacgctggcccggaatagcagcgtgatctccaccgccatagcgacccgcaccctcagccccacactagg

SEQ ID NO: 660068 - DNA, 2243 bp, Homo sapiens
  misc_feature (15)..(15): n is a, c, g, or t
ccggggtggcgcacncgcagccctcccgctccgggcgccctccgccgctccgagaccccctgggggcgcgtcctctcccgctcccctgttccctcccccggctcagggcgggcgcgtggtcccaggggaggctcccgcccagccccgcactcctttgtgcggccgggcgggcgctgcgtcaaggtggaggcgcggccacacgcgcgcacccacccgcgcgcacccagcccccgggagaggcaggaagggaggcggcggcgcgaggaggagggagcggccgtggagcccaatcgttcgctccccttcccgggtccgcgcgcggcgccgcctccgccattgctgcgagcaggagcaggagacgcggagctcggagcgctgagctgacctgccggagccgggcgtgggctgcagcctcggagctcccggaacgatggtgaagttggggaacaatttcgcagagaagggcaccaagcagccgctgctggaggatggcttcgacaccattcccctgatgacgcccctcgatgtcaatcagctgcagttcccgcccccggataaggtggtcgtgaaaactaagaccgagtatgaacctgaccgcaagaaagggaaagcacgtcctccccaaattgctgagttcaccgtcagcatcacggagggtgtcaccgagaggtttaaggtctccgtgttggtcctcttcgccctggccttcctcacctgcgtcgtcttcctggttgtctacaaggtgtacaagtatgaccgcgcctgccccgatgggttcgtcctcaagaacacccagtgcatcccagaaggcttggagagctactacgcggagcaagactccagtgcccgggagaaattttacacagtcataaaccactacaacctggccaagcagagcatcacgcgctccgtatcgccctggatgtcagttctgtcagaagagaagctgtccgagcaggagactgaagcggctgagaagtcagcttagcgggatgggcaagttccttacaatgtgtcacttgcaaataacaaagggactttgagggacatttcattaaatataattactgatactttagaggttactcatttacggtgcaattgcttctgtttgctaatgctgctttgcaaataaaacttgctgccgaccacccacgggcataaaatcaagtgcatttcagcattgcctaaagagctctgacaccacttttcatgttaagatcttcatttagctcctttactgggatttattggatgctgtaaaaaaataaatttacactggatatgcgaagggtttggatctcagataaatgcattttgtggaattgattttctgaaccgaccctgctgtctgcaaaccttcctccatagccatatctagagtgatctctcgctgtgctaagagcaagcctacttcgcatttcttcctcggccatcagcgggtaacagtgctgactgctgccaaggtgcactgtagtaagtaagtggcatagagaacgaggaaaaagacccccccacccctccctgtgctgactcctgagtcggggtgggacggccctgcaatgtggcaggctcggtgtggattgactactccctcccctctgactctggcatcttggtaaggagggaggggcaccacccatctgggtggagacagctggggtttgctccagtgtgtgtagactggcagagcatgtgagggagagggctgggaagagacggccctgggcccgtgaggtgcagaactctccctgcaggtagtctgtctgctctgtgatgtgctgataggaaagagcccccactggccctctggttcacttctattatgaataaatttgcaccaatagccccattagtttttaaagaaatgagctgggtgggaaaagtggaaatgtaatttctggtaagcttgagctactttaatttttattctatgaaactgatatcccttgatgtgggaaacaggcaggaaaggctgtggggtgggggtgggggactggtgtggcaccgtgcaaacaaaatgacaaatttcaactcacaatctttgtaagaaaattgttccagtttgaatcttgatattaaagtttatgtttacaaaactgccagttagatgaactaagtgtgtaaaacaaatagaaaagacattcgcagacatttcttctatgttattgaatgtgttgtttctggtgtacgtgtcaaaagtttcagttttttagatcagaaataaacgacaaatagtgtga

SEQ ID NO: 660069 - DNA, 4276 bp, Homo sapiens
  misc_feature (11)..(11): n is a, c, g, or t
  misc_feature (44)..(44): n is a, c, g, or t
  misc_feature (46)..(46): n is a, c, g, or t
  misc_feature (4107)..(4107): n is a, c, g, or t
cgagagggcanaaaaccttcgggctaggtacgaggcctgggtgntngggagcggccgtggagcccaatcgttcgctccccttcccgggtccgcgcgcggcgccgcctccgccattgctgcgagcaggagcaggagacgcggagctcggagcgctgagctgacctgccggagccgggcgtgggctgcagcctcggagctcccggaacgatggtgaagttggggaacaatttcgcagagaagggcaccaagcagccgctgctggaggatggcttcgacaccattcccctgatgacgcccctcgatgtcaatcagctgcagttcccgcccccggataaggtggtcgtgaaaactaagaccgagtatgaacctgaccgcaagaaagggaaagcacgtcctccccaaattgctgagttcaccgtcagcatcacggagggtgtcaccgagaggtttaaggtctccgtgttggtcctcttcgccctggccttcctcacctgcgtcgtcttcctggttgtctacaaggtgtacaagtatgaccgcgcctgccccgatgggttcgtcctcaagaacacccagtgcatcccagaagagaagctgtccgagcaggagactgaagcggctgagaagtcagcttagcgggatgggcaagttccttacaatgtgtcacttgcaaataacaaagggactttgagggacatttcattaaatataattactgatactttagaggttactcatttacggtgcaattgcttctgtttgctaatgctgctttgcaaataaaacttgctgccgaccacccacgggcataaaatcaagtgcatttcagcattgcctaaagagctctgacaccacttttcatgttaagatcttcatttagctcctttactgggatttattggatgctgtaaaaaaataaatttacactggatatgcgaagggtttggatctcagataaatgcattttgtggaattgattttctgaaccgaccctgctgtctgcaaaccttcctccatagccatatctagagtgatctctcgctgtgctaagagcaagcctacttcgcatttcttcctcggccatcagcgggtaacagtgctgactgctgccaaggtgcactgtagtaagtaagtggcatagagaacgaggaaaaagacccccccacccctccctgtgctgactcctgagtcggggtgggacggccctgcaatgtggcaggctcggtgtggattgactactccctcccctctgactctggcatcttggtaaggagggaggggcaccacccatctgggtggagacagctggggtttgctccagtgtgtgtagactggcagagcatgtgagggagagggctgggaagagacggccctgggcccgtgaggtgcagaactctccctgcaggtagtctgtctgctctgtgatgtgctgataggaaagagcccccactggccctctggttcacttctattatgaataaatttgcaccaatagccccattagtttttaaagaaatgagctgggtgggaaaagtggaaatgtaatttctggtaagcttgagctactttaatttttattctatgaaactgatatcccttgatgtgggaaacaggcaggaaaggctgtggggtgggggtgggggactggtgtggcaccgtgcaaacaaaatgacaaatttcaactcacaatctttgtaagaaaattgttccagtttgaatcttgatattaaagtttatgtttacaaaactgccagttagatgaactaagtgtgtaaaacaaatagaaaagacattcgcagacatttcttctatgttattgaatgtgttgtttctggtgtacgtgtcaaaagtttcagttttttagatcagaaataaacgacaaatagtgtgagatgtgttgtgaacaggcatggtgaccgtggtcagcgccactcttgtttcctgaaatgtgcttctaagacagaaaatgtattttctcatcaagggtgtctggagacacagaccgtgaccttggcgcagcggtgtgcatcagaggcgtgtgctgagaagggtggtgttaagctgtggaaaatgactcaagagcaataaatcagtgccaaagcttccctgcgcatctgaatagacacaagtgaagcccgtgtgcgcacagtgcagaggccgagcctgtatttccaggtagacgtggactttattgactgtgaattcatttacatgtaacttctgacatttcactctgtgcaaataaagaacatgaggatacctgtgctgcccagtggactgtctgtacacacacgcatttcaccaggcgcagtgcagactgtctcatgcccatgtgggcgctgggatgcttcctgtacagatgtctcatgccttcagttacacataggtgttcctgtttacagttcctggaggtcagaagcacaggcacgagagaagcaggcccgttcttccgtggcccacttcttcctttgaacaaaggctccttggacccagtggcgggaaactggccctcccacaccccctgcctgttctgggggcagcagtctttggaggagtaatgccaggcagcccctcactgagggccccagtctcccctgcatttcttccctgattgattgataggaggtggctgggctgccactgaatttgtcaacttagactcattgacaacacattaaggggctgtaattatatttattagattaacaaggcagatgtgaattttctcttctataatccagtaagtctgtgtattcgttgactcagacagacaagaagccacaaggaaacaaagaagtaatcatttgttgagagacgttattaactatgatcttccctgaagctaccgggatgggaaaggtcagtgtcttcctttgaaccctgagacaattaggggctcttgaggcctgctgtgcccctgctgccaaggcagcctcaagttcaaggagcagctaatcacccactcctgcattcagtctgtcttgcctgatgagggctacgcaggctgcctcccattggtgtgcactgtttcctttttcagctgctaaatggctgaacaccatcggcctggggtatccctttttggggaatacgtctgtctgtctgaactcctttcccttcaaatggcactgtgataaaatctggtcataccatgctccagcactggaagtacatgaaagcacgcagtctgtgagtgcccatgaggactctcgtgctgggcccccgtggccctggctagctgtcgtaccagtcgaggaagagcaaggagaaggagcacatcacgaggaagaagaggatccacacgcggaagccagcgttgtttttaatggcctctcttatgtcttcgttgccttccttgatattttcagttgcccccacaactaactggtgaatgctgtcaatctcagcttcctgttgcaaaaccttttccgtgaatatctcttggagtctggaaatctcaaccactctcccttcgatttgcctcacttcatcaaacaagctgttcatttcaccaattagtcgctgattttcctgttcaaacatttgtatttcttctggggataactcatcttcgcctttgccatctccccacgttcccaattcaggttgtgtttcagccaaaattttttctggacgttcttcagtggcagggttttcttcagagtcttttgaaggactctgtgaaactttctcagaagatgtggattctcttgtctttgtatttggttctggttccagcttagataatcttttcttatccaccactcttttaactcggatggctctctgttctgagtaaagtttacatactcttttcaagtaatcttcaatgaaatccaaaacagcggtcctgtgctccttcacttgctgggaatgtatctccttgtgagcttctgttcgtagttgctgaattgcttctgaacaggtcctcatgaatatctgggcatcctggtctatctggtctcgttctgtgtctgtcatcctcccatattcagacatggtatggctataagcattaatataatctttcctgtgttccagaagaaaatctctcagtttgccaatgtgagaaatcacttcgcgggcccggctggagaagtcgcccttggnccgggggctccggcggaacagcctcgtccaacggctgccatcgaccccgccgcccaccagccactcccagcgaccgttgttccgcgtcttcacggtcattgacgctggcccggaatagcagcgtgatctccaccgccatagcgacccgcaccctcagccccacactagg

SEQ ID NO: 660070 - DNA, 1755 bp, Homo sapiens
  misc_feature (15)..(15): n is a, c, g, or t
ccggggtggcgcacncgcagccctcccgctccgggcgccctccgccgctccgagaccccctgggggcgcgtcctctcccgctcccctgttccctcccccggctcagggcgggcgcgtggtcccaggggaggctcccgcccagccccgcactcctttgtgcggccgggcgggcgctgcgtcaaggtggaggcgcggccacacgcgcgcacccacccgcgcgcacccagcccccgggagaggcaggaagggaggcggcggcgcgaggaggagggagcggccgtggagcccaatcgttcgctccccttcccgggtccgcgcgcggcgccgcctccgccattgctgcgagcaggagcaggagacgcggagctcggagcgctgagctgacctgccggagccgggcgtgggctgcagcctcggagctcccggaacgatggtgaagttggggaacaatttcgcagagaagggcaccaagcagccgctgctggaggatggcttcgacaccattcccctgatgacgcccctcgatgtcaatcagctgcagttcccgcccccggataaggtggtcgtgaaaactaagaccgagtatgaacctgaccgcaagaaagggaaagcacgtcctccccaaattgctgagttcaccgtcagcatcacggagggtgtcaccgagaggtttaaggtctccgtgttggtcctcttcgccctggccttcctcacctgcgtcgtcttcctggttgtctacaaggtgtacaagtatgaccgcgcctgccccgatgggttcgtcctcaagaacacccagtgcatcccagaaggcttggagagctactacgcggagcaagactccagtgcccgggagaaattttacacagtcataaaccactacaacctggccaagcagagcatcacgcgctccgtatcgccctggatgtcagttctgtcagaagagaagctgtccgagcaggagactgaagcggctgagaagtcagcttagcgggatgggcaagttccttacaatgtgtcacttgcaaataacaaagggactttgagggacatttcattaaatataattactgatactttagaggttactcatttacggtgcaattgcttctgtttgctaatgctgctttgcaaataaaacttgctgccgaccacccacgggcataaaatcaagtgcatttcagcattgcctaaagagctctgacaccacttttcatgttaagatcttcatttagctcctttactgggatttattggatgctgtaaaaaaataaatttacactggatatgcgaagggtttggatctcagataaatgcattttgtggaattgattttctgaaccgaccctgctgtctgcaaaccttcctccatagccatatctagagtgatctctcgctgtgctaagagcaagcctacttcgcatttcttcctcggccatcagcgggtaacagtgctgactgctgccaaggtgcactgtagtaaggtgtctggagacacagaccgtgaccttggcgcagcggtgtgcatcagaggcgtgtgctgagaagggtggtgttaagctgtggaaaatgactcaagagcaataaatcagtgccaaagcttccctgcgcatctgaatagacacaagtgaagcccgtgtgcgcacagtgcagaggccgagcctgtatttccaggtagacgtggactttattgactgtgaattcatttacatgtaacttctgacatttcactctgtgcaaataaagaacatgaggata

SEQ ID NO: 660071 - DNA, 4378 bp, Homo sapiens
  misc_feature (15)..(15): n is a, c, g, or t
  misc_feature (4209)..(4209): n is a, c, g, or t
ccggggtggcgcacncgcagccctcccgctccgggcgccctccgccgctccgagaccccctgggggcgcgtcctctcccgctcccctgttccctcccccggctcagggcgggcgcgtggtcccaggggaggctcccgcccagccccgcactcctttgtgcggccgggcgggcgctgcgtcaaggtggaggcgcggccacacgcgcgcacccacccgcgcgcacccagcccccgggagaggcaggaagggaggcggcggcgcgaggaggagggagcggccgtggagcccaatcgttcgctccccttcccgggtccgcgcgcggcgccgcctccgccattgctgcgagcaggagcaggagacgcggagctcggagcgctgagctgacctgccggagccgggcgtgggctgcagcctcggagctcccggaacgatggtgaagttggggaacaatttcgcagagaagggcaccaagcagccgctgctggaggatggcttcgacaccattcccctgatgacgcccctcgatgtcaatcagctgcagttcccgcccctaaggtctccgtgttggtcctcttcgccctggccttcctcacctgcgtcgtcttcctggttgtctacaaggtgtacaagtatgaccgcgcctgccccgatgggttcgtcctcaagaacacccagtgcatcccagaagagaagctgtccgagcaggagactgaagcggctgagaagtcagcttagcgggatgggcaagttccttacaatgtgtcacttgcaaataacaaagggactttgagggacatttcattaaatataattactgatactttagaggttactcatttacggtgcaattgcttctgtttgctaatgctgctttgcaaataaaacttgctgccgaccacccacgggcataaaatcaagtgcatttcagcattgcctaaagagctctgacaccacttttcatgttaagatcttcatttagctcctttactgggatttattggatgctgtaaaaaaataaatttacactggatatgcgaagggtttggatctcagataaatgcattttgtggaattgattttctgaaccgaccctgctgtctgcaaaccttcctccatagccatatctagagtgatctctcgctgtgctaagagcaagcctacttcgcatttcttcctcggccatcagcgggtaacagtgctgactgctgccaaggtgcactgtagtaagtaagtggcatagagaacgaggaaaaagacccccccacccctccctgtgctgactcctgagtcggggtgggacggccctgcaatgtggcaggctcggtgtggattgactactccctcccctctgactctggcatcttggtaaggagggaggggcaccacccatctgggtggagacagctggggtttgctccagtgtgtgtagactggcagagcatgtgagggagagggctgggaagagacggccctgggcccgtgaggtgcagaactctccctgcaggtagtctgtctgctctgtgatgtgctgataggaaagagcccccactggccctctggttcacttctattatgaataaatttgcaccaatagccccattagtttttaaagaaatgagctgggtgggaaaagtggaaatgtaatttctggtaagcttgagctactttaatttttattctatgaaactgatatcccttgatgtgggaaacaggcaggaaaggctgtggggtgggggtgggggactggtgtggcaccgtgcaaacaaaatgacaaatttcaactcacaatctttgtaagaaaattgttccagtttgaatcttgatattaaagtttatgtttacaaaactgccagttagatgaactaagtgtgtaaaacaaatagaaaagacattcgcagacatttcttctatgttattgaatgtgttgtttctggtgtacgtgtcaaaagtttcagttttttagatcagaaataaacgacaaatagtgtgagatgtgttgtgaacaggcatggtgaccgtggtcagcgccactcttgtttcctgaaatgtgcttctaagacagaaaatgtattttctcatcaagggtgtctggagacacagaccgtgaccttggcgcagcggtgtgcatcagaggcgtgtgctgagaagggtggtgttaagctgtggaaaatgactcaagagcaataaatcagtgccaaagcttccctgcgcatctgaatagacacaagtgaagcccgtgtgcgcacagtgcagaggccgagcctgtatttccaggtagacgtggactttattgactgtgaattcatttacatgtaacttctgacatttcactctgtgcaaataaagaacatgaggatacctgtgctgcccagtggactgtctgtacacacacgcatttcaccaggcgcagtgcagactgtctcatgcccatgtgggcgctgggatgcttcctgtacagatgtctcatgccttcagttacacataggtgttcctgtttacagttcctggaggtcagaagcacaggcacgagagaagcaggcccgttcttccgtggcccacttcttcctttgaacaaaggctccttggacccagtggcgggaaactggccctcccacaccccctgcctgttctgggggcagcagtctttggaggagtaatgccaggcagcccctcactgagggccccagtctcccctgcatttcttccctgattgattgataggaggtggctgggctgccactgaatttgtcaacttagactcattgacaacacattaaggggctgtaattatatttattagattaacaaggcagatgtgaattttctcttctataatccagtaagtctgtgtattcgttgactcagacagacaagaagccacaaggaaacaaagaagtaatcatttgttgagagacgttattaactatgatcttccctgaagctaccgggatgggaaaggtcagtgtcttcctttgaaccctgagacaattaggggctcttgaggcctgctgtgcccctgctgccaaggcagcctcaagttcaaggagcagctaatcacccactcctgcattcagtctgtcttgcctgatgagggctacgcaggctgcctcccattggtgtgcactgtttcctttttcagctgctaaatggctgaacaccatcggcctggggtatccctttttggggaatacgtctgtctgtctgaactcctttcccttcaaatggcactgtgataaaatctggtcataccatgctccagcactggaagtacatgaaagcacgcagtctgtgagtgcccatgaggactctcgtgctgggcccccgtggccctggctagctgtcgtaccagtcgaggaagagcaaggagaaggagcacatcacgaggaagaagaggatccacacgcggaagccagcgttgtttttaatggcctctcttatgtcttcgttgccttccttgatattttcagttgcccccacaactaactggtgaatgctgtcaatctcagcttcctgttgcaaaaccttttccgtgaatatctcttggagtctggaaatctcaaccactctcccttcgatttgcctcacttcatcaaacaagctgttcatttcaccaattagtcgctgattttcctgttcaaacatttgtatttcttctggggataactcatcttcgcctttgccatctccccacgttcccaattcaggttgtgtttcagccaaaattttttctggacgttcttcagtggcagggttttcttcagagtcttttgaaggactctgtgaaactttctcagaagatgtggattctcttgtctttgtatttggttctggttccagcttagataatcttttcttatccaccactcttttaactcggatggctctctgttctgagtaaagtttacatactcttttcaagtaatcttcaatgaaatccaaaacagcggtcctgtgctccttcacttgctgggaatgtatctccttgtgagcttctgttcgtagttgctgaattgcttctgaacaggtcctcatgaatatctgggcatcctggtctatctggtctcgttctgtgtctgtcatcctcccatattcagacatggtatggctataagcattaatataatctttcctgtgttccagaagaaaatctctcagtttgccaatgtgagaaatcacttcgcgggcccggctggagaagtcgcccttggnccgggggctccggcggaacagcctcgtccaacggctgccatcgaccccgccgcccaccagccactcccagcgaccgttgttccgcgtcttcacggtcattgacgctggcccggaatagcagcgtgatctccaccgccatagcgacccgcaccctcagccccacactagg

SEQ ID NO: 660072 - DNA, 1756 bp, Homo sapiens
  misc_feature (15)..(15): n is a, c, g, or t
ccggggtggcgcacncgcagccctcccgctccgggcgccctccgccgctccgagaccccctgggggcgcgtcctctcccgctcccctgttccctcccccggctcagggcgggcgcgtggtcccaggggaggctcccgcccagccccgcactcctttgtgcggccgggcgggcgctgcgtcaaggtggaggcgcggccacacgcgcgcacccacccgcgcgcacccagcccccgggagaggcaggaagggaggcggcggcgcgaggaggagggagcggccgtggagcccaatcgttcgctccccttcccgggtccgcgcgcggcgccgcctccgccattgctgcgagcaggagcaggagacgcggagctcggagcgctgagctgacctgccggagccgggcgtgggctgcagcctcggagctcccggaacgatggtgaagttggggaacaatttcgcagagaagggcaccaagcagccgctgctggaggatggcttcgacaccattcccctgatgacgcccctcgatgtcaatcagctgcagttcccgcccccggataaggtggtcgtgaaaactaagaccgagtatgaacctgaccgcaagaaagggaaagcacgtcctccccaaattgctgagttcaccgtcagcatcacggagggtgtcaccgagaggtttaaggtctccgtgttggtcctcttcgccctggccttcctcacctgcgtcgtcttcctggttgtctacaaggtgtacaagtatgaccgcgcctgccccgatgggttcgtcctcaagaacacccagtgcatcccagaaggcttggagagctactacgcggagcaagactccagtgcccgggagaaattttacacagtcataaaccactacaacctggccaagcagagcatcacgcgctccgtatcgccctggatgtcagttctgtcagaagagaagctgtccgagcaggagactgaagcggctgagaagtcagcttagcgggatgggcaagttccttacaatgtgtcacttgcaaataacaaagggactttgagggacatttcattaaatataattactgatactttagaggttactcatttacggtgcaattgcttctgtttgctaatgctgctttgcaaataaaacttgctgccgaccacccacgggcataaaatcaagtgcatttcagcattgcctaaagagctctgacaccacttttcatgttaagatcttcatttagctcctttactgggatttattggatgctgtaaaaaaataaatttacactggatatgcgaagggtttggatctcagataaatgcattttgtggaattgattttctgaaccgaccctgctgtctgcaaaccttcctccatagccatatctagagtgatctctcgctgtgctaagagcaagcctacttcgcatttcttcctcggccatcagcgggtaacagtgctgactgctgccaaggtgcactgtagtaagtaagtggcatagagaacgaggaaaaagacccccccacccctccctgtgctgactcctgagtcggggtgggacggccctgcaatgtggcaggctcggtgtggattgactactccctcccctctgactctggcatcttggtaaggagggaggggcaccacccatctgggtggagacagctggggtttgctccagtgtgtgtagactggcaaaaccttttttaggtattgttcttgtataaaaattgctcatatggatccttattgtttgataaaagt

SEQ ID NO: 660073 - DNA, 188 bp, Homo sapiens
ggcacgaggggacaatttgctttgggtattttgagagggtcttgttttgtagcccaggctggcctgaaattagtgatcctcctgatgactgggattatagttatgtgtcaccccaacccagcaaggcatttgtttactgaagttcccacaactggctttataatcatttggggtaagcagctagagat

SEQ ID NO: 660074 - DNA, 104 bp, Homo sapiens
ccacagtaattacaactactatccggcatcccatacatgggacagacctaggttcaatgaatctgaggaggctactcagtagacagttccacccctacacgatt

SEQ ID NO: 660075 - DNA, 960 bp, Homo sapiens
gagtttgagtgtccaggcaacgggcgacgataatggagtcggggagatcgcgaaagccccaatcatggtttgtctctcctaggaaatagcgggtgatcttgggctgtggtggatgtggtgagacatgcctcgataatcgactgagcccaaggaatatagatagcgtgggaggctgtcaggtgccttaacggctcatttgcactatctcatcagtggcagtactctatggggtgtgacatggccatccagagtgataagctagaccatccttgctaggacagacatcctgcggatccgcgctagtactcattcatctgaaaatagatggaccatgcatcctacccttaagcacagggacccctgttgtgaccccttcgtgtggctgtctccagaatgccgatgagaacctgaaaaaagtcctagtgaccaaattgttacctgtaagatggtgggccgacccacgtcgagctcgacagacatttttatgctctcaaattttgccactctctatacacgtagggctaggtgcaataattatatgaatgggatcttgacgggcagacgtagcgaaagcaacacaaagggaaaaaaggacttgcggcaattgaatgaacaggccagcgaacacccggtagcgagcaaatgaagcaaagaggtccgaagacgctggcagtaaccggaaattgaagatgtcctttggggcgtccctttgagttgttcagaggccggcaccaagggatggggacgtccggggacggtgttatgaaatgggcccactcggggttggcctcaagggttcctgaggaacaacgcgtcgggggggcgggccccatttttcgtgaagattcccaggggcctttcttatatgccgcacatcccttggcagcggtaacgggtttgtccccctaaaacacaagctcggggggctcatgtgtgggccccttgtggcctcggcaggtg

SEQ ID NO: 660076 - DNA, 754 bp, Homo sapiens
agcggcttctgccttcaacagctggtttgaaaatgcagaggaggacttaagctagaccccgtgcgctgcaactccttgtcaagaaatcaaccgctttgcgcgaggcccatcgacgccttccgctcctccctcagcgtctgcgacaggctgatcttcaaccatggctggccgagctggaccgccgagatcaagagcttccgcgctagcctccaagccactacacctggttgtaccatgcgaggcccaggaggagaacgacgagctgcgccaggaagttggcccagcacgtccaacgccttgcaccagtggatccaagagaccaggacatacctcctcgatgggtcctgtggtggacgagtcggggaccctcgaatcccagtttgaagctaccaaacgcaagcaccaggaaattccgagccactgagaatgtcagctcaacaaatgatcgaggacctgggggccgtcatggaggacggccctcatcctggacacacaagtacacggacgcacagcaccgtgaggcctcgctacagcagtgggaccagctggaccagctgggcatgcgcatgcatcacaacctggagcagcagatccaggccaggaacacaacacgtgtgactgaccgaggccctcaaacgaattcagcatgatgtaatagacacgttagacaaggacaagtctggcaggctgaaccatcaggagttcaaatcttgcctgcgctccctgggctatgacctgcccatggtgggaggca

SEQ ID NO: 660077 - DNA, 188 bp, Homo sapiens
tgagctggaggcaaggttgatgcactgatggctgagattaacttcatgacgatgttctttgcggggggacgctgtcccagatgcagacgcatgtctctgacacctcagatggtcctctccatgggcaaacaacccgcaaacctggcacctggatagccatccatcgctgcagcgaccaaggccccagc

SEQ ID NO: 660078 - DNA, 478 bp, Homo sapiens
ggagtctcatcgacacactcagccactggaggtaacgcctgagttcaaatctgtactgcaccctggatgtggattcctttgcggtattttgtgaataaagcaaagacgcgcgtctacaggacacagctgagccaacactggcaactgaacgcgaactttgacgatacagctgcgcagcggctcccagagcccctcaccatacttctgcctactcacaaccgctgtcacacacacgtaccaacatccccaatgcacgaccccataccactgacaacctccatccccgacacccccccctgctcctagcacacctctgagatcactctcctacgaccttctgagcttgatctacacgtatcgcactgcacaccacccaacaactcatccctcagagtcaccaccttctctatcatctgacgatatttcatcactaacacctgcacccacacaccataacaccattgccgcactacccaac

SEQ ID NO: 660079 - DNA, 351 bp, Homo sapiens
gctagttccacagtagggtataaagttctctgtctaggtgattttatctagagtttggtgaagaaccaaggatttctcaagtgtttgctttaattatttgaattgtatattaaaattgttggtgccaaggtctgaattgactgccttgtacccattggagattggtggagagggattaccccaaactaaatatttggtaattttggaggcattttgagacttcatttgttatggtcttgtttctttgaaaaatagacgtttccactttattttttggttttatattgtttctaggtggttttgtttttaaataaaaagaaagcgagtcttttagataattgggaaatgaga

SEQ ID NO: 660080 - DNA, 258 bp, Homo sapiens
cgtggagatggctcctcttagctacttttacctggattgctctctgatgaactagatggcctgcagtttagttactgttctttaaggtatgttatcattttctaaagtgtccttaggcctgtacttccccacactgtttcaaataaagtcagttcctttggagagtacctcggagctctcttttgttatgaactgtctctcgccctgggaaaggtctctgaggcactactctgggtgctgggtgggatagtagcctct

SEQ ID NO: 660081 - DNA, 443 bp, Homo sapiens
cgatctacaggaccttaaaagtgcactcttctatatctactaaaaataaaaaactagccaggcatagtggcacacgcctgtagtactagctactcaggaggctgaggcaggagaattacttgaacctgggaggcaacaggttgcagtgagccaagatcacgccactgcactccaaacctgagggtcttctaaggaggtgagactctatctccctcaatcaatcaatcacatcaataatttggggataaaagagagtgggacaagaactagttagagaaaacagaaaattccgcaagtaagaaaaaaccattacagctataaacatatggtaggggtctaaaataaactagggtttacaccctaaattaacgaacaaggggatctaataaggaggggataattttcaagggtagatattagaagaggggacttatgggggaacc

SEQ ID NO: 660082 - DNA, 106 bp, Homo sapiens
aaggatgcggtccaccttttgcagaactcatatctcgagcagtttaacttaagggaggcgaatttttaatttaaactgctcgagatatgagttctgcaaaaggtgg

SEQ ID NO: 660083 - DNA, 206 bp, Homo sapiens
tttggaaaaaaaaattcaggtttccaatttccctcccccggaggggggccagccccgaggtttttttgaacagaaatttatttttggtaaccctcgggtgggcccccccggatcccgggggtcccccgcccccattcctttggaaaagggtttccaaaacccctccccacccaaaatatattttgggcccctgggtttggggggga

SEQ ID NO: 660084 - DNA, 423 bp, Homo sapiens
tttacgcgtttttttcaaaaatattcccgccaattatttatcaatcgccctttatgctgcacatttttttagaaaggccattggtgggggcttttttaattttgcacctggtgaaaaaagggtgtttttctacaaggttattttggttggttaccccattttttttccagtcaagttgttttaaaacggccgccaatttatttttattcgccccattattgggattttttggcagggggcccccccataagttttttttttttttttttttttttttttttttttttttttttttttttttttttttttttttttttttttttttttttttttttttttttttttttggttttatagatttattttcaaagagtaaaacacatacaatttaaatacaagtccatcagaatcactctgtcagag

SEQ ID NO: 660085 - DNA, 1399 bp, Homo sapiens
  misc_feature (932)..(932): n is a, c, g, or t
cttgttatctttgctcttattttctcttgttgtttttgttgttctttttcatgtatagtgtcgtttctatttgtttggtcatctgtgtgttttttttctttctttcttagcttctttgctgtctggcttgctactgcatgtcttatcctgtctgtgctcttgtcttttctgtctttttctctggttgctccgttgctgccttctgcttggtttgtttgcttcttttccttctcgttgtgtctcgtttttgtgtttgttctgcttggtgctcactgccggcgggctctgtcgggtgtgggttataaccagaacttcgttttgtgggaccctctccgtttcctctcctggtggcacgccctactccccaccccgtgtttttggcccccgccctttgagaagaaccccccggggtcccgtgtgtccagcccttcctggatttttacctttggccctcggggacggggagtgaccgaagttgccaccacacgggaccccgtcgttattgcgccctttggtcgctattttaatgtgaccacttattagcagcccaagttgtaccccaaaaacacggtcgtgggtgacccgcgtcccgcgaatttcccccgggatttttttccgacccccaccgctgttccgccccgtggcaccccccggctggccgccagcccctttgccccgcggcccccgcccgggcctctacggccccgagggagcccctcacgccgcgtacccttttgcctcctccgccttctggggaactcgtcttctctgggccccccgcgggccgctggtcccgcgccccttgcgcccttctctgcttgggtgaccacacgctgggcgcaccgcaccgctgggccccacactctcccacgggaatttctcgggtttcttcgcctctgttctcggcctcgggggagcaccccccgcgaggncccgctctcacgtgtccacacgccacactctcctcgcgagtggcaccttccacacacacctctctatggagacgccacgcgaggggttttccgcgcggagttggtttccgcagggcttcgcttccgctatgagatttggagaattcgccccctcgaagaatgtagagccctcccagggatttaatgtcacaattctggctccctctccacttctacgcctccgcggaggcctcgaacgccgttctcctcccactccgccaccctcggagtccacgagcgctggatttttgtatttgctcggtggtgcccacgtctctgccccacgaggctttggagttccatcttgaaaggggtgttctgggggaactttactgttgccaagttgtaaataaatggttaatttatatcctattttttctcacccccctctttttagaaacacctataaaggctattattgtgatcca

SEQ ID NO: 660086 - DNA, 99 bp, Homo sapiens
gtggtttccgaaattcctgggaaggggggtgctggcgtgtggaattgtcgcggcccctggtctgccgcggcgttttttgtctacattcgtcgtagctcg

SEQ ID NO: 660087 - DNA, 181 bp, Homo sapiens
gcggcctcatgaacacatccaacctctacatttacaaaacgaattcagggtgcggaagtacaaacaggtcgatcgattcacaaaactgaaatacttcattagcccacctaaacatacaaactgcttacagattagctgaaatggtctcaattgggctatcaaattcattgggattttcctc

SEQ ID NO: 660088 - DNA, 547 bp, Homo sapiens
  misc_feature (9)..(9): n is a, c, g, or t
  misc_feature (25)..(25): n is a, c, g, or t
  misc_feature (133)..(133): n is a, c, g, or t
  misc_feature (211)..(211): n is a, c, g, or t
  misc_feature (279)..(279): n is a, c, g, or t
  misc_feature (282)..(282): n is a, c, g, or t
  misc_feature (303)..(303): n is a, c, g, or t
  misc_feature (364)..(364): n is a, c, g, or t
  misc_feature (370)..(370): n is a, c, g, or t
  misc_feature (373)..(373): n is a, c, g, or t
  misc_feature (382)..(382): n is a, c, g, or t
  misc_feature (391)..(391): n is a, c, g, or t
  misc_feature (463)..(463): n is a, c, g, or t
  misc_feature (496)..(496): n is a, c, g, or t
  misc_feature (534)..(534): n is a, c, g, or t
ctgctgccngcggtcgcctctagangacccaatatatccggcctatcctgtgttgttgttgttgttgttgtttttaattaagtaaatgctgttttagaacctgaaaaaataaagtccatctttcttgaccctncataaaaaacaaatctaaaaccaagaagaaatgaaatggatatgatacgttcttaaaatgccagccttctcttatggncacagcatttccaagtatattcctgccctataaaaagaatagtcaggctctgcacctacaaaaaaagnggngttaccattgaatccattcanctgaattcattgcaataaaatattgcatttgagttttttataatgagcttttactataaanagaagngcnggtctatanctagaaaanagatcctaccattgaatccattcacctaaattcattaaaggaaaatatttgcatttgagtctttataatganatttactgctttcttataatatctccccatagncctttctataacgattgtttaaatttaaaactttgtcncttaatattaaaa

SEQ ID NO: 660089 - DNA, 1543 bp, Homo sapiens
aggccgctccccgcaggtgtttaataaataggaaataaagcggaggtgatggaatattaaaggtcaaagaggggggtgatattattaaaagtatgaataagatttgtttgtttgtgataataagaagcggcgagaaaaattaggggagagtttttgagaaaaagtatgtccgcatctccaacaaccaggggggggcaccgacgtattcaccacagaatgtttctccccggggataagaagtaaatatgataagataattttgggggaacaccacccaataagaggggggcttctccccccccgccaagaagaagagcgtctgctcacacatagggggggttttctatcatagcacagcgtgagttcttcttctggtggcgtctatataaaaccttcttgggaggaaaactgctggagaaaatgatctcataatctccccaacgactttttgtgccgtctttgagaagagggtataatagggtttgcgccgagtaatattatatcgcggaagcaccaccagcagctgattataaccccacagcacgttgtgccccgcggcgccaacagaggtgttgtttgacaacacgacgctgctgttctcttgggagaggtttttttcttagtagtaaaaagacgctcgccgccacacgacgcggtcatctggttggtagaaagctcgtaggagcacccacggcgcagtaatatagatacctcgccggcgtcactacacgggaggacacatcttctcgtgtgcgcacaacacacacactcggaggggcccccacaggagggtgccgcacacacaagatatgatgattataaaagaggaagagtctcatagagagagacactccgtataatatagagctcataggtgggtgtttgtgagagatgtcacactcatcagatggggcgtgtgatgaacacacacagtggggccccccccccgcactacagtgtgttgtaaaggggtgacgacaccacacagagagaccccctctcttggagaagagaaaatatactctttagagagagtgttgtttgtgtgtgctctgggatgacacacacatgtttcttttggccctctctttgtgtcactctctgtgtgtcacactgtgtgtgtgtgtccccacggaggacactactgtaaaattgtgtgtgtcacacatttgtcacagtactcttgtgagagagggagataactactgagagtgagagagagaggggtgtgtgtgtgtgtttgtgtgtgtgttctgagagaggagagagaatatacacccaccccctccaagtgagatcccgcagaaatatgagtattgttaccacagcgttccaggaccacacagaggtgtgggccacatatattgagcggcacacgtgagataaatagtgtggagagggggtcacactctccacaaatgtcacacgagatgtttgatttttgagttttctcacttccgccctgtgtaaaagggccaacccctttgagaaaatgcccgagcccgtttaagtttaaaactatggggttaatttttgaccccaa

SEQ ID NO: 660090 - DNA, 913 bp, Homo sapiens
tctcctgcctcagcctccagagtagctgggattaaacctgcctcggtctcacaaagtgctgacaattacaggcatgagccaccacgcctggctgagttttgacacgttcagcactaaattctatgaagttgtacaacatatcacaatgaatctctgccaaggatggacgagacatgtgcaaacaagcagacgcgtacaagaccaactaagttatttttgcctgttgggagcaaggccccccaaaaatccggccaataaactggccccaaggactggccattaaaccaaaaatctctgcaagcacatgtaccccattgttcccataaatgggcccctaatgcccaaagctgtaataggtagtctactggaaattcacatagcttggagcgctgaccaccattgacggcaaagttactgacccattccaacgacttctcatactctttccatcctctgaaaaccacaactactccatgggaacacttcggagttggcacttcaatatacttgccaggtcgcctgaggtaaccttaaggttgttaccctctttgtttcccaactgggcattgcaaacggggacatgtgcttggaaaacgcaaacaagttgcagatgaagaaactctggatcccctacagggcatcctctgaccaccacgagtcggggcgcctgggcatacggcctgtacgggccggagttcagggctcaccaccttggcttttggcagcacgaatgccagggacgccccacagtccggacggacacatgcaacacgagacctgtactgccagaagactactgcctggctagacggtcctctagatagagggacacggcacaaaattccgccgggcaataggatctaacgtgggccgaccggccaaacgggacacgcaaccagaccgcacacacaca

SEQ ID NO: 660091 - DNA, 830 bp, Homo sapiens
  misc_feature (642)..(642): n is a, c, g, or t
  misc_feature (672)..(672): n is a, c, g, or t
  misc_feature (746)..(746): n is a, c, g, or t
  misc_feature (756)..(756): n is a, c, g, or t
  misc_feature (828)..(828): n is a, c, g, or t
caactaatgggaaaaataaccaagctagcatcataatgacagaatcaaattcacgcataacaatattaaccttaaatgtaaacaggttaaatgccccaattaaaagacactgactggcaaattggatagagagtcaagacccatcggtgtgctgtattcaggagactcatctcacgtccaaagacacacataggctcaaaataaagggatggaggaatatttatcaagcaaatggaaagcaaaaaaaaaaaaaaaaaagcaggggatgcaatcctagtctctgataaaacagactttaagccaacaaagatcaaaaagacaaaaaagggcattacataatggtaaagggatcaatgcaacacgaagagctaactatcctaaatatatatgcacccaaaacaggagcacccagattcataaagcaagttctcagagacctacaaagagacttagactcccacacaataatgggagactttaacaccccactgtcaatagtagacagatcagcaagacagaaaattaacaaggatattcaggacttgaactcacctctggaccaagtggacctagtagacatctacagaactctccaccccaaatcaacagaatatacattcttctcagcatcctgatccacancatcacacttttctaaaactgaccacatantggaagtaaaacagtcctcagcaaatgcaaaagaatggaaatcataacaaacagtctctcagaccacagtgcantcaagttagngttcaagattaaagaaacttgccccaaactttcaactacatgggaaactgaataacctgctccaaaatgacnac

SEQ ID NO: 660092 - DNA, 313 bp, Homo sapiens
taactgtcgggaccaaactgggttgtgggtgatcttcttctcctcggatcccacgagcattcagaaggctgttcctggacacggtaccgttgcccatgcggggattacatgtgcagcgctatgtccctgaggagccaccttgaagttgatagcaaagctcttgcctgtgggaggcacatagaccttgatgatgatggttcttcgagctgtgagccctcctatgcagtctttcgaaatatggcacaggcgggttgcaggcatgggggtacttcccatggagggcaggctgtacacatagtgggtggcagaaatt

SEQ ID NO: 660093 - DNA, 421 bp, Homo sapiens
ctgtgaacccggccgggactaaatctatctgctgcttacgggttgagagctccgtctcgggtcgatgcgatcacgacatatccgacctttcagcgcataatatcatgcgcagtggacttgattccgcagtcctgcagcagccttgttttcatatagacactatgcagtgtccacccacaatctttgttctgtaaaattatcgtgccatggcctgcgcatttatttacagatacaatacgttgtgtgatggaccagctcttagctgtccatatcaacacaccctcttcttccatgtgctgcgtgtcccatccgtctgccatttttcgccgcacaatgctctattctatagtgtcctgacgccctgacgttcctttcatctcagacccgattgcttttctcgccggccttgttcatcctgtgg

SEQ ID NO: 660094 - DNA, 1488 bp, Homo sapiens
gtgcctgggcccgcacatttctgccattgcgggatttcctcggacgtcgtactcgtgtgtatactcgtggtctgatcggagtctagcacctcgggatccgagcgaactctctgagcaggtggactggtggggtcgagccgtctcgatttagagatcgggtagacaatgatagtaggggttcaggtccaatgatcacccgaaaagcagaggctaagtgagcagcatctgaatgaccgagtcttgcagaagctcccacgaatcgagggaaagacgctcgctgacacctagtcccaagcgtctactggagaacgggaccaagcttgaggtgcccacgtccccgtgtggctcctgagtggcctcgttgacgacgcctgtcgggtggccggagggggcccagccaagtgggtcgctgtgtgtctcaccgtcgaggactcgtcagcgttggtcagccccaacggttacactgtgtaaccaattgtgccgcactccattggcctctggcttttgtccttctctatgccttggtgcccttaggtggctggctcgttctcttgtcttctcattcggtcgtcgtcgagtaccttgactgcgaaagacatgagcgtcctcgtgaggccggacttaaccccggaaggtactaatgcaaccctatatgttcccacttgcggcagctcgtgcccaaaaacactttttgttccaacacaaatgctggggcccttttgttcatttggctaccaagagtcgcaacgcaccggactggatgcctatagttgcttcgcaatttgcccccagtttagactttgccctgttgaaactccactaacactgggggtagctccattcctttgtggggcgccttgtgactctcccgatcgtacacctgcttcctcttggggaagggaaccctcttgtgtcccacaaaccttctttcatttcaacgtgctacattatccaacgttgttcattccacttatgaaccctttggcatcaggccataagagtccccccctcttccaaaacggggttgaaccttttgcggtgcaaatccatgccccttttccccagttgggcgccttttatccttcatgtcttcccctaggaagcttcttttgaattagcctatggtccaacaaagccagttcgttcccaagctcttggatccctgcgcgtagtgtggagactttaatgattggcccttgggcaacttacccttagttcatcccttcctatcagttattaggaacgaaggcccaaatattcttctgttcaacgggggcgcccacatccactgaatcgcctttattgaccaaagtacaccacttgtgaggggagcccccacgacacaacttggtcgctcccttgacgcaacacctgtgacttcttctgctcggataccctgtaatggtgtcccagagggtatctattttagtgcccagggtggtagtgtggtcagctatgagattggagcttgtcccatagtgggattac

SEQ ID NO: 660095 - DNA, 640 bp, Homo sapiens
gagatagcctggtaacaaacgagggttcccgggattggacctgacgcagccatgctgggcatggtagcatgcgcctgtagtcccagctacttgggaggctgaggcaggagaatcgcttgaacccgggaagcagaggtttcagtgagcagagatcagcgccactgcactccagcctggacgacagagcgagacttcgccactgcactccagcctggacgacagagcgagacttcgtctcaaaaagaaaaaaacctctgcgacttgatatcaaaagaaagctaactgctagatctgatcgagttaagagtgtggatctgcatcctacagagccatggatgttggcaagtctttacaatggcagtgtgtgtgtcggaaatcatgaaaaacagacactggtgaagacatttgaagtatgtgatcttcctgtatcgagctgcaaagtttgtggcaaggaaggacttggggtggtgaacaggagtcggtgttgccatgccagacttacaaggggtcacattaccaatacttctgggagaggagttccacattgttgggaagcaccctccagaacctacttcctcaggaatggcggtacaatccaaacccagccttacatctcaaactagcattggatacttgctaa

SEQ ID NO: 660096 - DNA, 185 bp, Homo sapiens
ttatttgtgtgtttgtgtgtgtgtgtgtgtgtatctcaaaaaggaaaatatagtgaagtgaatatattggggttgtaagtggtattgacatgaaaatggagaggaagtgatgccaggagaaatggtcagtttatgaaggtctcacttcagaggtgtggatggatggtagggaaagagaattgagg

SEQ ID NO: 660097 - DNA, 203 bp, Homo sapiens
  misc_feature (23)..(23): n is a, c, g, or t
ccctaccccatcaccctgagtanagaatatttatcattacagcatcatttacatgatccaacatcacaattattctcataggaataaagataataattacagctctctactctctctacatactaattattacacaacgaggaaaatacacccaccacattaacaacatcaaaccctcattcacacgagcagcaggaggagga

SEQ ID NO: 660098 - DNA, 960 bp, Homo sapiens
agcgggctggctggaggtggcggagagcaacgtggcagccgggagcccatcagaggagaaagtctcgaggactgctgtgaacttcctgactgtccatggcggtgacagtgtcatcccgaaaggaccggccccagttttcagtactttatatcgctgtaatctagtgaccactgagcctgacgaaaggttccttcagctaactccagtggggaggaatactcgtaggcagacgtcggacaggaggtgccgcatggcagtggtcttggtcaactgattgtttgcagatggtggcacctacctggttcattttgatgaatgggctctttaagtggacttaggggtattgaccttctcagatggttcaaggtatgagtggggagtttgcccagagtcaagtttaactggcgtcgaagtctacattcgactatgacaatcatgagcctttgatgggggaactttagaatacatggcaagagtagatggttgtaggcctgctgactttccctgatggttctcattggaactcccccgcaatgaagggtctcttgggataacgaacaagctgctgcgtacgtgacgaagtgtttctgccattgttcagcgggcccagagctgcctccaatgtcaggcagaaatctaactgccttgaccagcgcaggtggtgcaccagcgtgataagtattgggtaaagccagtgcccctgtttgtcgattcgaggtgaaccaatgaatcagaagcggagaatgagcttgacgaatgaccgtggaagcagagggctggttttgtgcccctggcacccggccattccaggaactgggacacagcaaagtgctgaagatgctgggcaggaagacccgccagcagtcattggggggtcggtcgttgccctaacccttatgtttggaggacaaaggggcccctcttttaaatggtgagaattttgccaaaacccggttccag

SEQ ID NO: 660099 - DNA, 358 bp, Homo sapiens
actcaaatgatgacaactccagcttttggttactcaggccaaactctcagagtcattctagacccttctctttcaaaatgtacacccaatctatcagccagtcctgtcagctctattttaaaatatatgcagaaactaaacgatagtggtagaaaatagatccgaggggcttggagtgtggaataagggggatacaaaagaacaggagaaaatttggaagctgatgggaatgtgaagtatcttgactgtggagatggttgagtgggtgtatatgtgtgtcaaaatacaataaattgtacactatatgtgtggtttaatatgtgctagttatgcctcaataaaactgttttttttttta

SEQ ID NO: 660100 - DNA, 1864 bp, Homo sapiens
  misc_feature (15)..(15): n is a, c, g, or t
ccggggtggcgcacncgcagccctcccgctccgggcgccctccgccgctccgagaccccctgggggcgcgtcctctcccgctcccctgttccctcccccggctcagggcgggcgcgtggtcccaggggaggctcccgcccagccccgcactcctttgtgcggccgggcgggcgctgcgtcaaggtggaggcgcggccacacgcgcgcacccacccgcgcgcacccagcccccgggagaggcaggaagggaggcggcggcgcgaggaggagggagcggccgtggagcccaatcgttcgctccccttcccgggtccgcgcgcggcgccgcctccgccattgctgcgagcaggagcaggagacgcggagctcggagcgctgagctgacctgccggagccgggcgtgggctgcagcctcggagctcccggaacgatggtgaagttggggaacaatttcgcagagaagggcaccaagcagccgctgctggaggatggcttcgacaccattcccctgatgacgcccctcgatgtcaatcagctgcagttcccgcccccggataaggtggtcgtgaaaactaagaccgagtatgaacctgaccgcaagaaagggaaagcacgtcctccccaaattgctgagttcaccgtcagcatcacggagggtgtcaccgagaggtttaaggtctccgtgttggtcctcttcgccctggccttcctcacctgcgtcgtcttcctggttgtctacaaggtgtacaagtatgaccgcgcctgccccgatgggttcgtcctcaagaacacccagtgcatcccagaaggcttggagagctactacgcggagcaagactccagtgcccgggagaaattttacacagtcataaaccactacaacctggccaagcagagcatcacgcgctccgtatcgccctggatgtcagttctgtcagaagagaagctgtccgagcaggagactgaagcggctgagaagtcagcttagcgggatgggcaagttccttacaatgtgtcacttgcaaataacaaagggactttgagggacatttcattaaatataattactgatactttagaggttactcatttacggtgcaattgcttctgtttgctaatgctgctttgcaaataaaacttgctgccgaccacccacgggcataaaatcaagtgcatttcagcattgcctaaagagctctgacaccacttttcatgttaagatcttcatttagctcctttactgggatttattggatgctgtaaaaaaataaatttacactggatatgcgaagggtttggatctcagataaatgcattttgtggaattgattttctgaaccgaccctgctgtctgcaaaccttcctccatagccatatctagagtgatctctcgctgtgctaagagcaagcctacttcgcatttcttcctcggccatcagcgggtaacagtgctgactgctgccaaggtgcactgtagtaagtaagtggcatagagaacgaggaaaagtggaaatgtaatttctggtaagcttgagctactttaatttttattctatgaaactgatatcccttgatgtgggaaacaggcaggaaaggctgtggggtgggggtgggggactggtgtggcaccgtgcaaacaaaatgacaaatttcaactcacaatctttgtaagaaaattgttccagtttgaatcttgatattaaagtttatgtttacaaaactgccagttagatgaactaagtgtgtaaaacaaatagaaaagacattcgcagacatttcttctatgttattgaatgtgttgtttctggtgtacgtgtcaaaagtttcagttttttagatcagaaataaacgacaaatagtgtga

SEQ ID NO: 660101 - DNA, 1334 bp, Homo sapiens
  misc_feature (15)..(15): n is a, c, g, or t
ccggggtggcgcacncgcagccctcccgctccgggcgccctccgccgctccgagaccccctgggggcgcgtcctctcccgctcccctgttccctcccccggctcagggcgggcgcgtggtcccaggggaggctcccgcccagccccgcactcctttgtgcggccgggcgggcgctgcgtcaaggtggaggcgcggccacacgcgcgcacccacccgcgcgcacccagcccccgggagaggcaggaagggaggcggcggcgcgaggaggagggagcggccgtggagcccaatcgttcgctccccttcccgggtccgcgcgcggcgccgcctccgccattgctgcgagcaggagcaggagacgcggagctcggagcgctgagctgacctgccggagccgggcgtgggctgcagcctcggagctcccggaacgatggtgaagttggggaacaatttcgcagagaagggcaccaagcagccgctgctggaggatggcttcgacaccattcccctgatgacgcccctcgatgtcaatcagctgcagttcccgcccccggataaggtggtcgtgaaaactaagaccgagtatgaacctgaccgcaagaaagggaaagcacgtcctccccaaattgctgagttcaccgtcagcatcacggagggtgtcaccgagaggtttaaggtctccgtgttggtcctcttcgccctggccttcctcacctgcgtcgtcttcctggttgtctacaaggtgtacaagtatgaccgcgcctgccccgatgggttcgtcctcaagaacacccagtgcatcccagaaggcttggagagctactacgcggagcaagactccagtgcccgggagaaattttacacagtcataaaccactacaacctggccaagcagagcatcacgcgctccgtatcgccctggatgtcagttctgtcagaagagaagctgtccgagcaggagactgaagcggctgagaagtcagcttagcgggatgggcaagttccttacaatgtgtcacttgcaaataacaaagggactttgagggacatttcattaaatataattactgatactttagaggttactcatttacggtgcaattgcttctgtttgctaatgctgctttgcaaataaaacttgctgccgaccacccacgggcataaaatcaagtgcatttcagcattgcctaaagagctctgacaccacttttcatgttaagatcttcatttagctcctttactgggatttattggatgctgtaaaaaaataatacggggagcggccgaacaaccccgaacccgcgcacccggctgctctctctgtgaccgagata

SEQ ID NO: 660102 - DNA, 753 bp, Homo sapiens
acaaatataccctgggttctggattctgccatgaggcgaatgatttgagaaactgaatatagatgcccttgtccggaaccccatggccgatctaggaatgtctactactggacctagggaccagctcatgaacagtgctcacggaagcacgacttatcggcgaacttggagaggaagaactagagtggttattcaggggccagatataagtatctattgtacgtgatgccctttatgcagcctgtatagtgaaggtacaggtcgagcttaactcatttgtatcatccaaagtgttcgtgggaccttcccgagctgatcctaatcatcttgttgatgatctgttacacaccttgctctccaggtgaccctggtgccgttgaaatgacctggcatggattgtccctgtgagatcaactctgggtagtccagtggttctccattgctcgagatatgtgagtcgtgtcacctatacataactagcaagaaccactatcagtgcaatgatacatgacttgctggatgagtttaagaagtgaacagacagatctcggtcccgaaggctaagccgaagacaaggacatgatgcttaccgatattgtattctttcttctcatagatatctatgtctatttggatcgcatcaatagtttccagtgaaaagatcttttaccccattggaagtacacatctcacttcggcagtttcattcgggttatattgtacttttcctccattacttattaatactcctag

SEQ ID NO: 660103 - DNA, 2050 bp, Homo sapiens
  misc_feature (64)..(64): n is a, c, g, or t
  misc_feature (71)..(71): n is a, c, g, or t
  misc_feature (90)..(90): n is a, c, g, or t
  misc_feature (1881)..(1881): n is a, c, g, or t
aaaccttgtgcttgccccaagtggaactgtcctggtaacaacaacaacgacattttcaccccangcgcaantgcaaaactgtcctcaatnccccatgtgggcgctgggaatgccttccctgtaacagatgtcctcatgcccttcaagttacacataggtgttcctgtttacagttcctggaggtcagaagcacaggcacgagagaagcaggcccgttcttccgtggcccacttcttcctttgaacaaaggctccttggacccagtggcgggaaactggccctcccacaccccctgcctgttctgggggcagcagtctttggaggagtaatgccaggcagcccctcactgagggccccagtctcccctgcatttcttccctgattgattgataggaggtggctgggctgccactgaatttgtcaacttagactcattgacaacacattaaggggctgtaattatatttattagattaacaaggcagatgtgaattttctcttctataatccagtaagtctgtgtattcgttgactcagacagacaagaagccacaaggaaacaaagaagtaatcatttgttgagagacgttattaactatgatcttccctgaagctaccgggatgggaaaggtcagtgtcttcctttgaaccctgagacaattaggggctcttgaggcctgctgtgcccctgctgccaaggcagcctcaagttcaaggagcagctaatcacccactcctgcattcagtctgtcttgcctgatgagggctacgcaggctgcctcccattggtgtgcactgtttcctttttcagctgctaaatggctgaacaccatcggcctggggtatccctttttggggaatacgtctgtctgtctgaactcctttcccttcaaatggcactgtgataaaatctggtcataccatgctccagcactggaagtacatgaaagcacgcagtctgtgagtgcccatgaggactctcgtgctgggcccccgtggccctggctagctgtcgtaccagtcgaggaagagcaaggagaaggagcacatcacgaggaagaagaggatccacacgcggaagccagcgttgtttttaatggcctctcttatgtcttcgttgccttccttgatattttcagttgcccccacaactaactggtgaatgctgtcaatctcagcttcctgttgcaaaaccttttccgtgaatatctcttggagtctggaaatctcaaccactctcccttcgatttgcctcacttcatcaaacaagctgttcatttcaccaattagtcgctgattttcctgttcaaacatttgtatttcttctggggataactcatcttcgcctttgccatctccccacgttcccaattcaggttgtgtttcagccaaaattttttctggacgttcttcagtggcagggttttcttcagagtcttttgaaggactctgtgaaactttctcagaagatgtggattctcttgtctttgtatttggttctggttccagcttagataatcttttcttatccaccactcttttaactcggatggctctctgttctgagtaaagtttacatactcttttcaagtaatcttcaatgaaatccaaaacagcggtcctgtgctccttcacttgctgggaatgtatctccttgtgagcttctgttcgtagttgctgaattgcttctgaacaggtcctcatgaatatctgggcatcctggtctatctggtctcgttctgtgtctgtcatcctcccatattcagacatggtatggctataagcattaatataatctttcctgtgttccagaagaaaatctctcagtttgccaatgtgagaaatcacttcgcgggcccggctggagaagtcgcccttggnccgggggctccggcggaacagcctcgtccaacggctgccatcgaccccgccgcccaccagccactcccagcgaccgttgttccgcgtcttcacggtcattgacgctggcccggaatagcagcgtgatctccaccgccatagcgacccgcaccctcagccccacactagg

SEQ ID NO: 660104 - DNA, 364 bp, Homo sapiens
  misc_feature (1)..(1): n is a, c, g, or t
ntggagaggaatgaagggcccgatagagatggctcctcactctacagggttgatgcttatggggctaatatgtcgattcaaattcatttcacagttaagagtggtatcttaaaaatatgattcacggggagaagctctgatagcatacgtttcccaggaagctttccatggatctgcagaacacctttagacgggacgccgggcatactttcggcgatgctgctggtccactcgctccaggtaccaagtacttgggaaaagtctgtttgtgtcaccaggtggggagaaattcaccttatggtagaatcgctctctttggttcgacaggtctgatgtgctgcacaccaacttgtacaggggagag

SEQ ID NO: 660105 - DNA, 1304 bp, Homo sapiens
  misc_feature (15)..(15): n is a, c, g, or t
ccggggtggcgcacncgcagccctcccgctccgggcgccctccgccgctccgagaccccctgggggcgcgtcctctcccgctcccctgttccctcccccggctcagggcgggcgcgtggtcccaggggaggctcccgcccagccccgcactcctttgtgcggccgggcgggcgctgcgtcaaggtggaggcgcggccacacgcgcgcacccacccgcgcgcacccagcccccgggagaggcaggaagggaggcggcggcgcgaggaggagggagcggccgtggagcccaatcgttcgctccccttcccgggtccgcgcgcggcgccgcctccgccattgctgcgagcaggagcaggagacgcggagctcggagcgctgagctgacctgccggagccgggcgtgggctgcagcctcggagctcccggaacgatggtgaagttggggaacaatttcgcagagaagggcaccaagcagccgctgctggaggatggcttcgacaccattcccctgatgacgcccctcgatgtcaatcagctgcagttcccgcccccggataaggtggtcgtgaaaactaagaccgagtatgaacctgaccgcaagaaagggaaagcacgtcctccccaaattgctgagttcaccgtcagcatcacggagggtgtcaccgagaggtttaaggtctccgtgttggtcctcttcgccctggccttcctcacctgcgtcgtcttcctggttgtctacaaggtgtacaagtatgaccgcgcctgccccgatgggttcgtcctcaagaacacccagtgcatcccagaaggcttggagagctactacgcggagcaagactccagtgcccgggagaaattttacacagtcataaaccactacaacctggccaagcagagcatcacgcgctccgtatcgccctggatgtcagttctgtcagaagagaagctgtccgagcaggagactgaagcggctgagaagtcagcttagcgggatgggcaagttccttacaatgtgtcacttgcaaataacaaagggactttgagggacatttcattaaatataattactgatactttagaggttactcatttacggtgcaattgcttctgtttgctaatgctgctttgcaaataaaacttgctgccgaccacccacgggcataaaatcaagtgcatttcagcattgcctaaagagctctgacaccacttttcatgttaagatcttcagtgccctcccattcttccttgttcagtcctttgggccacctgattatggctctagccagaggtatctcagtggtgga

SEQ ID NO: 660106 - DNA, 1207 bp, Homo sapiens
  misc_feature (1038)..(1038): n is a, c, g, or t
tgccagtagtacccccacccaccctggattgctcctttggaggctggtgagccactgcctctcgaaagcagctggaggtgggcgacaaggtggtgggtctcatgaacacacgcagctccgcggtcacacaattttgtgatcagccccgtgagctctgcccagcaaggctcctgggcagctgtgccggcgagactaacacccgctgctgggactcagtgctgcgccacgtcgcacctggggaacctaaacagtgcctacctctcttatgtcttcgttgccttccttgatattttcagttgcccccacaactaactggtgaatgctgtcaatctcagcttcctgttgcaaaaccttttccgtgaatatctcttggagtctggaaatctcaaccactctcccttcgatttgcctcacttcatcaaacaagctgttcatttcaccaattagtcgctgattttcctgttcaaacatttgtatttcttctggggataactcatcttcgcctttgccatctccccacgttcccaattcaggttgtgtttcagccaaaattttttctggacgttcttcagtggcagggttttcttcagagtcttttgaaggactctgtgaaactttctcagaagatgtggattctcttgtctttgtatttggttctggttccagcttagataatcttttcttatccaccactcttttaactcggatggctctctgttctgagtaaagtttacatactcttttcaagtaatcttcaatgaaatccaaaacagcggtcctgtgctccttcacttgctgggaatgtatctccttgtgagcttctgttcgtagttgctgaattgcttctgaacaggtcctcatgaatatctgggcatcctggtctatctggtctcgttctgtgtctgtcatcctcccatattcagacatggtatggctataagcattaatataatctttcctgtgttccagaagaaaatctctcagtttgccaatgtgagaaatcacttcgcgggcccggctggagaagtcgcccttggnccgggggctccggcggaacagcctcgtccaacggctgccatcgaccccgccgcccaccagccactcccagcgaccgttgttccgcgtcttcacggtcattgacgctggcccggaatagcagcgtgatctccaccgccatagcgacccgcaccctcagccccacactagg

SEQ ID NO: 660107 - DNA, 373 bp, Homo sapiens
  misc_feature (40)..(40): n is a, c, g, or t
  misc_feature (58)..(58): n is a, c, g, or t
  misc_feature (75)..(75): n is a, c, g, or t
  misc_feature (115)..(115): n is a, c, g, or t
gagaccccgggattgcagactcacccttcgtgcgctcacncaggctctcctgctttgntccctgctgcctgctgngtgctgcccagtgtgactggcgatggtgggtgggtgagcnctgtcagtcgctgttcctgtgctggatgatggggcaggtaaatgccctctctgcagtgtcttacagcacacctgcatctccagttttcggcccctcactggctcttaacaggtcacgtgatcactccagacaacatattgcaacctgtcatcagcatcagggtcaccaaccacccgctagagtacacgttccagaaaagagaccttcatcagatggtcagtcccagacagctcgctgcacctcaccagaccacaaata

SEQ ID NO: 660108 - DNA, 164 bp, Homo sapiens
agttgtagtgctcgtggtcacaatattaaaagatcccatctgctaataggatcaaaggccagatgtgtatggcctgtgttcttaaatgtcgattgtatttataccttggtaattaattcatactttacacacacatatcctctccaaagaatttgtatcagatt

SEQ ID NO: 660109 - DNA, 1011 bp, Homo sapiens
  misc_feature (86)..(86): n is a, c, g, or t
  misc_feature (842)..(842): n is a, c, g, or t
ctcctccatcacacgtgtgcagaggcagctctgggtagtgagagcttttccctgaggagctctgcgcacacacacctgctagcaanacatggctctgctcctggctgtgtagagcagcagcctttgggaaaaatgtctcgtgctctcaagtacattcccctttgagtgaaaacatacagctcctttgtttttgtttttttacctgttgcaaaaccttttccgtgaatatctcttggagtctggaaatctcaaccactctcccttcgatttgccatttgtatttcttctggggataactcatcttcgcctttgccatctccccacgttcccaattcaggttgtgtttcagccaaaattttttctggacgttcttcagtggcagggttttcttcagagtcttttgaaggactctgtgaaactttctcagaagatgtggattctcttgtctttgtatttggttctggttccagcttagataatcttttcttatccaccactcttttaactcggatggctctctgttctgagtaaagtttacatactcttttcaagtaatcttcaatgaaatccaaaacagcggtcctgtgctccttcacttgctgggaatgtatctccttgtgagcttctgttcgtagttgctgaattgcttctgaacaggtcctcatgaatatctgggcatcctggtctatctggtctcgttctgtgtctgtcatcctcccatattcagacatggtatggctataagcattaatataatctttcctgtgttccagaagaaaatctctcagtttgccaatgtgagaaatcacttcgcgggcccggctggagaagtcgcccttggnccgggggctccggcggaacagcctcgtccaacggctgccatcgaccccgccgcccaccagccactcccagcgaccgttgttccgcgtcttcacggtcattgacgctggcccggaatagcagcgtgatctccaccgccatagcgacccgcaccctcagccccacactagg

SEQ ID NO: 660110 - DNA, 670 bp, Homo sapiens
atacacctacgaatgccaatccaaggttcccaatatcacccgcacatcctaaggggacaagacatatagacgtatgctacaacctcctctcctctcctggcctcactctcacaacctgcctttgcccacccacctactcaacagccgaggcgccttccgccgtagccgcctcgacggattcccgcttgggtgggaacgtcggacgaatatgcgtatccctacctcgaaatagagggatccgaaccgtatgtgtctaagtcagtaatgctaagaggaagctacactacggagcccaagccctaagcgatagacccggatatataaggagattacctagataaggtttcagtaactccgatgctttgcgatctagaaattccggcgatagcgtatgtctcatacctactaccgtatttcaaagccccttccatggaagccctggcggactaatattgtataggattttcggatgcggtcaggaacctacgagagccggtttagaacgcgcctatgggcaagtggtaagcgtaatagacggccgacgccctaatttaacgtaagacgaagatgtgccctcgtaaaagcgaggtaaacgcccctttaattaaacttccggcaacttcccgaaacccgaaaatccgtgttgctataatataaagacgagcgagac

SEQ ID NO: 660111 - DNA, 516 bp, Homo sapiens
tgcatttggttattgaagcaggtaggggcagatttcacgaagtgactgcagatctggaatagggggtatgttgtagatctgcccatagagctcactttagaccggcctatactcctacaaggaattggggtaggatcttctactcagccttgccacaatagaatgtccaatgcccttctagtatgtttggtgaaggtcttgaaggcaccatttcccccatccaccctggggagaaattgagtccctaaagtcaacgacatggcttattgaggctgagtttgcaacagatccgatctgggaggtagaaacaaaaatgactgaacatctttttatcccccaatcgttacaaagcctaaataactctaaacgggatgggagggcaaattttaggtcagttgacatcctggagaagatatcctaggtcctgtctcattccctagaccgcataacactccaaccgtgtaaatctcaggaccctgaagaagacagttgtaggggagaggaggggagctagct

SEQ ID NO: 660112 - DNA, 185 bp, Homo sapiens
tgcagtgcattgccatataaatatggtgagggaaaggcagatatccccacgaggcctgccaggtaaagccattgtaattgcctatggtcaggcctgaaaattcacacatggattttaaccaggggctgtactcttcaggcacttcttcagcaggacttgagattgtagtttaatttcattcccgc

SEQ ID NO: 660113 - DNA, 367 bp, Homo sapiens
ggttactggacttcttctacacacgttaaacaataatttctcaagacctgatttaagagcaaactttttaaactgagtacttatggccgggtgtggaggctcatgcctgtaatcccagcacttcgggaggccgaggtgggcggatcgtgagatcaagagattgagactatcctgggcaaccaacatggtgaagccccatctctactgaaaatacaaaaattagctgggcatggtggcgcatgcctgtcatcccaactacttgggtggctgaggcatgagaatcgcttgaacccgggaggcagaggttgcagggaggcaaaatcgcgccccttcactccagcctggtgaaagagtgagactccatctc

SEQ ID NO: 660114 - DNA, 908 bp, Homo sapiens
tactaaatatttcttgtgcttgtcttaaatgactatgcttggttgtacaaaaatctctgtggtatctctcatgcatgtggaaaaatggactttttaggtcactagcatgtcagttgttaactgacccctatccagtttccaaatagaatgtaacaatctccctatgttcttcgatgtgcatgactggccttgatgttttaataagtcgctgagatgtatctgtaaaaggagacgggaaatatgcctgggaatagatgcgtgcttctgaaattgtgcgtaaaatagctatgtaagaaatataagcatcgaaagagtgaaacattacttatatctcctctaatcattaattgcaaggtgaataagcattcattggttatttcctctagggcttgtattaaaccactgactcaattgtcttaatagtatactcctcacagaactaaaaggagtaccactagacagatgtcgagaatagtacaaaatatttacaaagatagccttagaacggtactctgtaccataaaagctacgaggttaccaattacctattcacttaaagtgcaaggcgcattactgaacaaatacttctgattttgacactgttgacgccagatatgtgattgcatcttcatgcctgcattttcggtccactagaaatttattcacctgtgccctcagaaggtaccgttgtcagccatgtatttcttcatcagttgggatatggccagtttaaggctggccatttaaacggaggagggattagacttaattacttaaatgaccaatcatgcatgaacggcaatgagaccgcgaagaaaaatgacgaaacggccctaaaatgaaaaaaaaaaggccgaaaaagacgaaagaacgaaatgaaagggatatttcatccttttcttttctag

SEQ ID NO: 660115 - DNA, 163 bp, Homo sapiens
  misc_feature (144)..(144): n is a, c, g, or t
gatcaaacccaaagggaaaagtgttgctagagaaaattggggaaaggtgaaaaaggaaaaatggtagtaattgagcagaaaaaaattaatttatataatgtaattgattggcaaccagatttatctaaggtggcctgaattggntagggaaaaggaaaacctg

SEQ ID NO: 660116 - DNA, 1171 bp, Homo sapiens
ggcccaccccgtatctgtctccagacacccctgactagaagtgagtccctttcccccacccgatctgccgggcactggaccagcgggccggtgccctctgcggtgtaggggaggccgaaaggctgtgagccacagtgtgctgtggactcacactagtgactgcgggggcacatgggtggcaactctgatctgcggctgtccttgtccaacaggctcgtcgtcacgtctacggaccgatatcgtacgttaataccagctggctgtggacgcaacagcttgccagacaccctgcgtactccgaaagcctcagggacacaaggattccccccaaggggctggtgcctgccgccgcgacccttgtgcgcaagagacactcgttgatgacccatctatggaaggaagctgcactatacagagagtggaacaaacccataacctatggtcccgggttacgagccctcacaaggttcttggacttggaaccatggagcgtagcaatgatcagccaacgtccacttgactagtagttgcccgtttatccggcagcaccagttgcctaagaacccccagtccttgcactcgcaccagtgtattccttgagataactaaagtggctacaagcctccacatagggctataacgcagacaacactcaattgcgtgttccacggagcaacacaccacgaaaaactatcacgggaaagaccacgattgacataagccaacgacaccggtggcgcatccctaattaagcatacaggcaggacgcccctaagggccccagtcattcttccttccattccatgactctaattggacccccctgtcagtggtcatccctgtgccacctttcatcgaaagtttgatgcaagggagtagtgcatttaagtgtcattatagtggacacaaggtatagggccagatacagtagatatctgtttcagctaactcgcgtaagcacgaataagttttccagagaccagggataattggtagcagcgtaactcaccaaagggatggtcatggagaggtcaaagaagataccaaagaagtatgatagcgaacaggaatagaaatcaaggtagagatcacaaggatagaacagtagggtggttaacgaacacaagcgaggtagattcctgtggcgtactacatttagtacgattattag

SEQ ID NO: 660117 - DNA, 670 bp, Homo sapiens
atcccagcactttgggaggccgaggcgggtggattactcaaggtcaggagttcgagaccagcctggccaacatggcaaagccccgtctctactaaaaatacaaaaaattagccaggcatggtggtgcatgcctgtaatcccagttacttggggggctgaggcaggagaatcacttgaacctgggaagtggaggctggagtgagctgagatcacgccaccgcactccagcctggacgacagaacgagactccatctaaaaaaaaaaaaaaagcaacagggctctgagattcccaaaatgaaaggggccaacagattagggacagagaagtgatccagacaggcctgtaccacctatacagagagggaggggtccaggtatacatgaaagataggtaaatgacgacaaacagaaacacaagaagaaaagttggtcataaaggggcacaggaaacagttcggtgcgaccaggcaaccagataagtgtacacaggaagccaaggaaaaagcacgggatgaaacaacggaataacacaaagttagaaatccatggacatagacagtgagcaaaatcattgttgaactccacggaccagaagattccacatatacaccgaggcccagaattgggccacggtaaaatcggggtcaaagaagcaccccaaggacaagg

SEQ ID NO: 660118 - DNA, 1486 bp, Homo sapiens
ttggcaagttgcacatttcacaggtgcattcattttggtgtgcacaattcaaacagcctaagtgacaacaccagcaaatcttgtgtcagtggcaatgcacacattgtgtaatgtgtcacccccaatctggtcagcattttcaattgcaacagtttagtgggcacatgttttggtgcacagcagtgtgtgcattgtctcacagtttgcacatcgccagcacatttccaactcaagatacttcagatgtcaagttttcaagtgatcgtagctctcttatttatctcaagcacattccaattgtacatgtgcacaacaagtgccagcattttacctgtcttcacaacacattttgcacaatccacattttcaccattgcacgatatcgtttgcacacattcgtcacagccacaggttattcattggtagtccagcacaccatcttacaacacaacttccatcccagaattatctccaccagggcgccaacccattacaattgcatttcaccttgcatccacatttctcggcacaagggctttcaattgtcacagcctcaagcactttcaaagctgcacacctcttgggattcccatctggttgttaccattggcaatggttaactggcggcaacattgccacaccaacacatgttcccactgggcccttactcacctcccaagctaccggacgatggtttaccacaccgttggcacacacgactgacggcctccttacgttaacagaggtcccactaagctcccttctcctcaaccctccaaccatttgacccattgtagacccacagacttatccctttggttacataccaagccgcctgccacttctgggccacggaatcacgcgacgccactgcattctacacgttggtagctgccattcacagggcaccaaaggtggtgcgctacgggctacagggacaccgaacgaagcacatggacccacaaacacgtgaaaacaagaccatgtgagaatggggaacagctcggccactgaccccgaccaaacaagcgcacgaacacaaccaaggcccccacaacagcacacaacacacacgaacgtgggcacccgaaaagtggacacacagccaggctcacaccacagtgtggaacagcaccacaaagcacagcgatgtgcaaacatagcccacagagcgcgcgcagagagaagagtacggcgaagaagaacacagaaggaggagcgagacacgaattagacccgcggaagaaacaaccagcaactgcagagaaagcaaacaacagaagacagagggtaaacgagcagggaacagagcaacatcgcaacaacggagcgacaaatgcgcgatgaacggagagaccaagatagaacgtaccaacgaccacacaaagagagagaaaacaaggaaggatgacaggacagaaggccacacgacgagactgacacggtagtcgactattcacgatggtcgagtcatgaagcaaggaat

SEQ ID NO: 660119 - DNA, 405 bp, Homo sapiens
catggcgcatcattaccattaatccagagacctgcagacaggtgatacgagaccatgaacagcagagaaggagcatcttagtagcagagaaggtatcttataaaacatcctcatgttagcaaacccacgacttactaaattggcctctaacagaggagataggtgcaacaagtataggaaccccctttattgatgaaatgtttgcagcttcatttaaggtgcacttatgcagtggggaatatgacttcatagaggcatacaatgtgccagaaccgtgatagtccaatattcttgcgagattcaggccaaagagaaatgggttctgtatgtatgagtaggttgaattgagtgtttcgaatatgagtaaagttgaagaaggaaagaagtgggaatgtggaaagagag

SEQ ID NO: 660120 - DNA, 353 bp, Homo sapiens
ctgttcggattgggtgtctgcatacgttaggtgcggattgagaagtcacagctggcatgggtacccggatgatgttatatcgagtccttcttcagagaagtacgatttacgtagcaaatttttgggccgcgggtgacagggcaaggatgttgcgagcagcagcatctgtcatggaccctccaaatcccttcactttctggaacttctgttctggctgcagggtcagtagcaggggctgtgcccgtgtgaataggctggattgggcccatactcagctccatccgttgcccacctgcgtgtactctcatagcggctgaaagtgtaccaagggcaggaacagcgtcggggggtca

SEQ ID NO: 660121 - DNA, 167 bp, Homo sapiens
acaagtggcagggggtattcagacgcagtatcatgagaaaatagcgtagtgtacatgacacttccataggatggtacgtgcgtctggatccgaacaggaaccactgttcctgggagggactgcaaagacccagcatttgccgaggcaaaatcttcttgaagaacctg

SEQ ID NO: 660122 - DNA, 99 bp, Homo sapiens
tactctgctgtactgtgctctgtcactagtaactgcgcagttgctggaatactgctttgcccccctattgaatttgtgaataaaaccttctctttacat

SEQ ID NO: 660123 - DNA, 316 bp, Homo sapiens
  misc_feature (44)..(44): n is a, c, g, or t
  misc_feature (53)..(53): n is a, c, g, or t
  misc_feature (81)..(81): n is a, c, g, or t
  misc_feature (179)..(179): n is a, c, g, or t
taggaaggaacctgagaggcagagtgagcaggtctaggattgcntagcttgantaatttcaatgggtttggggtaggatgnccctagttgtccagtctctgggggatagtggtgcagcgtgtaagagcccagtaaaggaggtggttggaaggtatgggctctggattggttagtatgantatgaaaggcacggcacgcttgcaggtgagtgagtgagttactatctctagggaattggatgagaggatggagtatgatgaacctttgattcctggagggccatgagttcactgtgggatggaaatgcaactgtgct

SEQ ID NO: 660124 - DNA, 227 bp, Homo sapiens
gctaagaccccacttgcggacactcaagcagtgctcgactataagtaatgtacattctgcgatatggtgacttgctagactggtcgataaaggatgtcaggttaaaataaaggatgtgggacagtttttgtgcgagaagtgctcgatagccaacttcagagacagcaggttgtaaattgtttcttttgggcgggaaaaaaccccccctgttttttttttttttaaaa

SEQ ID NO: 660125 - DNA, 564 bp, Homo sapiens
  misc_feature (370)..(370): n is a, c, g, or t
  misc_feature (523)..(523): n is a, c, g, or t
taagactagtatgaagttaattatttaatggatagctaacaaagttgtattctggggaataaagtgctgaatcagtgatatgggagtaaacatcttttttggatgaaatactaatatatataaaaatgatagtagctagctagtagctaacatttactccaggtagtatcacatttacttcacacagtaatcctatgaaggaagttctatttgtattattttaagatgaggaaactgagtcagagaagttctcacttgaccataccatactactagtgggcaatgcagccagtatttgaacctaggtattttgtccgactccatgatctcctcagccactgtggtgtgctactgctattgtggacatgtncctggtgtctgctcagagctgtagagattggttttaggtctcagcaagaggaaccttgtcccccttggtaactttctgtgttggtattctgaatgggaactatatccttccattcttctggttggctattgtttctcagtattctcttcctgncaaaactagctcttagtttttctctactgctgtgtctttgt

SEQ ID NO: 660126 - DNA, 333 bp, Homo sapiens
acatcccccgttacgtgagtctctactcacatttttgggagaagagaacaattttgttattgtagactacaacccagtaactagtgcagtatctatagagctgctgtgtttttccatagtttatcttatctacatctaggagctctagtaagagaagtaatacaagaaaattaaattaataactctttgtcatttaggcttctggtgactgcaacatgtaagcagcgtctaccgattggtcttttgcaatttttatttttatttttattaggaaccgttctggactctgttcaccccacggaagtgtgatgttctcggcaagtgggtgttgca

SEQ ID NO: 660127 - DNA, 110 bp, Homo sapiens
  misc_feature (57)..(57): n is a, c, g, or t
gcagggtgtaaagcagtttaacagagggccctttttttttttgttcaaatgattttnattattgggaagccccatttttttaatatgcaaataaaaagtttaaaaagtta

SEQ ID NO: 660128 - DNA, 605 bp, Homo sapiens
  misc_feature (377)..(377): n is a, c, g, or t
ggaatcacttgaatgtgttcactgatttcaatttttaattttcaattatctactacaggtcatgaggggaaaataaaatcagtacactttaaagattagtgaccataatatctgcttgagatacatgatattgtttaattgcatgctttcatgcatgatacattgagttgtcttagttgtctgttccgttggcatgaggttgagaaatgttctgaactgtgtctgtgcaaaccgaaacatataaatccttgggcttttgaactgaaatggttgttttaacctgttgctttcagatttcaagtctttaatttttttcctaatttagttattactcattcataaagctactatcatagaaaaccaacatataaatgttntgcttagcatgtatggttgttctaaagtaggatttaacttgttagaatatgtgttagcgtatcaggcaagcattccttgttctagagaagaaaaatcacatagttaaaaaaacctacactttaaattgaagaattcaaatatattaccatatgttttggctttttatgaatagcggattcaaaaattacttaatgtctaaaactatgtgacgttgcaaatagcaaaaa

SEQ ID NO: 660129 - DNA, 338 bp, Homo sapiens
caatttttgtatttttagtagagacagggtttggccattttggcagggctggtcttgaactcctactcaggtgatcctcctgcctcggcctcccaaagtgctgggattacaggcatgagccaccaggcccatcctctgatatgaatttcttattggagaatccctttatgtgtccagccctgtggtaggctctgagaatatagtaatgaacaaggtaaacaaaacatacatagtctctcccatcatgaagcttacgttccagcaaggagctagaccttcaatagataattatcatttaaaattataccttgtaatcagtgctatcaagaaaaataagg

SEQ ID NO: 660130 - DNA, 137 bp, Homo sapiens
catgtgggcatcatggcttaaacacatttttctaatttccctgtctaggtttttttttttcattattattattcctgactgaggcagggggcagtgtgtcaggcctataattccagcacttggagatgccaaagtga

SEQ ID NO: 660131 - DNA, 175 bp, Homo sapiens
aacggccaaaaggggttgggttaggtcccagcttgggccgaccccccccccaggggtcagcaaagcccaggaggggacattgcccgcccgccgttcccagaccttgcccgagtgggttttgttgtttgaataaacgtgaacgtgaacccagggggaagggacccgggaattttga

SEQ ID NO: 660132 - DNA, 972 bp, Homo sapiens
ttgtggttgtgcggtagtcgggcgtacgtttttgtgctctgtctggtctctcattttcgtgtcttgctggttctgtctggtgctgtgctctccgagtgctgcgccttgtggtccgaccgtttgtggagaccttgcgggcctttgtccgaggcctgagccccctgggtccatgttgctcccgttttgtgaccgggcgtgtggtgtaacgcgccccacggctttgtgcacccgggccgagtacttgggctcccccctgtccttgtgcactgcccctggggcgccaaatttaaccggccgcctgctgcgttttgccaaccagccttttatgtcgctccgtacaactttttcatagcgccacatgcgctctgtggtacacgacttttgtcgccaaagcccccctcgtgttttcccgcgtgccccatcattttaatattcgccccccggagttatacatctccccactatagttttcggcccttgccaaattccaattgcggaaccactcttcacccggttgccttcacaaatcctcctcctctcaagagcgcttccaactctcatgtccccccgcaaaaaagctctttttgaaaataactctcttctaaccagagcgcttctcctaaacctctgccctttatcccctcccccgattcttacccccctgggaaaacacttttccttggcggtagataacaacgaggttctctctgtgaccaaatatccacctcgtcccctactttcacaggacctccacaaacttatgtcgaccagccccctattatctcgcccttttacaagaaatgtacccccacccacaattgggcggctaacctacccccccaacgtcaactaacccattctactcctctcttttccaccgatggaacaccccttctgtgtcaatacacccccccccctttccccctttccccccacccccaaccctccggggtttccccctaaaaaaaaaaa

SEQ ID NO: 660133 - DNA, 151 bp, Homo sapiens
atagtatggcttcgaactaatatgctataaagcatgctagtgcttcctggccagagacctgagcacactgcacacgcactgccatctagaagccaccctggcaactgtagaaggcacttatggaggcagccagctcatgtcatgcggagac

SEQ ID NO: 660134 - DNA, 146 bp, Homo sapiens
acctaatctgcccatgccttatctgcggcgcaaataaggccggcaagaagctcttggctgaccaggctgaggcccgcaggtctaagaccattgacgcacgcaagcgcggtgaagagcggcctccaggccaagaaggaggagatcat

SEQ ID NO: 660135 - DNA, 664 bp, Homo sapiens
tattgataaatgcaactacttattaataagagtctacaaggtaacaaaaagtgtaaagagacatctttttgttaccttgtagactcttattgataaatgcaactacttattaataagagtctacaaggtaaaaaaaaaaaaaaaaaaaaaaaaaaaagaaaaaaaaaaaaaaaaaaaaaaaaaaaaaaaaaaaaaaaaaaaaaaaagagggaggggcgcgcacccacacaaaatgatccaccacgaggggagcagacaaatatgaaggcgaccacaatctttattgtgaacaaagaaggggcccacacaagagaaggagcaattaaacaacaaaagaacgagagcgagcgaacccgctaaaaaacaacccgcgtgtaaactgggcgaaacaatgcatagcagcgcagaacttttgtgaagaagaagaccaactatatagtgggggaagagcgaaaaatatggggagaacaaactaatctactatgaagatatatattaaagccgttagcagaggaaatatataaaaaagtatagaggaggatataatgatggagtacaaacagagtactaaatagttgagggaaagaaaaaaaatttgtataaacatagagtgatattgtaaagagatatttatataaaggagatgagtagatataaataggta

SEQ ID NO: 660136 - DNA, 140 bp, Homo sapiens
gtttgtggggttgggccccccaaaaggggtttgggcccctttccaggggccgggggccagccccgggttgcttccgggcccttaggttaaaactgccccttccggggggtttttatggggggggggggcccccccaggat

SEQ ID NO: 660137 - DNA, 807 bp, Homo sapiens
atcgtgtggcgccggaggacgtccccgcggcggagccatggagatgccgctgccccccgatgaccaggagcttcgaaatgtcatcgacaagctcgcccagttcgtggctcgcaatgggcccgagtttgagaagatgactatggagaagcagaaggacaaccccaaattctcgtttcttttcggaggcgaattctacagttactacaagtgcaagctggcgctggatgcagcatgcagctcatctgcaagcagcagaccccggagctggagccagccgccaccatgccacccctgccagcagtcctccgctgtgtccccgccgtagccacagtccgcgccggcccagggtcgcgcgcatccatggacgagctcactctcagtcagtagccaggttgtgagagctccagacatgtcagggagcatcaacttgcctggcgcgtcagacaggagcgagtgacagcgtgccgtggcccacagcggttgtaggcatgtcagatgcacgaagctatctggaggagcatcccaggcgtagaccattgatcgaggtttgacaactctcctgcagccccatcatcagacgacgtgcactcaatggacgccaatctgggccgggaaagcaagtggatgttcagcacagtgcctggtgccctgtcgcgctgtgtgctgatggccgagcagctccggaacccgactcacggtgatggggcacacttcgagctgcgggctgcaccgtcatctacctgatcaagtgaccgttgctgcaccactggcagcgcatgcaggcccgggaagctgattggacggcct

SEQ ID NO: 660138 - DNA, 376 bp, Homo sapiens
ggtcgtcatcttctgaatccgagtgtggggggattctcgaccagctaacagaactggacctttacgtggtgagccatgaagaaaggtttgctcccggtgtggaacagtgtattatccaacctcctccccttaagagtcatgctcacgagagacactctggcaactttcctggcagagattcagttccctttgatttccagggagcattcggggcctccttttgcgaactgtagaggagcattctttcaactatggagctagagacggaccgcatggtgactatcgatgaggggagggacctggacatgatttcagggggggagattgatcgtcttctgatttccagagcatagattcatcacagccggacttcagg

SEQ ID NO: 660139 - DNA, 365 bp, Homo sapiens
cgctccgttatatgagaagcacactgacacttctcattaacatggatctaaagttaaatgagcctaataagacctggacaccagatctaaaaagactaatatagcttgtctacatagtggaccccgatgtctatgagtgcggcgtagttggagtttgctaggctcaatagtaatgaggatgtaagtccgtgtgcgatcatgataatgactgcgcctggtatgcttcagggggtttggatgagaatggctgtttctactacgcgtgctctctggcttgtcgaagagtatgcgatgtttcgaatttaggtctgtatgtcgtacgcggatggagcttgtcataagttgtgcctcataggccgcgtaga

SEQ ID NO: 660140 - DNA, 295 bp, Homo sapiens
agctgggattacaggtgcccgccaccacacccagctaatttttttggtatttttagtagagacggggtttcaccatgttagcccggatggtctcgatctcctgacctcgtgatccgcccaccttgtcctcccaaagtgctgggattacaggcgtgagccaccgcgcccggccgagaacacacatttctaccagttcccaggtgatgctgatgctgctggtctagggacctaacttccagaaccactattgtgagggatggaaaaataaaagaaagaacttgcgtaccgagctcga

SEQ ID NO: 660141 - DNA, 172 bp, Homo sapiens
ttctacatgaggcagtagcaatataggactgatcgtacactgacccagtgtcaatgagacagacacgtggtcatgtacaactgcagctgcatggctcgagacctgaccaaaatcttagaggactacaggttcctgggccaggaaggcagctccatcccatcaacttggcccc

SEQ ID NO: 660142 - DNA, 113 bp, Homo sapiens
aaggtgctgggattataggcatgagccactgcacccgccctcaaggtccattgtaaaagtttttatccttactatttcaaatgctaaaacttagtatgatccgagcggccgct

SEQ ID NO: 660143 - DNA, 457 bp, Homo sapiens
  misc_feature (94)..(94): n is a, c, g, or t
  misc_feature (350)..(350): n is a, c, g, or t
  misc_feature (373)..(373): n is a, c, g, or t
  misc_feature (394)..(394): n is a, c, g, or t
gaaaaggaagaggaagggagaaagagacagagaaggattaaactactagaaaataccttacaaatgaaaaaattggaatgagcatagagcaacntgggaaatctctattctagagaattattaccagttcagtcactcccttggatggattgaatgaagtctttctgggaattagatcaaagagaaagcactctcagggcttttcccaaaattcctgtggatcaggttgatgaaacttatggttgggggaaaataattttgtgtttagataatgagaatttcctccactcccacccattcctggcttttctccctgtggcttttttgcctacttggtttccttactctgnacctaggaactatcctttttttnaccatgcctttggagggggantggcctgcccctttgaaaggtggggggaagcaaggttgggcccaagaagaagggaaagaaggg

SEQ ID NO: 660144 - DNA, 101 bp, Homo sapiens
ggggtcccatgacatcgtggatggaaaccaccggctgacccttggcctcatctggaccatcatcctgcgcttccagatccaggatatcagtgtggaaactg

SEQ ID NO: 660145 - DNA, 1100 bp, Homo sapiens
taatagtcctttctgaattgtgaggtcacatgcaggtgcaagggacagaaatcccaccctgggccatgtggatgcttcagcccctgtgggctacagatctgggtgttggcaaaaaggcagcgggtgaggtcgtgctgcttaagtcttggatctggggatgggttgcatctcttcctaaagagatctctctaaggatggtgctgcacttttttttaagagataaggtcttgccatggtgcccaggctggcttcatactctgggctcaagtgatcctcctgcctcagcctccaaagtagctggacgagtagctagtgccgcaccttttagggttgttgaggcttctgtgcttacccactgtgatggtttcttattgtatggggtgcccttctacagaagttcacattgtcacattacactggggtctcagaggccaaggttttaaaaatgggagtcttttggttttggttctcccacatgtgagcctttttctggctcactgctactcagactgcacgtgttgtagtgaagatacagacctaatcccaaaataatgctcttcccatcactgcacacccggagatttttaaataatcttcactgggccgtcctgtaagagaatagttgatagtggctttgtgggtcatttcctctttgtaatggattattctctagacacaatgttggttattttcacttaagtacaacctgacagttgcttcagtgaggctggcctgctgtctttctgtttcttgcctgaactcgggttgtcctgcattttgtcccgtgagcttggcacttcactgtccggaggagcgtagggccgctgcacacctggagattttggtggggcactgcttaaatcatgcagatgagaaccagtttctggagaccttggcactagacgcccagcagagaagtgccttttttgagacttggaagacacaataattttaaattgcctacagcaggggttggcaaatagtggtgcaagggccacatctggctagcagcctatttttgagaatgaagttttatgagaacccacacatctgtttgtagattgctatggctgcctttgagttacagcagtggagctgag

SEQ ID NO: 660146 - DNA, 798 bp, Homo sapiens
tggtacttttaacggtggataatggtactcctggcttatagacttcgatctacttggatggctgccggggctaattatagtatctagctgacctgtctgctggaggtatggccttgcatggctccgctagcttctcgctcagcaaggagaatcctccctgtgtcctccttggctcttaaggttgtcggttctggtcggggctgttcgtgatggtcttgtatcctcttcctgggagtcctccatggtctacctgagcacgggtggctacggaggtaaccaggtgctgtgtccctgcgctatcctgtctggagcctctcggatgattgatcaatggagacacgctgagtgaatgaatcaacattaatgtctctggtgatcctgccctgtctgtcctatatgtatggatctgtgggtaagagtgagggagagatctaatgtgtgacgctttttttataatatgagggacttgatctcggatttgagtgatcattacgggctgacggtctgttgtctctcgggatggtagcgacggctgcttcctgcgtctggcaggcgatgggctttagccgtttggaaatccttctaggaggctcctcgctcgcatggcctgcagtctggcagcagccccgagttgtttcctcgctgatcgatttcgggtcctgcaggtagagttttctttgcttatgttgaattccacttgcactcttttcgcatcacacgaagtgatgttggatcgttcttttgtttgtctgattatggttttttaagtatatcaaagtttacacagggtctgaaaga

SEQ ID NO: 660147 - DNA, 873 bp, Homo sapiens
tacacggtgtggggcccccacagggggcaaaccacaccgcggtcaacgttgtgtgccacaggacacctcaccccgtgccgtacacaggaggcgcggaagaaaaaatgtgtgtgggcctgcccccaccgacacctggggatgtgcccccgcaacatccacacccgccaccacacggcggtggaaacaccgcaccaccacgtaaccgcgtgtgcccgcgggaagggcctcgccacccgctaactcgttgtcatgaatgtgtgtgggcgcccacacgtggagagaaaggccccacaggccacacacgtgtgtgtgtgtgagaagaccccacacgtgtgtgtgagagggacgcccaccgcgaggggggagatataccccccgccgtgtgctcccctcgccaacgtcgtggggtcacacacccccacacaacaccgcgggagaaaacatggtgccgcggcgtgtgtgtgtgtgaacaaagagagcgggccgcccccccccagtctcggtgacccgtgcgccgcgtgtgagagaaaacacatgtctcacccgtgtggatgcgggccaccaaaggggacccacccacacgtggggaccaccaacacacccgggcccaccaaggggcgtgggctccccgagtggccccccacgggtctccggcgtgtccgagtgagcacaaaacccccggtgggcgtgcggtgcgggagaaccccaccccccccgcccccaccccctaccccgggccccaaaacaccccgcgcggggcgtctgggacagaccccgagatggtaaaagggccggttcggggaaaaaaaaaaagaaggaataagtacgtgagcagtacggctggcgagagagagtgctctcggtgggcgggtt

SEQ ID NO: 660148 - DNA, 1144 bp, Homo sapiens
gtcctggttgtgagttccgttctgcgcggattgttctctgtgaacacagcgttctgttgtatgctccgttcacgtcttcttcttccgtagcccttaacggtgctgtgccgtgcgagccacgaatgggaatgaattccgtagttgtgcagcattggtagcactgacggtctcctccctggaagtggccctccacgaaaacatattactgtatatgcatggtatgctgtacatcgttgagacagggtcgcgcacagaagcattgatcatcctttttaaggttggtagtacttgattgagaagaatgatgacaactgatgggtgtactacctttatatacggacatgcggggtcatgatgtaaatgggagcggtctgaggtagacagaaagagaaatgaaggtttgcatcacatgtgctgtagaatgcagagaggggcaaattgaatttgagcagagatgggcacagtatatatttaaaggtaagctccatgggcatagctttgaattaatgtcgtgaaagcaaagcactaatctgggttaccgcttttgtggttggttttgtgatacactagatctatactaactctatgttgtggtcttgtaatgggttggaaaggttggttggtctctagggaccctaagatggtactatatttagttgagtagagaaatattagtatgcattgtgcggtaggacacgaattgccataagattagaaaagaatgaaggaaggaaggaaaggaattgttgagaagcatcttttatagataatcattctagtgaaaagaggttggggtacctgggaccggttgtggcaggggttgagttagacaataaggttttccgactacggaagagttacttcgttactacatctttcggcatggcttaggaattgtaggggaacttgtagtgtgtaacctggatttgaattggagtctcgtaacagagggggatgaactgggattggaacgaattggattgactcgaatttgtaggtgaatttttgtgactgaatgaattgcataagctggaagaatgcagaggcgaccaaggtgtaaaataattcctaatgcgtatgcatactctaatgtcaaaggaaatggcacacaatcagtttcacttaaaatgctggtacttacatg

SEQ ID NO: 660149 - DNA, 779 bp, Homo sapiens
  misc_feature (23)..(24): n is a, c, g, or t
  misc_feature (33)..(33): n is a, c, g, or t
  misc_feature (40)..(40): n is a, c, g, or t
  misc_feature (44)..(44): n is a, c, g, or t
  misc_feature (55)..(55): n is a, c, g, or t
  misc_feature (65)..(65): n is a, c, g, or t
  misc_feature (68)..(68): n is a, c, g, or t
  misc_feature (74)..(74): n is a, c, g, or t
  misc_feature (77)..(77): n is a, c, g, or t
  misc_feature (103)..(103): n is a, c, g, or t
  misc_feature (567)..(567): n is a, c, g, or t
taagggccctgttctctttcccnncccccagtnccaaggnaaanatttgatgacntctgtaggancgncagcgngtngttgagatagaacgggcggaggaggncattatgggtggggggagatagaaaggagtttttaggaaggagtaggtggtgggatcatagggagggtatgattagatttttgtctgaattgataggttgagttttattggaatttgaaatggttggcggtaaggttggaaaggattttggaaagggaaagaaaaaggcggttttccgctcgaagagagcaggtttgaagttataagtggggcgtattgatggatacgtaaaatttaggaggataaggtatggacgtgtgggtgggagtgcagttgtgtacagtggaggaatcgtggagtacgtcactggagaggtacttgaactgggaggaaatgcatgaaaagaattaaaggtaaagggtattagcccttgttaattgaaatttggtattgggggagatgaagaaattggattatttaattaagggtaaaattggtggtggggggtgttattttaaaaattncaaaaatttttggatgggaagaaagggaaacaggagaatgtctaagggaggcggggatgttttggtatttaagggctataaataagttaaaagtgtgtaaagggggggtgaatgaaggggaatgggttatttggggaaaaaaaaaatatttgggtttttgggaattttaattggggaaaggggggagggtaaatgagggtttgaagaaaatg

SEQ ID NO: 660150 - DNA, 406 bp, Homo sapiens
  misc_feature (19)..(19): n is a, c, g, or t
  misc_feature (25)..(25): n is a, c, g, or t
  misc_feature (74)..(74): n is a, c, g, or t
agagcaaaaggggcccctngaaggnaacattgcattggacctgtagattcaaaataacaataattaaagccctnccttatcccatgaaacatgatgctattatttaatgatgcccatttttttaaagtttcctacacacaggccagtcgtggtggctcacacctgtaatccctagcactttgcgaggctgaggtgggaagatcacttgagccccaggagtttgagaccagcctgggcaacataatgagaccctatctctacaaattttttttaaaaaaattagctgggcgtggtgatgtgtatctgtagtcccagctacttggaagggctgtggtgggaggatcacttgagctcaggagatcaagagcgcagtgagctgtgatcttccccatgccttccagcttag

SEQ ID NO: 660151 - DNA, 726 bp, Homo sapiens
ttacacatgggtcgatcggtcctgagagcatggtgatggaaatcccatcaccatcttccagagagcgagatacccatccaatagatcacatgtagtgggtcgatgctgagcgctagagtagcgtcagtgagagtccactggccgtcgttcaccaccatggagaaggcaggggctcatttgcatgcgggggagccaaaaggcgtcatcatctcatgcgcccctctgctgatgcccccaatgtgcgtctatgggtgtgaaccatgagaagtattgacaacagcctcaagatcatctagcaatgccttcctgtgccaccaactgcttagcaccccgtggcctaaggtcatccatgacaacatattgcgtatcagtggaaggactcatgagcacagaccatgccatcactggcagccagaagacgtgtggatggtcccttccgggaaactgtggcgtgatggccgcggtggctctacgcaggaacgatctatccctgtcgctcatactggcggctgccaaaggcatgtgggcaaaggtcatcccgtgagctgaacgggaagctcacttgtgcatggccttccgtgtcccctattgtcaaccgtgttcagtggtgggaccttgaactgccgtctagaacacaacctgccaacatatgcatgacatcaagaaggtggatgaaggcagaggtggagggccccgtcaagggcattcctgggactaaactgagca

SEQ ID NO: 660152 - DNA, 878 bp, Homo sapiens
  misc_feature (142)..(142): n is a, c, g, or t
  misc_feature (165)..(165): n is a, c, g, or t
  misc_feature (195)..(195): n is a, c, g, or t
  misc_feature (197)..(197): n is a, c, g, or t
  misc_feature (204)..(204): n is a, c, g, or t
  misc_feature (206)..(206): n is a, c, g, or t
  misc_feature (210)..(210): n is a, c, g, or t
  misc_feature (213)..(214): n is a, c, g, or t
  misc_feature (223)..(223): n is a, c, g, or t
  misc_feature (225)..(227): n is a, c, g, or t
  misc_feature (237)..(237): n is a, c, g, or t
  misc_feature (250)..(250): n is a, c, g, or t
  misc_feature (253)..(253): n is a, c, g, or t
  misc_feature (256)..(256): n is a, c, g, or t
  misc_feature (259)..(260): n is a, c, g, or t
  misc_feature (262)..(262): n is a, c, g, or t
  misc_feature (264)..(264): n is a, c, g, or t
  misc_feature (268)..(268): n is a, c, g, or t
  misc_feature (272)..(272): n is a, c, g, or t
  misc_feature (275)..(275): n is a, c, g, or t
  misc_feature (281)..(282): n is a, c, g, or t
  misc_feature (286)..(286): n is a, c, g, or t
  misc_feature (289)..(289): n is a, c, g, or t
  misc_feature (294)..(294): n is a, c, g, or t
  misc_feature (297)..(297): n is a, c, g, or t
  misc_feature (300)..(301): n is a, c, g, or t
  misc_feature (306)..(306): n is a, c, g, or t
aatgcccgtgcccgcattgtggctgaagagttccttaagaatttttaaaccatctggctggatctcgtggccttccccctcagactacccatgtctccacgaaggcgtcctggagtcactccccgagcagcgcggggcggcngggagtgggtggggtgggcattngatgcgggaggtgggtggtgtgcttgctancngggcaananagcngcnntggacctgncnnnaggccacacntgcctggtcaggntgnctnctnntntncagncccntgngccggnncagnttnttttnaangtnngaaanttaaactctgtgctgggtaggatactgtaaccttttgtcttttttttttttttttttttaaacctcaacctccaggggctgggacgggtcccggggatatataacgtgatgggtggcggggggctcggggcgggcgcctgggagccagaggggacgttattttttctcgtcctatgccaccccagggtggggagggagggaggttccagactccagtttctcccttgcctttttatgcccaagcctctttggccccggtatagggtgtttgcgacctctttgccagctcctggagtctgggctaaggagtggccccccagcacttggtgtggggcacacggcgcccaatgttgggtggaccaccccattcatttgcctaggaacgtgggggccaagatggcggggaacctctggctcggggcgcatgggtgccctccccaattgaggggggccgtgtttccgcttgtcggtagtggccattgcctgtcaaaggtggcggggggtctcaaggttctgggggccctcttggcgtggggcttttggccagcaaagggccttcggttggggccccc

SEQ ID NO: 660153 - DNA, 126 bp, Homo sapiens
ctcgataagccggatctccagcctagttgtgatgctatagcacccatcatcctgcgctaaacacccctttcaggctgtaggtaactagagttgttcctgttctttgacggtaacaccatatgtacg

SEQ ID NO: 660154 - DNA, 309 bp, Homo sapiens
  misc_feature (9)..(9): n is a, c, g, or t
  misc_feature (31)..(31): n is a, c, g, or t
  misc_feature (196)..(196): n is a, c, g, or t
  misc_feature (208)..(208): n is a, c, g, or t
  misc_feature (246)..(246): n is a, c, g, or t
  misc_feature (259)..(259): n is a, c, g, or t
tgtattttnagtaaagacggggtttcaccgngttagccaggatggtctcgatctcttgaccacgtgatccacccgcctcggtctcccaaagtgttgggattacaggcatgagccaccatgcccagcctgtttatctttgttaagccgtaatatgtgtgcgattattaattttttattaacaaataatacacatggnataatatttagncaatagagaaaagtaattttgaaaaattactcataggnttatcacacacanaaagatcacttttaacatttggtcgggctcttttatttgtcaacttaggg

SEQ ID NO: 660155 - DNA, 733 bp, Homo sapiens
  misc_feature (512)..(512): n is a, c, g, or t
  misc_feature (515)..(515): n is a, c, g, or t
  misc_feature (521)..(521): n is a, c, g, or t
  misc_feature (524)..(524): n is a, c, g, or t
  misc_feature (531)..(531): n is a, c, g, or t
  misc_feature (533)..(533): n is a, c, g, or t
  misc_feature (541)..(541): n is a, c, g, or t
  misc_feature (566)..(566): n is a, c, g, or t
  misc_feature (568)..(569): n is a, c, g, or t
  misc_feature (571)..(571): n is a, c, g, or t
  misc_feature (573)..(573): n is a, c, g, or t
  misc_feature (575)..(575): n is a, c, g, or t
  misc_feature (577)..(577): n is a, c, g, or t
  misc_feature (579)..(580): n is a, c, g, or t
tcattggccgtcctctcaaggctgtcttgggcaaggagggcccctggggaatcgtggtctatatccccgataaatattctgcctcacgggtctaccttgttctcctgcacccgggttgtcagcaccctccatcatttctccctgcacaggagggttggaatactggggtgtcgacgcccatagggtctccgcatgtagtagggtggggaaccttcgcctgcggtagggccggcgttgttgggcctggccttcgggagcactctccgatccctacgttcttttccccatcttctcactaatatcctgggtaaatttggctgggtcaattggctggggaggacccctacgacgtggatagcgtctaataatgggtaacggtctggctgcatattaactggccttgaactgggaacaccaccaggacctgtaacattggctgcctccgcacccttttctccttcaacaacatcaaactccacagtctctccatctcctacactgcgaaggtactnccnggggtnatncttcttnanggcagtcnggtgtacaaatacatcttcctgggngnnancncngntnngaaaccatatccgttccttacattggacccattttactggttcccaaaaccttcgttgcaatagaccttcttgtcccccgccggatggcgccgccaatgtaaggccgcccgggccaccgctccctgggccgttgcccgtagtgccgggattgg

SEQ ID NO: 660156 - DNA, 277 bp, Homo sapiens
gggggggggggaaaattttgaaaggcccctttccgggcccctttttttgaaccctcccattttttggcatttttcctttgggattttgcccggaatttttgccccccccccttgggggaaatttttgccgttgcccagccttttcaaggtttttttttttcccccaacccccttttaaaatttccctacccctttggcccgcccacccccttcgatttttccaatttttttggaagggtttagaatttttaaaaaatttaaaaaagtttggggttta

SEQ ID NO: 660157 - DNA, 479 bp, Homo sapiens
ttatgacaaagcagggcttgagtatcaccatcttgacccgctcctgctaacatttgctggaatctaccaaaatggtaccctaaccacttaacgagttggtgcgaagacccagaggatcacattcccgccggggaccaattggatctctatcagggggctgccaataaccgtaaaggggatgctgaaatgccacttacggcggcttgaatacattgtatacttactgcccaatctgcggaataatttgtaagacccgctggccgaaaccttttaatgatacccgacccaaaaaaaacatggcctgaagttatggtgagtaggaacgtgggaaggacttgtcacccttgaactgtcctgtggctataacgcaatttccctgtggcctaccgagcttgagggaacacacagacacattggttctaaaattgatgatggtcttggagattggagtcgcctttccagcttcaacaaagagcact

SEQ ID NO: 660158 - DNA, 162 bp, Homo sapiens
gaagtcagactctagagcatccctctcagtaggtacagggagagcactgggcactatttgacaggatgtactccagaatatatcaaagaattattctgatacaatttcactaaagacaagtttttgggctggatgtggtagcttacacctataatcccagca

SEQ ID NO: 660159 - DNA, 387 bp, Homo sapiens
  misc_feature (334)..(334): n is a, c, g, or t
actatgtcgagctcatgagtgatgaatcctgatgcgagtatacggatgtgttaggaggggactctaggggattagcggggtgatgccggtggggggccagtgccctcctagtgggggggtaggggctaggcgggaggggtaaagggctcagaaaaatccggcgaagaaaaaaacttctgaggtaataaataggattatcccgtatcgaaggccttttgggacaggtggtgtgtggtggcctgggtatgtgctttctcgtgttacatcgcgccatcatgggtatatggttagtgtgtgggtaagtaggcctagtatgaggagcgtaatggagggnaagtgaaatcacatgccaatcaacatagtcactatgtggatgggttagtagaa

SEQ ID NO: 660160 - DNA, 188 bp, Homo sapiens
atggtccaatcagtcggggctagacttgaactggaagaccgagcatcactttgggattttgttgatcatctctccatttcttcctagtgacaacgccaacagcaagagtcttggaatggggacagtcgtatccgcttcatttcctcgctattcttgacccaatactcgattccgacacttctctcgaa

SEQ ID NO: 660161 - DNA, 122 bp, Homo sapiens
ttgtctgaccagtaaacggctctccgcgctcagatggagcaagcgcaccggcctacggatgtgtgactctcctcacagaccgagcggcgggcttcacggtatgcacagaagtgcgcctggtg

SEQ ID NO: 660162 - DNA, 242 bp, Homo sapiens
ggtggacttgtcattggtattctagggatgtctgctattaagtttcatcaattgtgggcaaaacatgtaaaaactgtctctttgaactattgaaaatttaaggttcagaaaaaaaccaattttgaatttttaagggggtttatgaaattttaaaaaccagcgagtccttcgtttgatcaataaacagtgttccaaataacttcaagtttataaaaaaccagtgaaatttctccaaagctcta

SEQ ID NO: 660163 - DNA, 324 bp, Homo sapiens
agctgagaaggcaagcaggacatggcccggactgcatgcgatgaataccaggagctcatgaagaccaaagctgagccctggaacgtggagatcgccacttaccgcaagctgctggagggactgatgcaatgcacgactcagtggagacggagttggaccagtcaacatctctgttgtcactagcagtgtatcctctggatatggcacctggccgtggctatggcggtggcctcgtgtggaggtcttggcggcggcctcggtggcggtctagccgtaggtagcagtggaagctattactccagtagcggtgacgccgtgaggatc

SEQ ID NO: 660164 - DNA, 268 bp, Homo sapiens
  misc_feature (166)..(166): n is a, c, g, or t
agatcacttgaggtcaggagtttgagaccagcctggccaacatggtgaaaccctgtctctactaaaaatacaagtagccagtcgtgatgacaggcacctgtaatcccagctactcgggaggctgaggcatgagaattgcttgaacccgggaggcggaggttgcagngagcctggatcatgccactgcactccaacctgggcagcagagcaagactctgtctcggggaagccacacattggtacctttagttctctgggccccgttttt

SEQ ID NO: 660165 - DNA, 721 bp, Homo sapiens
  misc_feature (24)..(24): n is a, c, g, or t
  misc_feature (57)..(57): n is a, c, g, or t
taatatacttttatcacgtgttcnagatcagtagattaatgggagaaaacatttaanaattgttttaaatttaaatacattgaactctaacatagatgaaaaatgtgtttactgctttcagtcgacctgataaaaagcaacgtatggtaaatattgaaaactccaggcatcgaaaacaagagcagaagcaccttcagccacagccttataaaagggaaggtaaatggcataaatatggtcgcactaatggaagacaaatggcaaatcttgaaatagaattggggcaattaccttttgatccctaatactgattcacaattgagttaaattagacaactgttagagaaaaaataatgccttggattaaggtgggaattgaaactatgaaattccaagaggacaatggcctttcttttgttctaagattcaattgatactttatttttcctcagacctttgttaaaagctactacccggctttccgtagttaacttcgtgaatttttttgcaatggaaatgtcaatgtgtttatttaggaagccggcctgccccgtatttgggcctgaaagaaattctctcaggtaaaacttaagcagcccgtttccctgcaaagggattacacagggttgggtaaattcccaaactctgaaagacaaggtcggaatctccttcacttttaactcccccctttgtctttgggggaagaccctcctttgtaaat

SEQ ID NO: 660166 - DNA, 1157 bp, Homo sapiens
gtcacgtccgctgtactagccgaggacaaccttagcggagaccatttacccaaataaagtataggcgagtagaaattagaaaccctggcgcaactagatatagtaccgcaagggaaagagtgacaaattataaccatagcactaagtatagcaacggtactatacccctagtaccttctgcactaatgaagttaactagaacataactttgcaaggagagccaaagctaagacccccgaaaccagacgagtctacctaagaacagctaaaagagcacacccgtctatgtagcaaaatagtgggaagattcataggtagaggcgacaaacctaccgagcctggtgatagctggttgtccaagatagaatcttagtgcaactttagaagtttgcccacagaaccgctctaaatccccttgtaaatctaactgtgagtccaaagaggaacagctcttgggacactcaggaaaaagagcctggtagagagacgtaagagaatttaacacccatagtaggcctaaaagcagccaccaattaagacagcgtacaagctcaacaaccactacctaaaaaatcccaaacatgataactgaactcctgcacgacccagttgggaccagtctatgaccctatagaagaactaatgtaagtcataagtaacgtgaaaacattatcctccgcataagctgcgcatcagactgaaaacacttgagctgaacagtaaaagagtcactatctagcactaagccaacaagtcgttattaccctcactggaacccataaaggcatgccataagagaacggtcaaagaagtaaaaggactcggcaaatctaaccggccgggtaaccaagaacgtcacctcctagagtcaccggaataaaagcgccgctgccacggaccagtgtcaacggccgaggacccctaccaaaaacaacaccaacggggcaagcacaaaaaatcacccagggaacgacaacggacccagaactgactaaaaggacacaaacgactgcacgaaccaaccgaacgcatcaaccatgatgggcacagacagagacaataaaacgtcaggaataatcaacaacacatacacgaaaacaaaagacacgatcacacaaaagacaagaacgcggcagcacacaacagacaacaacaaa

SEQ ID NO: 660167 - DNA, 432 bp, Homo sapiens
ttgttgataggtcctggcaagcccatgtgtgttgagagcttctcagactatccaccttttggttcgcttctgctgtgcgtgatatgagacagacagttgcggtgggtgtcatcaaagcagtggacaagaaggctgctggagctggcaaggtcaccaagtctgcccagaaagctcagaaggctaaatgaatattatccctaatacctgccaccccactcttaatcagtggtggaagaacggtctcagaactgttggtttcaatgggccatttaagtttagtagtaaaagactggttaatgataacaatgcatcgtaaaaccttcagaaggaaaggagaatgtcctgtggaccacttgggtttcctttttggcgtgtggcagttttaagttattagtttttaaaatcagtactttttaatggaaacaacttgac

SEQ ID NO: 660168 - DNA, 621 bp, Homo sapiens
gtactttgggttgatctcactgtacaaaaaaagtgtaccccatattggaagaaataaggaatactgaaggttctccttctatctacacttgagtcatgtgcaaggttgaaccagtatgaaattgccagtgtgcaaccattgctgatctgctgaagcgacaatatcatatgcctcaacctaacatttactcttagatgctggttcgaatctctgtgaggcaaagggataatattctctaggaactcacttttgagagtagtttatctctaacccatgtggagtctaaatgttaagagaataggaatgaatctcttaatggcagcttgtggagagtataaaatattttgagcacaatatgcagcacataacttttcagattgtgtcttgcagtagaaaaggttaaaattcgaatgctttcagttactgtatggttcatgtcgtggtaaaggtcgttcctacattgtgagacgagaccctttaacataggctgccttagtaacaacaataaaacagatgtgtcaataatattaactggtcctaaagaacatggtggtcttgcaatatgccaatggaactggaatattctactttccttgtgagtatcatgaccgttaccaaagg

SEQ ID NO: 660169 - DNA, 891 bp, Homo sapiens
gctgagatggctggccgtccgggatcctggtgtgtgtgctgcagagggtgccgccgcctaggcgaagtagggccgtcactgagcgaaagaaccgtccccatgtcaggagcaccatcattggcttatcaaagaatcccagagcccgcccgggaaggtcagcgaaccatggagtcttccagttcatctacctcttagtttctccgtgtggaccaaaccagttcccagcgctgtcgtgctcctctactcgaagtggagctcaagacacgtgggatgcagttctgaagatactccttagaacgcagatggacggccagtgtcctgtgacttctgcgaggtcctgccttgagagatgctcaccaacgcgtctccgctcgtaatcaaggggcaaaattgacaatcacgaatgggtcatccgcccataatttggagtgatctacacaagtgcttacgatggttgcgttccacactttcattggaagggaagcaatgtgccactataatgctcgatgtgaatgaccacggggttttccccaaaaggggaaatgccccctttctaagtccgtggtcgacaataggtccccatccggatgaggcgcaaagagtgaagcctgtagggatccgtcataagaagtgatcaattgaacctcaccgaggcagacggtttgccagatcggtaaggggagagatcacaaatctatcggacgaaagatctagcacgcgcttgtaacagccccgttgaatggaaaaacacggtgtaggtttataatacacaagaatacattatagcgctcgggagaataagtaggcttagtttgcttcaaacctcggagaggcggatacacgtggtaaattacccagataaacgcctaccaacacagagaagcgccacat

SEQ ID NO: 660170 - DNA, 174 bp, Homo sapiens
accggacattagaatatgtgggaggggacaggtttgcatctctgttatgggtgcaggacttgggatgcaaagaatagagaaggatgcataaggatacttaaattagaagcttcagggaggtaaggagtgtgagtcagtgccatcagtaaagatagtagatagttgtaaatggcg

SEQ ID NO: 660171 - DNA, 815 bp, Homo sapiens
ctttgcaaggactaattttagtagcagggcgtcggcgtctgttgcccggtgtgtcccgaggttgatttttgtgttgcatcatgggccgccatctcgtggttctggtacgcgggaagttccagaagagttcgtgatggtgtcgtgcgatcaaactggccgaaccaaggggcttgtgggtaacagagcgtgacggtagtgtgtaattctaacgtagacttttttgtgccttagtctgattggattaggtgacaaagccactgtgaagtttcgtcccccggtgacgcgcagcagtctccacttggtcgttccagccccttgaaggtgtgttccaatgccctagagtgcttggaggacctaaatgccagagttcgacgatctagctgggctcttcttgtcagcccagggttaatactgtagggtctcggaccttatgtcctgaagtgacagcatgtaagtctgaagctatgttactagcaaagcttcttatgcccagcgaggtggctgatggcctaccgcgttctgcctggcatggatcgtccgccactctaggggtcaggctccattaggatttgcgcctttcccatctcttccgtacccaaccactcagattaatctttcgttacctgagaccagttgggagcatctcgtagtagcagggagagagaggggaagggccagtctgggctgccgggttctagtctcctctgctactgagggcctcactattaccatgtgaagagggcatgtgggagcctagcgaaactccctgctgcaagaagacatggagactcctgccataactcccaggtgcaatt

SEQ ID NO: 660172 - DNA, 132 bp, Homo sapiens
tctaaggatctcgggagccttaacctatcacttcaagaggacaacgtgggaaaagaattgcttgagtccaggagttcgagagcagcctgggcgatacagcaagagcccatctctacaaaaaaatagaaaaag

SEQ ID NO: 660173 - DNA, 89 bp, Homo sapiens
ctgtgcgtgtgcctttgccttcttccctttcttcctgttttctgttcttttaatttggggattgagaaagctgtacgattttgttaaag

SEQ ID NO: 660174 - DNA, 129 bp, Homo sapiens
cccgacttaaaaaatcactctgataagtctttgataagttctaataaataataactgagtaagtccattgaactttgctatcatgagttacttattcttctagtagctaaacatgatatgtactcctat

SEQ ID NO: 660175 - DNA, 315 bp, Homo sapiens
gccttaaatagagacgtgggtttcactgtgttggccagtgctggtcgtcgaacacctgacctcagtgtgatccattctgtcttggcctctcgaagtgcttgggattccagtgctgtgagccactgcgtgccatgcacatttccacgttttagatcctactccaataccacagtgtttcagtttaatgcaagaaatgagctacgataaagtgtgctacttctgtgttaccgccacccgtgcacagatgtgcatttcttacacgtgctaggcagggtgttgagacttgctgccttggccttgccagcccatatgggg

SEQ ID NO: 660176 - DNA, 214 bp, Homo sapiens
ccacccgtttgctggtgcaagtaagggtgatggcctgtttgctgtcagcattgagaattcgatctctacaagaattcaacagaaacctcaggaagcccctcagtctgttgtcctgggagctgctgctgatcaagatacgattgtgaaggcagcaagaagtttgcccacagcgataatgtcaaggctctggcaggtggagtcaacccgtcgacgc

SEQ ID NO: 660177 - DNA, 195 bp, Homo sapiens
aggtgagggaaattatagatgcttcgaacagcctggaaagagcaactcagtagtaactagtgggaagttaacgatccgcccgagtgcagagagaacaaccaggaaacgccttgaccttccagctgcaaccacgcgttagtcgcgacgctggatgtccttattcagtacgcacagaattttcctttatgaatttat

SEQ ID NO: 660178 - DNA, 221 bp, Homo sapiens
ccatcaatcgacgcctctcacacatatcagagagatacgacagggttctaaatggttacggttaggcattcggcaggcaggaatttcatggtgcacttcatggaagaagacagaagaagggataaagagcctggcgttaaagccctgacgactggaggcggagtaagcatgctggttcttgaggagagaaaggattttccccctggatcctttcgtctcga

SEQ ID NO: 660179 - DNA, 151 bp, Homo sapiens
actctccaggattttagcagtgggtggctgtggtacttacatgtagttgctggcagcagcagagcgcgcagcagaatacttggcggagtacggcttgtctgtgcggggtggacagttgcagcaaagcaagccccccgccaaaggagcagca

SEQ ID NO: 660180 - DNA, 1048 bp, Homo sapiens
  misc_feature (23)..(23): n is a, c, g, or t
  misc_feature (97)..(97): n is a, c, g, or t
  misc_feature (101)..(101): n is a, c, g, or t
  misc_feature (205)..(205): n is a, c, g, or t
  misc_feature (271)..(271): n is a, c, g, or t
  misc_feature (289)..(289): n is a, c, g, or t
  misc_feature (314)..(314): n is a, c, g, or t
  misc_feature (319)..(319): n is a, c, g, or t
  misc_feature (326)..(326): n is a, c, g, or t
  misc_feature (591)..(591): n is a, c, g, or t
  misc_feature (599)..(600): n is a, c, g, or t
  misc_feature (604)..(604): n is a, c, g, or t
  misc_feature (608)..(608): n is a, c, g, or t
  misc_feature (615)..(615): n is a, c, g, or t
  misc_feature (630)..(630): n is a, c, g, or t
  misc_feature (637)..(637): n is a, c, g, or t
  misc_feature (649)..(649): n is a, c, g, or t
  misc_feature (660)..(660): n is a, c, g, or t
  misc_feature (667)..(668): n is a, c, g, or t
  misc_feature (674)..(674): n is a, c, g, or t
  misc_feature (679)..(679): n is a, c, g, or t
  misc_feature (683)..(683): n is a, c, g, or t
  misc_feature (704)..(705): n is a, c, g, or t
  misc_feature (714)..(714): n is a, c, g, or t
  misc_feature (718)..(719): n is a, c, g, or t
  misc_feature (728)..(728): n is a, c, g, or t
  misc_feature (732)..(732): n is a, c, g, or t
  misc_feature (921)..(921): n is a, c, g, or t
agttgcaaggcgcatggcttcgnaggcctatagccgcagggattaaagcctgtgtttccacagaagcaccacctatcatatttgccacaccaactanactnacctccgattccacagtgtatgattatgctgggaaaaacaaagttccagagctacaaaagtttttccagaaagctgatggtgtgcccgtctacctgaaacgagncctgcctgaccaaatgctttaccggaccaccatggcgctgactgtgggagggaccatctactgccngatcgccctctacaatgnttcgcagcccaaaaacaaatgagtnaggcngcagagnactggtttgttttttggcataaaccctttgaagttcctttttcattattaaattaaaattttttttttacttggatggcttaacatttttgcaaaaaaaatagaaaaatatgaaaataatgttttggtttgtttataaaatgcatatggcttatcagagctcattcaacagttaaaaccattgtttaaaaaaacggtgctttgctctgtgtttgtgctcctgatttccctggaggttctggataaaggctgaaaacaggcttgtnaatatcannctgngctnagaaccncaggaacttgaggtngcatttntgagcatggggngcaggagcctntctgaanntggatntggcnatgnaaagaaaacaaaagccaaggnnatgtgcatnaaannaggagtttnagtnagtcacctcggggattttttccattttgcagtaaaatgttaaattaatgtagcctgcctctatttgttgggcaggtaatttcaaagggttatttgcctcatctcctatctttagtgaaatcttatgtgtaattgtgtgtatttattccaccgtgggaacagagaatacctgtttagtgttgcactttanactggtgtctgttttgttaatgcagctgtgccacaaattctcctttatcttttaaaaatgttatagctttaaattttgatttattttgactgtggaataaatacatgtatgagatgattttaagtgt

SEQ ID NO: 660181 - DNA, 606 bp, Homo sapiens
tgggcaccagagttgatttttaattggtcctaaagccgtctgaagcaaaaaccatgataaaactttcttgtctttctttttcttttacaaccccaggacaacacttaaaaaaaaaaaaaaaaaatgaaataaaaaaaaagaaaaagaaaggggggggggggactaaagacagtttctccctggaagagcaccacaagtcttatcgtcctacacccgagttttgtttgtgtaaaagagggcggccccatattaagggaggtagtatttattaagagaagaggcgggggcggcgggtataaaaagaggtgggagtgggaaacaacgtgatcgtggagcagatctctttggggagaggagaccgcttatacttcggtgggggggggagaacatctgttggggacacaactcctctcataaggaaattttcaacgccctactagagggaaaatctaactaacactttaaagggtgtatactggttgtgttaaccacagcgccggaattttgctatggggtataagaaagtttgtggctaacaggagaagttttagttctatcgagagacacttttttttcccggggcagcttcgtatctataaatagcga

SEQ ID NO: 660182 - DNA, 595 bp, Homo sapiens
gagaggtctattctcacaagattcgaatagaccacgtctgccctaagcaagggtatatatggctaccagtggatcccatggtatgctacttattagtagcatgtgctttattagcattcagtcatctcgaaagcattcttacgacccatccaaaccccaacattacttaaagctccaattcgagatgtatcaatgtgatgctatcagcacagaatttctctatcgtttacacttctacatgaatttagggcagtaatcatggagcttaggtacttctctttctgtaactatttgtaggctaaacaagactgggccgatacgagtttgctgtatttgccaatgcctaatacaacattagaaacaagacgggtttaggttgagcaaaggctgagagagtaaagttgttattattacaggatgaggaatcaaacccaaaatgtagtgttttgctgctgcttttgaattgttttggcatgtgtcaggtgctgagaataaccattactacatctcagtctgatttaactttcccaaacataaaatactgcagctgctattagaggtaagcaatctatctccttacactacctgatactgc

SEQ ID NO: 660183 - DNA, 961 bp, Homo sapiens
gccagggctccgacccttgtcgactgctggccatccatgctgacctttccttgcttgccttgtagtgttccaccgcatggccatcccataacatcacctaccactgcaagaacagtcgtggcctacatggtaccagcaagactggccacctcaagaaggccctgactcctcacagggctctcaatcgtagatcgagatcgctgcggccggagggcaatcgagtccgtcttcgatcctactagcgtcatcctgtcaggagtgagcatgcaccagcatgttcatcacacgtgaagtcgcatggggccaatgagctagatgcattcgaagtactaagataccatccagagcaaccattccccgactctgccgccatcgaatcgggatcgtggcccacctcattggaaccgcttgagtgcaccctagcaaccaatgtagatatcagtggctatcgatcgattgcatcaccatgttcgtgactttccttgctaacactccccatcccataccctagtcccttgtctcaccatcgccaaccccagactctacttttacctccccacacaccctcctgggttcccctcagacacagaagcccaaagcataaaacacttgaataccacaccttcaaaaaaagctcgacaaacactattgagtcacccaccccaactcaatcaccatgtaggataccttacgccggctcaaaacatttctctccctccccactttcgtccctccccactccccgtcattatccccctagtatcccctttacacttggtacaccaaaccccgtaaccatgtgatcctaacctaattaccaccacaaccctctacttagcaaatccttctaaccaaacacctaataaaacccactaaccaccccgcccaaccgcctcccaaaacatatactccccccccacaaccacaccacaaacccaacccaaccactaccacaacaacc

SEQ ID NO: 660184 - DNA, 163 bp, Homo sapiens
ctggcattatggacttctcacggtggctcatgcatgcactttgggaggcatgctgatgggtcacttgaggtcaggagcttgagaccagcctgaccaatgtgatgaaaccctgtttccactaaaaagcaggtgagagttcacaatgaaggtccagtgtatgcct

SEQ ID NO: 660185 - DNA, 410 bp, Homo sapiens
  misc_feature (16)..(16): n is a, c, g, or t
  misc_feature (49)..(49): n is a, c, g, or t
  misc_feature (245)..(245): n is a, c, g, or t
  misc_feature (358)..(358): n is a, c, g, or t
  misc_feature (360)..(360): n is a, c, g, or t
  misc_feature (406)..(406): n is a, c, g, or t
gggcgagatatggcgntcaacagatcatcgagggcggcgggtgatcgtnaataacaccgagagcatctaatgtcctatgatcacgtggactcacattcaatgacatgaagaacgtgccagaagccttcaagggaccagaaggcattctaccttacccttaccggtcattttctgtccagggcaaggatgccatgcagtccttcatgatgcattttatctcatgaagactgtgagatcagcagccntatttggtgcaactacatcagggacagtgagcggaggggaggtggctggaagctctgttcctcaagttgcttcacgcagggcgcatgagttcgtcagcggtgtccagtgcatntnagctcaagtgagtccagtgggcttgtactttacagccacgggcttntctt

SEQ ID NO: 660186 - DNA, 169 bp, Homo sapiens
tctatctcctgacagatgagggtaataatagactatgttggttagatagtagatatatgggctagtataattagtcagtatcagtgttttaatactgacgcaggcttatagcggagagaaaatgtcttcatagttacttatactcaacattagttctatctatacgggt

SEQ ID NO: 660187 - DNA, 224 bp, Homo sapiens
atcccttgcgtgctcgtgcctccttgtctcctgctgcctgcctcaacagcagtgtccccttccccccgcgtctgttctcgaccttacccctgtgcacctttgcctggctggggaggtgggctttgagccctgtctatgccggacgtgctgacgggtggtacgacggacaccttcaccagagcagcacgaggtccacatcttccggggagtaccgacgctcgaat

SEQ ID NO: 660188 - DNA, 1129 bp, Homo sapiens
tcccggtcggggtggtcttgcaagtggagtgtccgttgtgcccgggcctgcaccagtgagcgttcccggcctttcatctcgacattcagtgtgaaaaaaatctcgggtttagaaaatgtggattttcagtgacgtggaatctcttcaccactgtgaaaaaaagacaaacccttttaaaacttactttagtgagcgccacttgtgtgtggctatgtgtacagaagagaagtgtgtagtgctgtgcttctcaaagagagtctctagtgggtggaatatgcgcctgcggacaagtttcaccacgagagaggacacaaagtgcttctccacgaggctctcgagagttttgaagtcgcccaaccaggggtgttattggatccagaacgcatttgaaagaattcacaaatgtgcaattttctttgttgtagaccacccttatctttattttataaaacccaggttcaagagttttgtgggaagggggaaaccttattttcatagtagtctcttttaaaccccattatatgggaggagttggctaaaatatgtggggtatccatatattgtccacgagtttttatatccacagcaatcatatcaaccaagacttcctctgtggattcacacttttgggctcgggtaaacctctgtgaaccagagatatttggggccacacaccatgtggaaccactctcaccatctacactatactactatggggggagaactcgggccacgcttaacgacaaatataaggggggacaacatcacacctattgggacacaccaacactgaggcagcgaacgggaaactcttccacaaaaattgcggcaacctctagatctgatgtgtaacgaacacgctcttcgaggtaacatcgaggagccgacggttaggggacactttaaacaaggtggtatccaatactgaggcaaaaaaattgttggatgacaaggaagccagcagagtaaaaagagttaatatttgtataagctaaataagcacccaccatttgggcacatttttggggcaaaaaccaggtgtcatgtgggaaacacaaaggggtttgattaaccaaaaattataaatggtgcccgggtaacaacacaaatattttgtgaaacaaaagtt

SEQ ID NO: 660189 - DNA, 183 bp, Homo sapiens
ttgaaccctctcttgcctgaaataagctgtacagagtacaatttaaaaacacagctcagcctgggcgtggtggctcatgcctgtaatcctaggactttgggagaccgaggtgggtggatcagatcacttgagcccaggagttcgagagcagcatggtcatcatggcaaaaccccgtctctaca

SEQ ID NO: 660190 - DNA, 94 bp, Homo sapiens
tacaactaggcttaatagggacatggcaatattcatatgttcatttagatgtttgagctcctgaagacagacccttaatttaaatctttcaaaa

SEQ ID NO: 660191 - DNA, 564 bp, Homo sapiens
ggatctggacattagaatttcaatgaatccccattttcagccctctttcttccataaggcccacggtctccaaggcctcggtcttcccaggaacatcctggtgccagtatacttttctgcaggctcggctaagtcagtcaccactcttctattttctcaccaccaaaaactggacatctcaggtctgcttctatattctcctctatggtcttttataccctccagttggcttatgcactcaggttcatgaaataaagataaactcatgtggttaatcagccacatttaaatgcattttaaacaaattaggcggggcacaggggctcgtgctggcaattccagcaccttgggaggctgaggcaggtgatggcctgagctcaggagttcgagaccagccggggaaacacggcaaaaccccgtcccacaaaaaatacaaaaattagccaggcgtggtggcatgcgcctgcagtcccagctactcagggggtcgaggtgggaggatcgcccgagcccagaaagtgtgaggcgcagggagccatgatcatgacgctgcactccaggctg

SEQ ID NO: 660192 - DNA, 497 bp, Homo sapiens
tgggttgacccaggtactttatggatggtccatgacaaggtgcggtccctaggcccctcccctcttcaaggggtctacttggcacactgtaaggaggggaaattcatgtggtggggaactgattgtggaagggatttccccagaggtgagggtctcttctaatttcctcatggatgctacttgactggggcgctgggtggtccagggggatcttacatcctttgggaggccatgtggcgccattgagtggtccacaccacctcggtgttgggatgtgtagcacaaaattatcttgtgcaataccacaggggaaaattaggagctttgaaacaaatggtggctccgtcatagagggggcgaaatgtgccatatcacccaggaggttcacacaggcgttgagacgagaagttgtgggtgctgctcagcctcgtgtagaacggcatccaagaatgaagacccagcagtggagttgctctccaggtagtggccacggaggg

SEQ ID NO: 660193 - DNA, 399 bp, Homo sapiens
  misc_feature (20)..(20): n is a, c, g, or t
  misc_feature (51)..(51): n is a, c, g, or t
  misc_feature (56)..(56): n is a, c, g, or t
  misc_feature (61)..(61): n is a, c, g, or t
  misc_feature (69)..(69): n is a, c, g, or t
  misc_feature (140)..(140): n is a, c, g, or t
  misc_feature (375)..(375): n is a, c, g, or t
gtatattaacatcgaatttnaaaaagtatttgcttcgtaagtggacatttnatttnatttnattttttnattattattatactttaagttttagggtacatgtgcacaatgtgcaggttagttacatatgtgtacatgtnccatgctggtgtgctgcacccattaactcgtcatttagcattaggtatatctcctaatgctatccctcccccctccccccaccccacaacagtccccagagtgtgatgttccccttcctgtgtccatgtgttctcattgttcaattcccacctatgaggtgagaacatgtggtgtttggttttttgttcttgagatagtttactgagaatgatgatttccaatttcatccacggncctacaaggggcatggactcatcc

SEQ ID NO: 660194 - DNA, 189 bp, Homo sapiens
gtataaataggcatatgtaacaaaaactataaaaaaataaaagcttagacagtataaagaatgtcttgttcctattctgctcaccttcagtttactcctccaaggcccactgtagtgtttcttgcggttctttcaaagatatacttggaatatacaagcgtatgtatatatattccttgaaaaaacaca

SEQ ID NO: 660195 - DNA, 333 bp, Homo sapiens
tctatgaggatcccctatagaggtggatgttctcgccgaacttacgtagttggccaggtgcagtggctcacacctgtaatccctgcactttgggaggccgaggcgggcggatcacgaggtcagtagttcgagaccagcctggccaacatggtgaacacccgtctctactaaaaatacaaaaaattagccgggcctggtggcaggcgcctgtaatcccagctactcgggaggctgaggccggagtatggcttgggcctgggatttcaaggctgcagtggggctctgatcacgctactgccttccagcctgggcggaagaacgagacctcgtctc

SEQ ID NO: 660196 - DNA, 317 bp, Homo sapiens
cgcggtaacggtacgcacaaggcgatccttcttctccatgtcgtcctccacaactggtttgggttggggaagttgtatctttccttctccattctcaagcactgctgggagaaattgtggttcatgtatgttgcctccattgcctggttgcggggtgaattgaaggaattaccttcatcttgagggggctcattagcatatctcactccactagtcaggaggtcaaagtcatagtttgtctccctagtaaaagaagagtatggaccccaactctctaggacaacaatattcccccggaaatacaactgagcgggtac

SEQ ID NO: 660197 - DNA, 270 bp, Homo sapiens
ccccctttttttttttgtcccctccccccgggggggggggtggtttttttttggacccccccaaaaaacccttttgttttggggtttggccccaaaccctttaaaaggaaggggttttttcccccccctaaccccccccccccccattttttttttccctttttttttaaattggggaaaagttttttttggacccgactttttttacccctttttccgtttttttcctccccttttaaaaaaaaaaaattccccggggggggtttttta

SEQ ID NO: 660198 - DNA, 520 bp, Homo sapiens
tcatcagaaggcgaggaagtacatgggattgggaaaagagcaaggagatataagtttgaggaaaaaaaatcaccatgtagtgtgtcttcttgagtaggccaatgttgcgtatagagagaaaatgactatcaggagattgtaaggtatgatatattgttaagagtagtacatatttaagaagacgaaaatatgtttttgatccccaattatatcacttgtacaggatgattttcatattttgaagggattcatcacttcacaaagcatctccattctatcttgttcagctttacatttaaaaataaactcttcttgttcgtataaaccttatctcttacataaagtgaaatctgttaattttttgttttgacaaggataaactacttacctgcatctgtttaagaatagattaacttattttgagaagaaattctgggcaccatttttgaccattgaagacttatttgtaatttaatttctactttacattgtgaatgttcattttctaataaacaagatg

SEQ ID NO: 660199 - DNA, 1111 bp, Homo sapiens
gactggccagtggctccagctgaaatactcctggaatttggaattctcacctaaatcctgatcgccaaggctagtgtgacttggtaaagcaggagtggccactgacatctcctcacacaaaatcaatggaactggggaaagaacaaggactaccccaacagctaaacctggaggcatctccctgataatgacttcctgcaactatgggttaaaaaaaatccagccttaaacatggtgaaccatgttcggtgaacgaactggatacgtggtatacatgaagtccatggaagtccaggtatccagtcccagaaaaagccaggaagcaagtgttaagtgatactgcaacgctcacgatctgtgctcatcaaataggcttcaaacaacttcatttcctctccgacgcaaacaaccaacaaaagcgcttcccacacatggctggctttccctgcacactgacaaaatgtcctccacacgaaagtaatactgcaacccctggcctacatctatctctactttacaaccaaacctgccctccaactatctccaagtcctaacgtaagctaaaccgaacaagctccaacacacattatcgccacattacgatcctatacctggacagtccctgccccactccaccaaccacgccacctacctcatcgaaaacgcacacctgctacaacctagaccaaccccaaccccccaagcttaagctaattagactgcacacaaattcttcaaactgcgctcacactcgcacacacgcacccaaaaccaaacccgacatgctcaacttcagcaaccaacaattcacgacatgactttccaaacacaaacaacctaaccaccaacatcactggccacctacaccacaaactccactctccaaaatcgcccactcccaatcacacatcctaatagcaccctctcgaacaaccattcaccacaaacccacacacctcacgcatccacacccacgctccattcaacacgccccacacactcatctacccacctccccctaccactcaccagcaaaaaaaacacatagaaccacaccgtatctagcacacacacacacacaccataccctaacacccacacacatataaga

SEQ ID NO: 660200 - DNA, 166 bp, Homo sapiens
gaacacactgcttagcctgcaggggctcaaaaagactttgagggaggctgaggcgagaggatggcctgaggccagaagtccaaagacctggccctgttctgcactagtctctaccgctctccccagcaggaacctgagtctgcaggcttctccccggcccccattc

SEQ ID NO: 660201 - DNA, 692 bp, Homo sapiens
tgtattttgactccccaccgggtgtgtgcccgcctttattctcggcggggctctttggggggtggaccccccccgtgcacctcgagtggcccccttttgtgtcccccgctttgtccccgcagtccctgtggctcggacaaaggagatactgtgattatatgacgtttcgcacaacacttttctctgcccgcttgtcccttggagacccccctttgcacccactttcaagaccccccctggggaccacgctgataatactccactttctctcgaacaacggcgcgcttcgttgtgccacacacacaagggccacggtattccttctcacacgcgcttggaaggagcccacttattttattgtaaagtgtggcacttggtgaaggctgtgtccacagtgcacagtatgtggggcgagagcctgggcactcacctgtcacacccaccactggcacagttatacccgggtgatccacaagaaagtgggaaagccggctgaggctgctgagagaatgtttggtattcgaacacgggaattccacttgcacacacagactgtgaaggggcctcaatcacccaaggcctatgggcgggtattgaacgatgttggggcgggggttataaacattcctgagattttgggaaaggtgctccaagaatgtactgagaggaggggtaaaaatatgttttgagga

SEQ ID NO: 660202 - DNA, 363 bp, Homo sapiens
ctcggttttccatggccaaggcagcatgatccctctccaacataattctaagcaccactcattaaaacattatcttcgaggcagatttggggtcccaccacgtgggtggctccattggccatttaaaaagcaaaaggcttctcagggcacgctttggagatcccacactaatatctggggaggcttggtagaaggtgcagttgtgtccaatggcggatcgggcgattagatatcctaaactggcatccatttttattccaaatattggagagataccttatatggtcggtaaaaccacggccacagttaccaccatgttggcagcaccggttaccttcaggttggattagttggtgcggaggg

SEQ ID NO: 660203 - DNA, 854 bp, Homo sapiens
  misc_feature (422)..(422): n is a, c, g, or t
gtcataaaataagataaatttttaaaaaagagaagtgccatactgttttccaaagagtctgtaccattttccacttaccagcattatatgagagttccagtgcttgcatccttgtcagcacttagtatgtcagtttcttctttctttctttttttttttttttatgaaacagagttcgctcggttggcccaggctgggatgtgcagtgggcatgatctcgggctcactggcgaaactccacctcctggggttcaccgccattctcctggcctaaagcctcctgagtagctggggactacagtgtacccggtccccaatacctgggctaattttttaatttctaagtaagaagacgggggttctcaccatggttacgccaggatgatctcgatctggacctggtggatctggcgccacctggngctcccaaagtggctggggatatatagggcatgagccactggtgccgggccttaggtatcgggcagctctccaaaagacaaagaaaagcaacaacagaagacaacaactgtgttgtgcggcgcgctgggcgcccccgagagaaaggctctgtgagaccaaagtgggcgtgggcggcgggggcccacatgggatctaggcgacacggggcacacacaggcggggtcacacgaaagaaaacacgaggggcagaggaccaacagcggggtgtgaatatgtccgcacacagatgaaaaagacgcgccgcggggggaaaacaacacgaggatggtctttggaaaacacgctcagaagaggggaatcacggggaggccacaagcggggggcactataccaacgagggggcaccagagcggagcggaatataaattgcg

SEQ ID NO: 660204 - DNA, 381 bp, Homo sapiens
tctgtgcatcggaactctcattacttctgggccgtgtctgcgcatctgtggccagctacgttgcagagctgctcgacctgctgtgtggcttatgcggacccggtcgctcatggcctccatgttgccctgaatcctcctccagcacctcctccagctgggcgatccagggcctccaggcggagcttactcgtacctaggagtgcgtaccttcccgacaggctactggacagctcctctgccagttcctccttctcgaggtccgcttgtatgcgagccctctcagcggtggcgaggtcctcttgtagctgcatgaggtctgcttccaagctcttggctttcttctcattctctttggctgtggcaaagatctcatcgctggag

SEQ ID NO: 660205 - DNA, 338 bp, Homo sapiens
ttggctggatcgctcgccttaacatatgcgctgcctaccagccttcatgggttgggtctgatgtcaaccagcagtcttaccagaaactcgaggtctgtgtgatgtggcaactgttagctacacctggaaaacccttgagattcgtgggagatgaaggcacgcaccaggatatagcccatcagtgagctcagagcacaccttgcgtctttgtaggaagcacttggtacactagacggttgccctctatgtctgctgtccaccttagtgctaggttctgcacgggttagctggcccctctgagaagggacattagaaagggcaatcacgcttgggtaccg

SEQ ID NO: 660206 - DNA, 343 bp, Homo sapiens
acaagaatcgagctcgtaccggcattgctgtaggccagcgagaaggtcacagcgacgatcggtgcggcggctgtgggtgtccgtccatgccacggcacacagcgcgatggggtggtcggggatgacatggatgtcggtgatgcgctgttccagcagcaggtcttcggcttcgaagcgtcgggtcatgtagggcgccgtcagggcaaaagaaaagggggcggacccgcacctggcgagctgcccccacgacctgcggcttaacgctgctggcggttgccgccctgctcgcggttcgagccttcgttgccgcggttggcctcttcacgctggcctacagcacatg

SEQ ID NO: 660207 - DNA, 358 bp, Homo sapiens
atttggaataaatatgtagaaagaattcagaattatgccccagctttcacaatgttgggttacttaaacgaacatctacaagctgaaataaggaagcagcaaaatgcataccaaaggggcaatcttggttggttacagacttgcatgtaagaccagagatactttacaactgttgcaactaaagaaattacggcagattgttatgttccaactaggttgacagttattgactacaagccttagttccaagggcttggttaaagttcaaagcagccacctttggaaagtggttgaggcaaagaacgagttcaattaagcgtttatgtggcagtttgggccttgttaattccatggaaac

SEQ ID NO: 660208 - DNA, 271 bp, Homo sapiens
ttgcgatattgaggccaagtccgagagcggatatgataagtattagattccatagactgcattagataaagttgtccagcgaaagagaagatgtcctaaggcttcttcctactgtatcccgaatgagctagacctggtgcttgcgagtagagacaactttggtaagcaatcactctggcacaatcttcaacgcagtgaggataataccttgcgccactgaatattctagatactatatgatacgattcttggccttgccatatgcgagggc

SEQ ID NO: 660209 - DNA, 324 bp, Homo sapiens
tccgccatacgccacatacgccatgacattcttttgttctttagctcaaatcatgctccttgctcataattgtcccctgtttaaattttttctcccacatcttagcaaatggagatttaccaccctaatagccttaaccttggagactctagcaaaggaacgtgctgtggattttaacatctaaacaattccttgggatggatggccgtggaggtggcagatccctggaatcacgcagcagtaggcagcccagagagaggcctgggcatccctcagtgccccaagttcctgcatccgtctcctgcagctgcgtttcacttccga

SEQ ID NO: 660210 - DNA, 326 bp, Homo sapiens
ggcccgataagctggtaagcatggacgcagaccccgtcagcactggaccccgatagacggctcgcgcgcgctttcgtgctaggccctgtatgtgaggggcggctccccgtagagtgggtcgggtgtttgattctgtccgtcgcattggagttccctcgcaccatagtactcgcgccattcgtcgcctcttgacgggtccgggcctatccctatatgccttcccaagccagcagacgtggtcccctggatgacgcgtcgcggccggtgtctcccgtgcgtcccgcgccccccgcggtcgctcgctgtccatgggctcctgaaccgca

SEQ ID NO: 660211 - DNA, 1126 bp, Homo sapiens
actctcgaccgcctcgaccagtccccgtggtgggaggcggccaagaggatctccaagccctcggtttcggcctttttcacgggtccagaggagttaaatggacacggcccattctgcagccctgctggcacagctacaagtccttctacgacgctgcgtgctgctgtgtgatgtgaccatcgaggtggtgacgcctgtgcagcggagcctggcactgggtcgcctcttattcctgcaatacgcaacgtgctagcagctgcgtgtccctacttacaagagcatgttcacaggtaggacatgtaccgaagatgccaggcagtgccagctgttgacccatagccacgcatagctgcgaccgctcgacgtacctttactgaggtcgtataggtacagactaacttgctaacagcgggtacgatgtagtactctacagttgaggccaatgtgcagcgcctgtacgcggcctccgacatgctacagcctggaatatgtgcgggaagcctgtgcctccttcttagcccgaacgtcttgagctagaccaactgcaccgccatcctcaagtttgcagacgccttcgaccatcacaagcttcgatctcaggcccagtcctacatagctcacaacttcaagcagctcagccgaatgggtcaaattcgggaggagactctaacagatctaaccctggaccagatgctggctgtcctacgcctggatagtcttggacatagacagtgcagcggactgtatgcatgtagctgtgccatgattggacgctggctgccaagagcggggtcccagtgctgataaagtctcccagtgacgtgcgcatggattcctacacctgacgaggatcaggcttatttacacggccgtgacacagccatcgttgcaacaagcttttgtccttgaccgtcttcataacgggccccggagaagcgcctattgtagccatgatgacaacggctcttgagtgacatgatcaactatttcatacacctatacaggcaaatacttgtctttggccgagaatactgactgatccggataccttctaccagacagtcgcctattggtgacactagatcgcatcgtgatgcagtacgagcataatagacaacgacaaact

SEQ ID NO: 660212 - DNA, 158 bp, Homo sapiens
aaccggccgggttacgtgctgtgggttgagtggcttccactaggcttatacagttcttgacatgcctcataggcctctaagcagcccagaaagatagacggtaatcttgatctgtattgtattactgacaaagtatatagttcagtgtcctaagtgcc

SEQ ID NO: 660213 - DNA, 106 bp, Homo sapiens
cgcatatgagggagactgtttctaactctaaacgttagaaaaataattcgtttaatgtgttgagtgttatgaaaatatcactgaagaccccggactaaccttgaag

SEQ ID NO: 660214 - DNA, 81 bp, Homo sapiens
  misc_feature (20)..(20): n is a, c, g, or t
  misc_feature (27)..(27): n is a, c, g, or t
  misc_feature (66)..(66): n is a, c, g, or t
  misc_feature (79)..(79): n is a, c, g, or t
ggactctcaaagagtcctcnccaaacnccaaagtttgaaaggatcaatttttcagagcccaacttnctttattggccanaa

SEQ ID NO: 660215 - DNA, 129 bp, Homo sapiens
atccttcctctctacgatccttccctttctcacgtagggatgctccgcctgtatatcattccaactggcagttactggtacatattgtgggctccttattgcccccttttttcttcttttttggggtca

SEQ ID NO: 660216 - DNA, 453 bp, Homo sapiens
  misc_feature (201)..(201): n is a, c, g, or t
gcctccatggagttcgtgggctacaaagacttcttggctgctgcaggccatctggatgtatatgtgcagttcacaggggttacaatggcttagctctggctcagaggcctgacactgacctcagatgatccacctgcctcggcctcccaaaatgctgggattacaggtgtgagccactgtgcccgcctgggatcatatgtnacacgcatgtttgttcaataagcatggagtgcagccacccacatgaatattcatagctcctcctgtagcctgttcaatatgtatgtttagctaaccccttcagcataaagctcctgccccaacccctcctgcttctaaatgtctgtctctggtgttaaccagaggctgctcttcccaggctgctggatggctaccttgcaggctgtcacccttaacaagaaataaagtgtcatttgcaaatgcaaaaaaaaa

SEQ ID NO: 660217 - DNA, 315 bp, Homo sapiens
  misc_feature (2)..(2): n is a, c, g, or t
anaaataaatgcagataatttttctcccacagacagaggtgtccttgaatgattctaatgattatctgtaagcctttgtaggggagggaggccatgcaacggtcatgaaaggcagaagagtctaattgtgcctggatttctccaggacagcagtggaccctcgttttatcattcccagtccattgtcatcacgtcagcagaaaaatcttcaggggtgctcactccacgtggcatttattttgatccatcactaaccgagaacggttaatgcgtacaagcataccacatggcccttccatcttgtacattcctgtg

SEQ ID NO: 660218 - DNA, 131 bp, Homo sapiens
tattccccacgtactgacgagttctggcctaatggattactgcagccatcaggaccctgagtcaagaggacagtcatccagtcccctctagtgcccctacagactgttttggtcattgccagtttagaaac

SEQ ID NO: 660219 - DNA, 424 bp, Homo sapiens
gagatcttggcttactgtaacctctgcctctcgggcttgagtgagcctcccaccttggctttccaagtagctgggactacaggtcaccatgcctggctgatttttgtattttttttaaagaatgagttccaccatgttgcccaagctggtcttgaactcctgggctgaaatgatcctcctggctcagcctcccaaagtgctggacttacaggcgtgagctaccacgcccagccaattattttcttttttggggggtgggggaaggagtcttgctctgtcacttaagctggagtacggtggcgcgttctcggctcactggaacctctgtcttccgggttcacgccattcttctgtctcagactcctgagtagctgtgactacagatcaaacagatgatgggggcggcaacacgactcgaggaggg

SEQ ID NO: 660220 - DNA, 354 bp, Homo sapiens
ataacctgaagcctgaggtggcagagttctatgggacaggattacagatgaaccagcttagaggtaggacgtcctgtcacacgcatctaggcgggtacgctgggtggaacatactcataggcttactttactgagacttacctgagccacgtgaacctattgaggcagagcccaatttcttctcgagcagttgtgccctctgtgccaatggcacggactagcgccagctgtgtcaactgcgttcagagtgtggctgctacacccttgaccaatacttcaggtacttgagagccttcaagagtgtgaaggatggcgctgtggaagtgaactttgacgcactgcgctatatttgag

SEQ ID NO: 660221 - DNA, 227 bp, Homo sapiens
atcacaaatccttctgggatgaacaatactgttcttttcagaagaaaaaggcatattaccttttctatttctattatgaaaaacagagctatacaattttggtatttttagtagagactgggtttcaccacgttgccacgctggtcttgaactccttcaaggtgttctgccttttttggcctcccaaagttctgggattacagatgtgagtcaccccgatctcccca

SEQ ID NO: 660222 - DNA, 1065 bp, Homo sapiens
ctggttttattccttacgtcatttgttccagtaattcacgagtgtctaggtgccgttgctcgcgcacaccagggctgtgctgttatgcaggaaaaacacgcgtctgcttcatggctagccccctgggtgcctgcgaccattcgcctgcttgctcttcactagaagaccatcgtagccgtgtgcatgaatcaggctgttacaccagatggacctaggttctttgctccgaacggcgccatcacatggtatccggttcacaaaccccgggtgctgtcaaagagtatggtaccacggttgttaacgctcccacggtacttctgggtggggggaccacatatcatgctcggcagatacacctgtgacattgtgggtcatccaaacagagatggtgtgtttgagccaagtgtcacatgttcctcatcatcgttgccgcatgcacgtcgcgccggtgtgtggtcctaacacgcaatggggccaccagctaaaaaatggtttgttggggccattacgggatgcgaatacttgtgtgtgcagtagctgcgagttgcactgcccgctcgatgatatacgcgaggattggatgatgttatcgttttgccataactcgcgcagtgccataaatataagggtaagattctgcttcagatcgcctgttagtgaggtactacttcgggccccgcgtagtggcaccgcaagcacacactaaatgtcgccaatttctgcgaagaaggatcaaacctacaccgtatgataaaaaatatttgtcgtgcaccgcgggcacacagggagtacatcagtaggacgccacaccgcaatagggattggctcgtgggtggtagatagtcgaagaatttaatatgcatgttctatatgagacatttgcccggaatacatttttgccgcgcgacccacttgggtcgatcatcgcttgttaatacccacgcatcttctgtggagagaccgttatagcgggggctactcaaggagtccactaggacttgtcacagcacgtttctgtgctaaaacccgcggggaaaccccggttttgaataaaacacacaaaac

SEQ ID NO: 660223 - DNA, 716 bp, Homo sapiens
ggtatggtctctgccaacatcctgtatcagcattataaaataagaatggataacttcaagctttgccttgactgtatttccttggcttggataaaaagctattgtaatggtcaattccaatgcattttttacaggcccaggtaatggttaaatacgtcagattactgaataataattgaacgtatattattcttctaaggatacagcttgtctctggagttaaccagtcttaatttatatatttgtaaaatcgtattttaatgcttgatttggccatttatagacgtagtagcagtaattgcgagaagttcttgagctgaattcctgttgtgacaaacttcctataattaacagtagatacaacttttcactttaagtcgtatataacttttctataaatgtgtgatggacaatgagatatgcttatccaataagaataagcttaaatatgagatggtcttgggtcaaaatgttctttatacaaatgacctttgttatgagtacgttagggtaaatacttgaaagctttttagtatcttaaagaatactggttgaaaagcatattagatcgttaaacagtggtggccagtgtggatttacaagtcatgggtctagtgtgcagacttgattttataaaacatatcacacatttaatggttatacaggatacacattttggggaactcggggaagcaattaagaaagtcgggaggggg

SEQ ID NO: 660224 - DNA, 770 bp, Homo sapiens
ggttcgttagtggattacttctgagcttgcaacatagctcactgaagagctgttagatcctggggtggccacgtcacttgtgttatttgttctgtaaatgctgcgttcctaatttagtaaaataaaagaatagacactaaaatcatgttgatctataattacacctatgggatcaataagcatgtcagactgattaatgtctactgtgaaaattggtagtaaattttcatttgatattagatataaatatctgaatataaataattttaatatactagtcatgatgtgtgtgtattttaaaaattatctgcaaccttaattcagctgaagtactttatatttcaaaagaatgaataacattgataataaaatcgctactttaaggggttggtccaaaataaatattgtgggccttatatatcacacctattgtagaaagtattatttaatttaaaatggatgcaggtgtgtctactaaagaaagattatatattaatatgctaatggttcataatcaacagaaaccaagatagagctacaaatcagctgtacagttcgtacactaaactcttctgcttttggcattattaggaattaagtctcgattattaggtgatcacctggatgaatcagttttctgctgaaggcacctaactcaggattctttctcttattatctggatgggaattaatctctccttgtgtcattttggtgcttaaatcaggttatcagccattggttcctttacaacggctgggaaaattttttg

SEQ ID NO: 660225 - DNA, 1391 bp, Homo sapiens
taacataaattaacccatttattatagggccagggatgtctcaaagagtaaaggagcgtctacggggtcttttcaactctcctttcagtctttcgtggtgtgggggacttttaccggtgacaggcggaaggtggtattgggtacgtctccaggccccgccagccagctgtggtctctcagtgcgggacccccgaggtgccagactccccaaaaggcctcggtctctctttcaatctgtgggagttgtggccacacaagaaaaagagagacagaggtgttcacatgtgggggtgcgtgggcgtgaaattctcaattttctcttctccaccaattttctccggggaggggagcgccccccttaaggcgggtctcccgcggtatttataccgggacagaactcccgaacttttctctgtggggatacgtttgtggggccccgtgtgtccgccgggaacaccccctttaagagaggggggccctctcttagagaccctctcctataatgcacctctcgcggccttagccccatgtggtagatttttcaccttctccactctccaaataacggcctccctctcaatactataggggcgcataataaaacccaacaaaccatctataaccccatttatttccccacatgtggaggggggcgcgagatgtggttaaccacgggaagaagagccgctctatacacccagaggggcccccaccacaaaaccacaccatctctgtgtgtccccacaaaaaagaggggctctctgcgaaaaacacgggggaatacaaatccctaaattttaatttaaactcctgccgaagagagttctttattattctatcacgcgggagggaatttattccccgagagagcccctttttataccccaccttcccaaggcctatatgcccccttataccccccccacaatatttttgggaggggtgcacctgtgtgcccccccacaaagaaggggctctataacccccccggattataaattcccccctttaataaatggtccccaacgtcccatataaaacaacattccctggaatataaccttccgccactcaggggggggtatttcactccacccctgtgaggctcttccccatttggcttttttattctagaaaacctcgccggataccccaattattccaaggcccttgtgtttattcaccatttttccggggtctctctttttaaccccccctaaaaagcccctcaaaagactattcgagggtcccccttccccaattccaagggactttcggggcccacattttggttgacacggggttccaggcatacggctatatgtggaccatctccataatgtggtgtctcggcgcaaaattatttttattcccacatcttgttcgtcagc

SEQ ID NO: 660226 - DNA, 501 bp, Homo sapiens
  misc_feature (1)..(1): n is a, c, g, or t
  misc_feature (360)..(360): n is a, c, g, or t
  misc_feature (433)..(433): n is a, c, g, or t
  misc_feature (442)..(442): n is a, c, g, or t
  misc_feature (475)..(475): n is a, c, g, or t
nacttcggcacaggcactgatacagcccagttcctgggtacccataggtatgagtggtcagtaggtgtatatacttttaaatatatttcctaagagccattaaatgtaaaacccaaatgacggctgcagctcttcactcatgagtgatgccaaaccacattccacagtctctcagcacccctgaagggaaccgtgtaaactctagacatctggccagatggctttctgtcttccattccaactgccagttatttccttttttgtcccaagacggctatgccctgacacacaaggaaaacagttttatctagaactaggaggagggattccttttgcctattgctaattaggggcctattnggaacaaatttcaagtttttgggggagggaagaggtttttagaaggaaaccactttttccagctgttgtgttnagggcaggnccagggcattgatattcattcggacaggcattntgctttttctgttcttggttctttcc

SEQ ID NO: 660227 - DNA, 818 bp, Homo sapiens
  misc_feature (806)..(806): n is a, c, g, or t
ggtaagcataccttcacactttcggagccaagatggacgcttgtccttgtgagcttatcgtgatgccaataggaccccccttttgaacggcttataggacggttcaatttcatcggacagtgcccccgcttggtgaccaggagcgacccattcgtcaaaggcgcctaacttattatggtaccaggcacctctggggatcgatagaacctcgattgggaattcaaaagtgattcgaaattcgggacagccttacttgatatttaccagtatgtccctagacctgtatggcacctcatcactgctcgagagctacgcttgtctctaagaacctggatggactaatttacccaaaggagcctgtgcccttctaatgaacctctgtggatcatcgatcgcgcacctgtgcatggcatgtgagggttaatgtgctcattgtaccaggtatatagattgaaaccactgtgggtccaggaaaattccaaacttcacctacgatgtgtcagagttgacttaaaggggcaacatggccagaagtggcagcacgaatatcttgttggacatttagtgtgcagctgaagattgctaaagatcgcgggattccttcagtaacctagaacacatgaaacccagaagacaccaaatctaggtgatcatctgaagcaacgcaaccgcttccaccaccatggtgtttgtttctagaactttagccactccattgaagaatgggttctgtgtctaatcctgaaacaaagaaaactacaagctggagtgtaggaattgactatagcaattgatacattctacancggttcctgatt

SEQ ID NO: 660228 - DNA, 252 bp, Homo sapiens
caagcttatgactattccaagaagtggctccaggctttgaaagtagaatacaagaagaatttcaaaaagatagagtgcaattgctgcatcgttggaacagtactcgggtgcctcaggcgcatatttttaaagcacacaacattcacatgcttcttacaaccacatcagtcacatcactttatagaaacactctgcacttgtgcaaagaagacccatctatggtttttaaaaatgggaatccatgggtcccgc

SEQ ID NO: 660229 - DNA, 1346 bp, Homo sapiens
taaaaaaacaaaaagccacaaccattttttttttaattttttcacaaaaggggagggagaggggggacacctgtgtgtggggcctcggcccaaacccgcggcccacacccgggcctgtggcccgtgctcgtgaaaacaaggggactcgtaggggaaaatctccaggaactcaggcagagaataggaatctggggcagagaccatctgagaggccgtgggggaatgcccaagaggttagagggtgggaacagaggcttcaccggaaggaaaacaaatggagagccacgtgggcaagggaggagggaacacaaaacagaagccaagaaaaaacaaaaggaagcacacatggggggggccccccctgtgggaacaaccccagaaaggggaacacagaggtccagagaggagggtggacacaccgagtggccagaaagaagagagggtggagagagagcgccccgagaggtctcggcgaaaagaggcgaaaaaagtgaacaaaggcgtgcggcgaaaaaaaagaaaagagaggcggagcgcaaaacctcggggagcgaaaaggagcccccaaaaaaaacagggagagcccccgggtgtgtagaaagagagggtggggtgaagcactgcggggggggtggcgccccaaaaaagcccaaagaagaacagagagcacccacaaagaagcgggccccacacacagagccaccaagaaccggagtatgggggaaagaggggagaacacaacacacaaagaagagcgccccaaaatagggcaggagaaatacacagacgagaagaggggaaaccacacagagagacaataccaccccacgtaaagagggaagaagcccaataacaaaaccaggaggccgccactataacaagaacatacataataatatacaattttttcacataaatccatcaatacttactcccctataaaataatccacacctattataaagctatttggagaaatacattatattcatttacacacactataaagaccgcaatcactacctaactcaataaaaaaaaaaatatttaactaatacagacatatccggcgagaagacaaaccacaacgaacaaataacaaatgaaacaccaaacagaggcaccgaggacccaacgcagcgagggaccacccacgcacttcgccacagagggcacgaggcgagcgacaacggagagagaggcaaaggggacccgaggcaacaagagagtacccaacaacgtagagggcacacgcgaaacaggagcagagagaacgagaaaaacacagaaggaggcacaaaactacgtggcaggacgaaaaccaggcaattaagagaaacagaaaa

SEQ ID NO: 660230 - DNA, 469 bp, Homo sapiens
tgagagaactagtctcggtttattttatatttattttaagagtgaaaacccggtaatgatgtcggggttgagggataggaggaaaatgggggataggtgtatgaacatgagggtgtttctcgtgtaaatgagggttaatgtcgtaatgttggtgggtgagtgggccccattgtgttgtggtaaatattgtgagggagtatagggctgtgactagtatgtagagtcctgtaaattaggagagatgatatttgatcaggagaacgtggttaccaccacagaaagtcactccccagataggtaacataaggggcgggtaaggcgaggatcagagaggctccctaccaaaccactcaaaaagctataaggtgggagctacagtcggaagtccttgaaacaaggatacataatccgactgtgaactgcatcagacaatagcgtacgctacccacgcacacccaatcgggaatgc

SEQ ID NO: 660231 - DNA, 160 bp, Homo sapiens
agtcggacgctagcctggtcgcaggtcccaattgctacttcatggatgtgaaatgcccaggatgctataaaatcaccagggtcttgtagcccatgcacaaaacggtgagttgaggtgtgtcgggtgctccacgtgtcctctgccagcctacaggaggaaa

SEQ ID NO: 660232 - DNA, 1528 bp, Homo sapiens
cggatgtcgttgtgtcgcgcttgcgttgctgtgtcatggtgtgtgtgttgctctgctgttgttgtctgctgtgcctacgtggtgctcttgttctgttcgttcgttgcttggtcttctcttcgtctctggtggtggtgtttactacatctctgttttgtgccgttttttttcgcggtgagcgtctcattcatcctttggttgtccgctccttgtggtacagcccgtggtcggtgctgtctctgcccggtcttttatgcctttgggcccggggggtcggtttatcacattgttgcctactccgggtagcccactgctttggcccgttttagcgccttattgtttgggtgcctcctgttgttagcacccgaactgtttgtgtgccgcatagttcattcgcagtgtcgtgtgtttacccccgggttctcccggggatttttccctcgggggagtttttccgtcgtgcgcgacacctccacgcgggtgtcgctccatgggctcgccgcttctttctgggagttgtcacttgcgcgcttctgtccaaacctcgggggagtgtcctgcaaacccctgttttgcctactcctgtgtgtaaaggtgataaccccatgggcccccccacctgtgtgtgaggcgggatacaacatttccatattgccgggaatccacaaacacccagaattgggggggttacccaaaccagggggtcactcttagtgggtggagagagcatttattcccaaagcccgtgtttttggatgacccacccaaaaggaggaattttcccccccacccttattttttgtgttctttcggaaaaaattccaatatggcacaagcgtttttctgagatgaatctttgtcttctaaagggggaacacacgtatctggttggaccccctgtaaaggaccccgtccccaattcttgttgcccgggcacctgtgttgaaaaattatcaaatgcacaatctagggccccggtatgtattgccacttgtgttttcgtggataggggcttgaaaatgttgtgtgaaagaacggggccccgacagtcaacagactccgcgggatgagccacaacccctgtcaagagacgtcccaaagccgtggggagaccacatcacgctggaggagactctctgttacaatatacaacagttggcacggagaacacttattaacactggcacagtgaattttcttggaagaattccacgaagaaaggagatctggctctgtggtttcacacccctgagggaaatctggtatgagttaacaccgaagctgtgctccacgaaactggagtctatgaatgaacacggaggggcagaccaccacttgcttttcacaatccactttcccctccttcccacatgggcacgaaggacccacggctgtatggaaaatctaagttaatttacacacggaccttcactcataatttggagggaagcttttggagctgtgagttcttccctgtacagtgttaccatccccgaccatctgattataaatgcgttcctcccagcca

SEQ ID NO: 660233 - DNA, 345 bp, Homo sapiens
  misc_feature (251)..(251): n is a, c, g, or t
  misc_feature (319)..(319): n is a, c, g, or t
tttagccctttgaacatatttaagatagttgttttaaagtatttgtctaggaatatacattattacagtcattatagagaacagttcggaggttcctcaggaaactaaatatagagctaccatgtggatcctgcagtcccactgctaggtatatgcccaaaagaaaggaaatcagtatgtcacagagatatctgcattcccatgtttattttaggcactcttcacaatagccaagatatgggaagtccatncaacagatgaatgggataaaggaaaatgtgggtacatctattataactggggtacttatttcagggcntaaggaaaggattgaggattacattc

SEQ ID NO: 660234 - DNA, 504 bp, Homo sapiens
gctcagttgatgatgctgttgctgaggcctccaaggagacgcaagcttcgtgatccttctgtccacgcggagcaggggggctggaatgtcgagctgcatgcagagcaagacaatacggtgcactggctcagtggtgtacgccaacaatgtgagcaacggttggcgcagagcctgcgccagcctgtcagtttgtatctggcaaaatcgaggtaggcatgatgctgccacctttgatacttcccagattcaaaaccgatattgcggttgcccggcagcgcttggggcaagggttgtgtatgccgttcgaggtcgctgggtcgagtggcgagttgagaatggagcctggtactgctcctgtgggcatccagccgctctgcttcgaaaccgcctgtggcgtcttggccttcagtgagccaggaccacagttcagcttgatgggtgaatgccccgtgacgctcgagccggccgggaatgatccggacgcctggttctgggagttgtccc

SEQ ID NO: 660235 - DNA, 364 bp, Homo sapiens
tctggcacagtgtggctcggattctctgctccggctcttaaaggctgccattaagcggttggcaggacaacattccttcatggaggctctggtggaagaatctgcttctcacgttcattcaggttgttggcggaattcagcttctttgctggctctcagctggaggcccctctctcatctcaaggctgcctgcattccttcttatgttgtcccctccagcttcaaaccagccttactgctctttctcatgcttcatatctctctcccgttctcctgtattaggggcatatgattcgctcaagcccacagatatattttaaggtttattgtgcgatagaacataattgcaggagtactgtctcat

SEQ ID NO: 660236 - DNA, 487 bp, Homo sapiens
aggttccagccagttccaagtgaagaccccacccctggacatcaagaagctacccttcctccactagatagagcagggtgagagttccatgatccccaataggtagggactatgccccaagccagcatgaagcagttacagaaaaaagaccatcggtccctctgcctcccataaagatttatggggatcacatctcttgaaggggcagatgaggcaggaaaatagggtctgaagtgtgaagatcgattcacacttcagctataacaggaaatatcctctccatagggtgtatgactatgtaacttgaatacttcatcctctccatttacataaggtgtatctgaagtaaccaatggaatcctctgggggtaaatgccccacaattctgtaacgggacctttgagcccctacgctccgcctgctcccacactgtggtgtgtatgttcattttcaataaatcccttcattccttccttaaaaaaaaaaa

SEQ ID NO: 660237 - DNA, 344 bp, Homo sapiens
cgagcagcgcggtgggtgcggctgtgagaccggcaggatgacttctgtccccgctgtgtgcacgcgaccctcgagacgacagtcgcggctattgccagtcgagctgaaggcgcctcccgccggagcggcccagacggcgcccgctcgcccatgccgtagctgagctgcggcatgcggcgtgcgggaatgctggcgctgctggccgccagcgtggcgctcgcctgtggcctgctggggcccaggacatgcccgtgcgcccggtagccgcttcgtgtgcacggctattgcccccagaggcggtgcacgccggctgcccgcttccccgcggtatgccctatgcaggg

SEQ ID NO: 660238 - DNA, 584 bp, Homo sapiens
  misc_feature (579)..(579): n is a, c, g, or t
gcgaaagtgacaaattataacctaagcataattatagcgatgggactaacccctataccttctgcataatgaattaactagaaataactttgtcaaggcagagcctaacagcataaagtacccccgataaccagacgagctacctatgaacagctataatagcacacccgtccatgtagcataatagtgggaagatctataggtagaggcgacaaacctaccgagcctggttatatgcctggttgcttctctataataatcattagttcaactttaaatttgcccacagaaccctctaaatccccttgtaaatttaactgttagtccaaagaggaacagctctttggacactaggaaaaaaccttgtagagagagtaaaaaatttaacacccatagtaggcctaaaagcagccaccaattaagaaagcgttcaagctcaacacccactacctaaaaaatcccaaacatataactgaactcctcacacctaattggaccaatctatcaccctatagaagaactaatgttagtataagtaacatgaaaacattctcctccgcataagcctgcgtcagattnaaaca

SEQ ID NO: 660239 - DNA, 655 bp, Homo sapiens
  misc_feature (265)..(265): n is a, c, g, or t
  misc_feature (267)..(269): n is a, c, g, or t
  misc_feature (272)..(272): n is a, c, g, or t
  misc_feature (275)..(275): n is a, c, g, or t
  misc_feature (282)..(282): n is a, c, g, or t
  misc_feature (295)..(296): n is a, c, g, or t
  misc_feature (304)..(304): n is a, c, g, or t
  misc_feature (316)..(318): n is a, c, g, or t
  misc_feature (331)..(331): n is a, c, g, or t
  misc_feature (336)..(338): n is a, c, g, or t
  misc_feature (343)..(343): n is a, c, g, or t
  misc_feature (349)..(349): n is a, c, g, or t
  misc_feature (359)..(359): n is a, c, g, or t
  misc_feature (362)..(362): n is a, c, g, or t
  misc_feature (396)..(396): n is a, c, g, or t
  misc_feature (415)..(415): n is a, c, g, or t
ccccatgcgggatgaagactacgagggtgacatggaggaggaggtccgaggaggaacgaagagggtgtgttctggaccagtggcatgagcatggtccagctgggacaacatggactatgtgtgggaggaggaggacgatggaggaatgacctggactactacttgggggacatggaggaggaggacctgaggggggaggatgaggaggacgaggaggaagtgctggaggaggttgaggaagaggatctagaccccgtcagcccantnnnccncgnctccagnccctcggaggtgnntcacatgncctcagtgcgannngagctttcctcgncggannntccgncccaanctgcagctgnccnatatggtccaggtgattcggcagatgcacccaanccctggtcgagggagccgngtgacgatcagggcatctgtcccaaaccaccaagaagccctgaagctctaactgcgaggtagacgaagaggcccattcagatgtggtgtgaccgacgaatccaggagccacaaagagcaacagcgctggatgaccatatggaggcaggtcggagcaagagtcacacaaggacaaaactgcaggggagcagcgtggaagacacatgaggcagacaactggaggacagatgcagagaggatg

SEQ ID NO: 660240 - DNA, 152 bp, Homo sapiens
gatactctttacagacatccattgtatgactcccttgagacccatgtcagaagcccccatcgctgggtcaatagtacttgccgcagtactcttataactagtgcaggccatggtataatacgcctcacactcattctcaaccccctgacaaa

SEQ ID NO: 660241 - DNA, 132 bp, Homo sapiens
cagcaacattttaaggaattggataattgggggaaaaaaaaaggagacttgactgctttgatttttttcctttgatgaaatgaggaaaagggaagtagagatttcttcaagaatctaacattaaaacatgac

SEQ ID NO: 660242 - DNA, 720 bp, Homo sapiens
gcacacccgggcagggctggaccctgggtctagccagtgttcctacctcaggcctgctctctcttgtcccccagacaccatccttacccccccaccgaccccacagttgtccagctgtctgttgtgtttgtcctgaccgccccaacaactcgagggaggtctgggctgacagctccatttgtatgtgggagccaagaccaaggagaatgttgtacagagcgtgacctcagtggccgagaagaccaaggagcaggccaacgccgtgagcgaggctgtggtgagcagcgtcaacactgtggccaccaagaccgtggaggaggcggagaacatcgcggtcacctccggggtggtgcgcaaggaggacttgaggccatctgccccccaacaggagggtgaggcatccaaagagaaagaggaagtggcagaggaggcccagagtgggggagactagagggctacaggccagcgtggatgacctgaagagcgctcctctgccttggacaccatcccctcctagcacaaggagtgcccgccttgagtgacatgcggctgcccacgctcctgccctcgtctccctggccacccttggcctgtccacctgtgctgctgcaccaacctcactgccctccctcggccccacccaccctctggtccttctgaccccacttatgctgctgtgaattttttttttaaatgattccaaataaaacttgagcccac

SEQ ID NO: 660243 - DNA, 84 bp, Homo sapiens
ctagaagattcagcaaagtacttttgtgctcttggggaatttggggattcctactgggggatacatagggccgataaactcatc

SEQ ID NO: 660244 - DNA, 999 bp, Homo sapiens
  misc_feature (160)..(160): n is a, c, g, or t
  misc_feature (163)..(166): n is a, c, g, or t
  misc_feature (168)..(168): n is a, c, g, or t
accggtacggcccggaattttgggatgggaaggagagccctgcaggcatggggcttccaggcttgggacacctgggcattcctgggccaggaaagcacccaagtaaacctgcaactcagaagccaaatgagacctatcccaggcaggtccgctctgcganggnnnntntcatcggcgtcaataggaggcatcggggacagccgctgcggcagcactcgagccagctcaagcccgcagctcgcagggagatccagctccgtcctgcctgcagcagcacaaccctgcacacccaccatggatgtcttcaagaagggcttctccatcgccaaggagggcgtggtgggtgcggtggaaaagaccaagcagggggtgacggaagcagctgagaagaccaaggagggggtcatgtatgtgggagccaagaccaaggagaatgttgtacagagcgtgacctcaggcctgccttggggctggggctggggtggaggccagccagtgtcctcccatagtggccgagaagaccaaggagcaggccaacgccgtgagcgaggctgtggtgagcagcgtcaacactgtggccaccaagaccgtggaggaggcggagaacatcgcggtcacctccggggtggtgcgcaaggaggacttgaggccatctgccccccaacaggagggtgaggcatccaaagagaaagaggaagtggcagaggaggcccagagtgggggagactagagggctacaggccagcgtggatgacctgaagagcgctcctctgccttggacaccatcccctcctagcacaaggagtgcccgccttgagtgacatgcggctgcccacgctcctgccctcgtctccctggccacccttggcctgtccacctgtgctgctgcaccaacctcactgccctccctcggccccacccaccctctggtccttctgaccccacttatgctgctgtgaattttttttttaaatgattccaaataaaacttgagcccac

SEQ ID NO: 660245 - DNA, 182 bp, Homo sapiens
ttacttgtgccttatatagtgacctgtatgcatttctccacgatgacaaggctggctctgactatgatccattgaaattgacctgtgcgagacgaggcgcgcatgacacagcgtgacgagatgaccctatggagctttaatttattagtgcagacagtacctacactgcgtacactagtgga

SEQ ID NO: 660246 - DNA, 444 bp, Homo sapiens
tctctgatgcctgcctctgcgttttctgtatgctcacattctttcactgcttagtttcctcagattcgaacgggagagaaatgctcatacatgatccaccagcccgtgtgggattccctctgcccttctggtatctgaaggctgtgattcaaagatcccccctgcaaccttcccacaaatgaaccaactgattctcacaagcgaagggagaattgacacctcccattgagggacaaaaaaaagtcacactctggcctgctggggagtcacctgtcatttccagctcatcttcattgttccatagttagtcctattctttaggtgagaatattaagactattaaaagcttctatgaggtgcactatgtgtgtctctggggtcagtcttgtgcttgacacagcgaaagctcattctagttcagtgtgaaaaaccagaccttaccaa

SEQ ID NO: 660247 - DNA, 500 bp, Homo sapiens
ccgtcagcttgtgcaaatgttaatctcagatgacggtatcatcctggaccctccttgagtaatatgagagactacaacacagagaacaatcaaagttgccccccaatgctgaacaagttaagagcttcatttacaggctgaatttcaaagaatgtcagctctgttgaaccaataatgacatctgccagtcccacgatgttttcaggacatacggacaacaaacaggattggcatcctgacaggtagaagactcagatccaagccttcttgttgccaaacttagaagaatcattctgctttgttaaagatactcccctaaaaaaatacattgcagtttctgggagaatactccatgaggtagaacaatacagcaccttgggagagtctcacaagagctttcccaagtgcaaggcataatctgacacacaacagggaggaagaaagctgggtgggtccacacagtccagttgaaaaggtacttgagagctggtaggcatgag

SEQ ID NO: 660248 - DNA, 539 bp, Homo sapiens
catcccctagtcttttaaaattatcctttgtttacatctcaaaaaagagttagtgacccgctatgtcacatatttaaactgttcgctaaagcggtgtatccttcccttttttgcgggcaattctgtagtcagcagcctctctgatttagtgctcctcccacaatgctcctgccagttgtggtgagtttgaatcaccgagccctcgtgacgcataatcgtgcttcctacagacaacgcatggttgtaaatcgttttataatacccaaatacatatttcttctagatgtgctgtgctcccgcctatagtcaaaacacttgaggagcctgagtcactcgcgttcattgatctcgtgagtccctagaccagcttcgtccacaagaagaaacatttccattctgtacacacaaaaagcacccaggtttggtgcagagcatcggtggtgtaaacaacacaggtgttcgttttaggagaatctctttttcttaggtgcccgtgtttgcttgagcccacattaaaaaaactcgcgtgcaagcagatc

SEQ ID NO: 660249 - DNA, 133 bp, Homo sapiens
ctgcgttgtatggccgccggattcacattaccggcagcatcgttgaggatgccaatattgcaacggcggccgaggtgactcgtgcccgcgagttcgtgaaagccttggtgttagaccttctggcaaagggtgc

SEQ ID NO: 660250 - DNA, 543 bp, Homo sapiens
  misc_feature (500)..(500): n is a, c, g, or t
cccaagtagctgagattacaggcatgtgtcaccatgcccagctaatttttgtatttttagtagagagggggtttcaccatgttggttaaagctggtgtggaactcctgacctccagagatccgcccgccttggcctgccaaagtgctgggattacagacgtgagccaccatgcctggccaagataacagttttttaagcatatccgtaataccatgtattctgcctccccaaattttcttactatcatttaataactacacaattcaaattttcctattgtctcagtaaatctttcacatttggtttaacaggatccagcaaatcccatgcattttatttggttactgaggtcttttccaaaccagtaagaggcagttaattccctgtttaattcagtgaagcagagagcaatgtttttctgaggaagatatttaagtagtttaaaatcactgctttaaatatggagaaattcaagaagaaatcctcatatgaaaagtcnccaattgatagcgtgttgtaagaaatgtaattgtacctgatgc

SEQ ID NO: 660251 - DNA, 253 bp, Homo sapiens
attagaggatccgggatgaggaagtcactgctaacaaccttctagacaagtcaatgattgtgattttaccacatagcacctttttactcttaagtcaccatctcctttctctaactgtgaattcttttttttttgggagacaaagtcgggtccggtgggccaggtgggagggcaaggggggtgatctcagcaaccttggccttcccaggttcaagcagattctcgtgccttcagcctcctaagatagcgggaa

SEQ ID NO: 660252 - DNA, 173 bp, Homo sapiens
  misc_feature (123)..(123): n is a, c, g, or t
gatccgtattgcggtgctttccagaagctttgtaaatacagctttagaattcagaacatttccatggaattgaatatcaccggtgacggtttgtgctaaggttaagccaataacatttcccanacacactgaaaactgttagcaaaggtgaaaaatgcaggttggagttccaa

SEQ ID NO: 660253 - DNA, 900 bp, Homo sapiens
  misc_feature (33)..(33): n is a, c, g, or t
  misc_feature (82)..(82): n is a, c, g, or t
  misc_feature (84)..(84): n is a, c, g, or t
  misc_feature (89)..(89): n is a, c, g, or t
  misc_feature (92)..(92): n is a, c, g, or t
  misc_feature (105)..(105): n is a, c, g, or t
  misc_feature (134)..(134): n is a, c, g, or t
  misc_feature (145)..(145): n is a, c, g, or t
  misc_feature (149)..(149): n is a, c, g, or t
  misc_feature (161)..(161): n is a, c, g, or t
  misc_feature (243)..(243): n is a, c, g, or t
  misc_feature (268)..(268): n is a, c, g, or t
  misc_feature (336)..(336): n is a, c, g, or t
  misc_feature (338)..(338): n is a, c, g, or t
  misc_feature (340)..(340): n is a, c, g, or t
  misc_feature (392)..(392): n is a, c, g, or t
  misc_feature (415)..(415): n is a, c, g, or t
  misc_feature (442)..(442): n is a, c, g, or t
  misc_feature (453)..(453): n is a, c, g, or t
  misc_feature (469)..(470): n is a, c, g, or t
  misc_feature (473)..(473): n is a, c, g, or t
  misc_feature (475)..(475): n is a, c, g, or t
  misc_feature (482)..(482): n is a, c, g, or t
  misc_feature (485)..(485): n is a, c, g, or t
  misc_feature (490)..(490): n is a, c, g, or t
  misc_feature (493)..(494): n is a, c, g, or t
  misc_feature (496)..(496): n is a, c, g, or t
  misc_feature (503)..(504): n is a, c, g, or t
  misc_feature (512)..(512): n is a, c, g, or t
  misc_feature (514)..(514): n is a, c, g, or t
  misc_feature (527)..(527): n is a, c, g, or t
  misc_feature (529)..(529): n is a, c, g, or t
  misc_feature (578)..(578): n is a, c, g, or t
  misc_feature (585)..(585): n is a, c, g, or t
  misc_feature (605)..(605): n is a, c, g, or t
  misc_feature (609)..(609): n is a, c, g, or t
  misc_feature (617)..(617): n is a, c, g, or t
  misc_feature (621)..(621): n is a, c, g, or t
  misc_feature (632)..(632): n is a, c, g, or t
  misc_feature (641)..(641): n is a, c, g, or t
  misc_feature (659)..(659): n is a, c, g, or t
  misc_feature (673)..(673): n is a, c, g, or t
  misc_feature (676)..(676): n is a, c, g, or t
  misc_feature (694)..(694): n is a, c, g, or t
  misc_feature (696)..(696): n is a, c, g, or t
aaataaataatttaaccatctcaaactgcattnacccctgccccagccctgattgaccccacttcttttggccaaaggtttntnggctntgntgggaccctattntcagctccccgggaggccaggttcatgcnaggtccctganccancccccttaagcnagctaggtagggtccccggacaccctgggcacacagacgagatgcagggacagcaacagggaagggtcacaaaatgccagcncggtggccctcggacgctgcaagtncgttcagctgccagccctcctgacctcccagaaacactttcctggagcccaggaaggaggatggtggnangnagcggaaggtgggcagccccacagtccacacgtggccggccctgctccagcntcctagctgttatccccattttnacccgggccgcggattaggcgcttatngccccgcttgntccctgggcccttggnnttngngaaggcntgnttganggnntnttgtttnntgtgcacntngtcgtataggaantntgctgttatttcttctccatcgccaatttcaatttttttttttattttnatatggnatttctgttccacggatttnaggnggcggctntttnagctggatttnagcattcgntccttgatgctgcacttntaccccggcatggngtngatgaacactacagattnangggggtcgccctcatgggtgtgcttgttgaggaagaagtggtagcgggcagcatctcggggcaccggggagggcagctgggccacatccgtgggctctgtgtgcaccagctcaatggtttcccgctctaggtccagcttcatctggatgtagttgaccattttctgcttgagctgctggagtgcccgctgggcctcaggctgca

SEQ ID NO: 660254 - DNA, 534 bp, Homo sapiens
agaaacagagtctcactatgttgccctcgtggtctcaaactcctggcctccggagatcccacagtcttggtctcccaaagtactgtggttacaagtgtaagccaccacatctggctctcactgattattctttgtcactttatcttgctttcctttgtagggcctctatatctgttctaagattatgctgtatctctcatccgtgtatagctcttcttttgttttcccaattatattttatatatttatttttgagacggagtctcgctctgtcgctcaggctagagtgcattggcacaatctcggctcactgcaattgtaagctccacctaccgggttcacgccattctcccgcctcagcctcccgagtagctgggaccacaggtgtcctccaccacccccggctaattttttgtattttttgtacagacggggtttcaccgtgttagccaggatggtcttgatctcctgacctcatgatccgcccgctttggcctcccaaagtgctgaagcaggagaatcacttgaggttag

SEQ ID NO: 660255 - DNA, 746 bp, Homo sapiens
ctaggtcagcttgctgccctaggctccgtcggtagtcagggctgccagacggcaccacccagcagccagcaagtccaactaacaagaaactcacccccaaggggcagtcggaggggcgtggccagcagctgcgtagaactgaggaggaaggagagaaggggaggagggcggggggcacctactacatcgccctccacatccctgattcctgtgttatggaaactgttgccagagatgtcaggttctctcggagtatctgggaactgtgccggtttgagtttcctctaggctgctggaggataactgtgactctgactggaaagggaaggtcctgacagacaaggtagcccgtggccagaggcttgtatgtctttcggtttgttatgaggtgggatatccctatgctgcctaggctgaccttgaactcctggggctcaagcagtctacccacctcagactcctgtgtggctgggatgatagattggagccaccatgcccagctcagagggttgttcgtcctagactgaccctgatcagtctaagatgggtggggacgtgctgcctgctggggctgtcacctgtcccggatcccttgaatggacctcctgtagcgatgactcaagtgtctcagtccatcctgagctggcatccaggatgccactctgtgggcacgctgtgggcggtgggagcttgattctcagctcttggtggatctgttgtgtctgtggagagggttgagtgctgga

SEQ ID NO: 660256 - DNA, 521 bp, Homo sapiens
  misc_feature (57)..(57): n is a, c, g, or t
ctgcccgtgagggactttgtggcacctctccttgctcagccggcttggagccagtcncctcctccagggtctaacgcgctcgcgttcattcggtgggagttccccaacttcaacagccgaagcaaggacttgctgggtcgctttgttttggccccgcgacacatagtggctgcaggcttcctgatagtggccgtccccttctttgagtggctggccctccagtttgaatggctggaaggcgccttcctcaaggacctgttgcgccaaccggtggctttggcgctggcccagtgccttgtgcccgcagcttgggctgcgtgcctctcccccgggggtctttctgtgggcggcccttaagggtcccccttgagggcaaacctctgtgcaggaccttggccagagtggggagggtggccccccccttttatgggacaaaacgtccttttgtgtataataaaccttttattttggtgttggacccctagagacctttccaaaattagtaaacctataaaaagtca

SEQ ID NO: 660257 - DNA, 308 bp, Homo sapiens
  misc_feature (83)..(83): n is a, c, g, or t
agaaggaggacatgtgacccaaaagtcagtactggtctggaaacataagtgagacccatataaaaaagaaagatcaagcatgntgaactgaaaattgaagtgaactgtgaatgttcaacaggctggttgcagaaatttaagaagagatatggcattaaattattattttttatttatttatttttttgagacagcatctctgtcacccaggctggagtgcatggtgtgatgataggtcactgcggcctaagaatctcctgaagacacgaaatagatccccatcaaatagcctaccaagaaaaaaacca

SEQ ID NO: 660258 - DNA, 478 bp, Homo sapiens
caacatggtgaaagctcgtctctactaaaaaatgtaaaaatcagctgggtttgatggtacaagcctgtaatcccagctactccggaggctgaggcaggagaattgcttgaacctgggaggcagaagttgcagtgaaccgagattgtgccattgcactccagcctggacaacagtgagactccttctcaaaaaataaataaataaatagaacaaatacaaaagaagagagaatggtaaaagtgaatgaattgcgctacccgtcgtctgcctttaacagttagcacatcacaacccctcattccaccgcttcattctcctaccctcatcttggattattttgaagtgtatcctagctattcatttcaattgtaaatatttcagtgtgaatcataaaaataaggatctctttaaaaagataactatagtactgttattatcatactaaaaataaacaattccatattattgtcaaatatat

SEQ ID NO: 660259 - DNA, 381 bp, Homo sapiens
  misc_feature (353)..(353): n is a, c, g, or t
gaatgtttcttccatccttataatccagtcatctgcaacctcagtctcccaggttcaagtgattctcctgccttagcctcccgagtagctgggattataggcacccaccaccacgcccagctaatttttgtattattagtagagacagggtttcaccatgttggccaggctggtctcaaactcaactcctgacctcaggtggtccacccgcctcagcctcccaaagtgctgggattacaggtgtgagccaccgcacctgggcctctgtcctcttttagtctagtgtctggttttctaggcaaacagtaaatttaaacaagtaaaactattatgggttccattgcttacaaaangatttttcctttaacattcttatcatgg

SEQ ID NO: 660260 - DNA, 1041 bp, Homo sapiens
gagcaactttatagtgaatttgcagttcaagcatgctaaagattcaagattcaaagcaattagagaaagatgaaagaccgcagcaagccgttgtttcaaatgcagttatgtggccgctgctcaggcaagcacacagcagaaagcaagcattcgcacagacacagaggtgagcaagcattcaacatcggcatttcgtttgacactcattcatctcaatccatcactatggaccagtcagtctacgatggcagacaaagtacaaagcacaaagtcagcaaagtagatcccacgtatacaaagccagtagatcagttcatcacatgagcagaagaccttcgtacaaaacgagatcacatagcacaaacacatcagccgaagcaatttaaggactccaagcacaaaagcaacacaggcagctatgcaacaggccaaagcccagcaatagcaggccaaagcctatcgaagaaacgagcaaagggcaggttcacaaaggcccagttcagcaacaacacaaacagaaaatagcatcgcagcagagagcagcagcacgcaaacggaagaagaaagctatcgcagcaataccaaaagccacaacaagaacatggacaatgggaacagtacctatacaggagggtagacaatggaactggataaatacgataaggaaccacaacgcgaaagaaggatcaaacagacaggagaaatacacaggacacccataacttagggcaaaaagaaacaagggacgcacaagacagaaacacaaccacaaacaatgaaagccaccatcacgaaagaccacacacccaaaaaacacacagaacgaagaaacaacatataagagccaaccattcctggggaatgacaaagcactactggccaagtaaacactcaacacagtcaccaaagagggcaacagagaggtaacaaaaaacaacacaaagaagaggcaaagaacacatagaaggaaacatacaggaacacaccacaagtcgacaacaggaaagaaaacacagacgcagcaaaacagaaagaaaacaa

SEQ ID NO: 660261 - DNA, 502 bp, Homo sapiens
atggggcttccctggcttgggttgggcgactgtgttggcaaggacttgcagtatcattcacgtttgcatgtgttttgtaacatgttgtggtggccgctgctctcggagagggccttgccgttcgtggaatggtccttctttcagtctaccttgtgcttccgtccatttggccgactgtgttgatacgtatgatgaaccatgccccatgtcgtgacttggaatgccctggagagaacacctggccacagcgtctggaaactccttatctaagaagagggacagactcatgcccacatgatgagttctgttgagtaccaaggtagcagaaaaggggagctttgaactccatttgggagtagccagggaagatggcctttctgcaagattcttgagggaatgatcaggcactcaggcctgggaggggagaagacatcagacgtcaggggatggtcagatgcctgtgcagaaggtaaaatgaaatctgtcagataaaatctacaaa

SEQ ID NO: 660262 - DNA, 159 bp, Homo sapiens
cgtatgtgtgcgcggtggcactggctggggtaatgtctgacgtcagacataaggagctcatctggcaaatacgccatgcgagactagtccacaggcttccaggagggaacaacagcaacaacactgcaagcaagtgcatgtcggatgcaccagtgacag

SEQ ID NO: 660263 - DNA, 182 bp, Homo sapiens
ccacagacttattctttaatgtgattttggcaagggctcactcccagtgactctttggatctttcttactctaagtagatagggacagctgtaacgaagagacttggagggcaaggcaagggaattaggacttaaaccttaaccaaaggggccgagagaatctttaggtaacttggagggcg

SEQ ID NO: 660264 - DNA, 468 bp, Homo sapiens
tcgcggccgcgtcgacggctgagtaggtctgtctccctgcctgggggtgtctacctggctgagtaggtctgtctccctgcctgggggtgtctacctggctgagtaggtctgtctccctgcctgggggtgtctacctggctgagtaggtctgtctccctgcctgggggtgtctacctggctgagtaggtctgtctccctgcctgagggtgtctacctggctgagtaggtctgtctccctgcctgggggtttctacctggctgagtaggtctgtctccctgcctgggggtgtctacctggctgagtaggtctgtctccctgcctgggggtgtctacctggctgagtaggtctgtctccctgcctgggggtgtctacctggctgagtaggtctgtgtccctgcctgagggtgtccccaccctgagatggtcctatatggggtctttaggtgttgatggttgttttataaca

SEQ ID NO: 660265 - DNA, 138 bp, Homo sapiens
ctgaggatcccataggacgatgtgcagagaaaacttgtcgatatacatctttgaatatgacaaaagattgccatgtatggagaggagtttattatctatgattacaataatccattggacttacccgaaagaattgct

SEQ ID NO: 660266 - DNA, 150 bp, Homo sapiens
gaatgactggatatccatgggaggacacatggcttccttagcggtatccaacaggcctaagcccatgctattgattccaagccgttgtggtcacagcatctggggtcttcactacgggagtgtgaggaaatcaattaattggaggagctg

SEQ ID NO: 660267 - DNA, 1363 bp, Homo sapiens
  misc_feature (323)..(323): n is a, c, g, or t
ggctgcccttccatgaaacatgagatgcttcagtttcggagaaacttatttagatgctcacttttgctgtacaggagcttgaatattaaactaggactacacagattaatgcgatcaacgaagttgtttaatggagagcaagctgacatacacggttaagtcgatgagactcatggccttagagagatctcagatctctgctggacttgctagtacataatgagacaatgtggtaccatgtatctaaccagtctattccagtcgctggtacagcgaaggcagagtaatacatttactgatggtagtagtactgagacttcgcnacctagagcatgtataataccgaagtggtcatgtgagacaatggcacaagaggtacctgcacgtacattagacacaccgtatcattcccatattacatacgttgtcacgcgatatagtagcgcaattagatcgtgtcacaaagcaaccggttggactagttaaagccctagagcctgtaccctcatttgtattcaatggcataggaacgggaaaacaccaatgtggaacgtcaaacaagggtcggtaggagttatagccttaaatcctttggggccatggcagggacacttttttggtgccccttaagagtgggttcccgccaccctttggggaagacaccatttccttcctaaaaggaccgaaacccatggtttgggccttaattttccttgcctccaaatcttggagggagaaaccacccccatagggtcccgtcaagtccggtacgacacatgcggattcagagcaccactagattcatcaacatatgagcactaggattattcatatacaccccagagagtctcacaaccggggacgaaacccattcaaattataggcgatcaggaacagacattacgggcacaaattcatacagtataacacaatatcactacaggaaaacgagaaggagaatacaacgccatacactactactgcagccagttttaatgcgcccacattattaccgtgtcaagagggtgtgcaacaacaacgaggccgacaaactcgccgaaaatctctgcagtgcccccggcaagttcatgctcccccagattaaaacccattggtcgccacgtcgggacaccttacttccacgtttctctgccaatcagcacatgacgcagaatacaaggtgtaaattatgacccatattattacgttcctaaataaacactacgctcacaacattttacgcccataggatacaagaataaaaaggaacaattaggagatctagtatgatgcacaagttgcatacacaggaataccaaccacgcacatgattggtgcgatatctcacctaggtatgaagaga

SEQ ID NO: 660268 - DNA, 102 bp, Homo sapiens
cctttaagcacagggaggcagatgttgcagggttgcagtgagcaagattgcatcactgcactccagcctgggtgacagagcaagtctcctgccctcagcctc

SEQ ID NO: 660269 - DNA, 174 bp, Homo sapiens
agtacagatacgaagtcgagcgcggaccagaggatgagagaacccccctgtctctctctctccgtctctctctccctctctttctccgtctctccctctgtctctctctccctctctctctctctccctctttctcgatgtatggatttgtgcctaacacccagacgtttatga

SEQ ID NO: 660270 - DNA, 197 bp, Homo sapiens
gggtacttgaagatagtaaaatatttctacaactatatttcagaatctgtcagggggcccagaacatcataggacttggtcaatacagaagtcgaggagttcccgtcgtggcacagtggttaatgaatccgactaggaaccacgaggttgtgggttcgatccctggccttgctcagtgggttggggatccggcgttg

SEQ ID NO: 660271 - DNA, 559 bp, Homo sapiens
  misc_feature (522)..(522): n is a, c, g, or t
gtccatccgtggatgaacagataaagcagatgtggtctatacataccatggaatattattcagccttaaaaagaaggaaatcctgtcctatgctacaacatggatgaatgttgaggacattgtcctaggtgaaataatccagaagaaaaacacaaatactgcatgactccacttacatgaggtccctggagtagtcaaattatggaaacagaaagtaggatggtggtcagggtagcgggagagggaatggagagttgttcaatggatacagagttccagttttgcaggataaaaaagttctagaggcctattacacaacaatgtgagcataattagcactggtgaacttaaaaatggtgaagaggataaatctttttttttttttgagacggagtttcactgttgttgcccaggctggagtgcagtggcacgatcttggctcactgcaacctctgcctcctgggttcaagcgattcttctgcctcagcctcctgagtagctgggattacagacatgtacctncatacccagataatttttggatttttaatagcgacat

SEQ ID NO: 660272 - DNA, 155 bp, Homo sapiens
gaggaggagttgagagaacggagcggacgcatggggaccaacatcgagcagatttttaggtctttcgtggtcagtaaactccgggaaattcaacatggagctttccatgtgtaaggaagtgaaggccagcgtgaatggtgaaacaaaatacaccc

SEQ ID NO: 660273 - DNA, 162 bp, Homo sapiens
cagattctcaacgggtgctgattccagacgggtgctcgattctcatacgagatgctacatgtacaaaaactagcccccatctcaatcatataccaaatctctccctcactagaacgtaagcgcttctcctcacgtccctcaagtcgttatccgatcatacgc

SEQ ID NO: 660274 - DNA, 129 bp, Homo sapiens
gagctatgctgagcggagcaggacctagactctatagccataccaggtctcatggaggggaacaacgctggaggagcaggactctagccctccacaggccactccagtggctcatgaaggggaacaagc

SEQ ID NO: 660275 - DNA, 430 bp, Homo sapiens
  misc_feature (362)..(362): n is a, c, g, or t
  misc_feature (413)..(413): n is a, c, g, or t
ccattgggccaggcgggtctcgaactccggaggtcaagtgatccacctacctcggcctcccaaagtgctgcgatggtaggcatgagccacggcgcccagcccagcttttcttcataactctcaactcttggcagtcaggcagttctcagagctaattagggcatttcaggtcacagtataagtggggtatgttttttctatggcttaaggaaaagcaagatagtaacgtataatacttttggtccaaaagtgcaagatatttgggtcggtgagtctcataggagcccctagaaataaatatagtttggcttttaactgttagaaacggcagcactctgagtgtcctatgcccaaagaagggncttctcttggtggcgtcaacatagcaggctggcttctttcggcctcagggntttacatgtgtggtttc

SEQ ID NO: 660276 - DNA, 448 bp, Homo sapiens
aactccataacgctcctcatgttaggctactaaccaacacactaaccatataccaatgatgcgaagaaaaaaacttctgagccttttaccactccagcctagcccctaccccccaattaggagggcactggcccccaacagggttttttgattaccatagttttgtagtttttgaaattcagaagtgtgagacctccaactttttctttttcaagattattttgtgtgtctacgtctattcctactgtaaatatatggtgtgctcacacgataaaccctaggaagccatttggatacataggtatggtctgagctatgatatcaattggcttccttcctattgataggacatagtggaagtgagctacaacgtagtacgtgtcgtgtagtcctgtggataattccaacagcttcctaagtgggatccctgcttcctgcttttcccctg

SEQ ID NO: 660277 - DNA, 486 bp, Homo sapiens
  misc_feature (151)..(151): n is a, c, g, or t
ccagttctatgagggggtgcatttggtgttcatgccgcccaacaccacccagatgtcacttggtcaagaaggtccggaccctccgtatgcacctgttcacggccctgcaattgttttgcctggccctgttttgggccgtaatgtccacagntgcctccctggccttcccctttatcctcatcctcacagtgccgctccgcatggtggggctcccccgttttttccccgcccaaaaaatgaaatgtttggatgctaacaaggcaaagccggtgttttatgagcgggagggtgtggacgagtacaattaaatgcccatgcctgtgtaaccccccccaagggacaaccaagggcccaatggacaaggggacaggttggtgggatggggttccccctcccatgcccctccctcctttttttttaagtgaataatttaaagttttttcctccccccctgcccctgcagtaaagtgttttggccccccccta

SEQ ID NO: 660278 - DNA, 458 bp, Homo sapiens
  misc_feature (17)..(17): n is a, c, g, or t
  misc_feature (104)..(104): n is a, c, g, or t
  misc_feature (129)..(129): n is a, c, g, or t
  misc_feature (181)..(181): n is a, c, g, or t
  misc_feature (255)..(256): n is a, c, g, or t
  misc_feature (279)..(279): n is a, c, g, or t
  misc_feature (325)..(325): n is a, c, g, or t
  misc_feature (339)..(339): n is a, c, g, or t
  misc_feature (361)..(361): n is a, c, g, or t
  misc_feature (382)..(382): n is a, c, g, or t
  misc_feature (392)..(392): n is a, c, g, or t
ggttgctgctgcccaangaccgcggagtcggacgcaggcagaccatgtggaccctggtgagctgggtggccttaacagcagggctggtggcatggaacgcggtnccagatggtcagttctgccctgtgncatgcatgcctggaccccggagagccagctacagctgctgccgtccccattntggacaaatggcccacaacacatgagcaggcatctgggtggccccatgccaggttgatgcccactgcatcatgnnggccactccatgcatctttaccngtctcagggactttccagttgcatgcccctttcccagaggccgtgnattgccggggatgnccatcacttgctgcccacgggntgtccacttgcagtgcagacngggccgatcntgcttccaaagatcaggtaacaactccgtgggtgccatccagtgccctgatagtcagttcgaatgc

SEQ ID NO: 660279 - DNA, 1783 bp, Homo sapiens
  misc_feature (374)..(374): n is a, c, g, or t
  misc_feature (1372)..(1372): n is a, c, g, or t
tgtgcaccagatactgttacacatagcggtgtctcactcgtgatgtaggttgtattaaccaagcagtctgtccgcatcacagtccgtcggcggtgattattttttataagggggctctccatccataggcaacctcccatataagaatgggtgcctcccccacggagtcttctcatcaccggaagagtgtgttcttcccccacgcgaacagacgaaaagtggtgactgatactgattcgactacataccgttgttacattcatcccccttgctcgccgcggagggaattattcttttctcctccccgccccgcgcgtgatattatttatggatggcttggtgttttccgcccaccgcctcccttgtttgggggntcgcacacccccacacacaacgcgggtgtggtgttggtgagacaccaaccacgttaggtgcacgtctggtggtgtatactcccccgtcgggggggtatcccccctctgtggtttattatataatcaccctcgtggtggcgcgtccgtttgtgtttccctcccactgtttgttaggaagcccacgttatggtgtatgtctccctccctggtcgtgattgttttatttaatgaatttctcatcaatatatgactctcagctaatatcaagaagtgggttctctattcctcggggaggttgtttcaatcaataaattgagttaataagatgatttagtaacccctgctcgctaataaataacaaattgggggggccgagcaataatcttcacatcaagttttaaagcgacgtaccacacaagatagagagtcgtgttatgtgtagacacagttactttcattttgtggtgtgaggcgctaccccatcacggggtggtgtttatgattcgcgtctaatataagaattactccccccctcggttgatgtactaccacacatgtttgtatttgtgggcccaaacctctatatattatagccgtgtattagtatgtggtttctactctcgtggtgcgtctactatatatagagagattgccgcgcgggggagaacacccaccaccccactcgcgcgcgccctctgtgttgagagactggttgtcccacctcgccgccctcgtgtaatgatataatacgctcctgtatatatatcatatatataatatatcgcgcacacaacacacacacatagtggtgagagatatatatgtgtgtgagagccagcacagcagagagatatatagagaggggtgtgtgtgtgacacacacacactctcgagtatatatactcaccctgctgagaggagtagtcttttgtgtgtgcgcgcacacacacaccacacacacagtgtttgtttcttatatataacacacagagagatantgtgtgtggtgcgatattgttacacacacactttgtttgtgtttcgccccactacagcagagagagaatatatgtgtgggcgacgacacactcacattgtttctctcacagagtgtctctcccgtgtgtctctctctatgatgagaggtgttgtctcccaccggagaacacatctcacgcacagacccttgtgtgtgtacacacacaataagaagagagataacatatgtgggcgcctgttgttataacacacacaatatatgtgtgcccgcccgctattatctccctttctctctccctttttctctttttctcctgaaaaaaatatgagagagggggtgttataaaagctttggttccctttttctctctaaatacaaaaggccccccgaccccctttttttacacaca

SEQ ID NO: 660280 - DNA, 148 bp, Homo sapiens
gctggacccgtctccttctgctgctgtcctcctcctgctgctgacctcctcctgctgctgtcctcctcctgctgcttaatataacggtacatgtctattttgggggacatctgtatttatttgaggcaccaaagcagcaggaggagga

SEQ ID NO: 660281 - DNA, 611 bp, Homo sapiens
cgcggtggctcacacctataatcccagcacttggaaggctgaggcgggtgaatcacctgagatcaggagttcgagaccagcctggcaacatggcaaaacccgtgtctctactaaaaacacaaaaattgtgccgggcatggtggcagatgcctgtaatcccagctacttgagaggccaaggcaggagaatggcttgaacctgggaggcggaggttgcagtgagctgagatcgcaactaactgcaactccaggcctgggtgaacagaggtaagaactccatcttcaaagaaaaaaaaaaaagaaaaaacaaacaacaacatttggtggggcgcggccgtgggcccctggagaaaggttttgaagaacccatgtggggtgggcgggcggggcccccacgagcgggcaaaacggaaaccatgggggcaaaaatagggggtgtccccaaatagagagaaacaccggggggacaagagagcaaaagaggcgcgggggattccttacaacccaagttataaaacaaaaacgcgccgggggggaaaccccgaggcgcggtgctcctggaacaactctccaacgaggggggagcaccacaggaagggacacatcaagggg

SEQ ID NO: 660282 - DNA, 694 bp, Homo sapiens
  misc_feature (94)..(94): n is a, c, g, or t
  misc_feature (96)..(96): n is a, c, g, or t
gtaatacgtctatgaggtataggaaagcggtgatgaacgtgccaatcgggagcacggaccacaataggtgccaatgcagcagtcctctgagagntnagccatgtcttccttcgatgactccacagtccagtgctcaaccagctactagaccgagtgttcagggctgttgcatggagctggtggtattagactttgcaacttcgtggtcacctgctcggaaaggtcagacgcgtacacccattcctgatgacgaggctctggctacacgagaatgaatcacatggtcacattctcgagcacgggacagaagctgattagatgggcccatcctgcctgatgagcccaagtcttatatcacaacatctctgcgtggatgcttgcttcgattatcgtatacatgagaaagcagcaatctgagtaccggagacgataggatgccctgatggcctctagatgcagatagatccattatgttctaatctcatggggcacctcatgacacggggtccgacccgtcggcagagggtaaaataattcatcaacagtcgactggcgttgtaatgaagataccctgcgaaggagacttggagtgatgccaggcggcaaagggtcttggtgtggttacggccccatgaaaaccctaccggtacatcaatgattacgaaggcggatcgggaacctgattgaaactcta

SEQ ID NO: 660283 - DNA, 948 bp, Homo sapiens
  misc_feature (36)..(36): n is a, c, g, or t
  misc_feature (65)..(65): n is a, c, g, or t
  misc_feature (67)..(68): n is a, c, g, or t
  misc_feature (78)..(78): n is a, c, g, or t
  misc_feature (89)..(89): n is a, c, g, or t
  misc_feature (95)..(96): n is a, c, g, or t
  misc_feature (116)..(117): n is a, c, g, or t
  misc_feature (122)..(122): n is a, c, g, or t
  misc_feature (128)..(130): n is a, c, g, or t
  misc_feature (153)..(154): n is a, c, g, or t
  misc_feature (194)..(194): n is a, c, g, or t
  misc_feature (202)..(202): n is a, c, g, or t
  misc_feature (205)..(205): n is a, c, g, or t
  misc_feature (208)..(208): n is a, c, g, or t
  misc_feature (211)..(212): n is a, c, g, or t
  misc_feature (215)..(218): n is a, c, g, or t
  misc_feature (231)..(231): n is a, c, g, or t
  misc_feature (240)..(240): n is a, c, g, or t
  misc_feature (262)..(262): n is a, c, g, or t
  misc_feature (267)..(267): n is a, c, g, or t
  misc_feature (272)..(272): n is a, c, g, or t
  misc_feature (280)..(280): n is a, c, g, or t
  misc_feature (285)..(285): n is a, c, g, or t
  misc_feature (300)..(300): n is a, c, g, or t
  misc_feature (333)..(333): n is a, c, g, or t
  misc_feature (335)..(336): n is a, c, g, or t
  misc_feature (350)..(350): n is a, c, g, or t
  misc_feature (353)..(353): n is a, c, g, or t
  misc_feature (358)..(358): n is a, c, g, or t
  misc_feature (364)..(364): n is a, c, g, or t
  misc_feature (366)..(366): n is a, c, g, or t
  misc_feature (368)..(369): n is a, c, g, or t
  misc_feature (372)..(372): n is a, c, g, or t
  misc_feature (383)..(387): n is a, c, g, or t
  misc_feature (391)..(391): n is a, c, g, or t
  misc_feature (405)..(405): n is a, c, g, or t
  misc_feature (589)..(589): n is a, c, g, or t
  misc_feature (613)..(613): n is a, c, g, or t
  misc_feature (700)..(700): n is a, c, g, or t
  misc_feature (887)..(887): n is a, c, g, or t
  misc_feature (908)..(908): n is a, c, g, or t
ctaatgttctcacataacagtagaaaaccaaaattnggaggcatcgcttcaaagaatcgagaagngnngacaaaaaanaccttacatanattaannatgaatactatttatatggnntaaangcaaannncttttatatttcataagtaattnntagccaatggggtgtgggctaaagacattagtgaagaaangaaatgtnccnccnacnnctnnnncgggccaaccctnacagacccncaagataaaataactggttttngtcancctcnagagaaancccanaattatttcagtccntgacacgttaataccctgcatagattagaggcngnnggccacacagattnacnaagcnacagantngnnttncataagcacgnnnnnaccntagccacgaagganccaagccacacgtactaaaggttgaactcaaagatatgtacagggtattaaacaaataccaaggggaacagttaacttcaatacaaggtcaaaatcagcaacaagttctacaatccagtgctgatatcagatacaagcttcaaggacaatttcttttcgaagggttattccagtttggtgaggntagcatgaggtgtgtgcatttgcnagggggaaatttctattctcaattaacccatggagcaaatgctacgcatctgctgagtccgtttagagagcatttgcggtggacganggaggggcccgactcgtcgtactcctgcttgctaatccacatctgctggaaggtggacagtgaggccaggatggagccaccgatccacaccgagtacttgcgctctgggggtgcgatgatcttgatcttcatggtgctgggcgccagggcggtgatctccttctgcatcctgtcggcaatgcccggntacatggtggtgccgcccganagcaccgtgttggcgtaaaggtctttgcggatgtccacgt

SEQ ID NO: 660284 - DNA, 354 bp, Homo sapiens
  misc_feature (3)..(3): n is a, c, g, or t
  misc_feature (9)..(9): n is a, c, g, or t
  misc_feature (34)..(35): n is a, c, g, or t
  misc_feature (39)..(39): n is a, c, g, or t
ggnacccantaaaagaaaaaatcaactatccgannttcntattatttttatgaggctgatgtaggcggggaaagtttagctacatctgtgataaccatatttagcttacttacctgtcaggataaactacaaaaatagtagctttatgtaagtctcttccatgatacaatttcagttcacagaagattttactctctttgcattaaagtttcaaataatataatagtgaagcagatatacgaagaatatatctgaaggtggagttcaaacatctgacttattaataacctgtgcttgggaattcttgcttccagctacagctgtaaaaagttgtcactcactctcaccacgaca

SEQ ID NO: 660285 - DNA, 233 bp, Homo sapiens
  misc_feature (56)..(56): n is a, c, g, or t
  misc_feature (65)..(65): n is a, c, g, or t
tccatcttcacatggccttctcctctgtgtctgcctgaagtctcccttcatttctnttgtaaggncatcagtcattggatttagagcccaccctaaacccagaatgatctcatctcaagattacatctgcacagacgctatttccagataaggtcacagtcaaaggtaccaggggttaggatatgaacatatctttttgaaagacacgatttaacctacagcaggtgctcagg

SEQ ID NO: 660286 - DNA, 363 bp, Homo sapiens
ctcagaggatcctgagcgagtgcaatggctgtcgcattagatgatcgctgggtgttggctgtgcattagatgatcgctgggtgtttggctgttgcattagatgatcacttgtctgttgggctgtggcattaaatgatcactgggtgttgggctgttgcattaaatgatcactgggtgttgggctgtcgcattaaatgatcactggtctgttcggctgtcgcatcaaatgatcactcgtctgtccggctcttgcatcagataatcagctgggtgctgggctcctgcatcagatgatcacttggactcgcaggccctgtggctcaagatgatcactgggctcgagagcctgagccctgaagataa

SEQ ID NO: 660287 - DNA, 130 bp, Homo sapiens
  misc_feature (49)..(49): n is a, c, g, or t
  misc_feature (99)..(99): n is a, c, g, or t
ctcgaattcaagcttctaacgatgtacggggacatgcccatcgtcctanaattaattcccctaaaaatctttcaaatatggcccgtatttaccctatancaccccctctaccccctctatatccaaaaaa

SEQ ID NO: 660288 - DNA, 90 bp, Homo sapiens
  misc_feature (62)..(62): n is a, c, g, or t
gccacttcagggacagcctgggcccaggcacccagggggacggcggaagcgtccggcaccanacagaggtcgggggggcaggaggcgacg

SEQ ID NO: 660289 - DNA, 154 bp, Homo sapiens
ctgcgtcgcgagagtgctgtggcgccccggtgctatcttccgcagcgcgtcgtctccccaggcctggggggtgtagtccgcctgggcagtgatcttcttggcaggtgcgcccgccaggggggcctcatcgggttgccgacgtccgtcatcgaag

SEQ ID NO: 660290 - DNA, 630 bp, Homo sapiens
ctcgcaagtcacagcatcccccgtctgctatctcttgggagagtgggagcggaggagcgacgcaggccgacgcagcgggcaggcgagactctttgagtttctgtaaaccatggggcagaggctcctattactggtgaccacttgtctgtgggctctttcatgcgccgtgccgcacgatgcgttcctcgcctgagtggactgctaaggatcagacctgaacaagaagagcttgaccctatgaatctctggctgcagcaaaggccgcgaggcagcaaggcgccctccggctgaagagcagcgattcagacagcgacatcgtgcctcttgtcgactatctcaacacccagtactatggggtcatcggcctcggcacgccgccgcagaatttcacggtgatattcgacaccgggagctccaacctgtgggttccctcgtcgaaatgctatttctcgatagcatgctacctccaccccaaatacaagtcgagcaagtcaagcacttacaaagcagatggtgagatttgcaaaatcacatatggttctggtgcaatctctggatttttcagcaatgataatgtgtggctggggaccttgttgtgaaaaatcagaaattcattgagacaacacgtga

SEQ ID NO: 660291 - DNA, 379 bp, Homo sapiens
gccccagaaaaggtaatttccccttgtccccctgcccaggatcaaaaaaaaatggcacaaaaatggccaggcaagttggttcacccctgtaatcccagccctttgggaggccgaggcaggaagatcccttgaggtcaggagttttaaaccaacgtgggcaacataaaaaatcctcctttctcccaaaaaaataaaaattagccgagtgtggtagggcacccctttggtcccagctactcgggagggtagggcgggaggatcacttgagcccaggaggtcaagggtcccatgagctataattgcccccctgcactccagcctgggtgacaaagggaggccctggttttaaataaataaataaataaatcccctggcaaga

SEQ ID NO: 660292 - DNA, 716 bp, Homo sapiens
tattcgggaagctgagttaggagaatcacttgaacctggaaggcagaggttacagtcagctgagatcacaccactgcactccagcctgggtgacagagtaagactctgtctccaaaaaaaaaaaaaaaaaaaaaattcttgtccctggggtcccccgtggtggtacttgtgggggtgggattgaaacccaggaatttttgtgttggactcttaccctctagggctgaactggcctctttccaagcttgctttcacagggaagaagaaaatactgtccctttctgtgcctcctcatgctcagggccttgacacacagggtaaccgggtgacttacgagagttattggcaacaaaaccctccacataacaggaaaaaccttggccactgctaaattgtcatcctgtgatatatctctgcattggaattccctccccaatttactcagacctaggggtataatctcggggtgcccaagtgagtctgctcccacagaaccttcaaaatgctcacgggtcccaagcagtgcctcatttgccagcacagtttgacagttattttggtggggcaaggggcttcgtgactctaggatgggtcctctgaccctgcctttaatattggatccccgggttacctctttttactaaccgtttgaaattgagactgtagtcgctacttccctccttccattatactttgcgggacaccttcgaagggtg

SEQ ID NO: 660293 - DNA, 115 bp, Homo sapiens
tggtttcactactacctacgtatggggataggggtgtaggtgtgccttgtggtaagaagtgggctagggcatttttaatcttagagcgaaagcatatatcagctctgccagaggg

SEQ ID NO: 660294 - DNA, 153 bp, Homo sapiens
taggtcagacgcgcagcacggctcagccaggcagtggctgttctgactgccagtgcctgaagcctggccactgccctgctggctgatcatgcactggctgtcctgacactggctgcatgaccagtgcatgactgcgagagacgtagttccttg

SEQ ID NO: 660295 - DNA, 722 bp, Homo sapiens
  misc_feature (1)..(1): n is a, c, g, or t
  misc_feature (51)..(51): n is a, c, g, or t
  misc_feature (57)..(57): n is a, c, g, or t
  misc_feature (76)..(76): n is a, c, g, or t
  misc_feature (80)..(80): n is a, c, g, or t
  misc_feature (106)..(106): n is a, c, g, or t
  misc_feature (165)..(165): n is a, c, g, or t
  misc_feature (209)..(209): n is a, c, g, or t
  misc_feature (221)..(221): n is a, c, g, or t
  misc_feature (236)..(236): n is a, c, g, or t
  misc_feature (273)..(273): n is a, c, g, or t
  misc_feature (294)..(294): n is a, c, g, or t
  misc_feature (302)..(302): n is a, c, g, or t
  misc_feature (307)..(307): n is a, c, g, or t
  misc_feature (332)..(332): n is a, c, g, or t
  misc_feature (363)..(363): n is a, c, g, or t
  misc_feature (375)..(375): n is a, c, g, or t
  misc_feature (392)..(392): n is a, c, g, or t
  misc_feature (403)..(403): n is a, c, g, or t
  misc_feature (408)..(408): n is a, c, g, or t
  misc_feature (411)..(411): n is a, c, g, or t
  misc_feature (423)..(423): n is a, c, g, or t
  misc_feature (429)..(429): n is a, c, g, or t
  misc_feature (433)..(433): n is a, c, g, or t
  misc_feature (435)..(435): n is a, c, g, or t
  misc_feature (438)..(438): n is a, c, g, or t
  misc_feature (440)..(440): n is a, c, g, or t
  misc_feature (443)..(444): n is a, c, g, or t
  misc_feature (458)..(458): n is a, c, g, or t
  misc_feature (463)..(463): n is a, c, g, or t
  misc_feature (481)..(481): n is a, c, g, or t
  misc_feature (487)..(487): n is a, c, g, or t
  misc_feature (489)..(489): n is a, c, g, or t
  misc_feature (492)..(492): n is a, c, g, or t
  misc_feature (501)..(501): n is a, c, g, or t
  misc_feature (510)..(510): n is a, c, g, or t
  misc_feature (544)..(544): n is a, c, g, or t
  misc_feature (566)..(566): n is a, c, g, or t
  misc_feature (586)..(586): n is a, c, g, or t
  misc_feature (597)..(597): n is a, c, g, or t
  misc_feature (631)..(631): n is a, c, g, or t
  misc_feature (666)..(666): n is a, c, g, or t
  misc_feature (704)..(704): n is a, c, g, or t
nttattatttccaactgagacaaacatttttccaaagacagtagcacagtnattgtnataagcatgttaatatgtntatnttgcagaaaagaatatgctacaagtnatgcaattcacattttcaatagcattctgacagaaattaaagacaattccaattgtgtnaaacatttaatgaatagtaagttctactttctgcccttgggtanataaatggtgtntttcagtgaagtggngaaaaacagatcatgtgatggctgcttcttaacagtncccaccgccccaatgacagtnagcccctntggcngaatttctcagccatcttctgtagntccaaatccattgcagccaagttttcgagtncttttttctcgncctctgtcaggactgtntgggcagcccngtccnttncattttctgccncccggngggngngcncnggnnccccagaatcatanaagtntggaaactcagcggactncttccngnagngaaggagcnggtccagtngggccaccctgtcatattgccttttcaggtccancttggggaccctggcgaggttnctcttctcaaacccccagtncacatcctcanagaagggctttttctcccaccagttatagttgtnttctgggaagaaattcttctcgttcaagggcagcncattttcctcctcaccctcgagaaaattgttatttatnttgtctcttctttcaaaa

SEQ ID NO: 660296 - DNA, 382 bp, Homo sapiens
  misc_feature (13)..(13): n is a, c, g, or t
  misc_feature (18)..(18): n is a, c, g, or t
  misc_feature (205)..(205): n is a, c, g, or t
  misc_feature (259)..(259): n is a, c, g, or t
  misc_feature (289)..(289): n is a, c, g, or t
  misc_feature (298)..(298): n is a, c, g, or t
  misc_feature (371)..(371): n is a, c, g, or t
aatggccaaaatnttggntcactgcaacctccgcctcctgggttcagcaattttcctgcctcagcctcccaagtagctgggattacaaggcacccaccaccatgcccagctaatttttgtatttttaatagagagctaataattgtatatttaataaagacggtttcaccatgttggccaggctggtcttgaactcctgacctcnaggtgatcctcctgcattggcctccatgcactttatgtggagactactgccccnccgtggcctcgtgtccgcgaggccccagcncgttccggnaccgccgcagaccagctggcgggtgtggagaccaggctcctgaccccgccgatgcatgcagcgccacctgganacccgcggtcc

SEQ ID NO: 660297 - DNA, 317 bp, Homo sapiens
gctgcatgcttgttggtcgtctctacagatcccccatcatggggttctggaatctccccttcctccacagcaccagttaattaatctgatgtcgtctctctggtagccaaacagtttctgtctcccagccctctacgatttcagcccatattttacctcttaattgccttataagggtctgcagcttgttagttcagttactcacagccctcggtgccagatcaagcaaaggtaaaaagttagctactttatagccattattttcaccttaccctgtggccactgattttaactgtttaaacctatatcaagatgca

SEQ ID NO: 660298 - DNA, 233 bp, Homo sapiens
gtaaactctattttcttattatttcaaattattttaatataaaacttccccttctttccttccttcttccctccctccctccaggcgcgctgctgctgctgctgctgctgctgctgcttcttcttcttcttctttcttctttcttctttcttctttcttctttcttcttctttcttctttcttctttcttcttcttctcttttcttttcttcttcttctccttctccttttcc

SEQ ID NO: 660299 - DNA, 663 bp, Homo sapiens
  misc_feature (638)..(638): n is a, c, g, or t
gggctctgcttgtggctcgcggtggtggcttctgaggctgtcgtggtcttctgcgtggtcgcggataggggggccccgaatacccttcttgcttcaggtcttaagatagctggccggggtgcaataaggaagcttacaaacgaatggaagagcggagagtgaagaggaggagtccatagagtctttgtacgatgcccaccctgatacatcagtgttgtcaaatgccagaaagacagatatgccacttaccagctcgaggtaacaagctacagggtttttcaacatcctggcatcacaggtcaatcttcatcaggcgagtcaaaggtataacagagagtgtgatgaagaggaacacacgaccaagagctctcacgggttggcagaggagcaaaaggcgcgtcaggtccaacttcccgatcgcagacagctccgttccgtcgacgtgatgtgcgtcagcagtgttccgaggagcatgggacgagagggcctggctcacggtcttgggaactgactttccacgtcatggcaaagacttcatagcagttttggtcacattgaagtggtcccgatttgaaccagactggcacacgatggttccgtggcgaagtggcgaggtacgaaattgtagcgtccgcgtntggaatttggtgagcgtctactggg

SEQ ID NO: 660300 - DNA, 118 bp, Homo sapiens
atgcctgcggcgtaaaagatgatggtctggagcgggctgatatttattgctcccatgaagcgcttgtcatggattacgagcgcgccttcgtccatcttgctgaaaaagaaggggagca

SEQ ID NO: 660301 - DNA, 872 bp, Homo sapiens
gcttaaacatcacagatccatctgcggggtgcaatcgggctactgttagtcctcttgtaagatgcagtcactcctcctggtcacctagtgagcagggacatagccaggagtcaagtgcagtgccaaggttgcactgaccctctgataagtcactggtgctgatttgacctccgaactcattggttgtgcaaatgccatgtgcatcctttcctgagtgccatatgtgagggcttcctgccagctgagatctatgcaggccatcctctcaactaggtgccacatccaatgtgcggtcctcggtgcagctagtcagcagacttcacttgatgggtgtggtggggggaaggggcgggtctcagaaaatgctaggttcccaagttcccaccctggaacttctgagagggcgttgtgaccaatctgagatctcccttgatgcttatctaacaaatagtgtgaagccgactacatttagtaacaattcctgcctattaacctctgggcgagtatcgcatcgtagatttgacgctaacgcctagggaatagtgaacttgtacacgcagagagggccagctgacttgaatttcctagggctgttccctgagacacacggtcaaggtagacgtctgggaacacactactgtctgtacacctcttgaacggtgtcgaagtgtatgtgtatacactcaagttgagagacgcatagttgctgatgcgctaggcacagtcccccaaaggagcacttaatctgcttgcaagcagcattattgggtgagggaaaacttgtggctgcgagatttccagtggtaccactgtttccttatggctgagagttgaccggagagatcacttcacaggtagaccccttgtatttc

SEQ ID NO: 660302 - DNA, 1150 bp, Homo sapiens
  misc_feature (1149)..(1150): n is a, c, g, or t
gctgctgcccttcgtcctcctattcatcactggaccatattgagcaccgagatggtggatgtactgtagcgctttacctccacttcaggccgacttcgttggaagggatcccggagtctggtggtccggaatgacccgccagggatggctggacatagccctgcaggaccgcagcataccttgcccccctggacatgaggatctggggctcctgcttactatttgttagggcatgcatcagcactcatgtgcagctgaaagcagctgaaggcatggacatcccgggtactttggaggatccttcagagagtcactgatatgtggcctgcatctgcacctggacctatagcagcataggtgatgcggtactgggagcccatacccaaaggccctgtgttgtgggaggctcgggctgagccatgggccagctgggtgccgctcctctgctttgtgctccatgtcatctcctggctcctcatctttagcatccttctcgtctttgactatgctgagctcatgggcctcaaacaggtatactaccatgtgctggggctgggcgagcctctggccctgaagtctccccgggctctcagactcttctcccactgcgccaccagtgtgtgtggagctgctgacagtgctgtggggtggtgactaacctgggcacggacgtctctacttggtttcctccttaacctttaactgggcctgggtcacgggtttgatcagaagaacttcgtaactccgcggccaggtacaacgaaaactccacctgggtctccacggacccacggatgggaggcgaggtgaggagcacacactggtaaacaggccggacacgcctcgccagagaaacaaaaacgcaaaacacgaccggggagtaagccccagcggcacacatctagagtagagggagagagacccagcaagcagggggccgaattctactaggagaagacccacacagtacatcgggtgtaccagaggaacaggcagcgaccacacaggagagggagcggagaggtgtcacccgtgaagagaacccaccgagagagagagagccccaggacgatcgcagaagcgcgtgacgcgaagcgtggacccacatctagcgctccaccgtccgaactcaccctagttatctaccgnn

SEQ ID NO: 660303 - DNA, 294 bp, Homo sapiens
gggatccccttcttgtttgggggccagagtgaggaggaggggtccttcaccctcaatgccattaacaagggccccctgttgaagccttgggccctgcccttttcctagggccgagccctgcaggcttttgccctaaaggcttggggggggaaaaaggaaacccttaaggttgggcagggggggtttgtcaagcgagccctggtaaggataggcaggaggtgggcagggggcctggggggatgggactcggaaaagagcccttttccctccccccctttcccccctttagggcca

SEQ ID NO: 660304 - DNA, 248 bp, Homo sapiens
gctggagcataagggtatagcctcagcattatcacacagtggttggcacatcaatgaacttgggtgtcaggccagcacgaactttgttgtactgaacacgccatgcactccacgcagtctccattcaggtatgcatggggtacgttggcctaccagaaacatggcctccccaggcttcagggtaagcaggttccagaagtagatggcaaagcagacgatatcacctgggtactgctggtgcagctgta

SEQ ID NO: 660305 - DNA, 934 bp, Homo sapiens
  misc_feature (497)..(497): n is a, c, g, or t
agcggacttcctgtccctgcatgctgtgagggcagtgcagtgcagtgtcgatctgggaagtgttcactatgtactttccttctacaccgcctctaccagtgtcctcccaccccacccactcgagtgtgttatctagcttacttgagaccctgagtgcacttgtgcgtacagaagcgaagaatcgagaaatgtggtgaatgtgccttgtctgggcctagatcatggttgatccccatgctggtgtgctggctagctgaggtgcagtggggtgtgctgcgtgtgctcaagagaaacagcgcctcgcctgagaattggggaacccaggagatactagggcgccctagtgacctcgtgctaatgtagaggctactgatttggagtgtaccttctccattaccttggggacttcacgggtcttgctatcttagcacaacaagtgagcccaagggcgattgtaaccactggcaaagcagcctccaggagtggatagctcatgntggatccatgttgccttcagaccatcatctgccccacaaagcttgggtccaatcatccattgcatgctagtgcccagcattgggagggacaacaacccccctcagatcatacgtcagggatgttgattgcaacgttggcttcatcaattttgctgaacttactatgtacttgggcccttggataacaacgtgggtgggatgacgttgcaagcagcagagtggtggggccttcttgattggaaagacgttggcgcaccaataatggtggggcggacaaaggggcctattaacaactcccaagagccactttgccgagggaaaggccgaccgaaccaatatgaacacccggacacaggcataatacaccagcggggaaccgtaacatacgattacgaagaacaccaaaaagtgaggaacaaacatgacacaggtaaaga

SEQ ID NO: 660306 - DNA, 103 bp, Homo sapiens
agctgacttctagaggatccctatcgtattgagtggctgcctgcagaagatgtgatgaattatctgtagtacaagattatcttattcccctgccagtgtggag

SEQ ID NO: 660307 - DNA, 318 bp, Homo sapiens
gggctttaaaaccccccccccaaaagccccccttggggtttttttttttcataaagttttaaaaccggggccccccccctttgggttttaaaacccaaaaaggccaaaaaaacccctgggggggggggggccggaaaacccccaaaggggcccttttgggggggggcccttttttttttccaaagccccccttgggggggggttttttttttaaaaatcccccaggggggccggggggggccttttttttggtttcttttttttttttttcccccccaaaaagggaacaaaaattaaactttttgggtttttttttta

SEQ ID NO: 660308 - DNA, 619 bp, Homo sapiens
  misc_feature (427)..(427): n is a, c, g, or t
  misc_feature (465)..(465): n is a, c, g, or t
  misc_feature (582)..(582): n is a, c, g, or t
  misc_feature (619)..(619): n is a, c, g, or t
atcccacaggtgctgttcatccccaactttgacctggactgttgcagtgttttgtcgcagtgtttctccctttttttgtactgggatttctccccagaaacaaacccatatgtataaaaagtagttgggcttgctataaagatgactagtggaaacctcaatagaggtacgatttcctaaaataaatcttgttcagatattacagggcaaagtgaaacagcaaagctccctcctcagcactcagggtgcaggcctcacttttcctcatcttttcctcctgtggcctccatgtatcccaaaggtgagatgacatcgccccagattggtccggaaagtgcactggtcgtcactgtgggtgtaccctacaggagtctttcagatatgggaagctctggatctcactgtggatgtattccccctaggggtncccccaggttgtggagggaaaagggaagctttagttcntcactgtggttggcatcccccaccacgggttcagttcctgagggagggttatttgggtcatcactgtgatctacctcccaggggttcccaggttggtcctgaggagaagggaagttnagaacttcattgtgggttttgccccattagggtcctn

SEQ ID NO: 660309 - DNA, 150 bp, Homo sapiens
acaatgggctcagcgacgggaaatggcagttagtgctgaacgtctgggagaaggtggaggctgacatcccaggccatggcaggaagtactcatcaggctctttaagggtcaccagagactcttggagaagtttacaaagtcaaagcacct

SEQ ID NO: 660310 - DNA, 731 bp, Homo sapiens
ggaggcctttgcaaaagtgatctgcaactctttcaccatctgtaatgcggagatgatgcgaagtgggtgtgagggctatatcccagatatctctttgctcaatgcacgagtgtgtgaccccaagtgttcgatggtagtacaactgggcgccaagctcgttactgcagaagccagatcccgagaacatcagcaggtggggtagaggagctcaccgatcttaggctacgctgggtgtcactgcgtgatgaacccagtgcaggcagcgccgtgagagcaagcctgcagggaccagatactgctctctggaatgtgcactggttgtccgttcgcctacaatccgaggacaaggtatgcgtagatcatgcttaaacgtgtgtagtattgaaggcgaaaaggtcatggtggacagggcaaaagtttgccagatgaatacttcccccgtgtagaccacacatatggttggaataagtagagcatagtagaaggggccaccaacattgcgaaaaagtcgcgcgaaggccacggctctccgttggcccattgttggcacgaggcgccagaagtctatcacacgctacgacaaagtgtcttgaaactggactgtccccccgagtgattcaactaatctattcatggctgaaaggcgttgcgtacagagtcgtcggccatgtggagtggactgcaatctacaactgcaggggcttgtagggagtgaacgcctctggttctat

SEQ ID NO: 660311 - DNA, 214 bp, Homo sapiens
atcaccgtgacccatgtcactgtcaaaaccaccctacgggctgggagtggtggctcacacctgtaatcccagcactttgggagtccgagacggatcacttgaggtcaggagtttgagagaccagcccggccaacatggcgaaagcccgtctccactaagattacgaaaaattagccaggccgttggcgcactgcctgtaatcccagctattcag

SEQ ID NO: 660312 - DNA, 182 bp, Homo sapiens
actctaaggatcctcgcagaggcgtttagcaacacaaacccagagtcgaggccgcgttcttggtttgtccagatcgtcctgtgcatgttttgtctgatactggttttattagttacagcgacggggacacatggcatcttccacaggaaaggctctcgaatgcccatggcattgggcccggc

SEQ ID NO: 660313 - DNA, 222 bp, Homo sapiens
cttcccatctgtgcgctaaataacttgaggccaggttctctcagactttaaagccttggcaatcctatgcattgtattgtttgtgtgtagatgtgcagtttagaggggtagcttactctaaggtgtacataactccatcaataagttcagacatcatgttcactgatatacctgagtccatactccacagagccaggggtgcctgctcagagtcaggtctgc

SEQ ID NO: 660314 - DNA, 543 bp, Homo sapiens
  misc_feature (541)..(542): n is a, c, g, or t
gcataatcgtttccgccttaaaattcctaataaattgtagtatttgaactatattttagataaaaacatttttctgaaattttaatcgtactgcagaattactagtttagtttactaaaaccctaaaactttaaaaattacctttattcacaggaatttgatgtctcagatttccgtaagattgtagaatggaacttgttttttagaagacgcctcagccgcctgattatcatttttcaaaatcttaaatttaggccaggcagccaggcgcggtggttcacgcctgtaatcccagcactgtgggaggctgaggcaggtggattacttgaggtcaggagttctagactacctggctaacatggtgaaaccctgtctctactgaaaatacaaaatttgctgggtgtgctggtacacgcctgtgatcccagctactgaggaggctgaggcaggagaatggcttggacccaggaggcagaggttgcagtgccgagattgcaccactgcactccagcctgggtgacagagcgagactctgtctcanng

SEQ ID NO: 660315 - DNA, 125 bp, Homo sapiens
  misc_feature (30)..(30): n is a, c, g, or t
  misc_feature (36)..(36): n is a, c, g, or t
  misc_feature (112)..(112): n is a, c, g, or t
aaaaaaaaagacagccaaaaaaaagaaacnacaacnacaaaaaaaacacaacagtgtacaggtttgtaactgccaaaatttgatgattaaaacaagttttcaagtaaaaagnaaaaaatgaaact

SEQ ID NO: 660316 - DNA, 383 bp, Homo sapiens
accgggggctagttacgtggtaggtaagcttatatggcacatgatgaagtccacattcgtattctgcataatgctttctgataattccggagcattatactcatgcagcagtggtaggaagtactgatgtttttttaaaaaatgtccattcttggccaggcgcagtggctcacgcctgtaattccagcactttgggaggccgaggtcggcggatcacgaggtcagatcaagaccatcctggctaacatggtgagaccctgtctctactgaaaaaaaaaaaaattagcggggcttgggggcacacgtctgtagtcccagctactcaggaggctgaagcaggagaatggcttgaatctggaaggcagaggttgcagtaagccaag

SEQ ID NO: 660317 - DNA, 232 bp, Homo sapiens
gcagcatggtctgagggaccccgttcccaagtagggctgtcccaagtccccactcccatggtggccaggtttcctggccacttttgtatgatagcagatggatcaatattagtaaccccatcgcaatgattgaactgtgaaagagaggttcgcagggggtatctacctcagtgccagtatacttagtgatgtgttacccaggatgcagcaggtgtgtgcaggtatcttgctt

SEQ ID NO: 660318 - DNA, 128 bp, Homo sapiens
gatcccctgcgaacgactggcggttggtgacgacggccggttggacgaacggacgctggaggcccgggtgcggaagccagcggaagcggagcgctacaagctggagcgcctagccgaggcagagaagt

SEQ ID NO: 660319 - DNA, 134 bp, Homo sapiens
gagcggtctgacattgctcggatcccgtgttgctgtggctctggcgtatgctggtggctacagctctgattagacccctagcctgggaacctccatatcatgcaggagtggctcaagaaaaacgcaaaaagacc

SEQ ID NO: 660320 - DNA, 438 bp, Homo sapiens
atatacaattcacttaccattgaccaggcaccagctcagaaaatttagaactaccaataatgcttctaggagaccacagaatgtatttccagtggctggagtggcatgaaaggtattcattctattcacaacatatttacaagcatctattcagcactggctaaatttttatgctacataacataagtgaaaatatattgtgctcaagtcaagaaaaccaagctagcggatttctaaacgcaaacacacgatcccatagctagatattggtggccccctctgagatcgggggtataggtgtgctgacacttttttaaattattcaaacccgcttaaacggttttgtacatatcaaaatgtgctccttttaggataatagatcaaaatatttaatgcttctattacatctgctcatgtaggttttacaatattccatgt

SEQ ID NO: 660321 - DNA, 210 bp, Homo sapiens
gaagaagttaggtgtccagagcacgggactttctgctttcttaagaccggcgttcgcatggcccgaataaaggaacagagcttttacgtttgcccggcagacacgtgcagcttcgtgcgggcaccacatttcctgttttccattgcttattgcataaggtctttgtggagatttcaggtttgcttctgcaaggcaggcgataccgttttt

SEQ ID NO: 660322 - DNA, 1535 bp, Homo sapiens
gagatctgactcgtggtgccccgagttgtgagaagctgatgcccctggcgtgccttgtcctcctgtcaggctgcacgaaaaggagtgtggacagtctgttctagacgatagctagctgaagatccatatattgagctaggcagtagatggttagtgtcggcgagcaatagcatgaagtagttaacggccttatagctgtaagatcatagccaatgcttgaatatgtgggcgaagaattatgcatgagcagcccatagtggaggtatggaatatatgcgtgagctatttggatgacaaattggcacgtataggaaggcttcttcggcttgcataggtggccgtccaagcgacgtgggcagagtccacactgggcttgtcgactacgtacgaaaaagcctatccagtcaaacgcctccactagcactatgcgctaggtgtgtgccaaacgtccagacctatcattcccggtggccactttcgaaagtcgcagtcgcattgcagtgtagctctttggcgccgggacttcactagggacacaaattaggcaggcccttagcacaaattggactccaggtggcgataacgactcattatccgatgatactaggaaaaggaagtgggataagtgagggaaccgtcggtcggctctttctaatggccccagaatagggtctcgaggctcccaagtcggaaatgtggattcaatctggaaatacggtgcaagtagtatccctgtcaaggagaaatatctccaagttccaatcgcggcatacatctactgactcgccgaaagaggattgaccttgggcgacattaaccaccgcgtttgcgcacttggggcccgttcccgaacgaccgtccacttaggactcccacaagaacgagtgaaacgtaacctaagtattgtcatatatggactccccttcggatccacccctcaaatcggaaagtcctttgtataacagccatgtggccattatacagccaagtggccatggtggtcgaaaaaacgaccgacgggaggtcctataacggcgggaggcggatgagcttccaaaagtcgtccttgatcacgacttgggccaggggaacaatttggctgagcacaaattaggcgtcacacattcaacgaggagaggtacgcacgctgcacggggcgccattggccattatgtcattgcaaggccgtatactttaggactgttcaccacttggacggacagacacgggcccaccgagctccaccggacgagtcaccgaaccaacagacggacagggcggggtgaaaaccaacacgcgcgcgcctccagggctgataacagtccaaatccccgggtacagttagagcccacacagaggagactgcccaacaacccctgtcgagggcgcacaacgtagacaaggttccactgacagccagaggcacaggggtcacatacgaggggaacaccccagcacaagacgacaagcataaccaacacaaggagaacgttgagggcgcaaggccagccgctcagagctccaccaacaaccag

SEQ ID NO: 660323 - DNA, 302 bp, Homo sapiens
atggttagaatgataaattttatgttatgtgtattttctccaacttaaaaaaaaagcataaaaagataagccaaaattaaaaatcaagccccataatgtaagatagccaatatcatataaataacataaagaactcctacaaatctggctgggcacagtggctcacgcttgtaatcccagcactttgggatgccgagatgggcagattgcctgaggtcaggaagagaccagcctggctaacaaagcgaaaccctgactccagaacaagactccagccttactccagagcaagaactgtctca

SEQ ID NO: 660324 - DNA, 852 bp, Homo sapiens
  misc_feature (57)..(57): n is a, c, g, or t
  misc_feature (70)..(70): n is a, c, g, or t
  misc_feature (102)..(102): n is a, c, g, or t
  misc_feature (109)..(109): n is a, c, g, or t
  misc_feature (116)..(116): n is a, c, g, or t
  misc_feature (119)..(119): n is a, c, g, or t
  misc_feature (255)..(255): n is a, c, g, or t
ctggccgtgcaattgctggaaatacaaaacacatgttgatacagttcttgcttaccntcaaaagtttttngaaacatttgggaaaggggggactaataaacnatacttncattatncanaaggtctccaaatagattgggagaaaatcaaagccaaaattgagatggaaattacaaaagaaagagagcaatcatcaagcagccaatccagcaagagtataggtttaaagccctaaatggggggggggtctttaanaaattttatcttttgaaacacgttctgattaaccaagggtaggcgtgttttggttgctaaagaaaaaagcataatctttaaccaagtatgagtacttgctgggtatttagggaaaaatacattcaaaaagatgaaacacggaggattgggggatttctatctttaatatttttaagtccagtaattaccaaatattactatgtgcttaaaagattccctgggaggtggcgattatatgtgagtttttttcccattacttaatccctaaatcttcaagatgaacaaatattaatggcgataataaaaacttgggactctttaaaattggtgggaccatttaatttctatgtggacctcctaaattgggaaaagccctccaaaagttatttattagaaccaaaaatcctgagggggggggtttgacaaaatggttaaaaagcgcattttttaacacccaaggtcataaccagctttgctgggaataccaaagatggaaaccgcgtaggttgtctttagagatgataagaaattgtgctttagacctaacaggggagtagatttgactttaaagagagatgaaattgagatcatacctcc

SEQ ID NO: 660325 - DNA, 951 bp, Homo sapiens
  misc_feature (25)..(25): n is a, c, g, or t
  misc_feature (35)..(35): n is a, c, g, or t
  misc_feature (55)..(55): n is a, c, g, or t
  misc_feature (184)..(184): n is a, c, g, or t
  misc_feature (221)..(221): n is a, c, g, or t
  misc_feature (226)..(226): n is a, c, g, or t
  misc_feature (229)..(229): n is a, c, g, or t
  misc_feature (260)..(260): n is a, c, g, or t
  misc_feature (285)..(287): n is a, c, g, or t
gataaatgaaacatacattcttaanaccccccccnctcaactgtaaaagcatcanaaaatgcaatattaatcaacccattatttctaattgctgtattcatttccaccattaaactatttaagcatttcatctgctgaaagtccttatatacatggtagacggaatatttctccattaatgatngatcaaaatgaagatatttaaaaattaacaaaatcangccanggnaggaggatcactttagcccaggaggtccagnccagcctgggcaacacagcgggacnnngactccatttaaaaaattaaaaaaaaaaaaaaaaattttaacttttaaaaaattaaaatttacgcaaaatttcacttatcccagggacacgctgggcatttgggactcaatggacaaaggggcccctaaaggaaaataagggctagactggaatgtttcccataatttccacacaattaacagtccctttctatccagcttggccttccattaatctctagggtaaagctttacagggcaacatcctgggccattggcccaggaagtacctgagctaatcagtgatcgggaatgggcccaggaaaccggaatccattgggtgccctccacctgggattacaaagatatctgggaagttgtcgcacaaaacatcaggtccatgccctctcagagctcatgaggccttaaaacctacccttggaaccacatcaggtgccaaaggacagggatacgctacttaaacacccgaggcaccaactaaaggtattcggctaacacggtgtgttgttacccatccgatagcggatggggacacgacacagtggtcttagcccttgacacaatcagcggggccccgtgtatcaaacggcggggtgggctacagtgagacgattgtttttacaccgcagctcgaatttaggtgaagcattaaagtcagacaatg

SEQ ID NO: 660326 - DNA, 1032 bp, Homo sapiens
  misc_feature (938)..(938): n is a, c, g, or t
ggcggagggggagagcgcgggccgcgcgggggaaagcgaagagggggcgggccagcgagacgcgcgagagacacaggcgcgagcggccaggaagggctcaggccgaggacactttgacaggtgccggcagcggcaaacgagctgcggttgtgcatacagtgatccggcctccaaggacaaccggcaagtggtcagcgccggcggttggtcgcaacaaaagaatgtccaccacaagacggtccaaggtctggccaaaaccacagggaagtcatactcaccacggtggggcaggaatgatacgaggcgtcaacattcaaaaaaggggcccaccacacaaggtacaggcgaactggccaggtgagggagcaccccgggtgtaatatttggaccggccagaacggtgacatacgttgcaaaggcagacacctcctggcagactggcatggacaaatcgcaagacgaagcataccaaccacaggagcgggaccgggtccacaacacggaacaacagtccgtgcggctgggtgcccaagcggctggaacaaaggtcgacatcacgcctggccaaacagcggagcacaccaataaacacaaggggggcgagcatgtcgatccaccccaaacaagttcacaccccggaagttagaagacggacagcaaggggggacctcacaacgcaacggttggcaagccccacactgacaacagcacaccaccagaggccaaaacactggcaaagctatcacacgcgacgacagaaacgcctgctatctaagcaacaggcaggacggtcagacacggggacccggcaactccatgcacgcgcgctggcaggccgtaacgacagccagggcggaagacaaacagtaggggacacacggccgaacgcaaccacagcagtacgcaccaggcggctctttcaggcgcaacggcgacgntatacagtgacacagaactaagccgatcgaggagagcgcatacaacccaacagcgactgcttagagcgactgaacgcgaacacagcgacgagct

SEQ ID NO: 660327 - DNA, 326 bp, Homo sapiens
gtcttctagagaatagacctcttagagtcatctttcactcctttcttgctctcacatcctacatccagtctgtcagcaaggcatgttttctcttccttcaaaatatagccagaaactggagttcccatcgtggctcagtggttcacgaatccaactaggaaccatgaggttgcgggttccatcccttgccttgctcagtgggtaaacgatccggcattgccatgagcctgtgtgtaggttgcagacgtgggctcggatcctgaggttgctgtgcctctggtgtaggctggtggctaccgctccgattagaccccgagtatagcgat

SEQ ID NO: 660328 - DNA, 1112 bp, Homo sapiens
tgactctctgtgttttgttctgtctgacgatatgttgtgtcgcgcacagtctcagggctctgtgttgggtgcacgcgctgtgttccgcctctttgttggggtacccgctgcgcgcttgtcgccagaggttcttttcggcatgggcgcccctgtgcccccctctttgtggtctgccggcgcaatatactccgggctaccggttgtccgagcacgcgtggctacttgtgggattcccctctttgtgagagctcgcatttcccgcccctttgtggtgcaccgcgttagttccccggttcgcgagctagcacggaatcactgggacccctgagttgagggtccatggagcccagggtgacccccgcgaattgcagccggggcaacaagagcgagactcccgtcttgaaaaaaaagaaaggacccccctgttactgtcctcatcatccccagtttgagcgccagtgctggaatggggaagccctcttagaccctagaggttggaagacgctgagagatctatcccgcccagccccctgatggtaccagagccgagacacgagtgcccccaaccacggaaaaaggcaccttggccccccggtcaatacggcacggttgccccccaaagccccaagatggcacagcccttcctcacagcgtgcctcaccgtgccacactcccacgaagccacgggaggccccacttaaacccaccactcaatgttcttaaagagtaatattctggctccttgagccacgccatctggccctgggaagccacccacaggtgggaaaaggcgccttctgccacgagtccacggccttgggatgacacgacacgccttgcccgcacacactcgggccccacctaaaggaatttagggccttttttggcccctgaaccccttccctggcactgggagcgctggggacggggctggccttgggaggagcggcaggggcatcacctccttcctgctgcttcttccctgctcctaccctcaagggcctgggggctgcccaagctgcctcttaatgcccttctgggggtctcaggccccctgctgacacttctgccatccagagaaacaactaaataaagccaaacgtgtttgccca

SEQ ID NO: 660329 - DNA, 131 bp, Homo sapiens
gcggccgcctactactactactgctcgaattcaagcttctaacgatgtacggggacatgcagttctttaaccaatgtctgtttggctaatgtaattaaagttgttaatttatatgagtgcattccaaaaaa

SEQ ID NO: 660330 - DNA, 398 bp, Homo sapiens
actgacctgctagctctcgactcctgggtacgagtgaacccctgcctcagtcctcccgagtagctgggaagtatggacatgtgccacacaaacccagctacttatgtgtacctagtagagacaggataactctgtgtcagatcaggctggtctcgaacgcccaacctcaggtgatccgcccacctcggccacccaaagtgctgggataacaggcgtgagtcaccgcgcctagcctccggccagacttaaaactgtatagcctatgaaggtagttgtgcagacgtatctcccagccttaatttgctcttctatgatagactcatgaggttcagcaccttttcatatgtttactggccatttggaatatatgtgtacctaatgtatcacttgacagattc

SEQ ID NO: 660331 - DNA, 626 bp, Homo sapiens
gtcctttcgttggctgatcgacggcatcatggggtcgtatgcatgctcccgggaagggcctgtcccagtcggttttagccactatcgaggcagagtcccccactttggttgaagttgagatccgtgactgacgtgaaggagcagatttacaagactgggcaagaagggccgttactccgttcactagatcggtgtaatcgctgagagattcacgatggtgtagtactaagtacggtgtcgtgagaggcaataggaattttgaagaattcttgaagtctaagggacttgcgtcctgatcttgccgtgaagatctcgtacatttaattgaaggaaagcagtttgctgttcgaaggcatcttgagaggaacagagtaggataacggattggtaagattgccgtggtgattctaatagagagccgggattcaccgtgtaggctcgatattataggaccaagggagtccatccgctcccagttggcaatgtatgaatcatctacagtcgtctgcccatggtcgcataagattttgtctgtgtactcagagcaataaaactgattgtcctaggcacgacacaacaaagatcgacacatctccacaagaacatggggttttgggggaactttc

SEQ ID NO: 660332 - DNA, 346 bp, Homo sapiens
gggggggggggggggccccctttttcccccaaaaaccaaggggggggattttttttttccccccccccccccccccccccctttttccgggggggggggggggggcccccccctttttttttctttggcccccttttttttttgggggaaaaagggggttttttaacccccccccggggccccccccccaggggggggggtttttttggggcccccctgggttttttttttgggggggggggggttttggtttttgttttttttccccggccctttttttgggggccccccccccccccctttttcccccccttttttggcccccccttaaggtttttttggggga

SEQ ID NO: 660333 - DNA, 884 bp, Homo sapiens
cgcgtccgccccccgcggcctagcctggagcccgaggagcccaagaggcctgtccccgtcagagcgcggtagcagctctgggacgcccaagctgatccagcgggcgctgctgcgcggcaccgccctgctcgcctcgctgggccttggccgcgacctgcagccgccgggaggcccaggacgcgagcgcggggagtccccgacaacacgcccaccacgccaacgcccgcgcccatgcccgaccgacgccgcccccctaccccgcctcatctgcttctcgctcaagacgcccgactaccccggccacctccgtgccaccccctgtcagctagcgaccctgggcgtatacccatgaagcggaccacgcgagccacaaggacacacgacgcccaccacgacacgatgcaggcacggacgccaccgacgcgccacgctccccggccacccgccccccgcgcaccagcccccacacacgaaaacccccaccatgccctccccacgacaccaccgaaacacacaacggccacccccaataccgactaccgaggcaagcaaatctggaggccactacaatcaagaccgacaccctcagccgtcccactcgacacaccacacgacaacaaccaaggccccggacaaccaacagcaccacgcacctaaatgcgcacagcccctccccacactcgcatccacgaaatgagagccatcgaacgcgggcccccctgcatccacactacggcagcctcgtggccgcacagagtacagaacgcgcaacccacgaccacccatgatgtcacaccccctcctcgcgcccacgcgcaatgcaagtaaaccccacgcgctagccgcccagccccactaggccacccgcccaccacagtccgacc

SEQ ID NO: 660334 - DNA, 293 bp, Homo sapiens
gctccccgcatgagagcatttttggaggggctccccatgatggttcaggagcaggatgcctataaaaaaccccatgtggtttgtgggggccaacttgtttaaagcccccaaaaacaaaggttgggttccccccctggggggatttatttggatcaaatgttggggaaccccccagggcccccccccccccaaaactgtgggggagaggccatttttttttcatattggccggggtttaaacccaaagcacatttggatttgcccttttccctaacggttggaggcggttttta

SEQ ID NO: 660335 - DNA, 892 bp, Homo sapiens
ctcctgcctacttccttccttgaatggctctgactgagagaaggggctggtgagaagcttccccagactgagctccaaacacctcccctcccaggacatcttcctgcccacaggctcctgttgctcctttgcagagtccttgattctccagagcagtcttcattcatggtcctgagcagaggccatgggatggggctctggggagtgactcatgacacctccctaggatgtgggaaacacgccaaatctaaacacatcaggacacctctcctccatcgtcttggactctccgtaagccacaaactgcagtccagattctcaagagttattctgccttctggattcctgcctacccaattacccagccttgttgagattctctattgcctcctgaatacaaattaacactcatcctggttttaaggagaaaaatgattatccttcctctttgtttatacgtatgatataatttggatattttttccctacaaatctcaatgtgaaatttcatcccctatgttggaggtggggtcaggtgggaggtgttgggtcatggggatggattcatcatgaatgacttggtgttatcttggtctattagcacccacaagatctgattgtttaaaagtgcctagcagctccctcttctctttttctcttcctctctccccatgttatgccaactccacttcactgtccactgtgagcagaagcactctgaggccctcagcagcagatgcaagtaccatgcttcttgtacagtctgcagaaccaaaagccaaataactctctttataaattacaaaccacccctccccccaaacaaacaccacacctcacgcgcgagccaagcccataaaaccacaaaacagggcgggcgcataaatcccct

SEQ ID NO: 660336 - DNA, 317 bp, Homo sapiens
  misc_feature (257)..(257): n is a, c, g, or t
  misc_feature (260)..(260): n is a, c, g, or t
agaggcctacttttaagcagctggtggaagctctggacaaggtcctgctggctgtctctgaagagtaccttgacctccgcctgacctttggacccttttctccctccaatggggatgccagcagcacctgctcctccagtgactcggttttcagccacgaccctttgcccctcgagccaagccccttccctttctctgactcgcagacgacatgagccggggagcagcaatgttgtatgggctacgcggcccatggntgnggtctcctcgctgagctgcaacctgatgcatcgacatttaatgttggcagtgtcagg

SEQ ID NO: 660337 - DNA, 194 bp, Homo sapiens
  misc_feature (98)..(98): n is a, c, g, or t
ccacggacgcatcagtaatttttgttactcaccctcctccagcatccaacttctgagtctccagtgtcgttattccacactgtgcccacatgtacacnattattttgcttcaacttataagtgagaacatggcctccaggtccttccatccttccacgttgctacaaaagacatgatttcattcttcctttatg

SEQ ID NO: 660338 - DNA, 836 bp, Homo sapiens
  misc_feature (579)..(579): n is a, c, g, or t
actccacctttactacgcagtacaaccttagccaaactcatttacccaaataaagtataggcgatagaaattgaaatcgggcgcaatagatatagtaccgcaagggaaagatgaaaaattgtaacctaagcataatatagtcgaaggagctaatccgcctatagcttctgcagtaatagaatgaacataggaaataagctgtgcaaggagaggcgaaagctaagatcactggcgagaacaggaggagtctactgaagaactagtagttgagagctagaccgtctatgtagctacaatagggggaagattgataggtagaggcgaatacgtatcagagcctggtgatagcgtggttgtccaagatagaatcttaggtgcaccttgagaatttgtccacgagagacccgtcgtaagatcccgcttggtaaagttgcagtgttagtccaaagaggaacagctctttggacactaggaaaaaaccttgtagagagagtaagaaaatctaacacccgtagtaggctaacagcaggccaccaggttagaagcgtcaaagcatcagacacccactaacttaaaaanatccccatatgtataactggactcctcacgacccaattggaccaatcgtatcaaccctatagaagcaacgatgttagtataggtagcatgaaaaacatttgcatcgcataagcctggtgagataagagctgaatgcccagttacagccagatctaaatcccgcagaagtcttattacctcatggcaccgagaagggaggcctaggaaggtacaccgtaaggacggcagttaccgggtgcaaaccaaacggcatcgcg

SEQ ID NO: 660339 - DNA, 298 bp, Homo sapiens
gcttttgactttgctatttgtattaacacacagtcttgacctcatgggaatcatcaaataagctctatggtcgttggacaatcactacagctgggaacttacttattaaggaatttccaataatgttatactctctggtttttagtatttataccatggaatcttctctctgaaaaaatgtctaatataccaaagtcaagttcactcgagtattatcaacgagacctccaactaacagttttcaattcgagatctccaaaaagtttgtatgtttcaaagtccaggcctacagctaatt

SEQ ID NO: 660340 - DNA, 332 bp, Homo sapiens
  misc_feature (163)..(163): n is a, c, g, or t
agtgactgaagccctccgtgggccctaacaaaccgagcccgccttacaaaagccagccggctgcttggcctttcatgcataacgccgcctaaaaaaagtccccagcgccggtcgatgctttaaccatgaaagttctgctgaaagccagctactcagactcagnccagactgacccgtggttctcgaagtcatggcagtccggctaaggcccacccccccccaggctggtggagcgaccgtcctacttaagaaagccttatcagaatctctgtcttaatgtgaaaaccgccatgtccctcggccattggggcgaaatctcatggacggcccgg

SEQ ID NO: 660341 - DNA, 108 bp, Homo sapiens
ttataacaatctgaaatctctggaggctgcatctgaaaaggtaggtggttggcttgagctggagggtggcttgctggactttgttcttttcttctccccgggatacag

SEQ ID NO: 660342 - DNA, 293 bp, Homo sapiens
gccgtgatattgtgacacaaatcctgctgacaatcccatgacacccacagcaccttcctgttgagtccacctgataatgaaaagggagaagaccccctgccaagtgccaaaccaaaaagcaaacccgagagggactcacttatgggaatccatccgcgacatccctcttgaaacccagaaaagaaacccaggattcaataaaatgggaaagaacgaatctgagggcgtcttcaggttcttgaaaccagaggcagtggctcagctatggggttaaaaagaagaacacagcagca

SEQ ID NO: 660343 - DNA, 164 bp, Homo sapiens
ggcacgagccctcaccccgcctgctccgcagcgggaccgcgtagacctcaacttcccgagcagcgcaggtgggccagggaaggagaggaccgaggtctgccaaggtccatgggtgccgcgctggggacaggcactcggttggttccctggccggtccgggcctg

SEQ ID NO: 660344 - DNA, 479 bp, Homo sapiens
gcgacactcttgagttgggcatggtggctcatgcgtgtaatcccagcactttgggaggctgaagatggaggactgcttgagccaggagttcaagatcagtctggacaatacagggagatcttgtctctacaaaaaatttaaaaattagttgtgtgtggcagcctaacgcacctggtctcagctacttaggaggctgaggtgggaggatcatttgagcttgggctgtagtgggctgtgactgcaccactgaactccagcctgggtgacagagcaagaccttgtcctcaaaaacaaacaagaaaagtcaagtcccaacccccaaaccccaaaagaaaacaaaaccaaaaaaccacatacttgataaaagacaaatgtgtgaagaactcttaaatctcaacaagaaaacaaacaagccaattttaaaaatgaggcaaagatctggacaggcaacttaacaaagatattcaggtatggcacca

SEQ ID NO: 660345 - DNA, 223 bp, Homo sapiens
agaagtcaagcaattaccgtagctcttgtgccagtgaggcctgcttggtctttctataagggcaagggaggccaatgggagattaatgcctgttatttccatggtgaagcagaaaaaggacagtaaacaactttactaccatagagccccttttcatgaggccttgtgggtacctgacggcgtcggatattctgtaactcgttggtcagtacgctgttttccg

SEQ ID NO: 660346 - DNA, 110 bp, Homo sapiens
actgtatcatctcattttgttggctttcttatgaagaatgcgccacagtttaaagcacatcatgctgaacttattttagctaacccgagtccagttctcatctaccagac

SEQ ID NO: 660347 - DNA, 171 bp, Homo sapiens
gtggcttctcacgcacgcccgggtatgtttccacggttcatgggacaacgcatcaagcttgaccgcgccttcggcaaatttggcgccgtcgaacggaatgcgcccgcgcagaattaccgcccaggtcttcgccggtcttgagcatctgtttgaaaatggccttggccagcg

SEQ ID NO: 660348 - DNA, 818 bp, Homo sapiens
tgtatcagaggacatgctcagcatgatccaagagatatatttggcaactttttctagaaaaggcacattgggtatcattcattacattcttgagtttttttgggtttttttttttttggaaacattctttcttgtaataggcccagggcttgacagtgtggtggcacaatcacagctcatggcatcctcaatcacccaggcctaagcaatcctcccaccttgtagctgggactacaagctcacagccacacctggttaaaattttttctttggtatgaacagggtattcttctaatatgttggcccaaggtgggtcttacagggctctcgggggctacaagatttgtcctcctctggcctacaggttatccaaggggcaacagtggccaaatgtttgtaattctttggccctcttagcccatacatggccccaaccaaaggaggtgttctctataaacctatttacatgggatattggatcttcccataaaatatgggggttattgtagggcgtggggcaatgtttcttttagactctggggacatttggtaaaatccctctacctgggacatggttttttcacatgggcagtttcacacagtgaaatcttaattatctaacaaataagagggtaatggctcttgggggttgttcacaatacatataacacacacaaataaataaacaaaaaaaacaagatcgtcggtgggcctctatttatgtaggggggggcgggaaaaaagagtgtttcttaaaaatcagtcggacatgtttcacacaatttttatccttgaccccacttttttgtttcatgggg

SEQ ID NO: 660349 - DNA, 521 bp, Homo sapiens
cgggatcctggacgtgggggatacaggcagtggatgtggtcggaagaaggagaggtatcaagcagcgcagatccccaccatccattgcagaccagacagaataccatatggtggacatccatcctcttcgagatctcccccaacctctaccaggatctcctcaccctccgcatagtcctcttaaacttcacactggatgccttccttctcgcagtgtgggcagatccacttgccctcgggagccttctccatgtcgggatccaggcagaccatgtggcacgcccggggacaggtatcaaccacggatgatctcaccgacttgctggcacacctcgcaaatagtcctggtggtctgtctcataaccatccacagcagtcacctcctcctcgcctttctttttctttttagtggttcggcaattacttgcggctgcggctactacggctggttggcaccatcagaaacagaatagctattgcatcatggcatcattcgattcagattccaaatctaagtcatc

SEQ ID NO: 660350 - DNA, 147 bp, Homo sapiens
cccccaacaatcaatccactatctccctttatactatttaaactttagtattctccagttatccatatctatgagggtccacccccctagactacagttcctccatgacagagaacaactaagtattacatatattacaaaccagta

SEQ ID NO: 660351 - DNA, 383 bp, Homo sapiens
  misc_feature (1)..(1): n is a, c, g, or t
  misc_feature (3)..(3): n is a, c, g, or t
  misc_feature (5)..(5): n is a, c, g, or t
  misc_feature (68)..(68): n is a, c, g, or t
  misc_feature (301)..(301): n is a, c, g, or t
  misc_feature (377)..(377): n is a, c, g, or t
nantnagaattgtctttgttagctttaagtattaaggttaagctgccctcaaaaagagttgagaaatntttccttctcttttttctaagagtttgtatagggttgatattctttattttttggtatttgatatacttcatcagtgaatttatgagttttctttgtgggaaaatctttgataaattgaattattttatttatttatttatttatttattttcgagacagagtcttgctccatcgccgaggctggagtgcaatggtgtgatcttgggttcactgtaacctccacctcccgggntcaagcgattctcctgcttgatgccgggagtttgagaccagcctggggcaatatagtgagaccctgatctctaccnaaaaaa

SEQ ID NO: 660352 - DNA, 137 bp, Homo sapiens
ccttgcttctgcggtcgctctagaggactcccctcatgttacgcgcgcatcccctactgacgtccccgcctatgcacacccccacaggctctgtggcaacacaacataccccgagcaggcgtgaccgctccgcttac

SEQ ID NO: 660353 - DNA, 879 bp, Homo sapiens
  misc_feature (879)..(879): n is a, c, g, or t
atggcgccgccgaacgctcgtcctgctactctcgggggctgtggtcctgatgccagacctgggtcggagctctcactgcccatggaggtatttgcttcacgatccgtgatcccaggcccgcggcccgcagggagtagcccacgacttcatcggcagtgggctaagtggacgacacgcagttcggtgcggctctcgataggcgacgcactccggagccagtacggtagtggcatgccgccgaggcggccgtgtgatagagcagagagtggtccggcgaggtattgggatctggggagtacacggaaacatgctgagaaggcgccagcgtcattacggactcaacacggatgtggcaccgctggcgagtaccctgtctgtcgtggttacatacagaacgcgaggagcgggaggccaggtctcatcgacagccgctcctcgagagggcatggtagtggctgcggactggtagaggggatctgagcacgtgtgccgctatctcctctcgctgctgttaccaagcgaaatacgctctacgcacggcaaggcgttacactcggctcctgagaaggagagatctgcgcgctctggaccgcgtgaggacatggcgtgctcagagctaccgagagcagctaatgtggggacggcggcgccccaagtgttggacggtgatcacgtgagagaagcaataacctggtagcggccaccgtgccggtgtaagtggcctccggtgggactaccgtgcgaagaaaccgcgggacatcgatgaccggctttaccagggggccacagggagagccccaccggaaaaagcgcgatagtaaacttcgaacttagtggcctggatcgtcatgaacccaattgaaaagcctacccgtggan

SEQ ID NO: 660354 - DNA, 338 bp, Homo sapiens
atatgctgtctcacgtaggtattgatgaaggtgactacacaaaaaaaaagattttcaatgtggacaacaacctgtctattggaagaagatgccatctaagactttcatagctagagaggaaatttcagtgcctggcttcaaagcttcagaggacaagctgactttctcattaggggctaatgcagctgatgtctttaagttaagccagtgctcacttatcattcccaagattttagggcccttaggaattatgctaaatctactgtgcctgtgctatataaatggaacaacaaagcctggatgacagcacatctgtttactgagtattttaagcccac

SEQ ID NO: 660355 - DNA, 121 bp, Homo sapiens
ataaaaatcttccagtgattccttttataagaggacatcaaagcctgggcaacagagtgaaaatcctgtctctataaaaataaaaaaaattggccaggtgcagtggctcacacctgtaatc

SEQ ID NO: 660356 - DNA, 123 bp, Homo sapiens
ggcacggagggaagtgtcacgccgtagataatccaactattgcagaaaaaagaataattccctgaaacatctgttcagctagcttctggcccttgtaatccatctccgtgggcctctatgaat

SEQ ID NO: 660357 - DNA, 268 bp, Homo sapiens
tttttttttcactaagggccggcaattaattgcttagaatgctaaagctgtattctattgcctctgtagatgtacgaattcaaatggtttaaagtttcagtaaaaaattcaacataactgctcacaagacatttcaaacaactttaccaccaaagcaaatacaaccttgccaaaacacaagattctcaaacaaattttaaggtaatggttataacaccatactatgtttatttaaacaccatcttaaaccttacttttatcgtcgacg

SEQ ID NO: 660358 - DNA, 360 bp, Homo sapiens
tcttctcaccctttattttgtggcctccccggggtttcttccccacccccttgttaaaccccccccccaccttttttatccccccccccaacctgcttcttggggtggggccccccccccccgggggggggggagtaaagaatttttatgccccgccccccccccgggggtttttcattccccccccccccaccttttttttcttaaagaggggagagcccccctttaaagagtaggtgaccccccggggccccgccgctctttttgtttccccatccccctttggtgcttaaaaggcctgggggggggggacgcaggtttccctcccccaaatggggctttgtttttaacaatttgaag

SEQ ID NO: 660359 - DNA, 112 bp, Homo sapiens
  misc_feature (106)..(107): n is a, c, g, or t
gcggccgcctactactactactactgctcgaattcaagcttctaacgatgtacggggacatgtaatggtaacttggactttaataaaagggaaatgagtttgaacnnaaaaa

SEQ ID NO: 660360 - DNA, 652 bp, Homo sapiens
ggccaaacgaagtcgtggaggtggcgaaacgaggaggagataacgcggccttgggctctggtgtctcccagtctgctaaagccctaagtgccatcaccatggacttccatgcatcgccccgtgtggtgcaagaccgtgtgagctgtgggtgcgtggcctcctcctccgagagcaaactgtgaccgcagggagcgcactccctgtgcaagctttggccctggagaccatcgacatcaacaaggacccgtaccttcatgaagaaccacctgggctcctatgaatgcaaaactctgcctgacacttacacaacaactgagcgggagctacctggcacatacgcaggggcaagaagcaccagaccaacctggtcccgtgcgagccagccaaggaggccaaggaggcccctgcccaaaaccgagcctgagaaggtcaaaggttggaggtgaaagagcgtcgtgtgaacgactctggacgcaccgggtctaacaaagttgagacaagacagagagactcggacgcatggggaccagcagcacggactccctcttccagactatgactcaccctgagatcacgcccgaaaaggggcagtccactagcacactctccagccgcagacccgtgttcttgcggttaacacgcaacaaaggga

SEQ ID NO: 660361 - DNA, 723 bp, Homo sapiens
aatctcagcacttgtggggctgaggcaggcagatcagttgaagccaggagtttgagaccagtttcatgtggccaacatggtgaaaccccgtctactaaaaatacaaaaataagccagatgtggtgtcatgtgcctgtagtcccagctactcaggagagtgagacaggagaatcatttgaaccctggagttggaggttgcagtgagcagagatcgtgccactgcactccagcctgggtgacagagtaaaactctgtctcaaaaaaaaaaaaaaaaaaaaggctcccagggttcccaaaggtttcaaaaattgacgggggcccaaatgggggttgccacgggggggaacttggagggctcaaagtgggagatctttctataaattacatgtggttctaccaagggaaaaggctggttaataaaggtaggggaggtatccacggcttgggaagtattaaggccaaggttaagtggctcacttggtcaggaacgggatcgggcagaggatcccaggggctcaaaaggtcaattcaaagaggtttaaccaggtgcaaaaggtcttatttaaacaatgcgtctctttcaaaaccaatttcctggtgtggaacgtggtgtttccatttgcaaaagattggaatttcaaatctttccttaaccatatggcgaaattacttaaaattgggtttggacgggaaaagtttaaaacttgtgggataaacataagg

SEQ ID NO: 660362 - DNA, 285 bp, Homo sapiens
tctcctccctgccccctgtactaatatattatttttaagaattccatatccaggccgggcatggtggctaatgcttgtaatcccagcattttggggggccgaggcaagcggatcacttgagctcagaagtttgagaccagcctggccaacacggtgaaaccctatctctactaaaaatacaaaaactagccgggcgtggtgagtatgcacctgtaatcccagctactcaggaggctgaggcagaagaattgcttgaatccaggaggcggaggttgcaattagccg

SEQ ID NO: 660363 - DNA, 249 bp, Homo sapiens
tactccacacaagtactccggtattccaaggcaaggtaatagatgcggtcaggtgcataattctctccattaggacgtcggatctcatggacaaaatgagctaacccagtagttaagctcagcagtggtgtgagagagtagatcctcttttaactttactgatttagaagattttaactcatctaataccggaagatcggcaacacaagcgcatagccagggcgcagagaggggagccggaggcacgga

SEQ ID NO: 660364 - DNA, 256 bp, Homo sapiens
tgtgtaacaaggctttatttagcaaggtgagcaggacttaatcaagaaaggccaatcccatgtcatcatctgactcgttcagactcctccttcttctcatctttcttctcctctgctgcagcaggggcagaaccagcagcagaggctgcatagcctggtgcagcagagacggctacagccccaccagcaggtacactggccagcttgccacaaccctgggcaatgacgtcttcaatcctctcaagctacggcatgc

SEQ ID NO: 660365 - DNA, 1086 bp, Homo sapiens
  misc_feature (82)..(82): n is a, c, g, or t
  misc_feature (88)..(88): n is a, c, g, or t
  misc_feature (95)..(95): n is a, c, g, or t
  misc_feature (112)..(112): n is a, c, g, or t
  misc_feature (430)..(430): n is a, c, g, or t
  misc_feature (500)..(500): n is a, c, g, or t
  misc_feature (525)..(525): n is a, c, g, or t
  misc_feature (1029)..(1029): n is a, c, g, or t
agaaagattatgacaaccgaatggtcaaccattttattgctgagtttaagcgcacgcataagaaggacatcagtgaaaaacnagaganctgtaanacgcctccgtactgctngtgaacgtgctaagcgtaccctctcttccagcacccaggccagtattgagatcgattctctctatgaaggaatcgacttctatacctccattacccgtgcccgatttgaagaactgaagtgctgacctgttccgtggcaccctggacccagtagagaaagcccttcgagatgccaaactagacaagtcacagattcatgatattgtcctggttggtggttctactcgtatccccaagattcagaagcttctccaagacttcttcaatggaaaagaactgaataagagcatcaacccctgatgaagctgttgcttatgngtgcagctgtccaggcagccatcttgtctggagacaagtctgagaatgttcaagatttgctgctcttggnatgtcattcctcttgtcccttggtnattgaaactgctggtggagtcatgactgtcctcatcaagcgtaataccaccattcctaccaagcagacacagaccttcactacctattctgacaaccagcctggtgtgcttattcaggtttatgaaggcgagcgtgccatgacaaaggataacaacctgcttggcaagtttgaactcacaggcatacctcctgcaccccgaggtgttcctcagattgaagtcacttttgacattgatgccaatggtatactcaatgtctctgctgtggacaagagtacgggaaaagagaacaagattactatcactaatgacaagggccgtttgagcaaggaagacattgaacgtatggtccaggaagctgagaagtacaaagctgaagatgagaagcagagggacaaggtgtcatccaagaattcacttgagtcctatgccttcaacatgaaagcaactgttgaagatgagaacttcaggcagattacggtgaggcaacagagttctggcagnttatgaattatcaactggctgataaggtcagcttccggaggaggatttgacatcaca

SEQ ID NO: 660366 - DNA, 292 bp, Homo sapiens
accactcccagtttgtttttcatactttaaacccggctctcagggctgggcctttctgaagctgcttcctcttataaaatagctttggccgaaacatagtttattatagcagatcccaaaatataatgaaggggatggggggatatctgtgtctgtgtacttataatatataattatccttcctgggttctcacaaaaatacataatctctttttttcgggcaactagtgtggtgtacccagttggatgtagctggggggttgagtgcagtgcatttccatgtggcggggtg

SEQ ID NO: 660367 - DNA, 176 bp, Homo sapiens
accaggcgcttgtttgggcacctcgggatataaatgccaaatgcctgattaaaattgtggaagtgagaattctttgtagatggcatctctctacacttaattcctgaccatcctgctgctttaaggtcgagtatagcttggttcctctcactctgcagtcaaccgtgtgagtacct

SEQ ID NO: 660368 - DNA, 126 bp, Homo sapiens
  misc_feature (125)..(125): n is a, c, g, or t
gttgcgggtgatctaatatccggcgagtgatggtcacactgttgatccagcactttgactggctgaggcagaaggactgtttgagcctaggggtcaaagttgcagtgagctatgatcgtgcactng

SEQ ID NO: 660369 - DNA, 967 bp, Homo sapiens
  misc_feature (478)..(478): n is a, c, g, or t
agcggagtgcggccgccgccggcacagctgcagtcagcaccgtcaccccagcagcatcctgccgcctgacaccgcgcgtgcggccgccccggtcgtgaccccgaccgcacgaatccggatgccgaacgcgatgggagcctcgtagacgcccctcgcgtacgctcgagcacacgcatcaggcgcggttacctgctgacagcggaaaccctcacctcaacgaaggacttggtctttaccctgtgtaacgtagagtacaggaattgacacattcaatggacttggtatgccaccgtgtctcttcacacagtacacggacgatccaaggttacttacgagttcgtataagagaattgttcgtagctatctgacaccttctgaggctttggcacaggagtatccttactctctatgtggagtactccataggagtatgatacatgaatgattactcatatttagtaggaagtgacgtgagcanttctgaacatttcgagatattatcagtgtacctagttggtttaatatctcgcctaactgtgcgggtcatgagcgttggccagacccatttactactgtatatgggtgattctcaggcaaagcttctacagaagtgtccgtgcttctaattgactgttatactcgagcgtaagtcgcacggagccaagtacttcgccattacacgatctcatctaaattgccagtggtccaatgaaggatagtcgatcgaaagtgccgagttaggtcgggttgaaacgtggactgggaaagaaaacccgttagttgcattatggggtttcgaggaaggcacccttttgagggtttggtgacatttgcggaaacttagttcgccattcccctttgttgagggttcaactactctcggaggctcctgaacttaatcaacgcaggcttttaggcagagaatgacgtgagatggaagttccacataaccaacgtagagtaggtc

SEQ ID NO: 660370 - DNA, 170 bp, Homo sapiens
tgtaggaatctagcactgaaataaagctcacataaaaaaataaataatagaattcccattgtggctcagtggttaacaatgtctgactagtgaaccatgaggttgtgggttcgatccctggccttgctcagtgggttaaggatccatgcattgcgtaattatgggtttcg

SEQ ID NO: 660371 - DNA, 339 bp, Homo sapiens
acaaatgcacccactgcctcctgggttcaagtgattctcctgcctcagcctcccgagtagctgggattacaggtgtgtgctaccacgcctggctaattttttgtatttttattagagatggagtttcactgtgttagccaggatggtctcgatctcctgacctcaggtgatccgcccacctaggcctcccgaagtgctaggattacaggcctgagccaccacgcatggccatcattctcatttgatcaggctgctaacaagctagttagtggagctgatgggatagagaagtactgactgatgttaaaaaaaaaaagcaaaacctcacgctctgtgcat

SEQ ID NO: 660372 - DNA, 808 bp, Homo sapiens
  misc_feature (612)..(612): n is a, c, g, or t
aaacaaggcaccacaagaaagaaccagtggaaacttccctggtaattccagagtgtttttgtatttaaagaaataaggaggatacagagtttcagttatatgagatgaataaatcctagagatgtgtacagcatagtgcctgtagttaacaatactgtatgtacacttaaaaatttgcatgctggatgcggtggctcatgcctgtaatcctagtgcttgggaggccaagagaggagtttgagactagcctgggcaaaatagcacatttcatctctacaaaaaaattttttgaaagaatttactaagaggatcttattttaagtgttcttatcacaaaaagtaataataagaggatggggggaaccttttgatgagtaggttgtggcctacattgtagtgatggttttctctccaaactcatgagttgtatgcatcagatcattagatgtgtgcagccttgtatgtcagccatacctcactaaagggtcttggttaaagataagataatcgtttatctgcagggaagaaacgaaacagttaacattgatagggggagaaaatgaagcacaatcaatgaacatttggaaattcagagaatgctgtaaatcatangcagattggcacaccagaaaagggtggaagaatgacagaaaaatgggcggaaatatgacacgacatacgtgaaagtgagaaggttggactactttaatcagtctcagaagtgttaagagagaatatgattagatgattttgggggaattcgaaattgggggaccatcctgattcagaagccaatccagaggtaata

SEQ ID NO: 660373 - DNA, 125 bp, Homo sapiens
cttgataacttaagatctccaccctggtcaataacagaggatatgacctcagttagtcttattatattttcaattctttaaccatatgcttacatttactaatatcaagactgcgtaccgagctc

SEQ ID NO: 660374 - DNA, 810 bp, Homo sapiens
gagtcacagcctcagccgcagcggcgtgctacctaggtgatagcggagcggctgggtaggaagcaatgttctcaaacttcactagccccgtcggcgcggacgctgtcgagaatgcagattcctgggtactgccagatacgaatgagcataccacaaaaaagttctcatttgtgtcctcccatcccattctcctcactaaccaaaggctaggaattatctgtgaatgtaggaccactggattgcagtcttcatctgacactgtggagagtttctaggaatgaaacagatatatggccttgggtccccttttcctttctttttttttttttaatagagacgagcatctcactatgtggcctagggtagtctggaactccgggcctcaagcaatcccaacccgattccgcctctcgaagtgacggggattacaggcataaaccaccagccgggcagaaggtgctttaacaccaaatctgaacactggttcagaagagaaacatggagcatgaacaccatctgtgcgagtcatttacttatggccttcacctctaaatctaccttgtgtactcttcttcccgtgtaagtgatggggctaggtggccctcaaagggtgcccccagacctctttaaggctgtccctgcagtctgcaaaggggcctaagacaagacgggaggaaggaaaaaatgctcgggaagcggctggaagggggtacggaccagatgctctccaaagagttccacaaggcggcccaggttaagaaggatgcaggaccggccgaaataaggcagggccccgggggcgggaaggga

SEQ ID NO: 660375 - DNA, 439 bp, Homo sapiens
ctggagttttctggtggctcggttttgtccttctcgctgatgctgatacaagtgactcggcatgcatgagactgcagtcggcggtccacagcattcagcatggactgggagatggtacaaacaggtgatccggatccatgttgggctcccagaggaactcacacattccgtacatttgttcggcgcaggtgccactgaccacaaagtcatcagtcaccatggggcagccgatgaggtctagagagcaaatgaagggcttaaaggtcttcgggtccaacccggcaatgactggctcagtgtagtaagggccaaaccgtttctcatacaagaggttggccaccatgctcatgagggtatcaggtttgatctgccgaccttccttcaactcatacaggttcagccggaacttgaggcgctgggcaactgtccggacgtcagt

SEQ ID NO: 660376 - DNA, 711 bp, Homo sapiens
ggagcagccatagctggggcgcgcgtgggcctggttggtgccgcgtctatctgctgcccctgcgccggtgcatgcctcgccgcgagcctgcaggttgtcctggagtctggcccagagacctgtgccccacagtgagtcccagcagcggtgtagctccatcccggtggacaatggaccgaagtgcgacgtgtcagtagttcatgtgcccatgcctgctggagtggaaagcgaagccatccttcatctacaccccagaggtgtccccaatcctgcctgatccacgagaagtcaccataccttcctacaagcatgcctacaactcctgctagtgatcttggtaccccataggtggacagtgaatgcctatcgaccaattgtccattgaacgtgaacaaccaaagtccagatattatcctactcacgttccgtgatataactccgaaccctagaccaacttgtgatagcccaaccgattgaagttgcggaacacgaaagcggatgtttcccctttcccccacgcaaaatagaacgcggatcgattctggggagccgggccctgtgccttcccgcgtcgccacgcggaccttctccggggacagttggttgccacaggggtaacgggaccccggaagcactctggacggacggcgccccggcatctccccgggcacacgggagcgtatccacctagcgcgccccgctggcgcagcc

SEQ ID NO: 660377 - DNA, 221 bp, Homo sapiens
ttatttgtgtacttttaaaacctcacagtaatagtatagctggcctttcacgtgtgagagagcacggtcggaatttcataacagtagatgatcaggccccctgggcttcccatagtgttgcgatggcaggggtaagccctggcgctagggagccagctagttattctatccatagcctcaggacctgacatcatgcaggcattcccttctgtcgtcttctc

SEQ ID NO: 660378 - DNA, 218 bp, Homo sapiens
  misc_feature (162)..(162): n is a, c, g, or t
  misc_feature (173)..(173): n is a, c, g, or t
  misc_feature (201)..(201): n is a, c, g, or t
ttttcctggttttcagtccccaaagtcggtagaccaggggttacgtgactggggaaaatttcccatctccttgtttgaaaacatttcccctgctgttctctttttaacatggtgtggtaaatctgttcaaaaactgctcatttgactgttttggacatgtgncaattgccttnaaacctagcccagtcctcagaaatgaanaccgtgtttcccctgga

SEQ ID NO: 660379 - DNA, 808 bp, Homo sapiens
ccggaaactcctggaattatactgtaaatgggagatacattagttgccgtaccctatcgaccgtccttcaccgccgcagaccccattcaagtatctagtcactgcgtgagtgcatctccatccacagttggccaggctggtgtccagattggcaatgcctgacctgggagctctactgcctggaacacggcatccagacccgatggccacgatgccaagtgacaatgaccattggtgggaggagatgattccttcaacaccttctctcagatgaaacagggtgctggcaagcatgatgccaccgtgagcagatagtatgtagacttggaacccacagtcattgatgaagtacgcaactggcaactaaccgcacagactactatacacccatgagacacacatcatccacatggccaggaatgatgctgccaataaactatgcccgaggcacactacacccatttggcaacggcagatcatatgaccttgtgttggaccgaattcgacaaagctggcatgaaccagtgcacccgcgtacttcagaggacatatctatgagtaaaaaccgcaagactaatgtcgtgaggagaaactgtgtatgctgagggttcaaccttcgacttgctctatgagaaccgttctactcacgttgacttaatggcaagaaagtcccacgctggcagtttcctccagttataccacgagtgacccgaggtaatccacatacttgtaagatgagcccatacaacatacatacatcatcacccagaccaccctggagcactcctatattgtgctcatgataaac

SEQ ID NO: 660380 - DNA, 145 bp, Homo sapiens
acgcataggatactaatcctttaatgtagtgtacactggagaatagttatattttatgaaggttattttgttgtatttagtattggaaaagttgtgtttccagatgcatttcacgaatgtcgcaagcacccactgtctttttatt

SEQ ID NO: 660381 - DNA, 704 bp, Homo sapiens
ggcggcggcggcggcgggggactctcacggtgacatgtttacagctgggtgtgactcagtaaagtggatttttttttcttaaaaaaaaagaaaaaaaaaaaaaaaaaaaaaaaaaaaaaaaaaaaaaaaaaaaaaaaaaaaaaaaaaaaaaaaaaaaaaaaaaaaaaaaaaaaaaaaaaaaaaaaaaaaaaagaacaaacagaaaaaaaaaaacaacataagagagaacacgaggaaaacaaacaagaaaagaaagaaaaacacaagcgagcagcacagacagacgagacacgagcaaacagccagggaggaaacaggagacagcgggcgaggggccaccgcgcacagcagggaaaaacgacggcccgggcgctagagaggcgagggccggagacagagagcaaagaacgaggagacggaaaagccagcgagaggaagagggacgacacacacacagagagcacggaggagagacacgcgagcggacgagagaaagacatacaaacagtaaacacaccacacccgagcgggaggggggggaaacagaaacgaacacgaacaacacacaaaagaccaacagccgcaaggggggagcgaggcagaggcgacacgacgagaaacaaaaaagaaccacccagccagcggggaggagaacaaacaaaaacacaggaaagaacgaaaagaggcaaccgggggggggggga

SEQ ID NO: 660382 - DNA, 132 bp, Homo sapiens
caggttgcggacatcttctggtgggcactgtgcggaaacttgaggataaatcagtgagctgcatgcatctttaacggcatggcctgtctcctcacttgagtgcaatgtccactcgaccaaagccctgttctg

SEQ ID NO: 660383 - DNA, 1168 bp, Homo sapiens
tggtggtgcggtgcactgcaactgtgttcagccagacacattcaccagagcacatggggatttaaggttcagcagcagacaacttggacaagttctgtgttcaggatccttgcttggcagcaattcaactttttgccaaacaggttttcatcacaccagcatattctgtcattcaacattctggcagcccatagtcgagcacagcactcgagatccatacatctggcttcatttctctgctaattttgcgcggtaacgtactggtagatttgtgcgcaacttttatttggtaaaatacagttgggggagtgttacacaactattaaagctttgacttgtacgttcaagtatcttcgtcggaactaagagtcagaacagactcttgtgggctggatccgataacgtacgtggcaaaccgctccgtaaacactcgagttggatggtccgcctcatctcacgggacttcgggtccacgacagaacaaccactccaaaaaacactcgacgaactgaacactcccttgagtggcaggccagtttactaccggtacacttattagtatacaacaaggccaacacacaacaggtggcttggccaacgcctattcacttgactggctttgtcctaaaactggcagacaacaactttgggcctggcaataccaacacttagacccctttaatggtccaggggtagatgccagtttgcaaaaacgattgtgcccgtcccgtttgggaggccacccgatatcagttaccactttgcaaggccagcaaagtttctgatggacgccatcgcttctcgccccacaaccagttgttagcccttggtccctcgactagcgagtgctcatcaaatgggataatgggcggccgccggctagcggacagcaccgaccgaccccagcgcaggcatggtcgggtccaccgactgactacacagggtcggcgctactaacaccccgcactccggcggggtcctacctatgccgtaacatctggcacatagccagaaaggtgcaccacgaaagtccccgaaaagggtaacagtgaacgcggaagggccaggcgcagacaacaagagcgccgtccatcgaaacacaagcacaaaacacgcagcacattggcgacgagaccccacgagaagacacgacacacaggggcggcca

SEQ ID NO: 660384 - DNA, 633 bp, Homo sapiens
tcaaggccaaggcagggccaagaaaaccaaggggaccaagggaaagaccaagccatccaagaccaggaaaaaggtccgcagtggaggtggcagcgggggcagtggtggccaggtgtcgctgaagaagtccaaggcggatagctgcagccaggcggcaggcaccaagggggcggaggagacttcctggtccggggaggagcgggcagccaaggttcctagcaccccgtcccccaaggcagaccgagcaaccgggtgaccgtgcactccggactcgaagaccagaggacagaaggtggagaagacagcactgacggtctcctgtcctgcccgaggaggccaggtgaggaggctggggtccgaggtggggcggaggaggaggaggaggaacgaagacgaggaggaggaagaggaagaggaggacgcgcagcagaagcctgcgtacccaccagggagcgaccagacactgcatgcagccgcccaaaagcactgacacacagagcgagagtacaaaagagcgggagaatcgcgaaagcagagggacggggccaagataaccacggtgatatacaagactggggcaacgcatggcgacccgagcgcatgagacctgggaaatgtggccagggggatgtg

SEQ ID NO: 660385 - DNA, 256 bp, Homo sapiens
aaacagctcccaaattctgccaggaagcgatcctctggtgtacacaaactgagatggtacagcctactacatatctaggacatatggtatgtcctattgctccgaggctacacacctgtacaacatgttcctgtaacaaatagtataggcaactgtaaaacaatggtaaatattggcatatctaaacatagaaaaggtacagtatacgatactataatcttatgggaccatccatatattcaggttatggttgacc

SEQ ID NO: 660386 - DNA, 936 bp, Homo sapiens
gtggagaagcagactgggaaaaaggataaagataacgtttctctaaccaagaccccaaaactggagctgtggctgatggctgggaagtgagtgtgagggagctgagccagcaagctggaagctgcccttcacctgctgggctgccaatggggagcagaatggactcggacacatggacctgcggggtccttgcttgtcctggggcagcacacgagggagccctcgtcaggagcgccatgggcctgaagctgcctgaccatctgcacgatggatgtatctttggaacaaggggcaaaaattcatgattttcttattctagcatttgacctgtgacatgacaccctggtctctggtgcctggggtgtgctctctgcagtgctgccaggcacatgcttggttccttcagcgttaggtgcttggcaccttcagtctttaccatgacagtcatgtacgttcctggtgcctacagataggagacggctgttctgcacggctcctgattccccatacctggagggaagacagacttagccaactggctcatctcgtgggagacttcttcggacctctgaacatgccaaacccttggcacagtgcctcacacggcgacacagtgtgtgaaagtctgcaccgaagcgattctcacaaccttgctcaggctgcaggtgggaccctagctgggtcagacaagaagccgagatgcaaccaaaggggtcacaggccatgagagaacacgcaagtatcatgagacatgtttacataggcagaaaacagtgaccaaccacttggtaagaccacatgaccacaaagaaagggcacttcagaccaatgcagatttagtcccgacgacaccaatacgcacaacaattaaatagttaatataaagatgtctcaccataggcactccacatagaagtaacgatttataaacaaaaa

SEQ ID NO: 660387 - DNA, 1253 bp, Homo sapiens
  misc_feature (316)..(316): n is a, c, g, or t
  misc_feature (345)..(345): n is a, c, g, or t
  misc_feature (401)..(401): n is a, c, g, or t
  misc_feature (407)..(407): n is a, c, g, or t
  misc_feature (704)..(704): n is a, c, g, or t
  misc_feature (1253)..(1253): n is a, c, g, or t
gagtgacggatggctgattcatgataggcatcgcctggctgtcagatactcggaaaccagagcgtcggcagacgtttcagggaaaggtgagagatcgttagtagatcggtcctttgctgatgagggatgcctaccaatcatggtcgctgcgtcagatctaggagatcaattgattacgtcctctatgaagctgtgtcagtcacaggctgcacaacctgcgttgacggatggcgttcacgttgtcgacatccagtcggaccaggatattgactacgggtgtcctatggagtagggatgcatgacagtgctaacgagnattcgtagatccatcatcctgggagacgntatggtcaggatcgcaatcctctgcggcgtgactgatcctatagggagtctcattntgaacngtagcccgaattgatttgttgccaagtgcaatggtcatctgattgataagacagctggtgatgcgttatatcagatccgtgtataggggcgaccctctaagactgtggcgtaaatatatacatccttacacagtgggcccatgagggtgactgagagtctgtgtaaaccctgcgtccgatatgtcccgttcagtacaggtgtccgatgcgacgtgaaaaaattcctactttactgcgctcgaagaattatttgcttcctaattcttctcgttgaagaatccaccatttccggggggntatggtttcggttatcgtttccatagcgggagagcggttccataaataggaatgggtgggtgcaacccttcggtggcgacctaaggaatacttagcgaggttcctgtgtgagaaccggattatacgctcgaccattggtacagaaattccgtaaaaagcccggtgccccccaataaaagccccgtagggggaattatcctaaaccgcggaaaagatcgcgcggtcccgccttggcggaatcaaaggggcgcgaaccaccggttgcaatttccgttacgggcttgggggggagctttacccagacgatggggaacagaggttggcccggagccatcccaattgggaatttaacaacggaagggggtccattcggcgagacatgtggtgtgtgtcgggaaaaaggtgttacatggagagttcacccaaaggcggagtccgggaaaacacgagggggaatgaaatccgcggaatataccaatcgcagtgtttgaaccgccaactattgtgggaagaccgggtttcccgttctgtgtggcaacctccacaaan

SEQ ID NO: 660388 - DNA, 718 bp, Homo sapiens
cgctatgaccacgacaagaggtgaccgggaaacaggtttaacagagaacctgtatgaccagaaggcacggataaagacgttaccacagatatgccataagacaacgctctctgggtccatcatcggccacagatcaatcctagttcaaattctatagttatcttaatattatgattttgatgaaacaacagaagattgatcatttcgtgtggtttgaagtgaactgtgactttaatgaatattgcagggttcagtctagattgtcattaaattgaagagtctacattcagaacataaaagcactaggtatacgagtttgaaatatgatttaagcacagtatgatggtgtaaatagttctctaattgtttgaaagaatcgtgccaagcaataagatttatgtatatttgtttaataataacctatttcaagtctgagtttcgaaaatttacatttcccaagtatggcattattgaggtatttaagaagattattttagagaaaaatatttctcatttgatataatttttctctgtttcactgtgtgaaaaaaagaagatatttcccataaatgggaagtttgcccattgtctcaagaaatgtgtatttcagtgacaatttcgtggtctttttagaggtatattccacaatttcttgtatttaaggtatgcactaataaactacctacatattattcgtttctacctggtatacgaatgt

SEQ ID NO: 660389 - DNA, 685 bp, Homo sapiens
  misc_feature (662)..(662): n is a, c, g, or t
ggggccctcactggcctgtccgggctgcagcgccaggacctcccggaggtagaaggcgagacgtggaggctcttcttctgccccgtctcccctcaaagatgagaaacatgttcagaacggacaacggtcgtctctcaggactgtaggctgctgagtgcaaattgcagtgggcggaaaggcgaggtgggtgtgcatgctcttgcctggcaggcgctgggccatcagcgaactgggccccgtgagagagggcggcgagtgtggaggagggctgggcactctcaccacaggctttctcggcccctactccatcagcttgacagagctggccagccccctcctgtagggggctagggcgaggagacctctgggcagacccaagaaccatgcgggactgggcgtgtggttggatggcaccaatggcagccgctgccccgcccctctcacttcaaggagggttcctcgcagctggggggtgtgcggaggcgcatggcctcccgccacggggccgtgctgtgtctatggctggcagaggcagccagcgggtgggggattactgctgctcgctcacctgcctggctcgctggtctctcgaattttcttccctctgaatcctattaagactttgtgggaatgcgttattcacactcttccttagctttgantttaagattcaaaagagcctttt

SEQ ID NO: 660390 - DNA, 147 bp, Homo sapiens
gcgtcgatgggcgcactcgcttccacgaactcctacataggtaatcactgaggattgtgaggttcagttccccctggcacattgtctcatctggggttcccagagtcctggcggttgctccctgagctgtagagtgctatgttcgct

SEQ ID NO: 660391 - DNA, 1048 bp, Homo sapiens
  misc_feature (170)..(170): n is a, c, g, or t
  misc_feature (330)..(330): n is a, c, g, or t
  misc_feature (373)..(373): n is a, c, g, or t
  misc_feature (520)..(520): n is a, c, g, or t
ctgtgtcaccgcgtgttctggtgtgaccagccggggccccaccagtggtgctgctttttgccgccgggtgctccccctgtgtggcgcacaaagctcgccccttcttgacccaccggggtccgggcaaaatggccgccaacgccgggtggagacgtgtggcccacagtctngccgcgcccacactggtgggttgcctaggaactccatatattgggtcgcccgcaggtcctcttctctgtgataggcccgcgcgcgatgggctgctcccgacacatcgtgtggtccccaccaacagtgccgctcgttgtgctgaccaaagcgttgggtggnccggacacaggaagcgacgtggactcgacacatttcgccgcgngaggggtggataccccccccggcgcgttctacgctgttctacattgcgcgcgcgtctctcccacaaggcatctctttcctcactagccgtggtgtgggagacacgcgtgttccacacacaccagggcagcatcgcagcggagcctcnctctcggttagaacgcccgcactgcagcgctctgttttggcgcaccgcggtgttccgccactgcgcgcgcaccattgtgttacaccagcagtggctctctcgcccaccccacatgttgtctccgccatgcatcacagtggcagcataggtctagcattagtgtggcgccccgccccctcgcgccgggcgcacatttccaagaagtgtattctctctggccgccgccgcgtgcagtatcccacctctctctcaagagaacagctggggcggtacaccacacagtggcaacatggtgacacgtgagagtctcgacagacacaagggtcgtggtagtgaagaagtgcgctgactcatctccacaggacacgcgtcgggcatgacaagacgaagacctcccggcctggcctcccttcgtgaccatagccgggggcccgccaccccaggtggcggcggtcccacatggtcgatcagccccccttctttcatgtgccacccccgaaagttgttagattccccccccacataaca

SEQ ID NO: 660392 - DNA, 643 bp, Homo sapiens
tgcccacgggggtcatggggccaggcgcgctccggcgcctgcagaactgatcggggatagtctcaggaggcgctagtcacgtgccccggtgatcggggatagtctcagaaggcgctagtctcctgccccggtgatcggggatagtctcaggaggcgctagtcacgtgccccggtgatcggggatagtctcagaaggcgctagtctcctgccccggtgatcggggatagtctcaggaggcacgagtcgcctgcctcggtgatgcaccgtttctcacaccggctgctctggcccgagctaaaggggaagacgtgtgcggataggagctgcacacaattttcctccatgtattgttgatttggctttttctttgggctagacattaggaatttcagttttcccaagttgtatttttccttttctattttaaaattatcatgcagggctgggtgaggtcgctcacgcctatagtctcaaaactttgggaggctgaggggggaggatggcatgagcccaggagtttaaggctgcagtgagccgagatcgctccactgtcctccagcctgcatgacagagcgagagcctatctcaggaaaaaaaaaaagaaaactatcatgcagtagtatcgaccctggaagacgagtg

SEQ ID NO: 660393 - DNA, 169 bp, Homo sapiens
tctcacatgattattaaagcttttgtgatattttagcattttgaaagactttcacagtgagagtagaaggtaaggtggggatcatgcattttagcaagtggacttgttgaaacaggcaagcaagggccttcagttgtagccctattcttgatccagcagctgttgcctg

SEQ ID NO: 660394 - DNA, 1176 bp, Homo sapiens
agcggggtgtaccatttacatggtgtgcggcagggtctctggttcacatggctcacgatggaaacctgttctcattgaagcaacgtcgttactcaggaaccatctagggtggtacttcccatgcaccaattgtatcgtatcagggtggcgtatcgaacgtgctgaaaggtcgccattggtcggtggactagccacgactctaggaactcgatgtatgtacgtggtacgggacgaaatggagattaccggtgagcttggtaatgcaggtggtgaagcgagcagggtataattgaggaggccacatttaacaaacgcaacgccgctaagcgtccgctggagccacgcttctaatggagacgacagaccgtcgccaaggacagccatgcacgtctagccatcctgtagcaatccctgaagacagaatcccgtccaggactcgagaagcgactcataaccaaggaacgattttcctatgctactcgcgctcgcatttcaggcaaaccgtcaacagggtatgcaagagtatgcatgcccaatgaaacagtctcttacctatgtctggagtcgaacaccatggcgaaagccgccgcgttggagaacgcagacgcgtttgcttgggcaaacggagaagcccctaggcgtttttgacggagcaaacagcgtccacaaattgacctcccgaggcggaggaaagtgccgaaaggcatcgcgattggtgtgtctgggtgtactctagttccgggtcattttccgcacaaagaatttccacgaaaaggctcgcttggccaatgtgacctgtgtacggtatcctttacggagacgaagaggattcctgcaaggcggaaggaaacgattgcacacccaacccggaaattcacgtgtgggcgatggggaaccaaaatcgtggcgccgcggttggggcaagcaattaagtgcagagaacgactccgcgtgcgattgcagccggggaacaaacggtaccttggcgcacatttcgattgacttgaagaacgcaatgacaatagggtttggccccttttaagatgcgaaaaccacccgaaggggatagggttggcgtgtggaatccttacgacatttttgctttcgccgatgcttggttattgaactccccaaacttggttcaaagtaggagaacttttccttccgcattccttg

SEQ ID NO: 660395 - DNA, 263 bp, Homo sapiens
  misc_feature (115)..(115): n is a, c, g, or t
  misc_feature (213)..(213): n is a, c, g, or t
catacacgcacgtgcgcggctggtacttacctgtccttccagacgcgtctccatacacgcacgtgcgcggctgtacttacctgtccttccagacgtgtctccatgcacgcacgtngcaggctgtacttacctgtccttccagacacccagacacgtctccatgcatgcacgtgcgcggctggactcacctgtccttccagacacgtctccatncccgcacgtgcgcggctggactcacctgtccttccagacacgtctccatg

SEQ ID NO: 660396 - DNA, 304 bp, Homo sapiens
gcgggcgccgacctactaataataaattcgcgggccggcgaaaatccctggggcaagaaacaaggtcccctcatccaaaaataaccccccaacttaaaggacccaaaatactagtcaaagccctatactccccctaaacatttaccacaacacaattggggctcactcacccaccacattaacaacataaaaccctcattcacacgagaaaacaccctcatgttcatacacctatcccccattctcctcctatccctcaaccccgacatcattaccgggttttcctcttaaaaaaaagtcgacg

SEQ ID NO: 660397 - DNA, 375 bp, Homo sapiens
  misc_feature (12)..(12): n is a, c, g, or t
  misc_feature (203)..(203): n is a, c, g, or t
  misc_feature (211)..(211): n is a, c, g, or t
  misc_feature (213)..(213): n is a, c, g, or t
  misc_feature (221)..(221): n is a, c, g, or t
  misc_feature (245)..(245): n is a, c, g, or t
  misc_feature (248)..(249): n is a, c, g, or t
  misc_feature (375)..(375): n is a, c, g, or t
agcggaggttgngagtggaagtggtggctgctgctccgcagtgtggggaagatggcgccgcggtggcagagagggggctaaagagcgtcgtgtggcagaagatataagccaggtttgatgacttgcagaaagagcgagggacgcttagatgacattaccaccttaagccttttggccatccagtgttgccaaaaattgaaccngaattctntnccttaganagcgaacgggtaatataacctggnttnntgatacggaacggacacactattcttttaacttaaaaaggaaaacccggttggaaaacccttggttccaggaaccaaaaatttggaaaaacaaggcctccctttttttaaattttttcccaattcn

SEQ ID NO: 660398 - DNA, 162 bp, Homo sapiens
gagtcttatctagaggatcccagcactgtgagacatacattgtagtaggcagggaatatgccaacactggccatccggaccatagcctagtaaaacattaactgtagttggaatagctagcattgcagctaacagaagtgagcactgtacgtctagttccct

SEQ ID NO: 660399 - DNA, 113 bp, Homo sapiens
cattacaaaatcttagaaaagggaactacaccattatagtgtaacaaaagcatcattcatgttaactgtttttttttgtttttgttctatttttgacgacagagtcttgctct

SEQ ID NO: 660400 - DNA, 715 bp, Homo sapiens
cggacgcgtgggcttctcactagtaaaactgccttccctttgttcctatatttctctgttttttctctagagaggtacagttgtaagtcagacgttacactatacatagggcctgtgaaaacagaggcttttgcattgtctcttgacatcagacagttacaataggcatatgggcaaaatggtgtaccaggctcactggccgtttgttattgttacagcacagttttcagcaagtttcttgatgacactggcatttcttgaattaaaaaataaatgccgagcaacccattatttatacagggttgattgcgtttcatgttgttgattgctgtacccttatagtagcctccatgagaatctggtatatcttgctgcttggaactactttgcattgattactctggttgcagtcccaagtactctcggttatagtctgagcctggaagatgtcctagaactatgcttctcccacctctgagattaggacaggaatacaatgttgaaatttcccaattacaggattatcacggtcaccatctacatcattgtgtggaacatggggtgactgtatagctgggcatggggctaagcgactgtggtcttatctgtgccacatacagcctaaaatgcctatccagaaatcccagatcgttggaaaggaaaatgggtactcctgtgccacaggggttccacgactagggaacgtccgtttacc

SEQ ID NO: 660401 - DNA, 153 bp, Homo sapiens
cacgaggttgaccccttgtccacttactctaacaggtctggaggaaattcatttaaagatggaagaagaacaagttctactttagaggcggaagggacatttacttcctatatgaaagaatgggaataactatttgcaaacaagaattacttg

SEQ ID NO: 660402 - DNA, 131 bp, Homo sapiens
gatctttgtccttgtgttggtttctgtgcatttgagaagtagtcacttcttttagtctttactaattcatttctgtgaggaaagaccttcaccagtcagcctaacctggggttctggatgggtcagctggt

SEQ ID NO: 660403 - DNA, 656 bp, Homo sapiens
  misc_feature (306)..(306): n is a, c, g, or t
  misc_feature (470)..(470): n is a, c, g, or t
gttcgccctcttcattgccagactacttgggctgtcgcgaagtctgatatgacccagcctcaccccctggaccgcctggtgaagagtgtgtagcctgggcagttgcccgaggggcacagcgccactgtgtgaggccaggtgtgagcccaccatgataagacgtgccttgagggagtcctaggaaccccggcgttgagtcacgctgtgcccctggcacagaatcggaaagtctcgtcatgacctagatccatgacaggggaggacgccgctccctggaggcagtcccagggtgagctcatggctcangctcctgagtgcccagttccgactgacggcccgtggaagggggctaatctggggcgtgtggacccaatggttggatgggcgtacgaggattgagcgcatggcatgcctacccggacgagggtgctggtgttgcccagtgcttccagacatgcgtgcttcaaggntcctgttgcaccggtccgaatgtgccgctatgtgcctcggcgctcattgtcaggcacaataccatgggagctatgtattgccagtgaacgcatggcgccaagccctgagactgggatgggacgacaacccaggatgggaaggaggccttgatcagaaaaaccaggggtaaagacgacatgagggaa

SEQ ID NO: 660404 - DNA, 1003 bp, Homo sapiens
tagatcattcgtccgtagcgctatctctgatagtaagtgaacatggtcataacagtgtcctgaagagatcttggtaatgattattgctttagttgctccaggcaattctataagcccggggagatatgtagtgtatgtgataacataatccatagatcggagttcttagaggtcaatgatctggcgatcgtatcaagcaacggagtccgagagcgagagcatcagatatctaaattaaagccccaggccgtgtgaacttggtcccattactggtgtctatagatcaatctgctatagtagtataagctgagctataagtatgatactgatagttcccacggttccgataccggtatcaatatagaaacttgctgtaccatagacattcctcgattcatttgtatgccctcagaagtattgagttcctacagagtgttgtgaaaccggagtatatacctatctatattcagttggggcctaatctttttactaattaaactattcatactccaggctttgtgtccttggcagtacatcaccacattatgtcatcctccatgatctgaataagtgggaggttagccaatcctccaatcatcagctttggcagcattgggtacagaggggctggccatagtatgtcgcaaccctggacagtcacagccatcttatcgacatgcgaatgtcataatcagccctggagacgtcaggtggcgtgcctggcgattaatttccgctggcagactaggtaggcgcgcctacctttgcggccacaacatccgtcactctacactcttttcggaatatcttaagagtaccgtccgttaacccttttacggggctacccgggcccgcgtcgagcccagggccactgccttacgggacacacgacagggagccacacacgcgggccagtccggagacgagccagacttcgcacggcactcagcatcacaccaccaccatagagtagcagacggcacggaggtgtatacaaattcat

SEQ ID NO: 660405 - DNA, 181 bp, Homo sapiens
gcatctcaggccgatccctcttgccctgcgccaagatcctcatggacggtgcccactacctcttattgggtacctgtttagccgccatctctgtcagggttccgtatgctattatgtttgatctgcgagctccttgcccaatggtcttggtcctcctacaatcaacagtgtacgtccgccg

SEQ ID NO: 660406 - DNA, 143 bp, Homo sapiens
cagatacgactcgagctcggtaccatctgaaatggtaggctcttctaatttcgagtccaaatccataaggccaaaggttatcccaaagaccaccacacacacactctctacacaccgtccttctatgtctggatgcatggaac

SEQ ID NO: 660407 - DNA, 311 bp, Homo sapiens
gctatcgggcccataccccgaaaatgttggttatacccttcccgtactaattaatcccctggcccaacccgtcatctactctaccatctttgcaggcacactcatcacagcgctaggctcgcactgattttttaacctaagtaggcctggaattaaccatgctagctttaattccagtctctaaccaaaaaatataaaccctcgttcacacagagggctgccatcagtgtattttcccatcagcgcagcgcagcccagcatacataattccttcctaatatgctactcctctacaacaactactactctcc

SEQ ID NO: 660408 - DNA, 241 bp, Homo sapiens
ggcagggcatgaggccaccaatggttgtatcaactataaaaagctcgtccgcatggggttgaaagggtgaggaccttcccagtctccccaaaggccgggcctttccctgggtgaattttgtatttagcctaaagtttccctaggctttcttgtcccaacaactttcccattttgtcttttttggaaaatgtttgccgtcagcattccccaaataaacttgctttccggccaaaaaaaaaaa

SEQ ID NO: 660409 - DNA, 155 bp, Homo sapiens
  misc_feature (126)..(126): n is a, c, g, or t
cgactgactggggaggaccggggtgggtttggtatgttcaaactgtcatttatcattttcacgtttgttcagcatcatgggcgcagtcatgtgtgcatctgcagtgtggcatgtagcattcaggcngatagtgctagcacagtcagcagtgttca

SEQ ID NO: 660410 - DNA, 144 bp, Homo sapiens
tatggagagatggagcagcaatgtaagacctggggaaaggggactccaggcccacgaacagcaaagaaacaacctctggggtggtggacagcatttgaagaacaacaacgacaaaaaaccccaccctgactggagcccagttgg

SEQ ID NO: 660411 - DNA, 735 bp, Homo sapiens
gttaagagctgccgaaatgcacagaggtgaaaatgacaaaccaaatggaatttctcttcagagttcagaatttctcagatactaaggaggaagaaaggatccactacttcttgttcttatgaatgactctagaaaaatcagaatcaagttgtgggtggaaaaatcaacgtggcctttgagttcagttgttataaaccattgtgactattgttggtcaaagtattggtacttatattgttagtaattgcatcataattacattaccagtgttggaaaaactaatgaagaaacactgtaattgctactcagcaatgttgactaaacaggtgtttgcggtataaggatgtctgtttaagttactccttttacctatcaatatactggtaatggttgtatgtgtgatgctattggccaggaatatgaagtatctgtttttggaattcactttattttaacacgataagcgcttgactgggcacgggtgccttcattgccttgtaattccttagcaacctttggagggctgagggcaggtggatccaccttaggttcaggagtttccaacaaaaaccaagccttgacccaaactattggttgaaaccccaatttcttattagaaattaccaaaaattcagccgggtcctcattggccaggccacctggttaattccatttctaattgaggccggaagaatggtttgcccaaggaaggcaagaggttgcatgaggccaaga

SEQ ID NO: 660412 - DNA, 4446 bp, Homo sapiens
  misc_feature (27)..(27): n is a, c, g, or t
  misc_feature (30)..(30): n is a, c, g, or t
gcgtagctgacgtcatcgccgtgcgcngcnacgtctgctcagctccgcggtaatggaggctagggatgggtgctgaagtatcaggctctggctctagctttagctctggcactggaactgcgtcggagtctgggtctgagtctggcagcccgaagcctggacaccttttcttgattctctaggcgggggctgcctgcgtccaagcagctggtttgcagcgttccaacgctgggagggagttcccttacctggggtccagtctgtaaagttgtcgccgctttctagggaccccgccccaccggctgggactcttccatgcagttgaaactggttgacaaccattaacctgggttgcaactacaggtggcactggaagcagactggttcctggacatgcccggtggaaggaggggccctagtcggcaacagctaagccgttcagctttaccttctttgcagactttggttggtggaggctgtggcaatggaacaggcttgagaaacaggaatggtagtgctattggccttccagtcccacctatcacagccttaatcaccccaggtcctgttcgtcattgccaaattcctgacttgcctgtggatgggagcctactctttgaattcctttttttcatctacctgttggttgctcttttcattcagtacatcaacatttataaaacagtgtggtggtatccttacaatcatcctgcttcttgtacatcactgaattttcatctcattgattatcatctggcagcattcatcacagtgatgcttgcgaggaggcttgtatgggctctcatctcagaggtctgtgtgtgtaagctctgattttcaggaaccctatttctggaagcagagtaactggaaatactaagtcaagatctgaaaaccatttgaagttaaccaaaaagcacaggctactaaggcaggtgcagcatcaatgattcactacatggttctgatatcagctcgcttggtactactcactttgtgtggatgggtactttgttggaccctcgtcaatctctttcgaagccattcagtcctcaatctccttttccttggctacccgtttggtgtttatgttcctctttgctgttttcatcaagatagtagagcacatcttcttctcacagactacaactatgtggttcagcacgaggcagtagaggaaagtgcctcgactgtgggaggcttggccaaatccaaagactttctctccttgttgctggagtcgctaaaagaacagtttaataatgccacacccatccccacccacagttgtcccctatctccagacctcattcgcaatgaagtagaatgtctgaaagcagatttcaaccacagaatcaaggaggttctcttcaactccctcttcagtgcctactatgttgcatttctccccctgtgttttgtgaagagtacccagtactatgacatgcgctggtcatgtgagcacctcattatggtgtggatcaatgcttttgtcatgctcaccacgcaactgttgccatccaaatactgtgatttgctacataaatcagctgctcacctgggcaagtggcagaagttggaacatgggtcctacagcaatgctccacagcacatttggtcagaaaatacaatatggcctcaaggggtgctggtgcggcacagcagatgtttatatagagccatggggccttacaacgtggcagtgccttcagatgtatctcatgcccgcttttatttcttatttcatcgaccattaaggctgttaaatctgctcatccttattgagggcagtgtcgtcttctatcagctctattccttgctgcggtcggagaagtggaaccacacactttccatggctctcatcctcttctgcaactactatgttttatttaaacttctccgggacagaatagtattaggcagggcatactcctacccactcaacagttatgaactcaaggcaaactaagctgcctctcaacaatgagggagaactcagataaaaatattttcatacgttctatttttttcttgtgatttttataaatatttaagatattttatattttgtatactattatgttttgaaagtcgggaagagtaagggatattaaatgtatccgtaaacaaggtgatgtgatctttcatgtgttagtatattcgaataatatacatatgagaggtatgcctgtccagtaaagagattgatttgtttgtatggctctggaataactcattcgtttatgaacacatctcatgtattacttgacacagtacctttggtatgtctgcttttctttcaatcctcattatctttagccctcagctggccagtacttattgctaaagaaagggagatcaatggagttgcctaccagcacccattctcttttagttcagctggctaatagtattggaatacattgggaaaagagtgggttaaagtcctaggtggggttctctttgttgcctaccaggagaaagcagtaggcttcctttctaagatacggactcagctggtctattttaccctgtgacatttaaatatacttttgaataagctactatcctgaggctgagggttttgctgccacttttcctgtgtttccacttctgcttccaaagattttcctcttagttgtttgaaataatactttgccagacaggaagtctttagactgcccacattcatgaagaagatgatgtgtggctggatcagtaggagaagctgagtgcaaatgccatgtgggctagagtatgggaaggttgaaaattccaagtaactgggagagtgggcaagtcctcagctgaacaatcttggatgtagtctagcagcaacccacctacaatggcgttatgtttggagttatgaggggaagtgaaagataagaattacctacagctttgtactcagataatttatatccaaaatttgtgttttaaatttcatactccagaactttcatgtttatgagtattagccttttaagttatgggaggtgatatacttagtccattgatgttgtcacttgtcatctaaacttatgagaccttgtcttagagaatctaaaatatattgtcatatgttttctgtgctgagtttggtttgttacactgtgaagcttttggtgaaacaaaataagacttatgaagtaaaaagaccaatcatgtcgttgacaagctggctctgaaaataattcttgcagaagagttcctgaaaggcttcaccaaggggaagtattgtgaggagtgtttgtaaaaccaaggtacccaatatcagttttatgtttaaatcaataattgtttctttaaatattttgatgtgtatactttttttttaagttaacattatttggcattcagtctgagtctgttcaaccattcaacaaatatatattaaccagtaggcactatattaggccctggggatatagcagtgaatgagaaatgcaaaggtcctacttgcacagagcttacaatatgcgtgggggtgggggagttaggtggtgcagaaaatacagcaaataaatttatgtgtaatataacattccctggtagtagtgataagtgtagcaaagggaaatcaggacaaggaaatagtggtaagaatagcactgctagaaggcatctttgaggagatgatttttaagcaaagaaaaagcaagactgaatcatataaatagctttggggagaattccatgttacagtagcagaaagggcagtgccctgaggtggggacaagttggtatattggaagaatagcaagaaaatatattaggttagttgctttttaaagtagttcagcctaaatatagtggttcttgaggtaggggtgggaagggtagggaatctgccatctttctattctttctgtaggatcttgaaaatatgcttctcttggcagcaacattttcatgagattactcagcagttgagagcaaaatgggtggcatgggcacagagatatctcatcaaaattgccccaacttggctccagcttgggaaagtaacccagaaaaccctgattagagataacagaccagtcttatgaactaatatgatgccccttctggcttgatctgtcttggtcctatcctaagggaatagcacagaaccagatgctggcttggctaaataagtaagtggatataagaaataaataaaaattaattttggctaatggaattgcaaagttcctcctaccctcacctccagatatggcagcatacggggcataagaccgtttagttcaacgtgttctacacattccagctgttttttgtttgtttgttttgttgttttgtttttgtaggggccacgttcatggaagagagaaaaattactagttacccggatatcctattatagttcatgtaacagaagggacactatatttgctcactgatagtagaaaaatgtgtaatcattaaagaatgacctttttt

SEQ ID NO: 660413 - DNA, 221 bp, Homo sapiens
gtattcatcttgcaggttgctcttcctccacatacgagtggggtctcgaatgaggacgggggtcggaaatcctccaggatcttaggaaattccactaccgcttctcctgctcaatggtctctttggtcggcaggatgttcttctcgctgcgtctccgtttttcttcagcgttggcctatatcgaagcgtgtcgatatcccccgatgtcgtggtttgtctgc

SEQ ID NO: 660414 - DNA, 4337 bp, Homo sapiens
  misc_feature (27)..(27): n is a, c, g, or t
  misc_feature (30)..(30): n is a, c, g, or t
gcgtagctgacgtcatcgccgtgcgcngcnacgtctgctcagctccgcggtaatggaggctagggatgggtgctgaagtatcaggctctggctctagctttagctctggcactggaactgcgtcggagtctgggtctgagtctggcagcccgaagcctggacaccttttcttgattctctaggcgggggctgcctgcgtccaagcagctggtttgcagcgttccaacgctgggagggagttcccttacctggggtccagtctgtaaagttgtcgccgctttctagggaccccgccccaccggctgggactcttccatgcagttgaaactggttgacaaccattaacctgggttgcaactacaggtggcactggaagcagactggttcctggacatgcccggtggaaggaggggccctagtcggcaacagctaagccgttcagctttaccttctttgcagactttggttggtggaggctgtggcaatggaacaggcttgagaaacaggaatggtagtgctattggccttccagtcccacctatcacagccttaatcaccccaggtcctgttcgtcattgccaaattcctgacttgcctgtggatgggagcctactctttgaattcctttttttcatctacctgttggttgctcttttcattcagtacatcaacatttataaaacagtgtggtggtatccttacaatcatcctgcttcttgtacatcactgaattttcatctcattgattatcatctggcagcattcatcacagtgatgcttgcgaggaggcttgtatgggctctcatctcagaggctactaaggcaggtgcagcatcaatgattcactacatggttctgatatcagctcgcttggtactactcactttgtgtggatgggtactttgttggaccctcgtcaatctctttcgaagccattcagtcctcaatctccttttccttggctacccgtttggtgtttatgttcctctttgctgttttcatcaagatagtagagcacatcttcttctcacagactacaactatgtggttcagcacgaggcagtagaggaaagtgcctcgactgtgggaggcttggccaaatccaaagactttctctccttgttgctggagtcgctaaaagaacagtttaataatgccacacccatccccacccacagttgtcccctatctccagacctcattcgcaatgaagtagaatgtctgaaagcagatttcaaccacagaatcaaggaggttctcttcaactccctcttcagtgcctactatgttgcatttctccccctgtgttttgtgaagagtacccagtactatgacatgcgctggtcatgtgagcacctcattatggtgtggatcaatgcttttgtcatgctcaccacgcaactgttgccatccaaatactgtgatttgctacataaatcagctgctcacctgggcaagtggcagaagttggaacatgggtcctacagcaatgctccacagcacatttggtcagaaaatacaatatggcctcaaggggtgctggtgcggcacagcagatgtttatatagagccatggggccttacaacgtggcagtgccttcagatgtatctcatgcccgcttttatttcttatttcatcgaccattaaggctgttaaatctgctcatccttattgagggcagtgtcgtcttctatcagctctattccttgctgcggtcggagaagtggaaccacacactttccatggctctcatcctcttctgcaactactatgttttatttaaacttctccgggacagaatagtattaggcagggcatactcctacccactcaacagttatgaactcaaggcaaactaagctgcctctcaacaatgagggagaactcagataaaaatattttcatacgttctatttttttcttgtgatttttataaatatttaagatattttatattttgtatactattatgttttgaaagtcgggaagagtaagggatattaaatgtatccgtaaacaaggtgatgtgatctttcatgtgttagtatattcgaataatatacatatgagaggtatgcctgtccagtaaagagattgatttgtttgtatggctctggaataactcattcgtttatgaacacatctcatgtattacttgacacagtacctttggtatgtctgcttttctttcaatcctcattatctttagccctcagctggccagtacttattgctaaagaaagggagatcaatggagttgcctaccagcacccattctcttttagttcagctggctaatagtattggaatacattgggaaaagagtgggttaaagtcctaggtggggttctctttgttgcctaccaggagaaagcagtaggcttcctttctaagatacggactcagctggtctattttaccctgtgacatttaaatatacttttgaataagctactatcctgaggctgagggttttgctgccacttttcctgtgtttccacttctgcttccaaagattttcctcttagttgtttgaaataatactttgccagacaggaagtctttagactgcccacattcatgaagaagatgatgtgtggctggatcagtaggagaagctgagtgcaaatgccatgtgggctagagtatgggaaggttgaaaattccaagtaactgggagagtgggcaagtcctcagctgaacaatcttggatgtagtctagcagcaacccacctacaatggcgttatgtttggagttatgaggggaagtgaaagataagaattacctacagctttgtactcagataatttatatccaaaatttgtgttttaaatttcatactccagaactttcatgtttatgagtattagccttttaagttatgggaggtgatatacttagtccattgatgttgtcacttgtcatctaaacttatgagaccttgtcttagagaatctaaaatatattgtcatatgttttctgtgctgagtttggtttgttacactgtgaagcttttggtgaaacaaaataagacttatgaagtaaaaagaccaatcatgtcgttgacaagctggctctgaaaataattcttgcagaagagttcctgaaaggcttcaccaaggggaagtattgtgaggagtgtttgtaaaaccaaggtacccaatatcagttttatgtttaaatcaataattgtttctttaaatattttgatgtgtatactttttttttaagttaacattatttggcattcagtctgagtctgttcaaccattcaacaaatatatattaaccagtaggcactatattaggccctggggatatagcagtgaatgagaaatgcaaaggtcctacttgcacagagcttacaatatgcgtgggggtgggggagttaggtggtgcagaaaatacagcaaataaatttatgtgtaatataacattccctggtagtagtgataagtgtagcaaagggaaatcaggacaaggaaatagtggtaagaatagcactgctagaaggcatctttgaggagatgatttttaagcaaagaaaaagcaagactgaatcatataaatagctttggggagaattccatgttacagtagcagaaagggcagtgccctgaggtggggacaagttggtatattggaagaatagcaagaaaatatattaggttagttgctttttaaagtagttcagcctaaatatagtggttcttgaggtaggggtgggaagggtagggaatctgccatctttctattctttctgtaggatcttgaaaatatgcttctcttggcagcaacattttcatgagattactcagcagttgagagcaaaatgggtggcatgggcacagagatatctcatcaaaattgccccaacttggctccagcttgggaaagtaacccagaaaaccctgattagagataacagaccagtcttatgaactaatatgatgccccttctggcttgatctgtcttggtcctatcctaagggaatagcacagaaccagatgctggcttggctaaataagtaagtggatataagaaataaataaaaattaattttggctaatggaattgcaaagttcctcctaccctcacctccagatatggcagcatacggggcataagaccgtttagttcaacgtgttctacacattccagctgttttttgtttgtttgttttgttgttttgtttttgtaggggccacgttcatggaagagagaaaaattactagttacccggatatcctattatagttcatgtaacagaagggacactatatttgctcactgatagtagaaaaatgtgtaatcattaaagaatgacctttttt

SEQ ID NO: 660415 - DNA, 4693 bp, Homo sapiens
  misc_feature (27)..(27): n is a, c, g, or t
  misc_feature (30)..(30): n is a, c, g, or t
gcgtagctgacgtcatcgccgtgcgcngcnacgtctgctcagctccgcggtaatggaggctagggatgggtgctgaagtatcaggctctggctctagctttagctctggcactggaactgcgtcggagtctgggtctgagtctggcagcccgaagcctggacaccttttcttgattctctaggcgggggctgcctgcgtccaagcagctggtttgcagcgttccaacgctgggagggagttcccttacctggggtccagtctgtaaagttgtcgccgctttctagggaccccgccccaccggctgggactcttccatgcagttgaaactggttgacaaccattaacctgggttgcaactacaggtggcactggaagcagactggttcctggacatgcccggtggaaggaggggccctagtcggcaacagctaagccgttcagctttaccttctttgcagactttggttggtggaggctgtggcaatggaacaggcttgagaaacaggaatggtagtgctattggccttccagtcccacctatcacagccttaatcaccccaggtcctgttcgtcattgccaaattcctgacttgcctgtggatgggagcctactctttgaattcctttttttcatctacctgttggttgctcttttcattcagtacatcaacatttataaaacagtgtggtggtatccttacaatcatcctgcttcttgtacatcactgaattttcatctcattgattatcatctggcagcattcatcacagtgatgcttgcgaggaggcttgtatgggctctcatctcagaggctactaaggcaggtgcagcatcaatgattcactacatggttctgatatcagctcgcttggtactactcactttgtgtggatgggtactttgttggaccctcgtcaatctctttcgaagccattcagtcctcaatctccttttccttggctacccgtttggtgtttatgttcctctttgctgttttcatcaagatagtagagcacatcttcttctcacagactacaactatgtggttcagcacgaggcagtagaggaaagtgcctcgactgtgggaggcttggccaaatccaaagactttctctccttgttgctggagtcgctaaaagaacagtttaataatgccacacccatccccacccacagttgtcccctatctccagacctcattcgcaatgaagtagaatgtctgaaagcagatttcaaccacagaatcaaggaggttctcttcaactccctcttcagtgcctactatgttgcatttctccccctgtgttttgtgaagagtacccagtactatgacatgcgctggtcatgtgagcacctcattatggtgtggatcaatgcttttgtcatgctcaccacgcaactgttgccatccaaatactgtgatttgctacataaatcagctgctcacctgggcaagtggcagaagttggaacatgggtcctacagcaatgctccacagcacatttggtcagaaaatacaatatggcctcaaggggtgctggtgcggcacagcagatgtttatatagagccatggggccttacaacgtggcagtgccttcagatgtatctcatgcccgcttttatttcttatttcatcgaccattaaggctgttaaatctgctcatccttattgagggcagtgtcgtcttctatcagctctattccttgctgcggtcggagaagtggaaccacacactttccatggctctcatcctcttctgcaactactatgttttatttaaacttctccgggacagaatagtattaggcagggcatactcctacccactcaacagttatgaactcaaggcaaactaagctgcctctcaacaatgagggagaactcagataaaaatattttcatacgttctatttttttcttgtgatttttataaatatttaagatattttatattttgtatactattatgttttgaaagtcgggaagagtaagggatattaaatgtatccgtaaacaaggtgatgtgatctttcatgtgttagtatattcgaataatatacatatgagaggtatgcctgtccagtaaagagattgatttgtttgtatggctctggaataactcattcgtttatgaacacatctcatgtattacttgacacagtacctttggtatgtctgcttttctttcaatcctcattatctttagccctcagctggccagtacttattgctaaagaaagggagatcaatggagttgcctaccagcacccattctcttttagttcagctggctaatagtattggaatacattgggaaaagagtgggttaaagtcctaggtggggttctctttgttgcctaccaggagaaagcagtaggcttcctttctaagatacggactcagctggtctattttaccctgtgacatttaaatatacttttgaataagctactatcctgaggctgagggttttgctgccacttttcctgtgtttccacttctgcttccaaagattttcctcttagttgtttgaaataatactttgccagacaggaagtctttagactgcccacattcatgaagaagatgatgtgtggctggatcagtaggagaagctgagtgcaaatgccatgtgggctagagtatgggaaggttgaaaattccaagtaactgggagagtgggcaagtcctcagctgaacaatcttggatgtagtctagcagcaacccacctacaatggcgttatgtttggagttatgaggggaagtgaaagataagaattacctacagctttgtactcagataatttatatccaaaatttgtgttttaaatttcatactccagaactttcatgtttatgagtattagccttttaagttatgggaggtgatatacttagtccattgatgttgtcacttgtcatctaaacttatgagaccttgtcttagagaatctaaaatatattgtcatatgttttctgtgctgagtttggtttgttacactgtgaagcttttggtgaaacaaaataagacttatgaagtaaaaagaccaatcatgtcgttgacaagctggctctgaaaataattcttgcagaagagttcctgaaaggcttcaccaaggggaagtattgtgaggagtgtttgtaaaaccaaggtacccaatatcagttttatgtttaaatcaataattgtttctttaaatattttgatgtgtatactttttttttaagttaacattatttggcattcagtctgagtctgttcaaccattcaacaaatatatattaaccagtaggcactatattaggccctggggatatagcagtgaatgagaaatgcaaaggtcctacttgcacagagcttacaatatgcgtgggggtgggggagttaggtggtgcagaaaatacagcaaataaatttatgtgtaatataacattccctggtagtagtgataagtgtagcaaagggaaatcaggacaaggaaatagtggtaagaatagcactgctagaaggcatctttgaggagatgatttttaagcaaagaaaaagcaagactgaatcatataaatagctttggggagaattccatgttacagtagcagaaagggcagtgccctgaggtggggacaagttggtatattggaagaatagcaagaaaatatattaggttagttgctttttaaagtagttcagcctaaatatagtggttcttgaggtaggggtgggaagggtagggaatctgccatctttctattctttctgtaggatcttgaaaatatgcttctcttggcagcaacattttcatgagattactcagcagttgagagcaaaatgggtggcatgggcacagagatatctcatcaaaattgccccaacttggctccagcttgggaaagtaacccagaaaaccctgattagagataacagaccagtcttatgaactaatatgatgccccttctggcttgatctgtcttggtcctatcctaagggaatagcacagaaccagatgctggcttggctaaataagtaagtggatataagaaataaataaaaattaattttggctaatggaattgcaaagttcctcctaccctcacctccagatatggcagcatacggggcataagaccgtttagttcaacgtgttctacacattccagctgttttttgtttgtttgttttgttgttttgtttttgtaggggccacgttcatggaagagagaaaaattactagttacccggatatcctattatagttcatgtaacagaagggacactatatttgctcactgatagtagaaaaatgtgtaatcattaaagaatgaccttttttgtaattctttgttggcaagttaaaattgtttgtggaaagcatggtatagcaaaagttcagttgggtgaactgggatactggaaaaggaaagaagatacttgactagtctgggtggtctaaggtgggtaaataaaggagtagaggagggtagttcacaggaatgagcatgacagaagttttcctcaatatcctgtttactctgattccatgtttatgttcctaatcctcctttccttcctgtcccaatcagtcaccagccactgccacctgttgtgccgtttctctctcttttttttaagtaattttttgatttcatattaagctagccagggatctcaatttctatcgactagggc

SEQ ID NO: 660416 - DNA, 4098 bp, Homo sapiens
  misc_feature (27)..(27): n is a, c, g, or t
  misc_feature (30)..(30): n is a, c, g, or t
gcgtagctgacgtcatcgccgtgcgcngcnacgtctgctcagctccgcggtaatggaggctagggatgggtgctgaagtatcaggctctggctctagctttagctctggcactggaactgcgtcggagtctgggtctgagtctggcagcccgaagcctggacaccttttcttgattctctaggcgggggctgcctgcgtccaagcagctggtttgcagcgttccaacgctgggagggagttcccttacctggggtccagtctgtaaagttgtcgccgctttctagggaccccgccccaccggctgggactcttccatgcagttgaaactggttgacaaccattaacctgggttgcaactacaggtggcactggaagcagactggttcctggacatgcccggtggaaggaggggccctagtcggcaacagctaagccgttcagctttaccttctttgcagactttggttggtggaggctgtggcaatggaacaggcttgagaaacaggaatggtagtgctattggccttccagtcccacctatcacagccttaatcaccccaggtcctgttcgtcattgccaaattcctgacttgcctgtggatgggagcctactctttgaattcctttttttcatctacctgttggttgctcttttcattcagtacatcaacatttataaaacagtgtggtggtatccttacaatcatcctgcttcttgtacatcactggtttggtgtttatgttcctctttgctgttttcatcaagatagtagagcacatcttcttctcacagactacaactatgtggttcagcacgaggcagtagaggaaagtgcctcgactgtgggaggcttggccaaatccaaagactttctctccttgttgctggagtcgctaaaagaacagtttaataatgccacacccatccccacccacagttgtcccctatctccagacctcattcgcaatgaagtagaatgtctgaaagcagatttcaaccacagaatcaaggaggttctcttcaactccctcttcagtgcctactatgttgcatttctccccctgtgttttgtgaagagtacccagtactatgacatgcgctggtcatgtgagcacctcattatggtgtggatcaatgcttttgtcatgctcaccacgcaactgttgccatccaaatactgtgatttgctacataaatcagctgctcacctgggcaagtggcagaagttggaacatgggtcctacagcaatgctccacagcacatttggtcagaaaatacaatatggcctcaaggggtgctggtgcggcacagcagatgtttatatagagccatggggccttacaacgtggcagtgccttcagatgtatctcatgcccgcttttatttcttatttcatcgaccattaaggctgttaaatctgctcatccttattgagggcagtgtcgtcttctatcagctctattccttgctgcggtcggagaagtggaaccacacactttccatggctctcatcctcttctgcaactactatgttttatttaaacttctccgggacagaatagtattaggcagggcatactcctacccactcaacagttatgaactcaaggcaaactaagctgcctctcaacaatgagggagaactcagataaaaatattttcatacgttctatttttttcttgtgatttttataaatatttaagatattttatattttgtatactattatgttttgaaagtcgggaagagtaagggatattaaatgtatccgtaaacaaggtgatgtgatctttcatgtgttagtatattcgaataatatacatatgagaggtatgcctgtccagtaaagagattgatttgtttgtatggctctggaataactcattcgtttatgaacacatctcatgtattacttgacacagtacctttggtatgtctgcttttctttcaatcctcattatctttagccctcagctggccagtacttattgctaaagaaagggagatcaatggagttgcctaccagcacccattctcttttagttcagctggctaatagtattggaatacattgggaaaagagtgggttaaagtcctaggtggggttctctttgttgcctaccaggagaaagcagtaggcttcctttctaagatacggactcagctggtctattttaccctgtgacatttaaatatacttttgaataagctactatcctgaggctgagggttttgctgccacttttcctgtgtttccacttctgcttccaaagattttcctcttagttgtttgaaataatactttgccagacaggaagtctttagactgcccacattcatgaagaagatgatgtgtggctggatcagtaggagaagctgagtgcaaatgccatgtgggctagagtatgggaaggttgaaaattccaagtaactgggagagtgggcaagtcctcagctgaacaatcttggatgtagtctagcagcaacccacctacaatggcgttatgtttggagttatgaggggaagtgaaagataagaattacctacagctttgtactcagataatttatatccaaaatttgtgttttaaatttcatactccagaactttcatgtttatgagtattagccttttaagttatgggaggtgatatacttagtccattgatgttgtcacttgtcatctaaacttatgagaccttgtcttagagaatctaaaatatattgtcatatgttttctgtgctgagtttggtttgttacactgtgaagcttttggtgaaacaaaataagacttatgaagtaaaaagaccaatcatgtcgttgacaagctggctctgaaaataattcttgcagaagagttcctgaaaggcttcaccaaggggaagtattgtgaggagtgtttgtaaaaccaaggtacccaatatcagttttatgtttaaatcaataattgtttctttaaatattttgatgtgtatactttttttttaagttaacattatttggcattcagtctgagtctgttcaaccattcaacaaatatatattaaccagtaggcactatattaggccctggggatatagcagtgaatgagaaatgcaaaggtcctacttgcacagagcttacaatatgcgtgggggtgggggagttaggtggtgcagaaaatacagcaaataaatttatgtgtaatataacattccctggtagtagtgataagtgtagcaaagggaaatcaggacaaggaaatagtggtaagaatagcactgctagaaggcatctttgaggagatgatttttaagcaaagaaaaagcaagactgaatcatataaatagctttggggagaattccatgttacagtagcagaaagggcagtgccctgaggtggggacaagttggtatattggaagaatagcaagaaaatatattaggttagttgctttttaaagtagttcagcctaaatatagtggttcttgaggtaggggtgggaagggtagggaatctgccatctttctattctttctgtaggatcttgaaaatatgcttctcttggcagcaacattttcatgagattactcagcagttgagagcaaaatgggtggcatgggcacagagatatctcatcaaaattgccccaacttggctccagcttgggaaagtaacccagaaaaccctgattagagataacagaccagtcttatgaactaatatgatgccccttctggcttgatctgtcttggtcctatcctaagggaatagcacagaaccagatgctggcttggctaaataagtaagtggatataagaaataaataaaaattaattttggctaatggaattgcaaagttcctcctaccctcacctccagatatggcagcatacggggcataagaccgtttagttcaacgtgttctacacattccagctgttttttgtttgtttgttttgttgttttgtttttgtaggggccacgttcatggaagagagaaaaattactagttacccggatatcctattatagttcatgtaacagaagggacactatatttgctcactgatagtagaaaaatgtgtaatcattaaagaatgacctttttt

SEQ ID NO: 660417 - DNA, 555 bp, Homo sapiens
  misc_feature (1)..(1): n is a, c, g, or t
  misc_feature (46)..(47): n is a, c, g, or t
  misc_feature (68)..(68): n is a, c, g, or t
  misc_feature (71)..(72): n is a, c, g, or t
  misc_feature (75)..(77): n is a, c, g, or t
  misc_feature (82)..(82): n is a, c, g, or t
  misc_feature (84)..(84): n is a, c, g, or t
  misc_feature (97)..(97): n is a, c, g, or t
  misc_feature (100)..(100): n is a, c, g, or t
  misc_feature (102)..(103): n is a, c, g, or t
  misc_feature (105)..(105): n is a, c, g, or t
  misc_feature (107)..(107): n is a, c, g, or t
  misc_feature (110)..(111): n is a, c, g, or t
  misc_feature (113)..(113): n is a, c, g, or t
  misc_feature (116)..(117): n is a, c, g, or t
  misc_feature (120)..(120): n is a, c, g, or t
  misc_feature (123)..(123): n is a, c, g, or t
  misc_feature (126)..(126): n is a, c, g, or t
  misc_feature (137)..(138): n is a, c, g, or t
  misc_feature (147)..(147): n is a, c, g, or t
  misc_feature (150)..(150): n is a, c, g, or t
  misc_feature (163)..(163): n is a, c, g, or t
  misc_feature (172)..(172): n is a, c, g, or t
  misc_feature (174)..(174): n is a, c, g, or t
  misc_feature (177)..(177): n is a, c, g, or t
  misc_feature (184)..(184): n is a, c, g, or t
  misc_feature (187)..(187): n is a, c, g, or t
  misc_feature (191)..(192): n is a, c, g, or t
  misc_feature (195)..(195): n is a, c, g, or t
  misc_feature (200)..(200): n is a, c, g, or t
  misc_feature (202)..(202): n is a, c, g, or t
  misc_feature (205)..(208): n is a, c, g, or t
  misc_feature (210)..(210): n is a, c, g, or t
  misc_feature (212)..(213): n is a, c, g, or t
  misc_feature (216)..(216): n is a, c, g, or t
  misc_feature (221)..(221): n is a, c, g, or t
  misc_feature (223)..(224): n is a, c, g, or t
  misc_feature (227)..(227): n is a, c, g, or t
  misc_feature (231)..(231): n is a, c, g, or t
  misc_feature (248)..(248): n is a, c, g, or t
  misc_feature (250)..(251): n is a, c, g, or t
  misc_feature (255)..(256): n is a, c, g, or t
  misc_feature (258)..(260): n is a, c, g, or t
  misc_feature (276)..(276): n is a, c, g, or t
  misc_feature (279)..(279): n is a, c, g, or t
  misc_feature (303)..(303): n is a, c, g, or t
  misc_feature (308)..(309): n is a, c, g, or t
  misc_feature (312)..(312): n is a, c, g, or t
  misc_feature (319)..(319): n is a, c, g, or t
  misc_feature (323)..(323): n is a, c, g, or t
  misc_feature (328)..(328): n is a, c, g, or t
  misc_feature (331)..(332): n is a, c, g, or t
  misc_feature (334)..(335): n is a, c, g, or t
  misc_feature (339)..(339): n is a, c, g, or t
  misc_feature (344)..(344): n is a, c, g, or t
  misc_feature (347)..(348): n is a, c, g, or t
  misc_feature (351)..(351): n is a, c, g, or t
  misc_feature (357)..(357): n is a, c, g, or t
  misc_feature (365)..(365): n is a, c, g, or t
  misc_feature (367)..(368): n is a, c, g, or t
  misc_feature (371)..(372): n is a, c, g, or t
  misc_feature (375)..(376): n is a, c, g, or t
  misc_feature (382)..(382): n is a, c, g, or t
  misc_feature (389)..(390): n is a, c, g, or t
  misc_feature (393)..(393): n is a, c, g, or t
  misc_feature (395)..(395): n is a, c, g, or t
  misc_feature (397)..(397): n is a, c, g, or t
  misc_feature (401)..(401): n is a, c, g, or t
  misc_feature (406)..(408): n is a, c, g, or t
  misc_feature (410)..(410): n is a, c, g, or t
  misc_feature (418)..(418): n is a, c, g, or t
  misc_feature (421)..(421): n is a, c, g, or t
  misc_feature (423)..(423): n is a, c, g, or t
  misc_feature (435)..(435): n is a, c, g, or t
  misc_feature (438)..(440): n is a, c, g, or t
  misc_feature (443)..(444): n is a, c, g, or t
  misc_feature (464)..(464): n is a, c, g, or t
  misc_feature (474)..(474): n is a, c, g, or t
  misc_feature (488)..(488): n is a, c, g, or t
  misc_feature (492)..(492): n is a, c, g, or t
  misc_feature (497)..(498): n is a, c, g, or t
  misc_feature (504)..(504): n is a, c, g, or t
  misc_feature (510)..(511): n is a, c, g, or t
  misc_feature (524)..(524): n is a, c, g, or t
  misc_feature (527)..(527): n is a, c, g, or t
  misc_feature (531)..(535): n is a, c, g, or t
  misc_feature (543)..(543): n is a, c, g, or t
  misc_feature (546)..(547): n is a, c, g, or t
  misc_feature (554)..(554): n is a, c, g, or t
ntctttggagacgtaaacatctccgagtggcgagggtgggcggggnngggcttgggaaagggcggggnggnntgnnngaggngnggaaagaccagangangnngngnagnntnggnnggngtnatngggggcgcggnngccgcggcngcncccgcaagggggngccggcagngnggncagggcnagngagnnggngcgangnggnnnnanannggncgggncnngcnaacngcaaccagggaggcgangnngggnnannngagggaccgagaccgnggnggggacggaggggggggggcaccncgagnnggnggaaggngggnagggnccnnanngggnaagangtnnggnaacccnggggaganannagnnaannagaagnggaatcnngangngnggcngaaannngngaagaagnggnancaagagcacccngannnggnnaggcgcacagcacaagaggnggaaacatanagaagaagcaaggnaatnacagnnagaggncacaanngcccgaagccagngcnaaannnnnatgaagcnaanntccctgna

SEQ ID NO: 660418 - DNA, 4281 bp, Homo sapiens
  misc_feature (27)..(27): n is a, c, g, or t
  misc_feature (30)..(30): n is a, c, g, or t
gcgtagctgacgtcatcgccgtgcgcngcnacgtctgctcagctccgcggtaatggaggctagggatgggtgctgaagtatcaggctctggctctagctttagctctggcactggaactgcgtcggagtctgggtctgagtctggcagcccgaagcctggacaccttttcttgattctctaggcgggggctgcctgcgtccaagcagctggtttgcagcgttccaacgctgggagggagttcccttacctggggtccagtctgtaaagttgtcgccgctttctagggaccccgccccaccggctgggactcttccatgcagttgaaactggttgacaaccattaacctgggttgcaactacaggtggcactggaagcagactggttcctggacatgcccggtggaaggaggggccctagtcggcaacagctaagccgttcagctttaccttctttgcagactttggttggtggaggctgtggcaatggaacaggcttgagaaacaggtcctgttcgtcattgccaaattcctgacttgcctgtggatgggagcctactctttgaattcctttttttcatctacctgttggttgctcttttcattcagtacatcaacatttataaaacagtgtggtggtatccttacaatcatcctgcttcttgtacatcactgaattttcatctcattgattatcatctggcagcattcatcacagtgatgcttgcgaggaggcttgtatgggctctcatctcagaggctactaaggcaggtgcagcatcaatgattcactacatggttctgatatcagctcgcttggtactactcactttgtgtggatgggtactttgttggaccctcgtcaatctctttcgaagccattcagtcctcaatctccttttccttggctacccgtttggtgtttatgttcctctttgctgttttcatcaagatagtagagcacatcttcttctcacagactacaactatgtggttcagcacgaggcagtagaggaaagtgcctcgactgtgggaggcttggccaaatccaaagactttctctccttgttgctggagtcgctaaaagaacagtttaataatgccacacccatccccacccacagttgtcccctatctccagacctcattcgcaatgaagtagaatgtctgaaagcagatttcaaccacagaatcaaggaggttctcttcaactccctcttcagtgcctactatgttgcatttctccccctgtgttttgtgaagagtacccagtactatgacatgcgctggtcatgtgagcacctcattatggtgtggatcaatgcttttgtcatgctcaccacgcaactgttgccatccaaatactgtgatttgctacataaatcagctgctcacctgggcaagtggcagaagttggaacatgggtcctacagcaatgctccacagcacatttggtcagaaaatacaatatggcctcaaggggtgctggtgcggcacagcagatgtttatatagagccatggggccttacaacgtggcagtgccttcagatgtatctcatgcccgcttttatttcttatttcatcgaccattaaggctgttaaatctgctcatccttattgagggcagtgtcgtcttctatcagctctattccttgctgcggtcggagaagtggaaccacacactttccatggctctcatcctcttctgcaactactatgttttatttaaacttctccgggacagaatagtattaggcagggcatactcctacccactcaacagttatgaactcaaggcaaactaagctgcctctcaacaatgagggagaactcagataaaaatattttcatacgttctatttttttcttgtgatttttataaatatttaagatattttatattttgtatactattatgttttgaaagtcgggaagagtaagggatattaaatgtatccgtaaacaaggtgatgtgatctttcatgtgttagtatattcgaataatatacatatgagaggtatgcctgtccagtaaagagattgatttgtttgtatggctctggaataactcattcgtttatgaacacatctcatgtattacttgacacagtacctttggtatgtctgcttttctttcaatcctcattatctttagccctcagctggccagtacttattgctaaagaaagggagatcaatggagttgcctaccagcacccattctcttttagttcagctggctaatagtattggaatacattgggaaaagagtgggttaaagtcctaggtggggttctctttgttgcctaccaggagaaagcagtaggcttcctttctaagatacggactcagctggtctattttaccctgtgacatttaaatatacttttgaataagctactatcctgaggctgagggttttgctgccacttttcctgtgtttccacttctgcttccaaagattttcctcttagttgtttgaaataatactttgccagacaggaagtctttagactgcccacattcatgaagaagatgatgtgtggctggatcagtaggagaagctgagtgcaaatgccatgtgggctagagtatgggaaggttgaaaattccaagtaactgggagagtgggcaagtcctcagctgaacaatcttggatgtagtctagcagcaacccacctacaatggcgttatgtttggagttatgaggggaagtgaaagataagaattacctacagctttgtactcagataatttatatccaaaatttgtgttttaaatttcatactccagaactttcatgtttatgagtattagccttttaagttatgggaggtgatatacttagtccattgatgttgtcacttgtcatctaaacttatgagaccttgtcttagagaatctaaaatatattgtcatatgttttctgtgctgagtttggtttgttacactgtgaagcttttggtgaaacaaaataagacttatgaagtaaaaagaccaatcatgtcgttgacaagctggctctgaaaataattcttgcagaagagttcctgaaaggcttcaccaaggggaagtattgtgaggagtgtttgtaaaaccaaggtacccaatatcagttttatgtttaaatcaataattgtttctttaaatattttgatgtgtatactttttttttaagttaacattatttggcattcagtctgagtctgttcaaccattcaacaaatatatattaaccagtaggcactatattaggccctggggatatagcagtgaatgagaaatgcaaaggtcctacttgcacagagcttacaatatgcgtgggggtgggggagttaggtggtgcagaaaatacagcaaataaatttatgtgtaatataacattccctggtagtagtgataagtgtagcaaagggaaatcaggacaaggaaatagtggtaagaatagcactgctagaaggcatctttgaggagatgatttttaagcaaagaaaaagcaagactgaatcatataaatagctttggggagaattccatgttacagtagcagaaagggcagtgccctgaggtggggacaagttggtatattggaagaatagcaagaaaatatattaggttagttgctttttaaagtagttcagcctaaatatagtggttcttgaggtaggggtgggaagggtagggaatctgccatctttctattctttctgtaggatcttgaaaatatgcttctcttggcagcaacattttcatgagattactcagcagttgagagcaaaatgggtggcatgggcacagagatatctcatcaaaattgccccaacttggctccagcttgggaaagtaacccagaaaaccctgattagagataacagaccagtcttatgaactaatatgatgccccttctggcttgatctgtcttggtcctatcctaagggaatagcacagaaccagatgctggcttggctaaataagtaagtggatataagaaataaataaaaattaattttggctaatggaattgcaaagttcctcctaccctcacctccagatatggcagcatacggggcataagaccgtttagttcaacgtgttctacacattccagctgttttttgtttgtttgttttgttgttttgtttttgtaggggccacgttcatggaagagagaaaaattactagttacccggatatcctattatagttcatgtaacagaagggacactatatttgctcactgatagtagaaaaatgtgtaatcattaaagaatgacctttttt

SEQ ID NO: 660419 - DNA, 240 bp, Homo sapiens
caaacatcaaataacatcagcaggatgttgcttctgtaaaagtgaaagtgatcttaagctatattaatagatgtttgcatccagatgaaggggttgttatgtattattatgtagtattatgtccagttctggataatactttttaacagaaatattgataaaacccaagggttttggcattaatgtattggattcattaattttttaggaagaaggaggaaaagtagagttgagcaggtt

SEQ ID NO: 660420 - DNA, 530 bp, Homo sapiens
ctgctgccgtccacatacaggaaatggacgatttggacaagattgcatctcgtaatgataaaagcaggccggtgcctttattccagcgctttgaggacttgaaaagagagttatcaagtcagcgagaggaagaacgtgcgtgtggcctcaagttgaactgtcttttagatattgttgacaactgaaggtgttttagtttaacataagctgctaaatggcagttcccgtctctttatttgaaacagaatgtcttttattggctgcttaattagtcagcaggtttagttttgatgttcattattttgttttattttggattcaatgaaaatgattgtcatgcatctcatccctaaatttaaatgcatgctaagtgtgtttttcttgttcttaaacatttaatttagagtttgtgcgtttgtttgtttttcaggcgtacgtgtttctgaatattaagtgtgttttgttcattgcaaatatgattttgtatttaaaatgtatattttttggcaacgataaaggtgtttttagta

SEQ ID NO: 660421 - DNA, 4293 bp, Homo sapiens
  misc_feature (27)..(27): n is a, c, g, or t
  misc_feature (30)..(30): n is a, c, g, or t
gcgtagctgacgtcatcgccgtgcgcngcnacgtctgctcagctccgcggtaatggaggctagggatgggtgctgaagtatcaggctctggctctagctttagctctggcactggaactgcgtcggagtctgggtctgagtctggcagcccgaagcctggacaccttttcttgattctctaggcgggggctgcctgcgtccaagcagctggtttgcagcgttccaacgctgggagggagttcccttacctggggtccagtctgtaaagttgtcgccgctttctagggaccccgccccaccggctgggactcttccatgcgtggcactggaagcagactggttcctggacatgcccggtggaaggaggggccctagtcggcaacagctaagccgttcagctttaccttctttgcagactttggttggtggaggctgtggcaatggaacaggcttgagaaacaggaatggtagtgctattggccttccagtcccacctatcacagccttaatcaccccaggtcctgttcgtcattgccaaattcctgacttgcctgtggatgggagcctactctttgaattcctttttttcatctacctgttggttgctcttttcattcagtacatcaacatttataaaacagtgtggtggtatccttacaatcatcctgcttcttgtacatcactgaattttcatctcattgattatcatctggcagcattcatcacagtgatgcttgcgaggaggcttgtatgggctctcatctcagaggctactaaggcaggtgcagcatcaatgattcactacatggttctgatatcagctcgcttggtactactcactttgtgtggatgggtactttgttggaccctcgtcaatctctttcgaagccattcagtcctcaatctccttttccttggctacccgtttggtgtttatgttcctctttgctgttttcatcaagatagtagagcacatcttcttctcacagactacaactatgtggttcagcacgaggcagtagaggaaagtgcctcgactgtgggaggcttggccaaatccaaagactttctctccttgttgctggagtcgctaaaagaacagtttaataatgccacacccatccccacccacagttgtcccctatctccagacctcattcgcaatgaagtagaatgtctgaaagcagatttcaaccacagaatcaaggaggttctcttcaactccctcttcagtgcctactatgttgcatttctccccctgtgttttgtgaagagtacccagtactatgacatgcgctggtcatgtgagcacctcattatggtgtggatcaatgcttttgtcatgctcaccacgcaactgttgccatccaaatactgtgatttgctacataaatcagctgctcacctgggcaagtggcagaagttggaacatgggtcctacagcaatgctccacagcacatttggtcagaaaatacaatatggcctcaaggggtgctggtgcggcacagcagatgtttatatagagccatggggccttacaacgtggcagtgccttcagatgtatctcatgcccgcttttatttcttatttcatcgaccattaaggctgttaaatctgctcatccttattgagggcagtgtcgtcttctatcagctctattccttgctgcggtcggagaagtggaaccacacactttccatggctctcatcctcttctgcaactactatgttttatttaaacttctccgggacagaatagtattaggcagggcatactcctacccactcaacagttatgaactcaaggcaaactaagctgcctctcaacaatgagggagaactcagataaaaatattttcatacgttctatttttttcttgtgatttttataaatatttaagatattttatattttgtatactattatgttttgaaagtcgggaagagtaagggatattaaatgtatccgtaaacaaggtgatgtgatctttcatgtgttagtatattcgaataatatacatatgagaggtatgcctgtccagtaaagagattgatttgtttgtatggctctggaataactcattcgtttatgaacacatctcatgtattacttgacacagtacctttggtatgtctgcttttctttcaatcctcattatctttagccctcagctggccagtacttattgctaaagaaagggagatcaatggagttgcctaccagcacccattctcttttagttcagctggctaatagtattggaatacattgggaaaagagtgggttaaagtcctaggtggggttctctttgttgcctaccaggagaaagcagtaggcttcctttctaagatacggactcagctggtctattttaccctgtgacatttaaatatacttttgaataagctactatcctgaggctgagggttttgctgccacttttcctgtgtttccacttctgcttccaaagattttcctcttagttgtttgaaataatactttgccagacaggaagtctttagactgcccacattcatgaagaagatgatgtgtggctggatcagtaggagaagctgagtgcaaatgccatgtgggctagagtatgggaaggttgaaaattccaagtaactgggagagtgggcaagtcctcagctgaacaatcttggatgtagtctagcagcaacccacctacaatggcgttatgtttggagttatgaggggaagtgaaagataagaattacctacagctttgtactcagataatttatatccaaaatttgtgttttaaatttcatactccagaactttcatgtttatgagtattagccttttaagttatgggaggtgatatacttagtccattgatgttgtcacttgtcatctaaacttatgagaccttgtcttagagaatctaaaatatattgtcatatgttttctgtgctgagtttggtttgttacactgtgaagcttttggtgaaacaaaataagacttatgaagtaaaaagaccaatcatgtcgttgacaagctggctctgaaaataattcttgcagaagagttcctgaaaggcttcaccaaggggaagtattgtgaggagtgtttgtaaaaccaaggtacccaatatcagttttatgtttaaatcaataattgtttctttaaatattttgatgtgtatactttttttttaagttaacattatttggcattcagtctgagtctgttcaaccattcaacaaatatatattaaccagtaggcactatattaggccctggggatatagcagtgaatgagaaatgcaaaggtcctacttgcacagagcttacaatatgcgtgggggtgggggagttaggtggtgcagaaaatacagcaaataaatttatgtgtaatataacattccctggtagtagtgataagtgtagcaaagggaaatcaggacaaggaaatagtggtaagaatagcactgctagaaggcatctttgaggagatgatttttaagcaaagaaaaagcaagactgaatcatataaatagctttggggagaattccatgttacagtagcagaaagggcagtgccctgaggtggggacaagttggtatattggaagaatagcaagaaaatatattaggttagttgctttttaaagtagttcagcctaaatatagtggttcttgaggtaggggtgggaagggtagggaatctgccatctttctattctttctgtaggatcttgaaaatatgcttctcttggcagcaacattttcatgagattactcagcagttgagagcaaaatgggtggcatgggcacagagatatctcatcaaaattgccccaacttggctccagcttgggaaagtaacccagaaaaccctgattagagataacagaccagtcttatgaactaatatgatgccccttctggcttgatctgtcttggtcctatcctaagggaatagcacagaaccagatgctggcttggctaaataagtaagtggatataagaaataaataaaaattaattttggctaatggaattgcaaagttcctcctaccctcacctccagatatggcagcatacggggcataagaccgtttagttcaacgtgttctacacattccagctgttttttgtttgtttgttttgttgttttgtttttgtaggggccacgttcatggaagagagaaaaattactagttacccggatatcctattatagttcatgtaacagaagggacactatatttgctcactgatagtagaaaaatgtgtaatcattaaagaatgacctttttt

SEQ ID NO: 660422 - DNA, 4116 bp, Homo sapiens
  misc_feature (1)..(1): n is a, c, g, or t
naagtggggaggataaacgaatggaccagttgcctatcctccctccctggcacccctgggaaaatggtctgcagccagaaaactgaaggtcagagaggagttgaaactggttgacaaccattaacctgggttgcaactacaggtggcactggaagcagactggttcctggacatgcccggtggaaggaggggccctagtcggcaacagctaagccgttcagctttaccttctttgcagactttggttggtggaggctgtggcaatggaacaggcttgagaaacaggaatggtagtgctattggccttccagtcccacctatcacagccttaatcaccccaggtcctgttcgtcattgccaaattcctgacttgcctgtggatgggagcctactctttgaattcctttttttcatctacctgttggttgctcttttcattcagtacatcaacatttataaaacagtgtggtggtatccttacaatcatcctgcttcttgtacatcactgaattttcatctcattgattatcatctggcagcattcatcacagtgatgcttgcgaggaggcttgtatgggctctcatctcagaggctactaaggcaggtgcagcatcaatgattcactacatggttctgatatcagctcgcttggtactactcactttgtgtggatgggtactttgttggaccctcgtcaatctctttcgaagccattcagtcctcaatctccttttccttggctacccgtttggtgtttatgttcctctttgctgttttcatcaagatagtagagcacatcttcttctcacagactacaactatgtggttcagcacgaggcagtagaggaaagtgcctcgactgtgggaggcttggccaaatccaaagactttctctccttgttgctggagtcgctaaaagaacagtttaataatgccacacccatccccacccacagttgtcccctatctccagacctcattcgcaatgaagtagaatgtctgaaagcagatttcaaccacagaatcaaggaggttctcttcaactccctcttcagtgcctactatgttgcatttctccccctgtgttttgtgaagagtacccagtactatgacatgcgctggtcatgtgagcacctcattatggtgtggatcaatgcttttgtcatgctcaccacgcaactgttgccatccaaatactgtgatttgctacataaatcagctgctcacctgggcaagtggcagaagttggaacatgggtcctacagcaatgctccacagcacatttggtcagaaaatacaatatggcctcaaggggtgctggtgcggcacagcagatgtttatatagagccatggggccttacaacgtggcagtgccttcagatgtatctcatgcccgcttttatttcttatttcatcgaccattaaggctgttaaatctgctcatccttattgagggcagtgtcgtcttctatcagctctattccttgctgcggtcggagaagtggaaccacacactttccatggctctcatcctcttctgcaactactatgttttatttaaacttctccgggacagaatagtattaggcagggcatactcctacccactcaacagttatgaactcaaggcaaactaagctgcctctcaacaatgagggagaactcagataaaaatattttcatacgttctatttttttcttgtgatttttataaatatttaagatattttatattttgtatactattatgttttgaaagtcgggaagagtaagggatattaaatgtatccgtaaacaaggtgatgtgatctttcatgtgttagtatattcgaataatatacatatgagaggtatgcctgtccagtaaagagattgatttgtttgtatggctctggaataactcattcgtttatgaacacatctcatgtattacttgacacagtacctttggtatgtctgcttttctttcaatcctcattatctttagccctcagctggccagtacttattgctaaagaaagggagatcaatggagttgcctaccagcacccattctcttttagttcagctggctaatagtattggaatacattgggaaaagagtgggttaaagtcctaggtggggttctctttgttgcctaccaggagaaagcagtaggcttcctttctaagatacggactcagctggtctattttaccctgtgacatttaaatatacttttgaataagctactatcctgaggctgagggttttgctgccacttttcctgtgtttccacttctgcttccaaagattttcctcttagttgtttgaaataatactttgccagacaggaagtctttagactgcccacattcatgaagaagatgatgtgtggctggatcagtaggagaagctgagtgcaaatgccatgtgggctagagtatgggaaggttgaaaattccaagtaactgggagagtgggcaagtcctcagctgaacaatcttggatgtagtctagcagcaacccacctacaatggcgttatgtttggagttatgaggggaagtgaaagataagaattacctacagctttgtactcagataatttatatccaaaatttgtgttttaaatttcatactccagaactttcatgtttatgagtattagccttttaagttatgggaggtgatatacttagtccattgatgttgtcacttgtcatctaaacttatgagaccttgtcttagagaatctaaaatatattgtcatatgttttctgtgctgagtttggtttgttacactgtgaagcttttggtgaaacaaaataagacttatgaagtaaaaagaccaatcatgtcgttgacaagctggctctgaaaataattcttgcagaagagttcctgaaaggcttcaccaaggggaagtattgtgaggagtgtttgtaaaaccaaggtacccaatatcagttttatgtttaaatcaataattgtttctttaaatattttgatgtgtatactttttttttaagttaacattatttggcattcagtctgagtctgttcaaccattcaacaaatatatattaaccagtaggcactatattaggccctggggatatagcagtgaatgagaaatgcaaaggtcctacttgcacagagcttacaatatgcgtgggggtgggggagttaggtggtgcagaaaatacagcaaataaatttatgtgtaatataacattccctggtagtagtgataagtgtagcaaagggaaatcaggacaaggaaatagtggtaagaatagcactgctagaaggcatctttgaggagatgatttttaagcaaagaaaaagcaagactgaatcatataaatagctttggggagaattccatgttacagtagcagaaagggcagtgccctgaggtggggacaagttggtatattggaagaatagcaagaaaatatattaggttagttgctttttaaagtagttcagcctaaatatagtggttcttgaggtaggggtgggaagggtagggaatctgccatctttctattctttctgtaggatcttgaaaatatgcttctcttggcagcaacattttcatgagattactcagcagttgagagcaaaatgggtggcatgggcacagagatatctcatcaaaattgccccaacttggctccagcttgggaaagtaacccagaaaaccctgattagagataacagaccagtcttatgaactaatatgatgccccttctggcttgatctgtcttggtcctatcctaagggaatagcacagaaccagatgctggcttggctaaataagtaagtggatataagaaataaataaaaattaattttggctaatggaattgcaaagttcctcctaccctcacctccagatatggcagcatacggggcataagaccgtttagttcaacgtgttctacacattccagctgttttttgtttgtttgttttgttgttttgtttttgtaggggccacgttcatggaagagagaaaaattactagttacccggatatcctattatagttcatgtaacagaagggacactatatttgctcactgatagtagaaaaatgtgtaatcattaaagaatgacctttttt

SEQ ID NO: 660423 - DNA, 105 bp, Homo sapiens
atattatatacctacttctattatcccacttcccctatcctatataccctataattatagagacagggtctcgcactgtcatcacccaggctggagtgcagtggc

SEQ ID NO: 660424 - DNA, 821 bp, Homo sapiens
cattgctgcccaattctatggatcccacacgacaacaaggccaccccattacatggtgaggatcaatgcatcagaatgatacccttccccgtagcgctatggcgtgcccatggccgatcccggtgccacagaattacggcagcggcagtgagaccatccacctcaatcctccctcggccccgcgctagtgccctggggtagttaacactgggcccgggagctggtcagacccatggtcccatagatccctctaatcagtgctaatttcaagttccattactccctcctcagtcagcttggtacctactgctggggaacccccatgagtgagtgtgacggatccctcgcaggtaacacccagttatgcccagtcgccgcaggattctaacaagatttccagtgactaacgatactaggcgactaattgattaatcgcagatagccagcctgcgaggcaggtggctggttccagacgtatccgcgatgggtcccggctcgaacggtccgatgggcggcatgggtggcattggagccacaccagcatgaactggcatcagttagggctcaggcgacatagacggacttccaaacaaattctcctaacgaaccgtaagtggcattagcgaatcctccaggcgccccctcgagatgacggcgagctatggagggaacttcgctccactctctttcagaacgcccattattcttcccgctgacggttagtgtgtgttcccccctttttcggggagctagagagcaggcttgaggggggagatgccgggctttgcggaggggggggccttccggctggggggccccgc

SEQ ID NO: 660425 - DNA, 3597 bp, Homo sapiens
  misc_feature (41)..(41): n is a, c, g, or t
  misc_feature (68)..(68): n is a, c, g, or t
tctgtaggttcttaataatctacaatgaatgtgcactgctnttatggaaagaaattgaagagctcccnagataatgaatttactatcagcaatgtccctcttgagttatgtttactcctgcgggtcctgactattttattgacctaagttataagttatattgacgtaagttataaggtgtgattttaggtggtatctgtggtctcattttcacactttgttttacaggtttggtgtttatgttcctctttgctgttttcatcaagatagtagagcacatcttcttctcacagactacaactatgtggttcagcacgaggcagtagaggaaagtgcctcgactgtgggaggcttggccaaatccaaagactttctctccttgttgctggagtcgctaaaagaacagtttaataatgccacacccatccccacccacagttgtcccctatctccagacctcattcgcaatgaagtagaatgtctgaaagcagatttcaaccacagaatcaaggaggttctcttcaactccctcttcagtgcctactatgttgcatttctccccctgtgttttgtgaagagtacccagtactatgacatgcgctggtcatgtgagcacctcattatggtgtggatcaatgcttttgtcatgctcaccacgcaactgttgccatccaaatactgtgatttgctacataaatcagctgctcacctgggcaagtggcagaagttggaacatgggtcctacagcaatgctccacagcacatttggtcagaaaatacaatatggcctcaaggggtgctggtgcggcacagcagatgtttatatagagccatggggccttacaacgtggcagtgccttcagatgtatctcatgcccgcttttatttcttatttcatcgaccattaaggctgttaaatctgctcatccttattgagggcagtgtcgtcttctatcagctctattccttgctgcggtcggagaagtggaaccacacactttccatggctctcatcctcttctgcaactactatgttttatttaaacttctccgggacagaatagtattaggcagggcatactcctacccactcaacagttatgaactcaaggcaaactaagctgcctctcaacaatgagggagaactcagataaaaatattttcatacgttctatttttttcttgtgatttttataaatatttaagatattttatattttgtatactattatgttttgaaagtcgggaagagtaagggatattaaatgtatccgtaaacaaggtgatgtgatctttcatgtgttagtatattcgaataatatacatatgagaggtatgcctgtccagtaaagagattgatttgtttgtatggctctggaataactcattcgtttatgaacacatctcatgtattacttgacacagtacctttggtatgtctgcttttctttcaatcctcattatctttagccctcagctggccagtacttattgctaaagaaagggagatcaatggagttgcctaccagcacccattctcttttagttcagctggctaatagtattggaatacattgggaaaagagtgggttaaagtcctaggtggggttctctttgttgcctaccaggagaaagcagtaggcttcctttctaagatacggactcagctggtctattttaccctgtgacatttaaatatacttttgaataagctactatcctgaggctgagggttttgctgccacttttcctgtgtttccacttctgcttccaaagattttcctcttagttgtttgaaataatactttgccagacaggaagtctttagactgcccacattcatgaagaagatgatgtgtggctggatcagtaggagaagctgagtgcaaatgccatgtgggctagagtatgggaaggttgaaaattccaagtaactgggagagtgggcaagtcctcagctgaacaatcttggatgtagtctagcagcaacccacctacaatggcgttatgtttggagttatgaggggaagtgaaagataagaattacctacagctttgtactcagataatttatatccaaaatttgtgttttaaatttcatactccagaactttcatgtttatgagtattagccttttaagttatgggaggtgatatacttagtccattgatgttgtcacttgtcatctaaacttatgagaccttgtcttagagaatctaaaatatattgtcatatgttttctgtgctgagtttggtttgttacactgtgaagcttttggtgaaacaaaataagacttatgaagtaaaaagaccaatcatgtcgttgacaagctggctctgaaaataattcttgcagaagagttcctgaaaggcttcaccaaggggaagtattgtgaggagtgtttgtaaaaccaaggtacccaatatcagttttatgtttaaatcaataattgtttctttaaatattttgatgtgtatactttttttttaagttaacattatttggcattcagtctgagtctgttcaaccattcaacaaatatatattaaccagtaggcactatattaggccctggggatatagcagtgaatgagaaatgcaaaggtcctacttgcacagagcttacaatatgcgtgggggtgggggagttaggtggtgcagaaaatacagcaaataaatttatgtgtaatataacattccctggtagtagtgataagtgtagcaaagggaaatcaggacaaggaaatagtggtaagaatagcactgctagaaggcatctttgaggagatgatttttaagcaaagaaaaagcaagactgaatcatataaatagctttggggagaattccatgttacagtagcagaaagggcagtgccctgaggtggggacaagttggtatattggaagaatagcaagaaaatatattaggttagttgctttttaaagtagttcagcctaaatatagtggttcttgaggtaggggtgggaagggtagggaatctgccatctttctattctttctgtaggatcttgaaaatatgcttctcttggcagcaacattttcatgagattactcagcagttgagagcaaaatgggtggcatgggcacagagatatctcatcaaaattgccccaacttggctccagcttgggaaagtaacccagaaaaccctgattagagataacagaccagtcttatgaactaatatgatgccccttctggcttgatctgtcttggtcctatcctaagggaatagcacagaaccagatgctggcttggctaaataagtaagtggatataagaaataaataaaaattaattttggctaatggaattgcaaagttcctcctaccctcacctccagatatggcagcatacggggcataagaccgtttagttcaacgtgttctacacattccagctgttttttgtttgtttgttttgttgttttgtttttgtaggggccacgttcatggaagagagaaaaattactagttacccggatatcctattatagttcatgtaacagaagggacactatatttgctcactgatagtagaaaaatgtgtaatcattaaagaatgacctttttt

SEQ ID NO: 660426 - DNA, 123 bp, Homo sapiens
attcgcggccgcgtcgactgattacttatgattagaaaggctgcctgttaggatggtagttgaggtgatcactctggcttggatgtcccatactgtggtgaataagagtggggaaagtgggca

SEQ ID NO: 660427 - DNA, 698 bp, Homo sapiens
cttaagggacacaggtcaacaagcagtaggtctttggaagctcgctctctcacatggtataaggtgagggggacacatggaatgtaaacctccaaactaattatgggggaaaaaggaatgagaaaaacaaacacaagaaggcaaaaccaaaacacctggttcaattaaaaacaacaacaaagccaaacaaaaaaaacccaaaaccaaaccacacaataaatgagaaaaaaattacataaaacagatgacatgtatagaaataaaaaaatagaatggaggaactaattccaaatatataagtaatcctaagtggactaaatttgcaaagtaaaaggcaaacattacactggattaaaaaacaaatccagggaatacagtttacagctgatacattcaaaatataaaaacagataaaatataaataaaatcggtacagtggtgtctgcctgtaatcccagctagttgggaggctgaggcaggaagaccccttgagtctaggagttagagaacagcttgggcaacaaagcgagactgtctctaaaaaaatacacacacacacacacacacacacacacacacacacacacactaagagtgaatatggaaatgagccgagatcgcgccagtgcactccagcctgggcacatagcgagactctgtctcaagaaaaaaaaaacacaaaaacaaacaaaaaagag

SEQ ID NO: 660428 - DNA, 2978 bp, Homo sapiens
  misc_feature (3)..(4): n is a, c, g, or t
ttnnccatggaattactgtattttcagaattcaggcagatgaagccttgattatttaattccttccataaaaatacagctggccttgcagatgctatcttatctgtaattgccaatatgctaacattgcatttctttctcccttagttggtcagaaaatacaatatggcctcaaggggtgctggtgcggcacagcagatgtttatatagagccatggggccttacaacgtggcagtgccttcagatgtatctcatgcccgcttttatttcttatttcatcgaccattaaggctgttaaatctgctcatccttattgagggcagtgtcgtcttctatcagctctattccttgctgcggtcggagaagtggaaccacacactttccatggctctcatcctcttctgcaactactatgttttatttaaacttctccgggacagaatagtattaggcagggcatactcctacccactcaacagttatgaactcaaggcaaactaagctgcctctcaacaatgagggagaactcagataaaaatattttcatacgttctatttttttcttgtgatttttataaatatttaagatattttatattttgtatactattatgttttgaaagtcgggaagagtaagggatattaaatgtatccgtaaacaaggtgatgtgatctttcatgtgttagtatattcgaataatatacatatgagaggtatgcctgtccagtaaagagattgatttgtttgtatggctctggaataactcattcgtttatgaacacatctcatgtattacttgacacagtacctttggtatgtctgcttttctttcaatcctcattatctttagccctcagctggccagtacttattgctaaagaaagggagatcaatggagttgcctaccagcacccattctcttttagttcagctggctaatagtattggaatacattgggaaaagagtgggttaaagtcctaggtggggttctctttgttgcctaccaggagaaagcagtaggcttcctttctaagatacggactcagctggtctattttaccctgtgacatttaaatatacttttgaataagctactatcctgaggctgagggttttgctgccacttttcctgtgtttccacttctgcttccaaagattttcctcttagttgtttgaaataatactttgccagacaggaagtctttagactgcccacattcatgaagaagatgatgtgtggctggatcagtaggagaagctgagtgcaaatgccatgtgggctagagtatgggaaggttgaaaattccaagtaactgggagagtgggcaagtcctcagctgaacaatcttggatgtagtctagcagcaacccacctacaatggcgttatgtttggagttatgaggggaagtgaaagataagaattacctacagctttgtactcagataatttatatccaaaatttgtgttttaaatttcatactccagaactttcatgtttatgagtattagccttttaagttatgggaggtgatatacttagtccattgatgttgtcacttgtcatctaaacttatgagaccttgtcttagagaatctaaaatatattgtcatatgttttctgtgctgagtttggtttgttacactgtgaagcttttggtgaaacaaaataagacttatgaagtaaaaagaccaatcatgtcgttgacaagctggctctgaaaataattcttgcagaagagttcctgaaaggcttcaccaaggggaagtattgtgaggagtgtttgtaaaaccaaggtacccaatatcagttttatgtttaaatcaataattgtttctttaaatattttgatgtgtatactttttttttaagttaacattatttggcattcagtctgagtctgttcaaccattcaacaaatatatattaaccagtaggcactatattaggccctggggatatagcagtgaatgagaaatgcaaaggtcctacttgcacagagcttacaatatgcgtgggggtgggggagttaggtggtgcagaaaatacagcaaataaatttatgtgtaatataacattccctggtagtagtgataagtgtagcaaagggaaatcaggacaaggaaatagtggtaagaatagcactgctagaaggcatctttgaggagatgatttttaagcaaagaaaaagcaagactgaatcatataaatagctttggggagaattccatgttacagtagcagaaagggcagtgccctgaggtggggacaagttggtatattggaagaatagcaagaaaatatattaggttagttgctttttaaagtagttcagcctaaatatagtggttcttgaggtaggggtgggaagggtagggaatctgccatctttctattctttctgtaggatcttgaaaatatgcttctcttggcagcaacattttcatgagattactcagcagttgagagcaaaatgggtggcatgggcacagagatatctcatcaaaattgccccaacttggctccagcttgggaaagtaacccagaaaaccctgattagagataacagaccagtcttatgaactaatatgatgccccttctggcttgatctgtcttggtcctatcctaagggaatagcacagaaccagatgctggcttggctaaataagtaagtggatataagaaataaataaaaattaattttggctaatggaattgcaaagttcctcctaccctcacctccagatatggcagcatacggggcataagaccgtttagttcaacgtgttctacacattccagctgttttttgtttgtttgttttgttgttttgtttttgtaggggccacgttcatggaagagagaaaaattactagttacccggatatcctattatagttcatgtaacagaagggacactatatttgctcactgatagtagaaaaatgtgtaatcattaaagaatgacctttttt

SEQ ID NO: 660429 - DNA, 193 bp, Homo sapiens
caagctagaaaatatatatgttatgtacacacacacagacagacacattcacatgtagggagccatctcaatttacatccatttctctctatattttaaaaaaacgatgagttactgctgacatctccagttgcaattgtacatcacaggattcattctagattttctccattttcccctatttttccctccc

SEQ ID NO: 660430 - DNA, 284 bp, Homo sapiens
gggtgacatcgagagatccaaaaaaccctccgagtgattataatctagacaaaccagtcaaaataaccataacatcactatatagatccaaaattattgatcaacggaacaagttaccctagggataacagcgcaatcctattctagagttacctatcgacaatagggatttacgaacacgatataggatcaggacacccaaatggtgcaaccgatattaaaggtacgttagttcaacgattaaagtcctacgtgatctgagttcagaccggagcaatccaagg

SEQ ID NO: 660431 - DNA, 574 bp, Homo sapiens
  misc_feature (58)..(58): n is a, c, g, or t
  misc_feature (65)..(65): n is a, c, g, or t
  misc_feature (84)..(84): n is a, c, g, or t
  misc_feature (96)..(96): n is a, c, g, or t
  misc_feature (125)..(125): n is a, c, g, or t
  misc_feature (131)..(131): n is a, c, g, or t
gttcagacagctcagtgtgcacggcatcctaagagatgttcgccagaagcaccgcctnacgctgngccatctacaagcccgtgnacgtgaggcctnagggcttgcatgactactgtgacatatcnagcacnccatggacatgagcacaacaagttctaaactggaggcccgtgagtaccgtgatgctcaggaatttggtgccgatgtccgattgatgttctctaactgctacaagtacaaccctcctgaccatgaggtggtggccatggcccgcaagctccaggatgtgttcgagatgcgctttgccaagatgccagatgagcctgaggagcctgccgtggccgtgtcctccccagtggtgccgccgcccaccaaggttgttgccccgccctcctccagtgacagcagcagcgacagctcctcagacagtgacagctccactgacgactccgaggaggagcgagcccagcggctggccgagctccaggagcagctcaaagccgtgcacgagcagcttgcagcgctttcacagccccagcagaacaaaccaaagaaaaaggagaaagacaaaaag

SEQ ID NO: 660432 - DNA, 116 bp, Homo sapiens
aattcaacttcaaggtgggctcctcagggacatagctctgcacattaatccccgcatgggctacggtgccgtggtccggaacagccttctgaatggctcgtggggatccgacggag

SEQ ID NO: 660433 - DNA, 769 bp, Homo sapiens
gtgtcttttacaggtttgtaggctggtcctctttcctcttcagtgatacttgctaagggctctacctcttgtcaccggttattgttctcttttatgtgtttgctttagttattattctgcagcgtccttatcgcccttatgtctgtatggccttacctaagttacaatttggctctttgtcgtgtctctgtgtagctgatagttagtgtctgccctggcatacgtcctcgcccattgctctattggttgaactcctcatatgtctcccagttgtgtgtcatagtatgtatcgtttactgtgtcatatgtatactttggtgcctcttacgtcttgtgtgcctatagggtacttgctatacggtcggtctgtactggttatagttctcgttgatcaggtgtaccgtatgctggtacatccgtcgtctccctaatagctccatagcgggtaagtcttgtctcgggttctatcatactactgtagcgtagttcaagataggtccctggaatgagcctggctgtaccatagagattcaaggggaagatgcataggaggtagtagcttctctgctctagtccctctggtgtctggcccactcatggcctctgtaccctatggctgctctgcggccccttcctcctcctcttccttgctccaacttctgtccaccgtggggacagtctgtgcctgtagcctcatgaccccaacccagccccaggcatggctaacccctgactgcttgcctattctttaagggctgctctagcctta

SEQ ID NO: 660434 - DNA, 922 bp, Homo sapiens
atccctacttgggccatctcaccacatccatgtctagaaactagacccacgttgaccgcacgttcacccgtcttcacaacctggtttcactctctgcctcaagtgtctagaactccaatccatatcattattctgtaattatatcaggcatggagcgaggtgatcgtgcgatctcgctcgcacgcgatatgaatccgttaaatgcaaaaaatacaactggcatatacagtttgcactatgaatgccactcgatgtagtatcaaatgtgatgagatagacgtcctccttatctatgatcacatcgcataacgtaggcctctagaagtaaatctccgagatcgtccctttctagcgagtgtcttccgtcggcatcatgaccgcgtcttacacagtggtgctcgtccgaccaataagggactcctcaccgagtctctcagggtgctatcttacttggtggcgtctacatggctctccggttccacccataaatccttgtcatctgcaatccctgcccctagagcatgaaagtaaatgtattcgagctatgtccaacgactacacaaaagatcaaatacgagcgttgtaggacatatctgagagtcccagcacaggccttggataccataggtcgatgtcagtaccgaattggacgagtctatggcaccatcatatgtgcttagttgttcgtacgtacacgaatacgtaagttgcgcgatcagacgagggtcattgtcatcatataacatagagttagaagatagcaaaaagaagctttgcgcacaacagcacagcaacagaaaggcctcgttgaacgcagcaacgcagggcagagattcccctttgggccgaaaggggcaaggatccaatgttaccttggaaacaggcattttcgacttaggaaaaggaagagtccccgggccaa

SEQ ID NO: 660435 - DNA, 163 bp, Homo sapiens
gggggggggggttgggggggggtttcccttaaatgggggggggggggtttttcccccctttttttttcccgccccccgggcccccttggggggtggaaaattttggccgggggtcccaagccccccccccccttggttttaaaaaattttttttgggggttta

SEQ ID NO: 660436 - DNA, 188 bp, Homo sapiens
gaggtgtgtgtgggacacagaactcaggtgtgtgtgtgggatacaggactgaggtgtgtgtgtgggacacaggactgaggtgtgtgtgtgggatacaggactgaggtgtgtgtgtgggacacaggactgaggtgtgtgtgtgggacacaggactgaggtgtgtgtgtgggatacaggactgagtcgac

SEQ ID NO: 660437 - DNA, 806 bp, Homo sapiens
cagtgccggcccgccgggatgcagtgggcctgttggcctggctggtgggctgttgtgcctgcttgctgctcctgtgctgtcgcagctggtgctgacccagtgtctgtctggctctggctgggtacgcagagcttcgtcttccagcgcgaagagatatgctgcatgtatttggctgctgtgcatgtacagcttgtgttgaagctgtgtgcatgatgtggcatgtggatgtgtggatgctgtgctgtgtctgtggtgatgctgttgatgcctagtgggttcctgaagtgcggccatcccctgtgacctagtgacctggtgtgccatgcccatgactcctggcctgcccctcttgcctcctgcattggcttggaccacgagcttggccttctctctggtcttgatctgttggagcttgctgggctgggcttgcacccatgtggcgcaacctgtgcttgcccagacgaaggagcttgcagtaggggttgtactggtgaattgcggggttgggattgggattgggctgccattgttgccttcttgcaacgcctcgctgtccagagtatagtgctagattcataccggcaaccgggcttttgaagcatccactggttgaacaacatctgggggcgcataactaggggctataagaatctacggaataccaattcatactcttgcaacactatacacacaagatgaagaagagggaaccaacaaaaaagattaaagacattatacaccaatgagaaaacagtagaaccgggacttggtaggccaccagatgtgaatgagagcaaaaatagtgg

SEQ ID NO: 660438 - DNA, 1172 bp, Homo sapiens
  misc_feature (1172)..(1172): n is a, c, g, or t
gagctcggggctgcgcagcgggaaggctcgccatagtcggatccgacatccgtgtcgaccacactgtcatggacaccacgaagatgccaccacgtatgggggcaaaaaggccaagaagggcatcctagatatcgtttaaatgctggagagattgtgatatggagatggagggtatagtcttagcacatggagaagagagggctacgataaagagcacggaccctggaactcactgaaagcatgactgatgagagcacccagaagacaagaaaacgaccagcattacaatcgaagaagttcctcagacgcctggctcagaaagtcatgcagaccttcaccttactatgcgagtgaagacaagctggacgaacaggggcaaactatgtcttagacgaagatatctgggacaggcaagtcaactgaagactgactagcgagaaatcgccccgacaaagcggctgatacacgggagatgcacaggcaagacagagcaggagagcagtcagacaaccctacataccatatagacgccacgagctgaacacatgaaagatcaaacagaacgtacttacaatgcaaacaaggaacgagggatctcaactgacacggaacgacacggtggacgaacataggaataggcagcagaaatacaagaaccaccgatggcacgacaggcagcgagggaccagcagcaagcccagacataagcagtgcgggtacaacactgagaaaaaaaaaaatagtggatatggaccgcatataggtataatatgcaatagcggtgacaacccagcagagatggtgagatgaacttggatgaagacacgggagacaaaacggaacataggtagtaaataggcaaatataaacgaaaatagagagttaggaacaacaaagaacagaaagagggagaagagggacaaagaaaaagggtaaggtgttagagacggagacgaggctgaaccgagacgtaggatgagagaaaggggataaagagagcgacaatcctagagagagaaaacagagcacgtagagaggtagaggtcgagaagacgctaaggggggagtaggagagagaacaaacagagggagaggatgaagagaggaacagccgatagatgagaaaatgactaggaataagtaaaggagagagggaggagggtatgtaacgn

SEQ ID NO: 660439 - DNA, 106 bp, Homo sapiens
tgtttatatcattacaatgtgtttcaccatgttcaatatttaagtttttctccacactttgaattttttctgaatttattttgaatcttttattactaataaataa

SEQ ID NO: 660440 - DNA, 469 bp, Homo sapiens
actggatatgtgttagacacagcgctgctcatcgtgctgcatagggcggttggcgatggccaccatctgaagcacgtcatagctgtggcctgccacataggcgtggatcttgccattgtagtactgggtatccatgatgattagcaggtgggcagccacgttcatgccccagcagagactccgagaagccaccaccacctggatagcccctgagctgaagagctgctccaccaggcgtcgctccatggggctgagcccctcatgcaggtagcccaccccatttagcagcgtttccttgagcgtgctgtcacttagcttctccaggtacggaatcagatccttctcggtgcagtgcaagaacctctgccgttggatgtctgctgcacaggtggtgaggatgtcaatggcagtgaggcgggtctgcttgcgagacggcacaaagacaatgacaggcttcttgggcgagtgc

SEQ ID NO: 660441 - DNA, 420 bp, Homo sapiens
acatagtctagatgcatcatgattgcattagacgggctgattccaactcacctagaaagggcagcggaaccactatgcaggcagccttcttaggaacatatcttacgaacaactcttgagaaccatccgtgattgtggacaatggctctaaggtccaaacaccttctgttctttcatctcacgagctaggctcacaggaagcattagccctgtcaggagcaagaacagcagctgtggccccacgaaaacaggacttcaataactcgcggcttgtcaatgatccgggccgtacggtttcccttttccacaatgccaacgatccacgcttggtgaccctctccgtacttggaggatttgatttcagaacaaaagcgagccgcctgttctcttggcagacaaatcagtgtctaaatgcactca

SEQ ID NO: 660442 - DNA, 220 bp, Homo sapiens
  misc_feature (220)..(220): n is a, c, g, or t
ggtggcccggtgcctgggggagctgctggctgcagcctgtgccagccgggccctgcccccgtctctcggcccctgctgcctgactcactcacccggtctgcagcagcagacatctcatgctgagacagacgatctcaccaggagtactaaatgacccatccgcatgagcagaatcgggccattacagtgttgagccgcgccctgacacagacggggactn

SEQ ID NO: 660443 - DNA, 263 bp, Homo sapiens
gtccgcccacgcgtccgatcccagcacatgacaacacttcagtagggtccccctggtgactggacagctgggaatagggcatttggacacttcatttgtaaatagtgtacattttaaacattggctcgacacttcagagataagtcatggagagcccattgcaggggagtaatgcagttcctgcctgggtatttaagaatgtgtacttctcactaccattggtatggaaaagcaaaattctgtaaataaactttttttctaac

SEQ ID NO: 660444 - DNA, 406 bp, Homo sapiens
cgcaatgctgtcatgtagatatgctcgaatgtgctgatgacacagcggacctttgtcaagtatatatgtgaaaatcaagattcgatctccactaaactgaaagaatgcgtgtgaaaaacctctgttggaaaaatcccactgtgttggcgaagtggaaaatgaagagaagcctgctgacttgccttcattatactggtgagatttgttgaaaggaaagatgtgttgcactatgctgagagctgattactctgtcgtgctggtgctgagacttgcccagacatatgaaaccactctatagaaatgctgtgccgctgcagatcctcatgaatgctatgccaaagtggtcgatgaatttaaacctcttgtggaagaacctcagaatttaatccacttgtgagcgtttttg

SEQ ID NO: 660445 - DNA, 262 bp, Homo sapiens
tacatgtgttgcatgagctccctcttgatcttgccaggcaagcaggagctgcttcgctctcatcttcatgtcttcacatgcccacaatcttgtactgccaccactttatgagtatttattattaagaatatatgccatcctcactggttatactagtaccgctcagggaacacatgcccttctatggaggaattcttagaagaagccatagaacaggcagaacctgacaatatggtggaaaatgaatctaaggctgtgaaca

SEQ ID NO: 660446 - DNA, 179 bp, Homo sapiens
  misc_feature (9)..(9): n is a, c, g, or t
gtccatggntaatccgttcatagaaattgtgtttgctaacaaggtgccctttaaccagatgctaggctgtctgcggagaaggctaggagttcatagaagggagtggggctggggaaaagggctggctgcaattgcagctcactgctgctgcctctgagacagagagttggtgaaggaaa

SEQ ID NO: 660447 - DNA, 607 bp, Homo sapiens
tcttacgcccaattcatacagacctacactcatacacacccacaaactcatacacaccacacactctcaacccttttcctccacacaagcataggctcacattctcaacagttggccatcccagaggcccactcaagaaaggtcttgatttacgaacgcatatacagttgcagctgtatgagaaggccggccaagattgtgcaaacaattaaatgggcacgaacatggcgagattttattaaccctagtcacgtcctaaatgatggcggtcaaatgtacacatttgtgcttcttcacctgcattgcttgctgtaaggggttataggctgggtttctgtacagcactttgagatatcagctaatgtacgaagggctatataaataaatttgatttgattttccatgaaggcaccacaacacggtcccccggtattgatcatattcccaagcatctccatgcagtcagacttctgattttgtgccaccagggccacaataatatacccctctctgaatatccgagtgtgaccccctccccatgggttactgcagctagtgactgagctatgttgttgatgtaaattgagaagagttaggggcgtaaaga

SEQ ID NO: 660448 - DNA, 222 bp, Homo sapiens
gtgactctagatggatcccgtcttctccccttacacgtctctcttccctcaggtttgtcgtgcctaaagggctgcctccgcgcagctcctgtgcgtgaattccacccaaacttacagacgtagctcaatgcatcacttctccaggaacgcatctccagatccgcccaggcagacagatgctcgctgactcctctgacgcctcttctagaagcctagatctca

SEQ ID NO: 660449 - DNA, 355 bp, Homo sapiens
  misc_feature (14)..(15): n is a, c, g, or t
  misc_feature (20)..(20): n is a, c, g, or t
tagccggtccgaanncttantagtgtccccaacaggaattcgcttctgtatatcagccggtattcgctgagaactactgtagctcttaactgttgaatgatctttttctggtagatcattggcttcttttgacgcaggaaaaggcccgtgtcacttcggcttagcttctttcggcgattttcaagggaagcgtctgcaccttaacgcagacaaatgacgcatgatatgcacccttaaggcggacttgatcttcagatccctcaaatggtaaatgtgccataaggtggccaaattccaactaaaaatgataaataggtaatgaattgttcactataagctttcggtaccgagccga

SEQ ID NO: 660450 - DNA, 206 bp, Homo sapiens
gtcgtctgcagagcatgatgagttcgcgggtcacgcagtttgtgcagctgacgtctcagccaaacactgatcttccctggaggcttcggctgctgctgctgaggtccccgctgccagtcccgggccctggagagcagatgctgtcttgttatgtacaggaggaccttttaaaaaaatcaagtttctattttttgcttgttccgctg

SEQ ID NO: 660451 - DNA, 455 bp, Homo sapiens
gttcatgagctcctcagatgaaggtgacacacaggttggccctctccactggtcccaagaagacaaatggctgtcacccacacactgccctccccagcgctgagaagagcacgcgagggcgtgcttgactcgcggaagcacagggacacaggcagaacggtctgtgctggtggcagatgcccagccggacctccaacgctcccgatgcccacggccctgggccttgtgtgggtggggggcagtgtgcgggagcccagtggtgctgagtgcagccacgaggccctggccctctgtcacggcccttcctgcatcgttgcccctggggcctgcaagcctccctgttcttgcctgagggcctgctgttccctggagagaggtctccatacccagacacctctgattctgtctctggtcagttgcatggggcccagccgcctttgcctctccgtggggtc

SEQ ID NO: 660452 - DNA, 348 bp, Homo sapiens
  misc_feature (1)..(1): n is a, c, g, or t
nacagtttggcttctgtgaatacccttataggaaataggggtaagaggtggcaacaagatcttctcgtgttctccattaagcatcatgtaaatctcacatagtgtggttaacaaaatggctttccccaagcacagaagtcaagagcttgtgggcccatatattatcatagtactaggccattcattatctcctagattaactcttttttttttttttttaaggtgaagtttcactcttgtcgcccaggctggactccatctctaaaaaaaaataataataaaataagcacataccactttcacaattcacattactagagcttgtgtgtgtctcaaggtatgtgtcca

SEQ ID NO: 660453 - DNA, 284 bp, Homo sapiens
ggggcccttttttcgggggccccaacatgtttttttccggcttggttggggggccgggacaccttttggggggggggcccccccccctggggttggggccccaaaataccgggggccttttttgtccctggccgggccctcccaggggaccccccccccggcttggggcctcccatgggggggtatgggacgggggcccgctttcccccccccccccccggttgtcgggtgccgggcgtgggtaaggtgtttgttttttcttcggagagaagacaaagaagata

SEQ ID NO: 660454 - DNA, 208 bp, Homo sapiens
  misc_feature (20)..(20): n is a, c, g, or t
ttgtttgtcatcccgacagntggtaagggaaggacacaacaggagaagatgctggattaaaagatgtttcctgtggaacatagggggggcagcagcaaacaggatcagttaactattgcatttatatgtaccggaggctttgtattcaaaaatcatctatagctaagtacacagtaagcgaaaacaaaaagaaaagaaaatttttgca

SEQ ID NO: 660455 - DNA, 441 bp, Homo sapiens
  misc_feature (110)..(110): n is a, c, g, or t
  misc_feature (131)..(131): n is a, c, g, or t
aggcctcaatggatactctgctctcggctggctgtgtgaggcacaggatgggggctcaagttcagtgagggagatgacagagccgcgggtcctagggtgaaaatggtgtncctgctgcggagcgatggctntgagaagaatcctttctttgctgtatcttccacacccattagatcatctttctcagcgacttcctcatactgcaccttcatgagccgccccaggtaagagcggtagtaagacaggtaaatcttgctcagcgtctccacatattcatccctgatctcctttgctgttgctcgttcattgcccagcagaaactgatagaagaacctgtacttcagcagggccgtctgggggatctgatagttggtcatgggttacctgaaggaataaatcttctggaggataaactctcggatcttcgtcactgccttgacc

SEQ ID NO: 660456 - DNA, 878 bp, Homo sapiens
  misc_feature (494)..(494): n is a, c, g, or t
  misc_feature (534)..(534): n is a, c, g, or t
  misc_feature (536)..(536): n is a, c, g, or t
  misc_feature (542)..(542): n is a, c, g, or t
  misc_feature (572)..(573): n is a, c, g, or t
  misc_feature (584)..(584): n is a, c, g, or t
  misc_feature (649)..(649): n is a, c, g, or t
  misc_feature (678)..(679): n is a, c, g, or t
  misc_feature (686)..(686): n is a, c, g, or t
gggccccgtgggctcggagtgagccccgggtggctgtccccggggagcgcgccctcgctagggccctgacgtgtggtggaggcggatcgggcctgcgagccagcgccggggccaggcgatctgggcaaggtcaatgaaggagcatgcatgtgacgtgcgaggtcggacggatgacaatgttccccgtgtgcatcctgcgaggccgtcagtccaggtgctcagcggttacgactggacgctggtgcccatgcccgtgcgctgtcaacggctgccagcaaaagcaatgccggacgtcaatgcggcccatgaacgccttcagtggtgtgggctcaggctagcgcgcaggaagcatcgcggaccagtaccctgcacctgcgacaacgctgagctcagcaagacgctgggcaagctctggaggctgctgaacgaaagtgacaagcgccccttcatcgaggaggctgagcggctccgtatgcagcacaatgaaagaccanccggactacaagtaccagcccaggcggcggaagaacgggnanggccgnccagggcgaggcggagtgccccggtggggnnggccgagcaangtgggacctgcgccatccaggcccactacaagagcgcccacttggaccaccggcacccaggagangggctcccccatgtcagatgggaaccccnnagcaccnctcaggccagagccatgggctcacaccaacccctccaagcaacccgaagacagacgctgcagtcgtgggcaatggcaggacccgaaagcggggacgggcgctccatgggcgagggcgggaagcctcaccatcgacttcggcacgtggagccttggtgagatccagccacaaggtaatgtccaaaatggagac

SEQ ID NO: 660457 - DNA, 111 bp, Homo sapiens
aagaaattcttcttcacaagtaacattccacttgtagttagtgaccaggcaatacgaacttcatgtatgtcactatctttggtatataaatgccttactgggatcttctct

SEQ ID NO: 660458 - DNA, 125 bp, Homo sapiens
cgaagaaagaaggaaggacagacttaaatctctctaaagcacgagaatctattatatagcaaacaaacttgtatcatttaatctctagcgatcacgggttctaataagcctaggtaccacataag

SEQ ID NO: 660459 - DNA, 691 bp, Homo sapiens
gagagagagagttagagagagagagatatagagatagagagagagatatatagagagagactgtctatagactgctttcctctttcttctttcttctctcctctactccttctttcttctcttctctctcctcttttccttccttctcttttttctcttcttctttttttctctttctccttcttttttcttctccccccccctccttcctttcttctctcttcttccctctctctactccttctcctttttcttttttcctccttttcctcttctcttctctttcctcctccctttttctctcctccttcttctctctcctcttcctctcctctcttcttctttcttcctctcctttttccttctcttccttcccctcccttctttcctctctcccctctttttctttttttcccttctcctcttttctcttcttctttccttttcctctttctctctctcccttcttcttctttctctttcccctcttttctccttctccctttctccctttttttccttctttctctctcttctccttctttccttcttttcctcctctctttctccctttcttccccttccttccccttcccttcctctctctctttccttcttcttcttctcttctctcttcttccttcctctcttctcctttttcttccttttttcttctttctttttcttctcc

SEQ ID NO: 660460 - DNA, 727 bp, Homo sapiens
gccaagcccggatgtggggccgaggcgcgcagactctcaacgactcgacgccaacggtggtctctcgcgatcgctggcgcgaggcaggagggtgcggggcaggcagggccgcggtcaggcccggagccggcaaagttgtcaagcagaggtcgagggccggacgtgggagccccagagcgacgctgaggtgcgttgcgggactcggagtacgttacggagcgcccgagctcatcatgcaccgccatgccgccccgggaccatcccccggagtccccgggtccgaagcatccctggttcggctcagcggtcctatctggggccagagtttcgcccgcaccactacagggccgctgggtgagtcgggtgccgcaccagaatctgaaccggctcaagtccagcgggacgtcaaacccgcctttccacggctactggagcacggcgcgagtccgcgagcccgattaccgcgggaaggctgcagggaagttgagatggacaggctcatcaccgacggaatgtgccgacggcggagctgacagagggcagtgccccgggaaggacggggaaggtgacgatgcgtggactacgcaagaaaaagcataacccaggacaggatcgcgtgcgaggcggagagcagacagagacatgctggggactgaaaccccgagaagcctgtaagcactgcacgacaggagtggcaccgtggcccccgggacgcacgggagacacc

SEQ ID NO: 660461 - DNA, 1516 bp, Homo sapiens
  misc_feature (140)..(140): n is a, c, g, or t
  misc_feature (643)..(643): n is a, c, g, or t
  misc_feature (1146)..(1146): n is a, c, g, or t
cacgagatagcctgctcccctgcgagaacgccgcctcgcgaaatcccctgtgacgagagccggaaatcgcgggggcaggactgagaagtcaatgaccgcatgttagcacgtgtccgcgtgagactttgctatcggatctntgaccataacgtatcgacacgttatttcgattcaagcccttgctatggttgcagagcgcgtctgtgtacgagagaagatcacaacgtccctttactgggagaacttgactgtcacagggcccttgtgacaggtacagctcataagctcattccaggttggtgcgccaaggtgtcctttgacaaagcggacttgcacttgtgacatttgggtgacctaacctttcacgttagattcgcgcatagcgcctgtggaggaacggcgcccagagatattgtcgttactttgaacctgtttcgactttttgggcgcggggaccggatctcccaaatttgatcaaagttggcctcccaaaggagggattggcggagattaagttgttgcgctatgaaaacaccgtatggtatatagaggggactcccattgagaaacaccgccattggtggactccgatttatgagttcctcccgcgttcgcacatctttggctcgagagcgcttaggantgtgcagtatggtcaccgcgttaagcccaagattgtgacttgcccaacttttcgatgttgtggtgggcgtgtcgcggtcaccgtttttgtgcgtcgccgtgttaggatgaggcccatacagcgtctttggcatttgggattgggcgctttttgacactttatcagcttttggtgtccccccccatggttctgtgtgcgcaaaagttttaccccgcacctcttttgaattggtgcgggtttctggggtagccggcccccccttgagggtttgtggccaatgtttccgtgtacggcttttgatgggactccgttggggagcacacgagggcctacgatggtttcctcggcgtggcacacttgagagccggcctattttcgtcggatgctgttccccatattgccttagtgtccgtttcgcatttcggttgggagttcccccagcgttttttggacccactttcagtggtccgccgccctttttcacgttgggccagtccgagttngtgccctccgcgtgggaggcatccgcttggcgcagttttacacgcggcagcgtgggcctttacattggacattttccttgggttggctcgcaactagtggtcgatcttttattagctggggggcgcacagagggactgtggatttcactattttcccgtttggtcggttggaccgttgtgcttttgtcgcagtcaaagcgatttggtattgattaacagcaaatggttgccgcccgttgtttgtgtgttgtctacttgtgggcttgtcacacccttttttgtcgtgtctccctacgccccgttctttttgtgcacttcccgcgcctgtgtggtcgcacgtggctctccggggggtcacgaaggcctttcc

SEQ ID NO: 660462 - DNA, 837 bp, Homo sapiens
  misc_feature (812)..(812): n is a, c, g, or t
gacacaacttggggccctctcctctccagcccttctcctgtgtgcctgcctcctgccgccgccaccatgaccacctccatccgccagttcacctcctccagctccatcaagggctcctccggcctggggggcggctcgtcccgcacctcctgccggctgtctggcggcctgggtgccggctcctgcaggctgggatctgctggcggcctgggcagcaccctcgggggtagcagctactccagctgctacagctttggctctggtggtggctatggcagcagctttgggggtgttgatgggctgctggctggaggtgagaaggccaccatgcagaacctcaatgaccgcctggcctcctacctggacaaggtgcgtgccctggaggaggccaacactgagctggaggtgaagatccgtgactggtaccagaggcaggccccggggcccgcccgtgactacagccagtactacaggacaattgaggagctgcagaacaagatcctcacagccaccgtggacaatgccaacatcctgctacagattgacaatgcccgtctggctgctgatgacttccgcaccaagtttgagacagagcaggccctgcgcctgagtgtggaggccgacatcaatggcctgcgcagggtgctggatgagctgaccctggccagagccgacctggagatgcagattgagaacctcaaggaggagctggcctaacctgaagaagaaccacgaggaggagatgaacgccctggaaggcaggtgggtggtgagatcaatgtggagaaggacgctgccccaggcgtggaccnaagccgcatcctcaacgagatgcgt

SEQ ID NO: 660463 - DNA, 826 bp, Homo sapiens
  misc_feature (18)..(18): n is a, c, g, or t
  misc_feature (801)..(801): n is a, c, g, or t
aggaattcggacgagctncagcccttctcctgtgtgctgctctgccgccgccaccatgaccacctccatccgccagttcacctcctccagctccatcaagggctcctccggcctggggggcggctcgtcccgcacctcctgccggctgtctggcggcctgggtgccggctcctgcaggctgggatctgctggcggcctgggcagcaccctcgggggtagcagctactccagctgctacagctttggctctggtggtggctatggcagcagctttgggggtgttgatgggctgctggctggaggtgagaaggccaccatgcagaacctcaatgaccgcctggcctcctacctggacaaggtgcgtgccctggaggaggccaacactgagctggaggtgaagatccgtgactggtaccagaggcaggccccggggcccgcccgtgactacagccagtactacaggacaattgaggagctgcagaacaagatcctcacagccaccgtggacaatgccaacatcctgctacagattgacaatgcccgtctggctgctgatgacttccgcaccaagtttgagacagagcaggccctgcgcctgagtgtggaggccgacatcaatggcctgcgcagggtgctggatgagctgaccctggccagagccgacctggagatgcagattgagaacctcaaggaggagctggcctaacctgaagaagaaccacgaggaggagatgaacgccctggaaggcaggtgggtggtgagatcaatgtggagaaggacgctgccccaggcgtggaccnaagccgcatcctcaacgagatgcgt

SEQ ID NO: 660464 - DNA, 676 bp, Homo sapiens
acttagagagcaccgtcctgccacagtgacacatgtgtgtaatcggccgcggtacccgtatccgtgcgtacggtagcattatcacttggttcctttaatttagggacctgtatgtatggacgtccatcgagggttcagctgtctcttactgttaagccagtgaagattcgacctgcccgtgaagttgttcgggcatgacactagcaagacgagcagaccctatggagctttaatgttattaatgcaaatcagtaccttacaaacccacaggtcctcaactaccatacctgcattataaatttcggttggggcgacctcggagctagaacccaacactccgagcagtacatgctaagacttctacccagtcaatagcgtaactactagtatctcaatgtgatccaattaacttgagcctacgggacaagttaccctagggataacagcgcaatcctattgctagagtgtcattatcaacaataagggtttacgacctcgatgttggatcaggacatccgcgatggtcgcagccgctattaacaggttcgtttgttcaacgattagagtcctactgtgatctgagttcagatccggagtaatccaggtcggtttctatctacttcaaattcctccctgtacagaaaggaacaagagaaataaggcctacttcacaaat

SEQ ID NO: 660465 - DNA, 845 bp, Homo sapiens
  misc_feature (820)..(820): n is a, c, g, or t
acatccaacccccctccccccccatggctggtcggctgcgtgtaatcggacgaggctgctctgccgccgccaccatgaccacctccatccgccagttcacctcctccagctccatcaagggctcctccggcctggggggcggctcgtcccgcacctcctgccggctgtctggcggcctgggtgccggctcctgcaggctgggatctgctggcggcctgggcagcaccctcgggggtagcagctactccagctgctacagctttggctctggtggtggctatggcagcagctttgggggtgttgatgggctgctggctggaggtgagaaggccaccatgcagaacctcaatgaccgcctggcctcctacctggacaaggtgcgtgccctggaggaggccaacactgagctggaggtgaagatccgtgactggtaccagaggcaggccccggggcccgcccgtgactacagccagtactacaggacaattgaggagctgcagaacaagatcctcacagccaccgtggacaatgccaacatcctgctacagattgacaatgcccgtctggctgctgatgacttccgcaccaagtttgagacagagcaggccctgcgcctgagtgtggaggccgacatcaatggcctgcgcagggtgctggatgagctgaccctggccagagccgacctggagatgcagattgagaacctcaaggaggagctggcctaacctgaagaagaaccacgaggaggagatgaacgccctggaaggcaggtgggtggtgagatcaatgtggagaaggacgctgccccaggcgtggaccnaagccgcatcctcaacgagatgcgt

SEQ ID NO: 660466 - DNA, 300 bp, Homo sapiens
  misc_feature (81)..(81): n is a, c, g, or t
agaggttgtctgctgatagttttggggaaacggcccctctttttaagggattgctttcatctaattttggcagggcctccnccaaaagatccagcctcatacctacctcagacaaaaaatcgccgttgttccttttggactaaagtattgggttttgctttggaaaccccccccccctttgcaaaaaccgggcaagatgaatgccgattcccctggttttttgtgttccaaaattggagaaaggatttaataaaacccgttaatttttatactgccaataaaaatgtttttcccgaccca

SEQ ID NO: 660467 - DNA, 104 bp, Homo sapiens
gaaatctcttgccgtcgccgccgtgcccctctcgcagcgcattgcgggcttccaactctcacctctgatgtcattcttctgctgctaatgcacaacagatccat

SEQ ID NO: 660468 - DNA, 374 bp, Homo sapiens
tccgggtcctcatggataacgtcctgtcggaacgaacagtgccgggagctccacagtgtgcccagtgtaatcatgcttgttggtgatggatacagaggaaaaacttcaccccatacacccaatgaaaagtttgaaggtgcaactgtcctgaaggcactcaaatctggttatgaaggtcgagtcccactgaagagcgctcgtctgttttatgacatcagcgaaaaggctcgaaggattgtagaatcttattttatgctgaactcaactctgtatttttcctataacacacattgtctgccgaacagccctgtctggtcagcaggatagaagaaatgacctcagtcatcccatccatgctgacaactgtttgttgg

SEQ ID NO: 660469 - DNA, 215 bp, Homo sapiens
agtaacaagtgggtatgtaaattgcaacgcagtagttgtagccgcagtattattattcactcacatgctgtaccatttgttttgtagctgaagaggaacattcattcagtcagatggatgtcgaatgagagttaccaaactgctccccgggacccgcacagcgcacacagcctagcgggggagcgcaccagagcaaggggatcctctaacagtcg

SEQ ID NO: 660470 - DNA, 141 bp, Homo sapiens
ttgatggcgcaaaactacttaacgtgatagaacttcagcaaagtctcaggatacaaaaatcagtgtgcaaaaatcacaagcattcctatacaccaataacagacaaacagagagccaaatcatgagtcagtggccatcttt

SEQ ID NO: 660471 - DNA, 717 bp, Homo sapiens
aggacattcatttcctccgtcactctagcctcatgtcaagtgcccaagaaccccatggggctagctttcatactgtacagcatgcatatatataaattcttcacagaaagttcctctggacagtgctggtgcatcaagagagggtcaaatatgatttagatacagtgctgggaaaatatcacaattaagcaaataatagatgcagtgctaggaaaatatcacaattaagccagtaataattttatattcaggattcttatgtttgtgaatttgtagagagcttggcgtagaagcctgagagctgtgctgcaagtctttttcttgtaaaaatcactggggctgacaaacaaatcctgataaagagaaagtttgtttcagaaagttcaagtgaggcagactttgggacagcttgcatgcaaaatataaaacttggtaactatgaaaaggagaaagataaatccaacatttcctacattcacgatgaataatcagcaccattttcaaataattatcaaattaggaaaagactaccttttaaaaacattgagccttctactgaccgactataaagactatatataaagtatcccacaatttatttaggtcttctgaagctaaaatgtttttaacttttattgtataaccttaattagtttaattcctaggttagctaacttttaatgttgttatgaataatcatcatgttaaattgttctt

SEQ ID NO: 660472 - DNA, 458 bp, Homo sapiens
  misc_feature (24)..(24): n is a, c, g, or t
ctttatattttttttgtccgcagnaccctctgggggctcgtgccttattaatttacaccaaccccccaatttttttaaccctaccctgggccttccccttatgaggggggcgggggatttagggtttttgtttaaaatttaaaaaggcccgggccctttttttccacaaggggccccccacttccctttcccccaaattggtttttttggaacccctcggccttttttttcacccaaaggccggggcggggggcctacccgttaacattttggggggcccccttttttggcccctatttgggggggccccccctggaaatataaccctttacccttccctttccctttttttttttcccatttttttttttttgggttttcctagaattgggggtccccttattccaggcctgggttttcccctttttggtaggcctcccccggggggcccccccata

SEQ ID NO: 660473 - DNA, 229 bp, Homo sapiens
tggggggagaaggagcaaatccaccaattcccatttcaccaaagccattaaaccaacttggaaaaaaaaaggtttttccaaattgaagggagggaaaaaaaaaaaggccaccaaccccattagaagtcctggcactttgtaacggaacgggtactacactttatcttaattcttaatttaaaaacatgtttacaagttacaaccaacttctatgaaaagttgaaaagac

SEQ ID NO: 660474 - DNA, 269 bp, Homo sapiens
tgacttagaggaccccgcagcttctcccatcagtggtgtgttgttcacgtagcactggaaagtgacgttctttcagagattgttatgggttcctgttaacatccttcaaacacagctgaaggaggatgaggagggcaaggctttcttgtgatgaatgccatgagtcagcgcctagaggcttgtggggagctgtcagtagtcctggcagggagctcctccccctcactagaatttcttctccatgtttggaagggtggccaagaatcagc

SEQ ID NO: 660475 - DNA, 382 bp, Homo sapiens
gctctaatcatgctctaagtctgctagagtatatgttgcaattctagtcactctctcactgaacagacatgtacactgatccgagagtaacaactaggttctgtatgagcaaacactgtacttgtcaggttatcaccattatcaggcctaacagtctagttggaagttgtcgtctgactggagttaaaactgggtgactgaaaaggaactgtttgtccttttcaagcacttgtgagagagctatgcctgttagaagcagctgtgagatcttggtaatggggaagggagaggtctacggacaagcaggaaatgtcccttatggttttcagtcattggatgaatagcttgactattatagtgtgatgatgtctgactgaatatg

SEQ ID NO: 660476 - DNA, 543 bp, Homo sapiens
  misc_feature (86)..(87): n is a, c, g, or t
  misc_feature (90)..(90): n is a, c, g, or t
  misc_feature (92)..(92): n is a, c, g, or t
  misc_feature (94)..(94): n is a, c, g, or t
  misc_feature (96)..(99): n is a, c, g, or t
tctggtcatgattgtggtgaattttataactctgcttttgctttaatcatttgaagccacttagcatcacagaggttcatggctannatncngnannnnctttatgtgtttttatttacttttattaaatacacagtatcttcacccttgcaaatgctttttttacttgaattctagtttgcatacagtaataatgccatatctacatttcttttgttagccaagacctattttattttcctgtttatttcaaccattggtgtttaattttagattgtcttctataacagcattaagtggattttttaactgactctgataatgtcctttattattaccacttttaaattattcctgccatattattgacattttaattacaaattgttattgaatataggctgggcgcagtgacacacgcctgtaatcccagctactcaggagactgaggcacaaatattgcttgaactgggaggcagaggctgcagcaagtggagatcgagccactgcatgcagcctgggtgacagtgagactgtctcaaa

SEQ ID NO: 660477 - DNA, 218 bp, Homo sapiens
actgtggaattcgggaggggcgggccatgacttccagcgagatcgccatgcggggcagaggtgaaggccgaccccgccgcgctcatggtctcgttgatgctcctgccgtctgccacgcccaagctcgagatcaagtacaccaagatctttattcaccctgactggcagaactcagcgagtggcagaggtgtaccctgtctgtaaatccagccacaggc

SEQ ID NO: 660478 - DNA, 772 bp, Homo sapiens
  misc_feature (24)..(24): n is a, c, g, or t
  misc_feature (125)..(125): n is a, c, g, or t
  misc_feature (143)..(143): n is a, c, g, or t
  misc_feature (447)..(447): n is a, c, g, or t
  misc_feature (453)..(453): n is a, c, g, or t
  misc_feature (597)..(597): n is a, c, g, or t
  misc_feature (634)..(634): n is a, c, g, or t
  misc_feature (648)..(648): n is a, c, g, or t
  misc_feature (763)..(763): n is a, c, g, or t
gaagtttggtaaggtttggtaganagatctaaaggtgggggtggtaaggggaattgcacatgagaattcttgggagagagcaggctccaggcagcaaggtgattttggttggttctttgtaagtnaatcgttcacagggagcnaagggttcttttgattggttggacaagagggtaagggcgctggttggaggatttgggagtgaagtgatccatgtgaatagagcagatgatgggtcctcccaggtttaaattttttaagaattgaactttggttttcatattttttatattatcatagctgatttattggttttttttgattgtgtagggaattgttgattttggagcttggtgatgttggttgttttaggaattgggagatgtgataataggggaggaagcttgaagattgtgtgatgggtggagtagttccagggcgagaggnaggggnggccacggtggtttctgcagaggccagtttgaaggagtgcccatatgtggggatgcccatgaccaccttctctgatggcattcccttatgtatccagtaccccacagcatattccacattgtagtaggagcttggccctctgtnctgccaccccttgctcagagggctgttgtggccagtnataaggggcttttnccaagacccatggaagttaaaggacaggaggttgatgaaatccagatcttttgccagtttctcaacttgatagctgttatcaatcatttgcctccctgcagatacgcccgcagtnaagagaagc

SEQ ID NO: 660479 - DNA, 1238 bp, Homo sapiens
ctgccataccctgacctgcaggaatttgtgcgctgacgtaaatgtgctgatggccctgattatcaatggccccataaagtcattctgctaccgccggctgcacgtacccagacccacccaggcccccagacgcatgtgctactcaatgacgactgaaggagctggccgcccagcaagacaagtgccacaccgagataactacaacatccgccaggtggacacccacatccatgcctcgtcctgcatgaaccagaagcatctgctgcgcttcatcaagcgggcaatgaagcggcacctggagcgagatcgtgcacgtggagcagggacgtgaacagacgctgcgggaggtctctgagagcatgaatctcacggccctacgacctgagtgtggacacgctggatgtgcacgcggacaggaaccactttccatcgactttgacaagatctaatgccaaatacaaccctatagcggagtccgtactccgagagatcttcatcaagacggacaacagggtatctgggaagtacttagctcacatccatcaaggcacggtgaacgctccagcaccctggcagcacgagcaccataccacacacgcacacaccgccacgccccacacaccacggccgcacccacgcgactcacccccgaccaacccaggccccaaacagaacccgcacacgcccccgcgagacacacccacacaacagaacaacccagccccggccccaacagaaggaccccgccccacacaacaaacaacgcgcacaacaggacaccaaacgccgccaaaactgaccgccaaagaccccaacacagaacaaaatcacaccaacaaacaacaaacaccacaaccacaacagcgaaaagaaagccaccaccccaacaccaccacccccaaccacagcacccacacccccgcaaaacccacccaagaacacacaacaatcagccaagcacaaccgctgccaccacgcaccacaacagcccaacacgccacgagaaaacagaaacagcgacccacaaaaggcacacactgcacaacaacgaacaaggagcccccgacaaacaccaacggacaacaccacccacacaggaccgagaacgagaacaaaataactggaccttgccacggaacagccaacacacaaacacaccaccccagcaccccacaaacacacacagaggcagaacacaacaaccaccacacccgccacaaatacgagacaaaagccag

SEQ ID NO: 660480 - DNA, 503 bp, Homo sapiens
  misc_feature (28)..(28): n is a, c, g, or t
  misc_feature (282)..(282): n is a, c, g, or t
cgggccacgtggggggagacaaccttanccaaaccatttacccaaataaaggataggcgatagaaattgaaacctgcgccaatagatataggaccggaagggaaagatgaaaaattataaccaagcataatatagcaaggactaacccctataccttggggggaaggaattaactagaaataactttggaaggggaggcaaagctaacaccccgaaccgagcactactaaacagtaaaaccacccgtatgacaatagggaaatataggaggcacaacctacnacctgggatagctggttggccaagatagaatcttaggtcaactttaaatttgcccacagaaccctctaaatccccttggaaatttaactggtaggccaaaggagaacaggtctttggacactaggaaaaaccttggagagagaggaaaaaatttaacacccataggaggcctaaaagcaggcaccaattaagaaaggggtcaagctcaacacccactacct

SEQ ID NO: 660481 - DNA, 283 bp, Homo sapiens
cgccccccccggggggggggaccccccgggccccagggggccccaaccgggggggggccacccggccctcctgggccccccgggttcccccaaggccccggggttcccttgggggcccccccccggggggggccccccgggccgggggaaaagggaaaatcccccaaagggcccgggggggggtggggccggggacccccggggggggggtttaggcccccgggcccccccgggggggggggagggcccggtttcccccccaaaaaaccggggccgggccttt

SEQ ID NO: 660482 - DNA, 882 bp, Homo sapiens
gccggaggatacacacgcagatgaattgagtcttctgcgcacgacaggtgtagagaggtctccacaagccttgtctctcctgtgtcaaaatggtgactcttaacgaatagaactcattgtaccagttgcgaacagaataggcaacagttccaaacaataagatcacgtgtaggtgggtgttgaagacaagttggtatggcgtgtgcttatcgagcatgctgggaacaggtcatcgtgggtgatgcaagtctgcgttgttgctgagatgtcctcgggaagataaggctaaagagggagaaatgatggatcgtgcgagagagtgggaaaccttatttacgttcggagacagcatagtaagttgaggtagataaagattatatcttggtgaccagtcaattgtaagatcgtactggtaagttggagggactccgggcgaacgacgaggggggacagtcggcctcaatgcgggttgggacatgcaaaatgggtaatgttctatcaacactgtgcaattatatatcgctcagagtcggtacagatacagtcgcgacttgcgtcagtacttgtggcttctgcaactccaggtgtgagcaattcttgtgtagtgtaccatgcaatagtaagagtggaattagcccagaacgaaggtgttgatgggacagtggatgtaggtctgtagtgctgttgagatttggatgacgatgatggtttcaagagagtgggcattcattctggtggatgcgaggctggttttggggggaaatggagattaagtgtgggtggttaatgtagaaagagacggtggtggcctgggaatgatccgatgggatgggggaatggatcgaggatgcgaaaggtttccttttgtgtgaccgaaaatgg

SEQ ID NO: 660483 - DNA, 582 bp, Homo sapiens
ttgctgtcttttataatcgtcggtgacttgagtggcgtactatagtgagaacagcggtgttgttttgtccttgcgatagtttgctgagaatgatggttccagcttcatccatgtccctacaaaggacatgaactcatccttttttatggctgaatagtattccatggtgtatatgtgccacattttcttaatccagtctatcattgttggacatttgggttggttccaagtctttgctattgtgaatagtgccacaataaacatacgtgtgcatgtgtctttatagcagcatgatttataatcctttgggtatatactcagtaatgggatggctgggtcaaatggtatttctagttctagatccctgaggaatcgccacactgacttccacaatggttgaactagtttacagtcccactaacagtgtaaaagtgttcctgtttctccacatcctctccagcacctgttgtttcctgacttttaaatgatcgccattctaactggtgtgagatggtatctcatagtggttttgatttgcatttctctgatggccagtgatgatgagcattttttcatgtgtct

SEQ ID NO: 660484 - DNA, 543 bp, Homo sapiens
agaaaaaaagttgggctcccccatccgccaaagcccaaaaggagaaaggggggggaaattcaccagctcttgtaatttcgaaccacctactcggggggggtgtggcagtgacaacattggcagttggatttttcaggccatgggctggaaaaagggcaccggcctgggccgcaaaaaacagggcattgtaaccccttttaaggcccaaacccgggtggggggttccggcctgggtgcccggggcagctccttcggggtcccctcaaccgagtcctacaaggagaccctgcccaaaacaatggtggcccgcttcaacaaggcccagtgaacagcttcaaaagcaacttttccccatgttgggtgtccctcctggggcagggaaggacaaaatgttggatggttgggacggggccttgtttttgtgggccagccccctccccagccaaaaaggggttgacccaatcaaatttagggggggccttttgttggaaaattggggtggggtcccgtcctgttttgtaataaaaactgaaaagtttgcca

SEQ ID NO: 660485 - DNA, 143 bp, Homo sapiens
  misc_feature (16)..(16): n is a, c, g, or t
  misc_feature (106)..(106): n is a, c, g, or t
gaattcgagctcggtncccctatcaactgcggcgattccgtaagagggctaggagggagccggcacatgcgttgcagatccgctatccgtcgacggatagcggatntgcctcagttgatagccggaatcgcctcagttgatag

SEQ ID NO: 660486 - DNA, 957 bp, Homo sapiens
  misc_feature (1)..(1): n is a, c, g, or t
  misc_feature (4)..(5): n is a, c, g, or t
ntcnntttctttgtcgtcgcgttgtgctgtcgagacagcgttacggaccgccgtgcctgctttcattatggcccgactgcctgtcgcggttttcacgtcgggatgtctcataccagatgttgcgtgctctccacgcgtgagtttttcgggcgtggaagtctctctcggtgaggctgtttacccccggccagagctattgtggacgcgggccacgagtttctggtagagaggcccccatgggtatatttctggttaccaaaaaggttgttcttcccagagtccccttgagccttcctgtgcaacgggcagcccccagcaggttctgctggcccagatccccacggagagtctctcggctccatacctcttatgaaggtctttcttccgccgggcccctactatgtgcgtgtcctacgcagttattgtcttgcagatgggccccaatatccgccaggcacttttggtggtctggccgacatcctcgcgggcacgagcggctttttagcccccgttatagttgttgtggttcgcgcgcgtttgtcccacctccgcggacgccctttatatgtccacgcgtgtgcccgcgtctgttgcctccccccgtgtgcttgctcctgccccaaggcttcctgggcttcacagtgcatgcatgtctttgtgcccgcgtgggcgcccccccgtatcaattctgggcccaataagctgtcctcgcgctggccacacgagtgagtgctttgggagccccccatggtgtaaaactcgcgcccctcccacccccacttttcggcaactcacaaaggggctggcgtaccccgacgtaccgcctcttcaatgcgcgcctcagcctcttgcccactacccatttaagcacggctttcttccttcctcttggattttgggtttgggattttttctctctgaaacccctgaaaaaaaaatgttccaaagaaaaataac

SEQ ID NO: 660487 - DNA, 131 bp, Homo sapiens
  misc_feature (51)..(51): n is a, c, g, or t
  misc_feature (91)..(91): n is a, c, g, or t
ctccggcacattgtgctggcaaaagaagtgagctggagattggatcacagncgaaggagtaaggtgctgcaatgatgttagctgtggccantgtggatttttcgcaagaacattaataaactaaaaacttc

SEQ ID NO: 660488 - DNA, 1102 bp, Homo sapiens
  misc_feature (120)..(120): n is a, c, g, or t
gctcccggcgccaccgagacgcgcagaggacggctagagcgttgctcgccgagagacttcctcttcgttaagtcggccttcccaacatggcgcagtctattaacatcacggagctgaatntgccgcagctagaaatgctcaatgaaccagtttggaccaggaacgtgggagtccttgtccaacgttccatttggctcgagctcaaagtgggtacagacccacgtatgtggacagccaaggactgtctgaacgttgctgaacaagagcaacgagggggaacagaattactcgtaccactgaacgagtcctatgtatgtccctgggcaagctgcattgactgtgcaaccggtgctcatcgactgtggggacctgggtacctatgtagcagaagaacagctgaggatgccaaggcactcctttcaaggaggacggatagattttctaaccaaggcacgatggcgaaaatccaaaccagttcttcaggagacagcacgccattgaaacagggcgtcattggaaatgatcgagtcagacagattcagccagttcacagtcctgggggccagcctcaggcttactgctagggcccgaagagttcttcggccgcaacttgggggcagcagggacccccctttgggccgtggctaccctggtgctgcgcacgggtctagaggtatgaatgtgccacttcactgtttgccaagggtggggctacatacacaactgtaatccaacgatgtaaccaaaagacagttgcagagcagacacgctacctcatgcaagaacgtttctaagcaacaatgcgatatggaggagtgcggctccaacggatactaacacctgtgcccctaaggatgctgttcacaacgagaaacccgtgccgccactacaatgacgctgggtttctcacccacattaaaacatgcgcccgtgggacacagacatcttgttagaaacatccgctagatggtcagcgacgcttacggcatatttaccaggaccacgcagcgattaatagacgcccaacgcagctgaatcacacatccctccgacactatcactactactaagcaccgcgactcctccactcaccggtcccgac

SEQ ID NO: 660489 - DNA, 382 bp, Homo sapiens
  misc_feature (340)..(340): n is a, c, g, or t
  misc_feature (372)..(372): n is a, c, g, or t
  misc_feature (377)..(377): n is a, c, g, or t
cctttcgccaactgactaccacttctgctagcatcttgacaactttttgcagggaaaacacttcagcatggtgcagaaaatgctttccaagagttcgtcaaatcctgaagcacggatttttatgctacaggaataaacaaacatttctcattggcaaaaatgtgttgattgtaatggttcctgttttgattaataggaatatgttttaggcgtagttacaatgatttaaaattcggcagtctgggaaatttaatttttgcatcaacctaatatttctatggggtaaatccttggcaaacagggggaacaatggcattgggccccagtggctttgtggggntgtgtacttcttttttcctttgttttttttantaggnggggc

SEQ ID NO: 660490 - DNA, 698 bp, Homo sapiens
caggagaatcatttgaacctgggagggggaagttgccatgagcagagattgtgccactgctttccagcctgggcaacagccagactcagtctcaaaaaaaaaaaaaaaaaaaagtaaattttcctctcctcaaaaatttagtaggcaagccatttcaacgggaaccagtatttcagtttatattttaatttgggtttccccatacttctcaatagacctaatccttaagtttggtcttctaaaattggatatacgcttatcaacatggttgttcactggcttcaatggaccaatcccactggtggtttttttggagatgggagtctccgcttggtgccactggttttccaagcctggggcaaccagccagactccagtctcaaaaaaaaaaaaaacaaaaaaaggtaaatttccctctcttaccaacatttatgatcggggggaacgcaatatattaaacggcgaacagggatatttcagcaagtttattatgtctaatttggggttgcacaacgtttaagtaaagaacataatctcctaaaggtgggcgatataaaagtggttggaaacacaaatgaaaaaaaaaaaaggggggcgcgataaaagatatcactgtagaggggccaaaagtaaacatacccaagtttttgtaaaacggggccaaataggaggggatataaagaaggacaggggtgtta

SEQ ID NO: 660491 - DNA, 231 bp, Homo sapiens
ttttttttaaaaaaattttggacaaaactgatttaatttttcaatcctggttcaaggggtgggctgggggtgggaaaatgggattttgggccaatggattttccctaaatttgtcccccctttactttccctttatttttttttccttagaatccctcaaacctggaaccaggtttgggttttttttcctttttttttttttaaaccatgcattaaaactttgaaaccaaa

SEQ ID NO: 660492 - DNA, 158 bp, Homo sapiens
ctctcaattcagaatcccccctcctctctcctacttgtgtattccgcctggttccatctgatctgtctcccatttaatgcgtattatccattggtttgtagtgtcttcacagaacttgtgcaacaattgccatactctagtaccaggacatttcatct

SEQ ID NO: 660493 - DNA, 436 bp, Homo sapiens
  misc_feature (27)..(27): n is a, c, g, or t
  misc_feature (57)..(57): n is a, c, g, or t
  misc_feature (71)..(71): n is a, c, g, or t
  misc_feature (83)..(83): n is a, c, g, or t
  misc_feature (101)..(101): n is a, c, g, or t
  misc_feature (104)..(104): n is a, c, g, or t
  misc_feature (120)..(120): n is a, c, g, or t
  misc_feature (136)..(136): n is a, c, g, or t
  misc_feature (146)..(146): n is a, c, g, or t
  misc_feature (215)..(215): n is a, c, g, or t
  misc_feature (228)..(228): n is a, c, g, or t
  misc_feature (241)..(241): n is a, c, g, or t
  misc_feature (258)..(258): n is a, c, g, or t
  misc_feature (280)..(280): n is a, c, g, or t
  misc_feature (361)..(361): n is a, c, g, or t
  misc_feature (366)..(366): n is a, c, g, or t
  misc_feature (381)..(381): n is a, c, g, or t
  misc_feature (393)..(393): n is a, c, g, or t
tgtctccctcttcttaactggaaagcncacttgtgaggtatggtatccattatcaanagtggagtcatgantgacttcatagnttgtgtatctggttatanggntgtatagcatttaagncggcacttaatataangccatttganttgaatagtgtgtgtgtgtacatggtgtgtgtgtgtgtgtgcactttagtttcgtgagccttgggaagntgattctacaaanagcttatataganataaatgtagcaggcanttttttgcaaagcgatatatanattcctcttatttattaaagcactggctttggtgttatgtagagatatttgtagatctcagaacagaattaaaatattgtnaaaantacagcttaataaangtttattgtaantttgttgtatggacttttaaaatatatctcatcacttctaacc

SEQ ID NO: 660494 - DNA, 626 bp, Homo sapiens
tagaggttcctcacagcttcgggctaacctgccgcgtagcgtttcgcgcgcagctggcgaacatcgccaccttgcttgccgtcccatgagatgagcgcaatgcagatgaagctggcgcgtgcgcaggctgtggacatgctcgaccggttcaccgaaaccgtttcggtgctggtgcctgtgtggcgtcagaacacattggcccttatcaccaccaagaacattagccccgagctgattgcctcggcgacgaaggcgcaccaggaactgatgcgcaaattgtacagcagtctggacacccacagtcattgaaggcagggagaacgacactgaataaccagctgcagacctccaacaacgtcgcccggacgcgatctgctggccacagtggattacgaaggccttggcctgagcgcccacaccgacgccatggcagttgcgccagcttggcggaccgcatccagccgagtgaccccgccacagtggccgaatatggtcgtgacgtaggcgcgatcaccagagagttcacagcgatagcctgctggaacaggtccggaatagcgatctggacgatgccggcgaccagctgacgcaggtggtcaacgtcgctcgaaatctgaacgtgggac

SEQ ID NO: 660495 - DNA, 343 bp, Homo sapiens
cagcgggcgtcatgttaatgtgcgcgctcggtattggacatgagaggttgttacatcctcaccagaggctgtgccagtgcagtccctgtgacagacagagggcaaggcagctgggccagatctcaggccagccgtttgtgctcctagcagggttgctgtgctggccacacggagaggccctatagagcctcatggctcgtccctcacagaagaaacggttccttttggttttttgaaacagctgatttttccagtcccgttttttacaccgttctctcggtacttttttataacgctaagtcagcattgtcttccagtgttcaaggcacccatcagcctctgt

SEQ ID NO: 660496 - DNA, 1239 bp, Homo sapiens
gaactttaaaaaaaaaaaaaaaacttcatgggcttgtccgagttgtgaaatgcacatttaggaaggttacatgtcagaccctttggttaaggataacccgtggactctggggcatgtggcctctttggtgggaggcaagcacattctgggcttctggttggaggggaaggtagaggtgaaagaagagagggcccagctttctaacagggttggagcaaattgagaccaagaaattcactgggtaacgatgatggtatagtctgaccagttttcactggttagtaaattcactgggtcctggggaagcagatttaagctagcagaaagtccagggaaagaaaagaccagaaaggagctaagtgagcacaaggtgatggcgtcggggcaagctgaagtggttgcagggcagcggtggcacggaagggaggcagcatgagccaggtgctcagctaaactacgtggtgcattcagctagaacagttgtgaagaaatcatgggttagcaagccatttcccaacacacaacacactaagccaacaagggccacacttaggccttcatctctggacatggcatcttgtaaccttcacgaaacgactgtactacctcggtcgggggatgcctagacgtcaggcggacgctgaccccaggggctgggaacagatggccacgctgcccagggacccatgtgctgtggcccaggctatgtcctcgtgagcagcgtacgggggtcccacggcatatgatcgtcgcaggggcacgacaagtcaccgtcggcgacgtcctccaaaagtccagccagtcacaccgacatcacgtccacctcggacattcgggacgcctaaaatagccccggcaaaatcttcacactgcaaactctcaagggccttaaagcaatcaaactagggcaggggcgaaaactaaaatcacacacaatgggggaatgcaaccccccgggggttagacccacaaaatgcaacaggggccccgcggacaacgacggggcgcgaagcgctcaacaccgtaaagtgtagcccctggaacacgggcgacgcaccacagcccgcccactaacaacacgtggtacaaagcactaagggggccccaggcgacacaacacggcggcctatccaacgaccagtagcagcacacacgaccatcaacgacgacacacagagacgctgccacaccacagccgacgcacccacgccagcagcgcacgccaaacacagaacgcaa

SEQ ID NO: 660497 - DNA, 401 bp, Homo sapiens
  misc_feature (401)..(401): n is a, c, g, or t
atgttacctctctgagccccaaactttgtttacagtttgtctttgacagagtttctctcttgttgcccaggctggagtgcattggtcgcggtcttggcatccctgcaacctctgtctcccgggttcgtgcatttctcctgcctcatgcctcccgagtaggtgggagtttcaggcttgtgtccatcatgcccagctaattttgtatgtttggtatagatggggtttctccatgttgatcaggctggtcttgacctcctgacctcaggtgatctgcctgccttgtgctaccaaagtgctgagatacatgcgtgagccatcactcccgtccaacttttttattttttacctggtccgggtacttgatgtttctgttgcttctaagatttcttaactgtccaagn

SEQ ID NO: 660498 - DNA, 139 bp, Homo sapiens
  misc_feature (44)..(44): n is a, c, g, or t
gcgcgtttagaggatcccagactgtgacactccttgtatatcantcaccacgatgaggcaacagccagaatgcctgaacgcaggacatacttcctattctacaccctagtaggctcccttccccatactcatctgcact

SEQ ID NO: 660499 - DNA, 640 bp, Homo sapiens
atatcgacacctccctgtcgcgtgggcgatagatgttgtagtgaatgccgtcaacgacgatatcgttgtagtgttgtgtgatggggttggctctgttcctcctggatggaaagtggggtattaccattgtgcttctccctaacctgggctgatggtttggtttgctgcctgggcagacacaactttgtggcctttatacttgtacaagagcaactaccccagcaggttgtccgttaaccaccaggacaatctgtagtccttgacggtcctcagctccttctcgtatcagtcgttgttggcagagaggctggagttcacctcgtaaaaccacagcactatggacctcagcagcccgatgcagacaacctctacgaagtacctgcggactaccctgacctcacggtggcccttctggagttatgggtggttgccgaacactgcctgttactctttgattgatttgttgccaccctgggccaggtactaaccttacagccctatggcctagcagtactgccgcactaactcttgaaagacagataagggtaaacagggcagacacaactagtagactcacactgccagcactattgcctgggtgtaggctggttcctagactgagccctttgactagctgtgg

SEQ ID NO: 660500 - DNA, 414 bp, Homo sapiens
  misc_feature (49)..(49): n is a, c, g, or t
  misc_feature (119)..(120): n is a, c, g, or t
  misc_feature (125)..(125): n is a, c, g, or t
  misc_feature (135)..(135): n is a, c, g, or t
  misc_feature (139)..(139): n is a, c, g, or t
gtgggggtgggtgtgggtattggtgggggtggggtggcggggggggggnggagggggggggggcggggggggggggggggggggggggggggggggggggggggggggggggggggggnnggggngggggggggngcanaggttggaaaacttgtgcccttgtatagtgtccccatgggctcccactgcagcctcgagggcccctgtcccccctggctccccctgctggtgtctagtgtttttttccctctcctgtccttgtgttgaaggcagtaaactaagggtgtcaagccccattccctctctactcttgacagcaggattggatgttgggtattggggtttattttatttttttcattttgttttgaaattaaagtatgcaaaataaagaatatgccgtttttatacaaa

SEQ ID NO: 660501 - DNA, 2598 bp, Homo sapiens
  misc_feature (35)..(35): n is a, c, g, or t
  misc_feature (39)..(39): n is a, c, g, or t
aagcagtggtatcaacgcagagtgcccattacggncggnggagtcactccggcgcagtgttgggactgtctgggtatcggaaagcaagcctacgttgctcactattacgtataatccttttcttttcaagatgcctgaggaagtgcaccatggagaggaggaggtggagacttttgcctttcaggcagaaattgcccaactcatgtccctcatcatcaataccttctattccaacaaggagattttccttcgggagttgatctctaatgcttctgatgccttggacaagattcgctatgagagcctgacagacccttcgaagttggacagtggtaaagagctgaaaattgacatcatccccaaccctcaggaacgtaccctgactttggtagacacaggcattggcatgaccaaagctgatctcataaataatttgggaaccattgccaagtctggtactaaagcattcatggaggctcttcaggctggtgcagacatctccatgattgggcagtttggtgttggcttttattctgcctacttggtggcagagaaagtggttgtgatcacaaagcacaacgatgatgaacagtatgcttgggagtcttctgctggaggttccttcactgtgcgtgctgaccatggtgagcccattggcaggggtaccaaagtgatcctccatcttaaagaagatcagacagagtacctagaagagaggcgggtcaaagaagtagtgaagaagcattctcagttcataggctatcccatcaccctttatttggagaaggaacgagagaaggaaattagtgatgatgaggcagaggaagagaaaggtgagaaagaagaggaagataaagatgatgaagaaaagcccaagatcgaagatgtgggttcagatgaggaggatgacagcggtaagggataagaagaagaacaactaagaagatcaaagagaaatacattgatcaggaagaactaaacaagaccaagcctatttggaccagaaaccctgatgacatcacccaagaggagtatggagaattctacaagagcctcactaatgactgggaagaccacttggcagtcaagcacttttctgtagaaggtcagttggaattcagggcattgctatttattcctcgtcgggctccctttgacctttttgagaacaagaagaaaaagaacaacatcaaactctatgtccgccgtgtgttcatcatggacagctgtgatgagttgataccagagtatctcaattttatccgtggtgtggttgactctgaggatctgcccctgaacatctcccgagaaatgctccagcagagcaaaatcttgaaagtcattcgcaaaacacattgttaagaagtgccttgagctcttctctgagctggcagaagacaagggagaattacaagaaattctatgaggcattctctaaaaatctcaagcttggaatccacgaagactccactaaccgccgccgcctgtctgagctgctgcgctatcatacctcccagtctggagatgagatgacatctctgtcagagtatgtttctcgcatgaaggagacacagaagtccatctattacatcactggtgagagcaaagagcaggtggccaactcagcttttgtggagcgagtgcggaaacggggcttcgaggtggtatatatgaccgagcccattgacgagtactgtgtgcagcagctcaaggaatttgatgggaagagcctggtctcagttaccaaggagggtctggagctgcctgaggatgaggaggagaagaagaagatggaagagagcaaggcaaagtttgagaaacctctgcaagctcatgaaagaaatcttagataagaaggttgagaaggtgacaatctccaatagacttgtgtcttcaccttgctgcattgtgaccagcacctacggctggacagccaatatggagcggatcatgaaagcccaggcacttcgggacaactccaccatgggctatatgatggccaaaaagcacctggagatcaaccctgaccaccccattgtggagacgctgcggcagaaggctgaggccgacaagaatgataaggcagttaaggacctggtggtgctgctgtttgaaaccgccctgctatctttctggcttttcccttgaggatccccagacccactccaaccgcatctatcgcatgatcaagctaggtctaggtattgatgaagatgaagtggcagcagaggaacccaatgctgcagttcctgatgagatcccccctctcgagggcgatgaggatgcgtctcgcatggaagaagtcgattaggttaggagttcatagttggaaaacttgtgcccttgtatagtgtccccatgggctcccactgcagcctcgagggcccctgtcccccctggctccccctgctggtgtctagtgtttttttccctctcctgtccttgtgttgaaggcagtaaactaagggtgtcaagccccattccctctctactcttgacagcaggattggatgttgggtattggggtttattttatttttttcattttgttttgaaattaaagtatgcaaaataaagaatatgccgtttttatacaaa

SEQ ID NO: 660502 - DNA, 269 bp, Homo sapiens
  misc_feature (137)..(137): n is a, c, g, or t
  misc_feature (241)..(241): n is a, c, g, or t
tgtcatgtcgcggcgcacgacgcgtatgatggcgcactgcaggcggcgccatatgcatctaggctataagtatccggatatacgtagccgcaacgtaacaaccggtactctagaactatagctagcatgcgcagatnaggagcgctgatatcgatcgcgcgcagatctgtcatgatgatccattgcattggctccatatatagggcccgtgttataataacctcaggtcgactgtccatgnccattcagaattcggaatcatgtcatag

SEQ ID NO: 660503 - DNA, 223 bp, Homo sapiens
aagaacaacagagaaactacaccacctcgagacacccaaagtgctgggataacagatatgagccactgcagcccagctgcaaggatgtatttactatcagatattctacaaaagcgatatcctatgtctcttcttgactgatttcttctcctacgatcctatcaatgaacaagcctactgtaggaaaaggaatgttgtccactttatcatgagatacatttga

SEQ ID NO: 660504 - DNA, 2594 bp, Homo sapiens
  misc_feature (35)..(35): n is a, c, g, or t
  misc_feature (39)..(39): n is a, c, g, or t
aagcagtggtatcaacgcagagtgcccattacggncggnggagtcactccggcgcagtgttgggactgtctgggtatcggaaagcaagcctacgttgctcactattacgtataatccttttcttttcaagatgcctgaggaagtgcaccatggagaggaggaggtggagacttttgcctttcaggcagaaattgcccaactcatgtccctcatcatcaataccttctattccaacaaggagattttccttcgggagttgatctctaatgcttctgatgccttggacaagattcgctatgagagcctgacagacccttcgaagttggacagtggtaaagagctgaaaattgacatcatccccaaccctcaggaacgtaccctgactttggtagacacaggcattggcatgaccaaagctgatctcataaataatttgggaaccattgccaagtctggtactaaagcattcatggaggctcttcaggctggtgcagacatctccatgattgggcagtttggtgttggcttttattctgcctacttggtggcagagaaagtggttgtgatcacaaagcacaacgatgatgaacagtatgcttgggagtcttctgctggaggttccttcactgtgcgtgctgaccatggtgagcccattggcaggggtaccaaagtgatcctccatcttaaagaagatcagacagagtacctagaagagaggcgggtcaaagaagtagtgaagaagcattctcagttcataggctatcccatcaccctttatttggagaaggaacgagagaaggaaattagtgatgatgaggcagaggaagagaaaggtgagaaagaagaggaagataaagatgatgaagaaaagcccaagatcgaagatgtgggttcagatgaggaggatgacagcggtaagggataagaagaagaacaactaagaagatcaaagagaaatacattgatcaggaagaactaaacaagaccaagcctatttggaccagaaaccctgatgacatcacccaagaggagtatggagaattctacaagagcctcactaatgactgggaagaccacttggcagtcaagcacttttctgtagaaggtcagttggaattcagggcattgctatttattcctcgtcgggctccctttgacctttttgagaacaagaagaaaaagaacaacatcaaactctatgtccgccgtgtgttcatcatggacagctgtgatgagttgataccagagtatctcaattttatccgtggtgtggttgactctgaggatctgcccctgaacatctcccgagaaatgctccagcagagcaaaatcttgaaagtcattcgcaaaacacattgttaagaagtgccttgagctcttctctgagctggcagaagacaagggagaattacaagaaattctatgaggcattctctaaaaatctcaagcttggaatccacgaagactccactaaccgccgccgcctgtctgagctgctgcgctatcatacctcccagtctggagatgagatgacatctctgtcagagtatgtttctcgcatgaaggagacacagaagtccatctattacatcactggtgagagcaaagagcaggtggccaactcagcttttgtggagcgagtgcggaaacggggcttcgaggtggtatatatgaccgagcccattgacgagtactgtgtgcagcagctcaaggaatttgatgggaagagcctggtctcagttaccaaggagggtctggagctgcctgaggatgaggaggagaagaagaagatggaagagagcaaggcaaagtttgagaaacctctgcaagctcatgaaagaaatcttagataagaaggttgagaaggtgacaatctccaatagacttgtgtcttcaccttgctgcattgtgaccagcacctacggctggacagccaatatggagcggatcatgaaagcccaggcacttcgggacaactccaccatgggctatatgatggccaaaaagcacctggagatcaaccctgaccaccccattgtggagacgctgcggcagaaggctgaggccgacaagaatgataaggcagttaaggacctggtggtgctgctgtttgaaaccgccctgctatctttctggcttttcccttgaggatccccagacccactccaaccgcatctatcgcatgatcaagctaggtctaggtattgatgaagatgaagtggcagcagaggaacccaatgctgcagttcctgatgagatcccccctctcgagggcgatgaggatgcgtctcgcatggaagaagtcgattaggttaggagttcatagttggaaaacttgtgcccttgtatagtgtccccatgggctcccactgcagcctcgagggcccctgtcccccctggctccccctgctggtgtctagtgtttttttccctctcctgtccttgtgttgaaggcagtaaactaagggtgtcaagccccattccctctctactcttgacagcaggattggatgttgggtattggggtttattttattccgcatttgttctgaataaatgcacgggggccgctggggtggtgtgggggtgggggg

SEQ ID NO: 660505 - DNA, 1932 bp, Homo sapiens
  misc_feature (35)..(35): n is a, c, g, or t
  misc_feature (39)..(39): n is a, c, g, or t
  misc_feature (1786)..(1786): n is a, c, g, or t
aagcagtggtatcaacgcagagtgcccattacggncggnggagtcactccggcgcagtgttgggactgtctgggtatcggaaagcaagcctacgttgctcactattacgtataatccttttcttttcaagatgcctgaggaagtgcaccatggagaggaggaggtggagacttttgcctttcaggcagaaattgcccaactcatgtccctcatcatcaataccttctattccaacaaggagattttccttcgggagttgatctctaatgcttctgatgccttggacaagattcgctatgagagcctgacagacccttcgaagttggacagtggtaaagagctgaaaattgacatcatccccaaccctcaggaacgtaccctgactttggtagacacaggcattggcatgaccaaagctgatctcataaataatttgggaaccattgccaagtctggtactaaagcattcatggaggctcttcaggctggtgcagacatctccatgattgggcagtttggtgttggcttttattctgcctacttggtggcagagaaagtggttgtgatcacaaagcacaacgatgatgaacagtatgcttgggagtcttctgctggaggttccttcactgtgcgtgctgaccatggtgagcccattggcaggggtaccaaagtgatcctccatcttaaagaagatcagacagagtacctagaagagaggcgggtcaaagaagtagtgaagaagcattctcagttcataggctatcccatcaccctttatttggagaaggaacgagagaaggaaattagtgatgatgaggcagaggaagagaaaggtgagaaagaagaggaagataaagatgatgaagaaaagcccaagatcgaagatgtgggttcagatgaggaggatgacagcggtaagggataagaagaagaacaactaagaagatcaaagagaaatacattgatcaggaagaactaaacaagaccaagcctatttggaccagaaaccctgatgacatcacccaagaggagtatggagaattctacaagagcctcactaatgactgggaagaccacttggcagtcaagcacttttctgtagaaggtcagttggaattcagggcattgctatttattcctcgtcgggctccctttgacctttttgagaacaagaagaaaaagaacaacatcaaactctatgtccgccgtgtgttcatcatggacagctgtgatgagttgataccagagtatctcaattttatccgtggtgtggttgactctgaggatctgcccctgaacatctcccgagaaatgctccagcagagcaaaatcttgaaagtcattcgcaaaacacattgttaagaagtgccttgagctcttctctgagctggcagaagacaagggagaattacaagaaattctatgaggcattctctaaaaatctcaagcttggaatccacgaagactccactaaccgccgccgcctgtctgagctgctgcgctatcatacctcccagtctggagatgagatgacatctctgtcagagtatgtttctcgcatgaaggagacacagaagtccatctattacatcactggtgagagcaaagagcaggtggccaactcagcttttgtggagcgagtgcggaaacggggcttcgaggtggtatatatgaccgagcccattgacgagtactgtgtgcagcagctcaaggaatttgatgggaagagcctggtctcagttaccaaggagggtctggagctgcctgaggatgaggaggagaaganagaacgtaatttggggcaacgcaggagccaaagtgcaaagtttgagaacctctgcaatggcctccaattggaaaaaacggaaaaatcttgagatacagaaggttgagaatgtgtgaccacattctttcccaaattaagacttttgt

SEQ ID NO: 660506 - DNA, 305 bp, Homo sapiens
cctttggaccgaatttttttgtaataagccatcaagggtataattttttttaaaatagaaattttgtaagaaggccatatttacctaatccccatggaagccctctggatgatggattccccaaaacttggttttatgggtacttcttctcttagattcttaattcatgaggagggggggggagggaggtggagggagggaagggtttctctattaaaatgccttcgttgtgttttttaagataggggaacctgcttaaatttcttatggggccttaaccaataaaaaagctcttttaattttga

SEQ ID NO: 660507 - DNA, 1860 bp, Homo sapiens
  misc_feature (35)..(35): n is a, c, g, or t
  misc_feature (39)..(39): n is a, c, g, or t
aagcagtggtatcaacgcagagtgcccattacggncggnggagtcactccggcgcagtgttgggactgtctgggtatcggaaagcaagcctacgttgctcactattacgtataatccttttcttttcaagatgcctgaggaagtgcaccatggagaggaggaggtggagacttttgcctttcaggcagaaattgcccaactcatgtccctcatcatcaataccttctattccaacaaggagattttccttcgggagttgatctctaatgcttctgatgccttggacaagattcgctatgagagcctgacagacccttcgaagttggacagtggtaaagagctgaaaattgacatcatccccaaccctcaggaacgtaccctgactttggtagacacaggcattggcatgaccaaagctgatctcataaataatttgggaaccattgccaagtctggtactaaagcattcatggaggctcttcaggctggtgcagacatctccatgattgggcagtttggtgttggcttttattctgcctacttggtggcagagaaagtggttgtgatcacaaagcacaacgatgatgaacagtatgcttgggagtcttctgctggaggttccttcactgtgcgtgctgaccatggtgagcccattggcaggggtaccaaagtgatcctccatcttaaagaagatcagacagagtacctagaagagaggcgggtcaaagaagtagtgaagaagcattctcagttcataggctatcccatcaccctttatttggagaaggaacgagagaaggaaattagtgatgatgaggcagaggaagagaaaggtgagaaagaagaggaagataaagatgatgaagaaaagcccaagatcgaagatgtgggttcagatgaggaggatgacagcggtaagggataagaagaagaacaactaagaagatcaaagagaaatacattgatcaggaagaactaaacaagaccaagcctatttggaccagaaaccctgatgacatcacccaagaggagtatggagaattctacaagagcctcactaatgactgggaagaccacttggcagtcaagcacttttctgtagaaggtcagttggaattcagggcattgctatttattcctcgtcgggctccctttgacctttttgagaacaagaagaaaaagaacaacatcaaactctatgtccgccgtgtgttcatcatggacagctgtgatgagttgataccagagtatctcaattttatccgtggtgtggttgactctgaggatctgcccctgaacatctcccgagaaatgctccagcagagcaaaatcttgaaagtcattcgcaaaacacattgttaagaagtgccttgagctcttctctgagctggcagaagacaagggagaattacaagaaattctatgaggcattctctaaaaatctcaagcttggaatccacgaagactccactaaccgccgccgcctgtctgagctgctgcgctatcatacctcccagtctggagatgagatgacatctctgtcagagtatgtttctcgcatgaaggagacacagaagtccatctattacatcactggtgagagcaaagagcaggtggccaactcagcttttgtggagcgagtgccgagggcccctgtcccccctggctccccctgctggtgtctagtgtttttttccctctcctgtccttgtgttgaaggcagtaaactaagggtgtcaagccccattccctctctactcttgacagcaggattggatgttgggtattggggtttattttattccgcatttgttctgaataaatgcacgggggccgctggggtggtgtgggggtgggggg

SEQ ID NO: 660508 - DNA, 418 bp, Homo sapiens
  misc_feature (13)..(13): n is a, c, g, or t
  misc_feature (32)..(32): n is a, c, g, or t
  misc_feature (41)..(41): n is a, c, g, or t
  misc_feature (65)..(65): n is a, c, g, or t
  misc_feature (106)..(106): n is a, c, g, or t
cctggataaaggnattccggccaatggtttcngggatatangattaatggtacacaaatccggtngctccttcctatacccccaacagtgacccaagcatagaatnaaatcaagaactcaactcccttttacaatagctgcaaaaacaaacaaacaaacaaacaaacaaaaaaaacttaagaatataccaaacaaaggagttgaaagactgctgcaagggaaactacaaaacactgctgaaagaaatcatagatgacacaaacaaatggaaacgcatgccatgcccatgaatgggtagaatcaatattgtgaaaatgaccatactgccaaaagcaatctacaaattcaatgcaatccccatcaagataccaccatcattcttcacagagttagaaaaatcaattcaaaaattcatatg

SEQ ID NO: 660509 - DNA, 1169 bp, Homo sapiens
acgccaacggctgcgctagggattccgacgtagagactccactcaacggcttcggcggtctgagctgctgcgctatcatacctcccagtctggagatgagatgacatctctgtcagagtatgtttctcgcatgaaggagacacagaagtccatctattacatcactggtgagagcaaagagcaggtggccaactcagcttttgtggagcgagtgcggaaacggggcttcgaggtggtatatatgaccgagcccattgacgagtactgtgtgcagcagctcaaggaatttgatgggaagagcctggtctcagttaccaaggagggtctggagctgcctgaggatgaggaggagaagaagaagatggaagagagcaaggcaaagtttgagaaacctctgcaagctcatgaaagaaatcttagataagaaggttgagaaggtgacaatctccaatagacttgtgtcttcaccttgctgcattgtgaccagcacctacggctggacagccaatatggagcggatcatgaaagcccaggcacttcgggacaactccaccatgggctatatgatggccaaaaagcacctggagatcaaccctgaccaccccattgtggagacgctgcggcagaaggctgaggccgacaagaatgataaggcagttaaggacctggtggtgctgctgtttgaaaccgccctgctatctttctggcttttcccttgaggatccccagacccactccaaccgcatctatcgcatgatcaagctaggtctaggtattgatgaagatgaagtggcagcagaggaacccaatgctgcagttcctgatgagatcccccctctcgagggcgatgaggatgcgtctcgcatggaagaagtcgattaggttaggagttcatagttggaaaacttgtgcccttgtatagtgtccccatgggctcccactgcagcctcgagggcccctgtcccccctggctccccctgctggtgtctagtgtttttttccctctcctgtccttgtgttgaaggcagtaaactaagggtgtcaagccccattccctctctactcttgacagcaggattggatgttgggtattggggtttattttatttttttcattttgttttgaaattaaagtatgcaaaataaagaatatgccgtttttatacaaa

SEQ ID NO: 660510 - DNA, 232 bp, Homo sapiens
  misc_feature (73)..(73): n is a, c, g, or t
  misc_feature (98)..(98): n is a, c, g, or t
gtcactcatagaaaagttcttcctttatttctctttggaagtactttagtgaacttccccccattataacaantgcttgttcaatatggaaagatggnaaagttaaaaaaaaggtgtttagggtcttaggaatgggcttttgagaaaagaagtcgtctagagggaggttctgggtgtgcttaagagctttttttcagtaccaagcacacctggctcacaccttctcatccca

SEQ ID NO: 660511 - DNA, 735 bp, Homo sapiens
gctgaatcagctcgtaccacactggggtggtcagtgattgatctccaggtgctttttggccattatatagccaatatggagcggatcatgaaagcccaggcacttcgggacaactccaccatgggctatatgatggccaaaaagcacctggagatcaaccctgaccaccccattgtggagacgctgcggcagaaggctgaggccgacaagaatgataaggcagttaaggacctggtggtgctgctgtttgaaaccgccctgctatctttctggcttttcccttgaggatccccagacccactccaaccgcatctatcgcatgatcaagctaggtctaggtattgatgaagatgaagtggcagcagaggaacccaatgctgcagttcctgatgagatcccccctctcgagggcgatgaggatgcgtctcgcatggaagaagtcgattaggttaggagttcatagttggaaaacttgtgcccttgtatagtgtccccatgggctcccactgcagcctcgagggcccctgtcccccctggctccccctgctggtgtctagtgtttttttccctctcctgtccttgtgttgaaggcagtaaactaagggtgtcaagccccattccctctctactcttgacagcaggattggatgttgggtattggggtttattttatttttttcattttgttttgaaattaaagtatgcaaaataaagaatatgccgtttttatacaaa

SEQ ID NO: 660512 - DNA, 187 bp, Homo sapiens
  misc_feature (17)..(17): n is a, c, g, or t
  misc_feature (29)..(29): n is a, c, g, or t
  misc_feature (82)..(82): n is a, c, g, or t
  misc_feature (127)..(127): n is a, c, g, or t
  misc_feature (181)..(181): n is a, c, g, or t
gtcccccggggcaaggnctccttactctnagcccaggccgttccccttggtttcctccgtccacccaggctgcactgcagtnatggcgcgggaggcaccagctctgtggcctgtttccagcaactgngggtctgaaggaatagccagagaggagcacctgaaccccatgggcttggacttnctgggg

SEQ ID NO: 660513 - DNA, 671 bp, Homo sapiens
  misc_feature (319)..(319): n is a, c, g, or t
  misc_feature (634)..(634): n is a, c, g, or t
gctctcggttttcggctcggaggaggccaaggtgcaacttccttcggtcgtcccgaatccgggttcatccgactacctaggcgtcctccaccatgccgacgtaatgttcgacccctaacggagatctaaagtcgtatacctgaggtgctgcaggaggtgaagtcggtgccatttctgtcctggtccccaagatcgggcccctggtgtctgtctccaagaaagaaatgttggtgatgacattgccaaggcaacgggtgacttggaaggggcctgacggattaccagggacatattgatccacttcaagaagcagcatganggtccagagttagacggtggagtcgcgcatatcatgtcctctgtcgcctggagtacatgcaataagcgcacatcaatggtaatggcaccaatgagacatgaaagaaaatcaggaataaatagttatagatcacgagctgggaatgatctactttttgatagagcatttgtccaatcataggctcgacgagatgcggctagcgatccttagtccagaggaactcctctggtaaccattagagagattcctggggactgtccagtcagtgggctgtaacgttgatggtcgccatcctcgtgacatcatcgatgcatntcaactgtggtgctgtggaatgcccagcggttaagcc

SEQ ID NO: 660514 - DNA, 229 bp, Homo sapiens
  misc_feature (1)..(1): n is a, c, g, or t
  misc_feature (4)..(4): n is a, c, g, or t
ntgntcattcatcgaaaaggcaccaagcctgtatgggtcagtgtgctgtataccccggatgcaccagatggcgttgccttccgggagctgaccaaggggctggtggagctggacacgccgaaagcaaaaccggaatggcagacctatttcacttcccagatggccactaaggatacgaaagagatcacacggatcttcaacgatacgcgcagtgtgtaccgctatacct

SEQ ID NO: 660515 - DNA, 982 bp, Homo sapiens
tcacaaaagcatttttaattggaggcaaaaaaaagtctggctgaaaggtattccagttccaagcagtcaaaattcaaccgttaggggactatttggacctgggtaagatttcggcttctcttgggtcaagaaaaggggtatccagggttggtactttccccagcagggtaagaaaagaaggggcacaagcaacactgggaaagaagacttctactctactggacagggctcttgagatccaacatcaaagtcttaagaacacgccctcgttgggccatcctctaccgggtgttggtcttgccccatctggtctgatgtgacacagggccatatctacttttggcaagggaaaaaatattgagggcaaagaaacacagggtaataggtcacttgggggacagagcagggcaaccacagcgtttcaaaacctctttcatggagaaggggagtaactcctttggtggcgagagggtcacacgctcaacaagggcacaagacccttccagttcctggttggtacgctagagataaggggggtcaatatccgggctggcctcagtctcaaaggtcaacagaccttaaaggttctcacgcaatggctgtatctgggtggtcacaagatttgggcggatccaccaccaatgttcctctcgcttggggagaaccgggatcaggaccggggctgggtaagttcacattgggagctgggctgcgatccgccttagcccctgggagatcctccaggacaagaaggggtccctcgggcttgggcccaggcctgtcccggagaaccctgaggggcgctttgtagcggggtccaccacagattgcctttgggacctggcgcagtacgggatttaaccttctccctgacgtcacactatggcggggacctcaatctcggtacacctggcaggcttaatacttccacggccacgttttgttaaagaccattccccacctggaaatgcgtcacatttgg

SEQ ID NO: 660516 - DNA, 435 bp, Homo sapiens
ggacagagactctggatagtgtcgacttgacactgattccaccatgaatgggattgaaggatcagttctgctcactcaacatctgtactcatgtctgaactatgggttctagacagtccaaggactcttatggtgagagcctgaactctcatgagctgcagacctggactgactatgctaaggacctgatagatacaggcactagcccagagctacaagcccatgccagaagttactgtgacatgtccttgtagcagattgcatcctgatcaagacgctatgccgatagccgtgaacgtcttgacctagtacatggatgttgcaactcagtctatcacgtagtgacgtgttcagaccaatgactctcaagcgtatctaggctttataacgagctattgggccgttcgtcggttcatacccacgtagacctacgat

SEQ ID NO: 660517 - DNA, 224 bp, Homo sapiens
cgacgaatcttctcaatgggaaaacggctgagctccagccaccccgtagtcacttgctttgttacagcttccgttggtgccatcggatacttacacagtgtgtataacgtggtacatacattaacttatggcctcattttgttatttttcgaaacaaagccctgtggaagaaaatggaaaacttgaagaagcattaaagtcattctgttaagctgcgatgggga

SEQ ID NO: 660518 - DNA, 495 bp, Homo sapiens
cccggggggggcccctttaaaaaaaggggatcccccggggggcaggaatttggcccaaggggcaactttaaaagattggccccccaggggttttaaacgggtattgggggggggcccccggcaaaaccaggcaaatttcaaaaagggaaaaaaaaaagcttcaaaaaaaaaaaaagcccccccgggaaattgttaaaaaaattgcaaaaaaaattttcaaaggccatgccaaagttaaggaaaaagctttttaaaaaaaaaccaaggggggggggggattaaaaaaaggaaaacatgaaatttttcccaaaaaaaaaaaaaaaaaaacaaaaaaattttttaaggaattttttaaagaaaaaaataaatcaaatgatgaaaaaatgtaaaaatttcccccgcctttattgttttttaaatttttacccccggccaaaggaaatatttaacccggggttaaaaaaacgggccaattttcattaaatttttgtttta

SEQ ID NO: 660519 - DNA, 124 bp, Homo sapiens
gggggaaggaaagtatggaactgggggtgggtctggcctactggctgacattaactacaattatgggaaatgcaaaagtggttgggatatggtagtgtgtggttctctttgggaatttttttca

SEQ ID NO: 660520 - DNA, 421 bp, Homo sapiens
  misc_feature (90)..(90): n is a, c, g, or t
  misc_feature (250)..(250): n is a, c, g, or t
atctccataaccaagatctttagttccttccagtgtaagaagccggggtactgactctcttcttaaagacacagagggatacgataccanagcctgtctggctcccagggtgtggcacctcactggctgggtaagccctgctgcacagcccagtaactgttggctcgcaagaagcgggctaggatgggtccctgcctcccagcctgcctctctggaccctgctcctcgagtgtagaacctctcagccccntcatgggtcttgggtcccaggcagcccatgactccaggaaagagtctaagttagaagccccccacccccaattcttattattcccattacttgtgccacatgttcccaggacccatccaataattaattaaatccttaagaaagccaggccagctccaggaaaggaaagga

SEQ ID NO: 660521 - DNA, 331 bp, Homo sapiens
aggttgactctgggatccccagcgaccgcggtcaatgcaggcgatcctgaggacgccatccctagagagtggcgataggacgaaagacccttacaagcgcatctcgatctgtcctctacaaacgaattgcctgtgaggaagagttctccgattctgaagaggagggagacggggggccgcaaggaactcttccaacttcaaaaaagccaagagagtctaaacagaggatgaaaaagagaaagacccagaggagaagaaagaagtcaccgaagaggagaaaaccaaggaggagaagccatgaagccaaaggggctcaacggacggaggtcaa

SEQ ID NO: 660522 - DNA, 124 bp, Homo sapiens
gactctagtaggatccacgagtgtcttcagagtgtgatgttgttcttttcttcttgtcctcaaaaaggtcaagagggagaccgacgaagaataagatagcaatgccctgcaattccaactgacc

SEQ ID NO: 660523 - DNA, 93 bp, Homo sapiens
  misc_feature (90)..(90): n is a, c, g, or t
ccagaccaagagcaagatgccatcactcgtaatgagaaagcaggggacatcgcactcctgtatatacaagcgatagaaaggacaatactncgc

SEQ ID NO: 660524 - DNA, 152 bp, Homo sapiens
tacatagagtaagataagagctatataatcaatctgcttcatagggcgttatcgagttagcacaccatcatatgtacagtagaatagacgctagacacacagagcatatttactcctcctcgtatcatagtcatcgcttatgcctaacctgg

SEQ ID NO: 660525 - DNA, 881 bp, Homo sapiens
  misc_feature (159)..(159): n is a, c, g, or t
tggaatgctggattccaagttattcccggggctacctgggtggaacccatagtttggtggattgtgtattcccatttctgaatctcagggggtgtggcaggttgggtttccagaaaatgtgctctccatatatagctcgtggaggcccctcttaggganctcgtgacatgtgttatttaccaaagccaaagaggtaaccttgagagggcgtggcatgtggaccgtggggtgttttatctctgtgggcgtggtgggaccatctgcgggttctcttctttcctccagtgtggcaaatgtgacagaccttccgagctgggtagacgtagacgtgggtgggagggttctccatggggcgtgtgcaaggtctctttcaaccaaggagaccccagtgttgtgttacccaacaagcccctcgtggcgtgagccgtgagggggaacaccatgtggtcccccccgtgggcttttcccacaaaaaaccccacccaaacctttggggatttcaccaacaaaatgtgtgggtccctctataggagcccgtgggggggccgttgcccccttataacctgctggtattatacccaccccgtgtggcgttggcctctcccctgtttatagatctccaacaggacaatttctcatagagaaaaatctcccacatatttgtgcgcacgtggtgtggagacatatacccgccgaaaaaaaacttccctattatgtgtgctacgcccaatttcccccaatagatgtggtgtggaccaacactcccccacactttactatatacaacgagagactcctctgttttactaccaaaaacaatttacccgtgggagagatttcatcgtagtgatatgttggcagaaaccccgttagaaaaacgc

SEQ ID NO: 660526 - DNA, 461 bp, Homo sapiens
cacgaggactcggccaccgccgaatccagtgacgcctgtgcggacgctctgcaatcggtgatggaagataccgattcagcaatggaagacgctgtcgatctattcacgacggtggtggagacgggattgcccttgatcctgcctctgcctccgccggcgaaaaagatcgctatgcatgcgctgacgcaggtggggaacgcagcgggtttgctcctgttgaaccaggtgaaggcgcatgatcgtgccctcggtgaagcgttgggaacactatcgacacattgctcggaacaggtcagtgtgtgtggagcgtgcccggtcgagccgccgaaacctctgcagcactgtgatgccgtgacatcacgaggtaaggatgcggtgccgagtgttgtgccgaggaacgaatcgtcaccgatagtgagtgtttgtccttcaccggcgacgccggtctcgccggggacatc

SEQ ID NO: 660527 - DNA, 357 bp, Homo sapiens
ttgcagtattttaccgtcaagtcaaggcaccctcccctcttttagaaaatgaatccttgccaagtgtgtatccgtttaagctcttattttgggttgtgtgtatccggcacaggaaggttggtcctttgcctccccgagatttattgatcctttctttaaggccctattcatcagagcactggcagccagggacaggttggcagtgttcgccaaatagacatgtatttatagaaacatattttcatgcgttaggcaaaggtccagttatcagaagcgattatccttttatctgtatttgattgtatatatgaatgagcaacattttaaaggctcagatccctttgaaagagtccatag

SEQ ID NO: 660528 - DNA, 447 bp, Homo sapiens
  misc_feature (8)..(8): n is a, c, g, or t
tcatcccnccccccccccccccatcaataccatggcattttttgggaatgtcccaaagagaaggctcgcaccctgccagagaactggccaaccggttggcaccatgctgcaactgaatgagcatggaccacagtgtggcttccattgccactgcttgctaacacatgcaaatgaggatggatcctgctgccaccaccccacaaagtgctttggctgggacctcccatcagagtgttgtgacctttggtctgggagcaccacagcccctccagcacagcaggttcctaacgtcaaggagccagagaacaaagctagggcctgatataagtcccccagagttagagcatgcagtccaggagtcctgaggtgagtcttggccccctaaaatcttccagtaacgaagccagtcaactcaacccaccttatgccacaatcaaacccataagg

SEQ ID NO: 660529 - DNA, 178 bp, Homo sapiens
gcatacctccgcctcctctagaatattgatccatgatccagagttcctatattaacccactcccttgtttcttctgagcttcagcctagagatcaaaatagtttctgaattctagagaaaccagcagaggaacaaatactctccatattttgttcactggagtataccttactcaatt

SEQ ID NO: 660530 - DNA, 723 bp, Homo sapiens
  misc_feature (536)..(536): n is a, c, g, or t
  misc_feature (560)..(560): n is a, c, g, or t
  misc_feature (617)..(617): n is a, c, g, or t
aaaaaactaagtaataactggagcctctaaatttattatccattatccagtgatgggataggttggtatttcttctatcatggtttaggggccaaaataggtatattgtgtcacagagggcagcatctccttagtcccagctcaggctctctgccttccagaggccgcttctccagtgactaaacctcctccttctggcttcttcttgcagaccgttattcccttgtttagaacacgaatttccatttacctggtgggaacacgaaacaggagtctcttctgttctgcaagtttgatgggtaagaggtagccttttttcaaagtaggatttcctttttcaactgttccaggaaagaatctctaagactgggtagctcacagccagcccaaggcagctaccatttcaccagaagcccgtcccgtgcctccgtggcttctccagccattgaactggtcccacacgcaccccaggccccactcctcggcagtttcaggtgtagctgtggggccccgttctaggtctgtactcactttanggaggcttcactgactaggctttnctcctgcatgttgaatttccttcagctttagagggagaagtgaataaatttcctagngatttaatgcactttgacttgataaactttcctgggtagcgacggatctattagccttttacgacgatggatctgagctctctttcatgttgtagggtgtttcttg

SEQ ID NO: 660531 - DNA, 288 bp, Homo sapiens
  misc_feature (14)..(14): n is a, c, g, or t
  misc_feature (23)..(23): n is a, c, g, or t
  misc_feature (260)..(260): n is a, c, g, or t
  misc_feature (279)..(279): n is a, c, g, or t
aagaaaggaagggnccctggtgnaagtggctcatgcctgtaatcctcagcatttggggaggtttaggcgggcagatcgcctgaacctaggagttcgagacccgcctgggcaacgtggtgaaacctcatctctacaaaaattagctgagcatggttgtgtgcacgtgtggtcccagctgctcgggaggctgaagtgggaggatggtgtgagcccaggagtggaaggttgcagtgagccatgattgtgtcattggactccancctggatgacagaatgagntcctgtcat

SEQ ID NO: 660532 - DNA, 150 bp, Homo sapiens
tgccaggcatatactgcagctttcagtcgtcgagatgatcattatttcctgtctttatatctcttccgattatcagtctttctttagatcttcatggagaccatccattaggaacagaagcatttcttgtgaatctggctgactgtatcc

SEQ ID NO: 660533 - DNA, 301 bp, Homo sapiens
tgaataaactcaagctttcaattcttcatcaaaaggtgcatgtccaaatagtgagatgtattccaatatggaactcccatccaatggctaggagatgagacagcagcagacatggaagagaaaccttagaaaattctgctgagaatatatatttttttcataatgctcatgtttcttgtgctgagagtagctgtgcacttcgtttagagagaaatttgtttaaggggagtatttttggttgacttgatcaatctttcatctaatctaagttttttcttaagatgctttgaacttctttttt

SEQ ID NO: 660534 - DNA, 759 bp, Homo sapiens
  misc_feature (326)..(326): n is a, c, g, or t
tcagtcccgggaaaaggtgacctgattctctgagggtccttgtgtagtcgtgaaattgtccccgcagttttcaatcatgtctgagaccaatcagagtccttgtgactgagagcatgctgttcaaattgcatggttcagctgctgtacacgtatgaatatgagatctgtcttggggaaggatcagcctataattctgtgctgtgggatatcagccccatgatgggtgtcctggacgggtcctagatggaggtgcaagattgtgcccttacccttcctgagaagatgtcatcgcaacagactatagaacgacgttcgccttcaaagancctggatgtggcccattcttgttggtgctccatgccagagcagggaaccgcatggagagaaacagatttactgaaagcaaatgtgaaaatcttcaaatcccaggtgcagccttagataaatacgccaagaagtcagttaaggttattgtgtgggtaatccagccaataccaatgcctgactgttccaagtcagctccatccatccccaaggagaacttcagtgtgcttgacctcgttggggatccacaaccgagctaaagctcaaatgtggtctttaaacctttggtgtgactggctaatgattgtcacagaattgtccttattcttggggaaaccatttcctcgaatcaggatccacgttgtcaccatgccaggtggcacattgccggaacgaatggggttatgagctctgaagatacagcgggtcccggga

SEQ ID NO: 660535 - DNA, 630 bp, Homo sapiens
tgaatacggcacgaggagagagagagagagacgagacgagagagagagagagagacgagagagagagagagagacgagagagagcgagagagagacgagagacgagagacaaccacaacgagcaagagcatacgagagcacgatcagacaacaagaacgacgattagatccgcatccagaggtgttaatgcaaactcatcgactattcgccacctgtagactcgacaatcgtatgtgtatctaatgtgcacggcattgatctggtgtctcctgcgctcctaactctcccagctgatcactttcctgacctcttatcatgtttcaactataattatactacatgtatcctaggtccctcttacatgttctcccttctcccttctgtacgagcttatcgactcagggatatcaagctctgtaatgttatcttgatgacgaagagctcgtccgatgcctatcctccttatgctttggtgctgtctgttgagttgtgcaaccatatcgaagcacgatgggacgagtacctgtgacgtgtctctgtctggtctatcatgcacaatagcggcaagtacactgtgtgtcatgcgataacatactactggggtcacgatagtctgtgatcgatggatg

SEQ ID NO: 660536 - DNA, 361 bp, Homo sapiens
  misc_feature (320)..(320): n is a, c, g, or t
ttccaaaacatgccaagaattccacaatatttacattgtaaagtactcctgtaatactggagttaatttaaaatacattcaaagcaggatgcagtggctcatgccatataatcccagcactttgggaggccgaggagggtggatcacttgagataaggtgtttaagaccaacctggctaacatggtgaaaccctgtctctattaaaaatacaaaaattagcaaggcatggtggcaaacgcctgtaatcccatctactgcggaggttgaagcagaagaatcagctgaacccaggaggtggaggttgcagtgagccgagatntgtgcccctgcactccagcctgggaaaaagagcaagactcc

SEQ ID NO: 660537 - DNA, 156 bp, Homo sapiens
atattgcccaggctggtctcaaactcccgggctcacgcgatcctccagccccggccacccaaagtgctgggattacaggcctggccatgagttctagaattagatgctcctgggctcagggaggcactcaggggaatgccagagaggggcggagca

SEQ ID NO: 660538 - DNA, 172 bp, Homo sapiens
catctggatccttcatgaaatattaagcactgtagagtcagaaggcagctgagagtagatgcgcagcacagccaggtcaggcgcgttctcgaggtgcctccagatgctccacaactctggatctgacggtcaccgtcaactgtacctctatggcccaggacatgacagactc

SEQ ID NO: 660539 - DNA, 659 bp, Homo sapiens
  misc_feature (382)..(382): n is a, c, g, or t
tgtaatcccaacattttgggaggcaaggtgggaggattgcttgagcccaggagtttgagaccagcctgggcaaaacagtgggacccccatctaccaaaaaaaaaaaaaacaaaatttacccgggcgtggtggcgtactcctgtgttggtcccagcttactcaggaggctttgcagtttttagacaggcgttactcagaagaaaagcctcactgagtgtgacattctgcagaagggcctgaaggaggggagggcaagggaggagcagagtgggtattaggaagagcatttccgagaagcaggatgagccagttgcaaaggcccagaaggttaggcttggtccccttttctccttgggaacccccttcccttccttcctttgcntgcctccttaaaaccacaattaggtcgaggagctctggaactgacccaggtacagtctggaaatctgtgctttgaggaacagaggaggtatagagaatatgagatttgtgaaaaggaaagcgtcatcgtgatcgttgattgccccagcgcttgagagttgataggtgtgcatttagactctcggctcaacgtgcaggccttataacctccgtggctcaagacaagcccccttgccttttgcctaccaagtacctgagactacaggacccttaccacg

SEQ ID NO: 660540 - DNA, 1217 bp, Homo sapiens
cgctgtttttatctgcagttcctttttaggtattgtacaaatgtttcttgaagatttttaaatacaataacgtttaaaagatgaattaacgttcaattatgcaaattaacaagtgagaagtgggttgcctttgtcttcagttatcgaagagatggttgcagtcataaatactaaaggagcgtgaagttataaagagataatagagagagagttggctgctaaaatgaatctgagcaatatggaactattttgtgccacacgacagaacaagcactctggcacaactgtttctcgtttaggtattggtttggtgttgtacaagagagcaggatcttgctatgtttcgccagactggtctcgagaacgtcctggtctcaagtcatcctcgtcaccttggcctcccaaagcattaggattacatgacagtgagacatcactaccacagatccctagatagctaatgttgaagtgtactgacagatttaccccccaaaatacagaattgtcaatgatgacaataaagcgtaactgatatcaaacaagcagcagtccttgctgctactggtcatcatgcgtaacaggggtgcgtgaaggagccagagcattgccgatcttattctacaaagatgatcctgaggaacttgttatgcggttggcagtgaacatttggacctggcaagttatggagcagctcattgctgcgtacaatttgtccaagcaactgacggtggtgccacttacgcacgaatgttccctattattgggcaagccgaaaccctgtgaaaacatgggccgaatattccctaagggacattcacaatttttcagacaatggcacgcattcgagaacacttatgagagtccaagcggggtacacctgagacaacccacggcagtgacagtggaaggagcaatccatacgtcacgcccgtgtacactgacacccgtatccaaaaaaccactcgcgacccgtcagcgcactgccataatgataagacgtcggtcaagacacacaacagatcaaagagagataacacgagcccacaccaccaactctaacaaaacgacaactacaacagataataaagcactgcgcacaacggcggaccagactgaaggtaaacatagaaagtagagatcctctatgatcattaaagaccacggaatagaccacagagatggagatatgaacatacaacatcacactgccgcaagct

SEQ ID NO: 660541 - DNA, 791 bp, Homo sapiens
  misc_feature (29)..(29): n is a, c, g, or t
  misc_feature (483)..(483): n is a, c, g, or t
  misc_feature (499)..(499): n is a, c, g, or t
  misc_feature (556)..(556): n is a, c, g, or t
  misc_feature (562)..(562): n is a, c, g, or t
  misc_feature (571)..(571): n is a, c, g, or t
  misc_feature (579)..(579): n is a, c, g, or t
  misc_feature (619)..(619): n is a, c, g, or t
  misc_feature (728)..(728): n is a, c, g, or t
  misc_feature (769)..(769): n is a, c, g, or t
gccggtacgaccacccagtgcgaactcgnctatctgtactcctgcggttaccgggccggtcatctgcatggcagtgactgtccgaacgctttctgtttatataacaaacgcactatacgtggcgtcccggctccaccggacgacttgatgtcccactgtatagaataaacaactcgggaggtctttataaactatacgccatgccaccctgtcacctagtgttttctcaagcgcacttacgttaaacggggacgtacggcgcacgtggaattaatatctataccatgaccgtatttaatatttgcatcctaacaatacgacacgctattttctgggtgtagagatgggggcaagtacggatttatactaaacagcggaactctttacgcatctacactggggcgcccatttggcacctcaaacgatttaccgggacgcggtaaatgaggatttaacacgtgacttgtgaaaatggtttcttgngcagcgcgcctggtgntgcattttcaaccgtctcatgattgaccactttggttccaccggacagtaatgacangaaatnactgaattnccaattgntttactcaccacactgtttttctgcgatacgcttgggtanccgtggttggggaccgtggatggggacccgatcacgcttccaccactatacgacccgaccttgtttcgcgtcacggtatttttacgcctggcgtatattcgtgtattanatttatctgtcgcacacgtccacgtatgctatatatttatnttaaatcactctaaacttttag

SEQ ID NO: 660542 - DNA, 261 bp, Homo sapiens
agcaaacacaaaatataagtctctgatctagctgatgagaaaaataaagcaggtgagtgagattaagctattaccaaagggggtggcactcccatttacagtggggaggaaggaaagatctcaagaaaagggaaattgcggttagattaaatgaattggggccaggcatggtggctcatgcctgtaatcccagcaccttgggaggctgatgtgggaggactgcttgattctagcagttcgagaccagcgcggtaaaagctt

SEQ ID NO: 660543 - DNA, 644 bp, Homo sapiens
ccttctaagccacaagaacgttattggaggcatacgccacctgacttcaagctgtagtacaaggcactacagtaacaatacacagcatggtactggtaccaaaacagagatatagatcaatggaacagaacagagccctcagaaataataccacacatctacaaccatctgatctttgacaaacctaacaaaaacaagaaactggggaaaggattcccatttaactaaactggctgctgggaaaactggcctagccatatgtacaaagctgaaactggatcccttccttacaccttatacaaccaactcaattcaagactggacttaaagacttacatgttagacccaaaaccataaaaaccctagaagaaaacctaaggcaacgccattgaggacataagcaccaggcaaggacttcactgcactaacacaccaaaagcaatggcccaccacaaggacaaaattgacaaatgggatctaactaaactagagagctctgcacagcaaaagaaactacccactcaggagtgaacaggcaaccacagaatggcagaaaatttttgcaatccactcattcttgacaagggctactatccgaacctacaagaacgtagccaattttcaagaacaaacaacaaccccat

SEQ ID NO: 660544 - DNA, 567 bp, Homo sapiens
tcccccccccccctttttttttgccgttttgcaaaaccttttccaaaagggtgtaaaaaaaaaaaaaaaaaaaaaaaaaaaaaaacaaaacacaaaacaacaaatcatatttctaccacccccgcacgtacttgtgttttgttcccgcatgtgtgtccccccgcggcgcccccccccccgtggtgtgtgttcgcaccgccgtctattgtaccccagtgctgtctaattagataataaaacacacgagcgtcataataaaatttattattctatcattatgtggtagcgacctctgtatttgcgcgagggtgtgagcccaccagacatacacagagaaagaagcttctcgagcaccaaacatatgagtgtgacacacccaattcctataacacggcggtgtggcgaatatacatcatctatatatgagatatagaatgaatagcactatataaaagcactctcttactccaaaccaagagcggctaataaaaaatcaacccgcccccacgtactctccgcgcgatgagtatcacagatgttattatcatatcccccgcgaggtgggga

SEQ ID NO: 660545 - DNA, 576 bp, Homo sapiens
ggtgtttattgactgaaattgacgccattgggacaaaaagatatgactccaattctggtggtgagagagaaattcagcgcaacaatgttggacactgctgaaccagttggatggattctgattctagcgcgcgagatgtgacacagttatcatggccacaaaccgaactagaaactcttggatccagcacttatcagaccaggaccgcattgacaggacagcattgagtaccccctgaactgatgaaacagacgaacgaagcgcactctcccacactcacacaacgcagggatgacgccggcatgaatcactataaaccctgcacagaccctcactcattagcataacaccatgacccacgtcctaccataacattacaatacaaccgcaacccatcaaccacccacccaagacacatcaatccgcccccaccaccacaccctaccactccaccatccacacatcaaacaccactcaccacaacccaccacaccaacctcacctcccacaacccaccgcacccaccaccccacccccctcccccccacccaaccctacacacatacacccccaccc

SEQ ID NO: 660546 - DNA, 749 bp, Homo sapiens
gctctgatccggatctgcagttcctggagagccagcgtgggacaggtgagcctccatgtgacgtgacctggaggatgcacgaaaatgcagcttattcaggacgaagagcatctcaatcaataggtgggtatgctcgcagcggtttgctgggccgccttggaccaagaatcgtgccagtggcagtgtgagaggaatgagagctcgctgtgtcccttgttgaactccagatcgtgctaataggcctgggggaaagccagagggaggagtcaaagtgggccttgctaggaggcacgatgttagacgataccaaggtgcatgagggcatgccaggtaggaatgagcgtccgcgcaggccatcagggagctggagaaggagctacagaatgtggtcgtggcgtaactcagctcctggagggcaacgctgcaagccctgacaggcctgattaccatggtctttgcagcagcgggaatcagtcatccagggctccttgggccgtccctggaggccgagcaggtcagcatccggtacttgggtgaccaggatggaggtgagcttgctggctgtaaggaaggccaaggaggccatgaaagcccagatggcagagaaggaggccattctacagagcaaggagggcgagtgtcagcagctgcgggaggaggtggagcagggcagcaacgtggcagaagcccggcacagagagcttagggctctcgagagccagtgcagcagcagatccagctgaatttgg

SEQ ID NO: 660547 - DNA, 231 bp, Homo sapiens
  misc_feature (21)..(21): n is a, c, g, or t
  misc_feature (173)..(173): n is a, c, g, or t
  misc_feature (186)..(186): n is a, c, g, or t
cccctctgagcctcagattgnccttggcaaatgctgggcctggacgagccgccttagcagccgtcacacacccgtgtcaccgcgcacagactcagtcttactgaaccgatgggaggacgccgggcgaagaagcctatagaagcaaggttcgcagcccctttttaggttcccancacagtctctcgntctctaccacgatctagaagatcccctggagactatacacatcct

SEQ ID NO: 660548 - DNA, 348 bp, Homo sapiens
caaataaatatataataggaggggaggtgaagatcagtgctatgcagagaactaaaacaagttcaggagggctgagagtggtggttcacacctgtaatcccatcactttgggaggccaaggcaggtggattgcatgagctcaggagttcaagaccagactggccaacatggcaaaacccccgtctctgccaaaaaaaaatagaaaaaaaaaatagccaggcgcttgtagtcccagctagttgggaggctgaggcaggagaatcacttgaacctgggaggcagaggaagcaggtgagctgacattgtgccactgcaccccagcctgggtgacagagtgagacattctca

SEQ ID NO: 660549 - DNA, 412 bp, Homo sapiens
tgaattcccccgagtcaccctgttctcttatcatcacagtacttggcaccccatgaaatttcctggtttgtctattctccaccctcctgctggaatgtccgtcccgggagaataggagtcttgtcagatggattcattgctagcacagtgcctggcaggtagcaagtgtttactttgcaactccaggggaaagtgggattctcagacccatgaaatccaactaggatcagctcaagccctttccacatatacttaaaagcctcaaaccccaccacgcccccaggattttagcagaatctagagtggctcctgttctccagggcacctctgccctggagcagcttatctattgatccagacacgaatcttagcctgttcctcagctcccacaagaaagcccgtccttacagta

SEQ ID NO: 660550 - DNA, 432 bp, Homo sapiens
  misc_feature (82)..(82): n is a, c, g, or t
  misc_feature (136)..(136): n is a, c, g, or t
aatgtcccatcataaagacaaaggaaaactattgcctgtaatcccagcacttcaaagccccacggtgggaggatcctcgagncttaggagttcaagaccaacccgggcaacatagtgagacctcatctgtactaanattcaaaaaattagccaagcatggtagtgcacacctgtagtcccagctactccagggctgaggtgggaggatcacttgagcccaggaggtcgaggtggcagtgagccctcatcgcaccactgtactccagcccaggccacaagagcacgaccctgtctcaaaaaattataaaaattttaaaagccagacatggtggctttttatcccagcactttgggaggctgaggcaggcagatcacctgaggtcaggagtttgagactggcctggccaacatggcaaaaaccccatccctact

SEQ ID NO: 660551 - DNA, 246 bp, Homo sapiens
  misc_feature (136)..(136): n is a, c, g, or t
  misc_feature (236)..(236): n is a, c, g, or t
ccgtagttttagaagttcatagcacataatatatgcgtctgtttactaacggggtactatgtttaataatgtggggggtcactggtgatcttgacaacagcacaggactctgggtctttagtggctgaatccattnttttactgtagctccaggatctggcggttgccatttagttgttagaagtttcaatcagcaccgtagcgtcataaaaccccgaggcagcaatgccccaggncagcaagtgg

SEQ ID NO: 660552 - DNA, 381 bp, Homo sapiens
  misc_feature (251)..(251): n is a, c, g, or t
  misc_feature (257)..(257): n is a, c, g, or t
  misc_feature (282)..(282): n is a, c, g, or t
  misc_feature (337)..(337): n is a, c, g, or t
  misc_feature (366)..(366): n is a, c, g, or t
  misc_feature (381)..(381): n is a, c, g, or t
ttaactaattgtttaaaagtagcctcacaaattatatcaggctgtcctcgcattgctataaagaaatacccaaaactgagtaatttataaagaaagatttaattgtctcacagttctgcaggctttgcaggaagcatgatgctagcatctgcccagcttctgatgaagcctcagggagctttcagtcatgtcagaaggcaatatgggagcaggcatttcacatggcaaaagcaggagcaagcaacgttccngggttntggggaggggtgccacacacttttnaaatggaccagaactcatgagaactcagtatggcaaagaaaagcaccaagccatngagtcttggacccagacatctccccaccnggcccccaccttcan

SEQ ID NO: 660553 - DNA, 416 bp, Homo sapiens
cactttatatattcaatctcctccaacattagcataatttccaaggatgatgaggtggcagaggttgtatatgctcaggatgtccttatttgcttcagggacactgtgtcacgacgcgtgctgttttagacttatgcgggactactaacctgtcacagcagctatgacaccctacattcgttgatataccagggcagtgcttcattcattacactctagacgtgctgaaccgctgtcatgtccctatgtgtggccatacccactctgacagcatgaagccgatcatgacggagtctatgcgctcccctgtctactactacttcacctcagtacttgttgtgatcctacgctatctaagggctacgttctttccgcgtattgctaaggcggatgatcgatatctctattgcagaccg

SEQ ID NO: 660554 - DNA, 508 bp, Homo sapiens
  misc_feature (14)..(14): n is a, c, g, or t
  misc_feature (36)..(36): n is a, c, g, or t
  misc_feature (101)..(101): n is a, c, g, or t
  misc_feature (188)..(188): n is a, c, g, or t
  misc_feature (229)..(229): n is a, c, g, or t
  misc_feature (291)..(291): n is a, c, g, or t
  misc_feature (327)..(327): n is a, c, g, or t
aatggggaatttanggccccaagttgaaaaaaattncggggacccctgaggctcccttatggaaaatgaaaccctcctccccatttgttaacccctatcanattttgccactggccttatttatttatttgaccaaattctgcctgtttgtgacccagttcaccttagacccacagatgttaaattcnagttgctaaatgacagtgctattcagactcctttaaaaagnaggcccaggtgcagtggctcgcacctgtaatcccagcactttggaaggccaaggcaagaggntcacctgaggttaggagctcgagaccagactggccnacatggtgaaacaccatctctactaaaactacaaaaattagccagacatggtggtgtgtgcatgtagtcccagctagtcggaaggctgaggcaggagaatcacttcaatttgggaggcggaggctacagtgagtcgagatcgcgcaactgcacttcagcctgggtgacagagcaaggcatg

SEQ ID NO: 660555 - DNA, 81 bp, Homo sapiens
gccgaggacacggccgtatattactgtgcgaaagatccgaacggtgattatttaggggcctttgactgctggggccaggga

SEQ ID NO: 660556 - DNA, 386 bp, Homo sapiens
tttcagtaaaactttttttaaaaaaaaagggggtaggccaaatttgggttgcaacctgtaaaaatgtggtttaaattttatttaaaaactttttttggaaaaaaagggggaggattgttccctttacaggattatttttttttaaaaaacggggttttaaatttttggcggggaacttttttctgaaaaaaaaaaaattttggatgggatttggatttccgaaattagggagcccccgtcaggaaatgttgttttaacaggggtaattttgttggaacccttttaaattttgaaacaggtaaaatggtggggtttatttttaaaaatttttggagggttgggttgcctgtgaattttgggaaaaaaaaaaaagccttttgaaatta

SEQ ID NO: 660557 - DNA, 122 bp, Homo sapiens
  misc_feature (55)..(55): n is a, c, g, or t
cgaagatatcaagagagcttggccatccctgggccacttccattccactatctcntagagagactcccccaacttcctccatccattcattatgttaccctctgtgttccgggccactgtgc

SEQ ID NO: 660558 - DNA, 1251 bp, Homo sapiens
ttttgttttgtgccgtttgcgcattgtgtgtttgctttcgttgggtggtggctcgggttgttcgctttcgcgggtgtacgtggagtctttttgtgcctttggtcacatgattagttggtccatgtggtggtcgttgttatgtggtccgttcccttagtagtgggtataattgcgggatgggtcggtcgtgcggtgtgaagcgtgggcgtgggggggtggcagggcccaagtttagggtggtggcaggtctccgccgtcgtgtatctttgcggtgtgttcatggcggtggggtggcgccgcgcgtaggactggggtgccgcagtgaggggtgtgtgtaggtaggcgggagggccgcttccgtgtggggtcaggtccgtagcgaggtcccggttgatgccctgcttgtttatgggacttggaatgctctatgtttgcttttttggcatcttgccttgacagtctgagctggtggggtttgggttgcatagggtagctctagggttgtgcgtgggcagtaggccgggtagggtgtggtaaggggaggtgtggtgccgtttggctgcgtggaggaggagttgcgaggagtaagtaaagaagtgttgatagcaggtgagagtcacgcgtgtgggtgataatagcttagtttagagctgtcgcagttgttaggtctattaggctgtgtagcgtcatgcaagtgatctggtagagtatagggatagggcagggcggaatcatagttcaattgggaggccttgaagtgtaatcagtgtgtggtaaaatagtagagtgtgagcgcagagggcgcgtgcgcgcgttcgtagcgttggtgaggttgttgacgagttgcttcgtttgtctattctttcagtgggagtgacccgggttcggactggtggagtgattagtgagcttctggtgctggcacctcaggtgttattgtcgcgctaccctcgccagtgctgcaggccccagtgtgtgttcgtgttgtgtagttgtcagatacgctggtgaggtgtgattttgtcacagagagctgttattttcgcccttcctgtaagagcgatgtgactggcaacaagacgcactgcagtcgctttttcattaataaacttgtgaactatagacactgagacaggtcaaattttaattgtatcaatgggcaagatctggtgctgtttattaaaaaagacaaatcaattgagtaattttagattttacccggtatgtaaataattacgctctttggccgct

SEQ ID NO: 660559 - DNA, 131 bp, Homo sapiens
cgcgagaatcgcacggaggcagaccccccacaaggagcggctggcgccgcatggagacgatgcccactagcggcatgaggcgatcttggagagcttccacgtgaatctgcagaagagtgctggccgacgcc

SEQ ID NO: 660560 - DNA, 286 bp, Homo sapiens
tatatgtttctccctagcacaacagccatccccaggcatctcctctccgtgtgtgtatgcgtctagctctcttcgatggtccatgatgccagctgcaggttggtcagttccatgcaaccaacctggcgggctggcccccgattattctgccatttttccaggtctttgcgttgcacgtcaaatctggggctgatcaccccacactatgtttagcctgcctgtgaggttcacaacaattttcccagctactgtggtcatcaatgatttcaaattcgccaatgtaacc

SEQ ID NO: 660561 - DNA, 426 bp, Homo sapiens
  misc_feature (200)..(200): n is a, c, g, or t
  misc_feature (317)..(317): n is a, c, g, or t
  misc_feature (319)..(319): n is a, c, g, or t
  misc_feature (328)..(328): n is a, c, g, or t
  misc_feature (357)..(358): n is a, c, g, or t
  misc_feature (375)..(375): n is a, c, g, or t
  misc_feature (381)..(381): n is a, c, g, or t
  misc_feature (423)..(423): n is a, c, g, or t
cagcgtggataaaccttcaaaacagatgaaagatcacattctacatgatttcattcagatggaaatctatagaaataggaagtcgattagtggttgcttagggctggtaggggcatgggaggatgggggtgttagctaaatggtatgaggtttctttttgaggtcatgaaatgttctaaaattgactggtaatgtttgcntatatctctgaatatattaaaaaccattgaaatgtaaaaaatgcaaagaaaaaacagcccaagttgcaattttattcaacacttgattgctttaaaaatagattccaggctgggcangntggctcacncctgaaatcccagtgctttgggaggctgnngtgggaggattgcttgnggccangagttccaggccagccttggcaacatggcaagaccctgtctntac

SEQ ID NO: 660562 - DNA, 854 bp, Homo sapiens
ggttcctggggccttacccatatgcgggcgctgaagaagtggatctcactcaccaacttcatcagcgtaagccacacgtggcagaagctactagctcgcgagaatctgagcagatcttgtgcctatttactcgatggtgctacactgtgcatctcgcatgaagcacaccaaaggcacagcgctggggcacgaattctaccccggctgttggcattgtagtgtcaaaaggctaaccaaagagaggcactgagcgccggtcgtaaccaagagactgaaggcccaagatgccagggatcaagaggactcacgcgttcatcatgagactgtcccagcgacagtactgttcccatgaggggtgccagcgccaagcatgatgataagccaagcactatgctatggaaccttgaggctatggaccctgagacgcctggtgcatcaatctaagccagtatacccgcagacagggcccctcgacggatagtagctatggagtgaaactcgcgagttgtgcgttcttagttgatgcattctcgtagcttggggcaaatgctggtacggatgagcatttttgaagcgatatgcgaaggacggcgtctctggaagccttcgcatgtgctcggatcaagaagctaggcccatgagtgaaggtcaccaacagagcctcgtactatacaactctcatgctcctattccatggtaccgacgcagtctatgcgtgacgagtccccgagtgaacttccttgcgtaagaacataagtctacccaagtgacaagcttcactcagccaagacaccttgacacggttgcactctttcctcttgccctgcatagcatctgcacgtcggatagccgaa

SEQ ID NO: 660563 - DNA, 664 bp, Homo sapiens
tctcgggggcccggggggtttttttttgggaaacaaaaaccccggggggtttccccggggggccccccgggaaataaccggcgaggccccctagcgacccataacaccggggggagaaagctcaggcggcgaaaaaacccacgaggaggggccgcccctaccacaactcctgcaaccacaacacgccaccactagtgccctccgggggaccgcgcgtctcggcaaactctcacagagagaacgggatcacacccccagcgggggggggcccatacactacgggccccccctaaatgtggtcgcccggggagcccccagcagctcgcacgacgcggcccccaggggggggtgtttttgtgtccccccggtggtgcccaggtgtctcgtctccccaccgctttttgcgcagcggggtgttcttagatctccgcggcggaaacttatctccttggtcgcctagtctctttcacatctaaagggcgcggtctgattgcggccagcgcgtccacaatctcggcggggggaccacagtttgactcctcgcatgagggacaccccacaacacagtgacgagagaagggttttctagtcccccccaagagagagaaccctatatggccccccacttttggcgggcggcactttttgcgcgctagaaaatcag

SEQ ID NO: 660564 - DNA, 167 bp, Homo sapiens
ctaaggaagtagtgcgcacagaggcgaatcttgtctggctccacacgtccagactgtgaaagagatgttctatatattccactgtctcgacattagaagcctatggttggtgatggtaggtgacaatctctccccaacttcagtttgtacaggattgtggtcttgcc

SEQ ID NO: 660565 - DNA, 394 bp, Homo sapiens
cacgagggacacagtcatattagtacagatgagaaaagagtgaaagaacgaataaatgacttgactgaagttcattcaagcgttcatgaatatattctgtagctccctgggacgtattaatagatcaaggccaggcatggtggttcacgcctataatcccagcactttgggaggccgaggtgggctaatcatgaggtcaggagatcaagaccatcctgaacaacatggtgaaagcccgtctctactaaatataaaaaattagccgggcatggtggcccactacttgggaggctgaagcaggggaatcccttgaacctgggaggtggagattgaagcgagccaagattgcaccactgcactccagcctggcgacaagagtgaaactcttatctcc

SEQ ID NO: 660566 - DNA, 355 bp, Homo sapiens
gtcgacatccagaatatataaagaattcttactcctcaatgagatgacctacaacccaatttaaaaatggtctaaaggaaagcagtttgttgattgctgaaagaacttaaaacagaattaccattcaaaccagcaatcccattattgggcatatagccaaaggaatgtaaattgtactaccataaagacacatgcacatgtatgttcatcacaacactagtcacaatagcaaagacatggaatcaacctaaatgcccatcaatggtagactggataaagaaaatgtagcacatatgcaccatgggatactatgcagccatcatgctcggccaatctcattcttttttatggctgg

SEQ ID NO: 660567 - DNA, 394 bp, Homo sapiens
cttgagcggcaactacaagttctatgacgaattttgatattttgaaacgcctgaatagattggaaaaagaagtttttggtaaacaaattttagataactcagatttctaagtagttatttgagatgtgcaatttttggataatcgcgtgaggagagttgcttctcatgaggaaagtccatgctagcacaggctgtgatgcctgtagtgtttgtgctaggcgaaaccataagcctagggacgagaaatcgttacggcagttgaaatggctaagttcttggataggccagagtaggcttgaaagtgccacagtgacggagtctttctggaaacggagagagtggaacgcggtaaacccctcaagctagcaacccaaattttggtgggtaccgagct

SEQ ID NO: 660568 - DNA, 349 bp, Homo sapiens
  misc_feature (37)..(37): n is a, c, g, or t
  misc_feature (89)..(89): n is a, c, g, or t
  misc_feature (133)..(133): n is a, c, g, or t
  misc_feature (150)..(150): n is a, c, g, or t
  misc_feature (159)..(159): n is a, c, g, or t
  misc_feature (162)..(163): n is a, c, g, or t
  misc_feature (165)..(165): n is a, c, g, or t
  misc_feature (178)..(178): n is a, c, g, or t
  misc_feature (219)..(219): n is a, c, g, or t
  misc_feature (222)..(222): n is a, c, g, or t
  misc_feature (247)..(247): n is a, c, g, or t
  misc_feature (257)..(259): n is a, c, g, or t
  misc_feature (305)..(305): n is a, c, g, or t
  misc_feature (308)..(309): n is a, c, g, or t
  misc_feature (326)..(326): n is a, c, g, or t
aaacattgtgtcagcttcaaagcattgtgcatatggnagacattattgctattgttaatactgtaatagaattgcctctgcggattaanaatgtagatgtttatgtacaacatagcagcaataagtaaaagangaaattatttatatggnttctattanatnncncgggagtactgtnttcagtactttgtgtaatgcagattgctactcatgccattnaantctctgacattgtcttaccatttgntcatgcttgnnngacctgtgtccacttagtctgatttcactggtaaaataaattaggnaanncacaaaaacaaaacggnacagtgaacagatgtaacggttg

SEQ ID NO: 660569 - DNA, 243 bp, Homo sapiens
  misc_feature (31)..(31): n is a, c, g, or t
  misc_feature (48)..(48): n is a, c, g, or t
  misc_feature (134)..(134): n is a, c, g, or t
  misc_feature (180)..(180): n is a, c, g, or t
  misc_feature (198)..(198): n is a, c, g, or t
  misc_feature (228)..(229): n is a, c, g, or t
ctggccaggcgtcagtgcacttacgcctgtnatctcagcactttgggnggccaaggcaggcagatcacgaggtcaggagttcgagaccatcctggccaacatggtgaaccccgtctctactaaaaatataaaanttagctgggtgtggtggcaggagcctgtaatcccagctacacaggnggctgaggcacgagaatnactttaactcaggcgatggaggtttcagtnngccaaggtcacacc

SEQ ID NO: 660570 - DNA, 322 bp, Homo sapiens
  misc_feature (253)..(253): n is a, c, g, or t
tgagccggtacagtatgacatgaggagttcagagacaactttgaatcctgttcagcggagaccagcaccagaggaatctacaaggaaactcccatatatttgcttcccccaagatagcggcccctagagactcaaaggtctttttcttcgttttgtggtttctctaaaaatttactgtgctttgtcgatgctagtataagccagggagttcgtaagacgccagcgtctttgaggatttgctcagttccccggntagtttcctcacatatattattactatatacctcgctgataaattttatgttgtgtgtttctcatgtca

SEQ ID NO: 660571 - DNA, 1010 bp, Homo sapiens
ttcaattttagcaataggtggaaactgcagtactttacagaggtgcctcatttgagacagagcttgtttttacagcatcataaacttcatctttcatttttgaagcttttgcaaataggaataggcagatctaaggagtaaatgtaacttccacaaaatgaattgaaatagatttttttctgttttttcttctttgcatgaaatgcctgttttgaaaaggactacatggaggtaactttttaatcacaccttgttttaaaacccctagcttagttaacatgtcatttgataagaggtgttgcttacgatctagaactagaaagttttcatttattttgaaatgatgaagtgtagtgattgccacagcatttagaagaacatttattgaagtgtatgtatatatatatgcacatcatatgtgctcaataaatttttatgtgtgtaaccagcacccagatcaaaagacagaatacgtcaaacagactcatccgtgctcccttctaggtactacatgagccgcgagacgcgtgacaccatgtgccgggggtaagcgaggggtacaagagtaccactgtgaaacacgcatagcgatcaggaaaaaagcactggaagaggaagcaacgaaaataatacagatagaacacacaaaaccacactgatataataataacgagcaacacacaaaaaggacaatcatcatactaatgcaacacgatgcaataaacgctgaaacgaacgaacaacagactgggcccaaggatcaggaaacgacaaacagatgggatgaaaaactagcaacacgggaggatgaactcagacacgatagtggaattcgacacgatagagaaaggcacacagcgtcgagaaggaacacatcacaatcacatggacagacatgaaaaaacagcgagggaagacatcaggcacccagctaaagagaagaaatacagacaacgaggaagcgggaagaacacaatgtgataacacggtcacaaaagacgtgaggacgg

SEQ ID NO: 660572 - DNA, 467 bp, Homo sapiens
gtttgtttctttgttcagcctggctgacagagtaagaccctatctcaaaaaacaaaaagcagaaagaacaaagaagtaaacaaaagcttaaaagtaaatcagccaggtgcagtagctcatgcctgtaatcccagtactttgggaggcctaggcaggcagattactgcaggtcaagagtttgagaccagcctggccaacatgatgaaaccctgtctctactaaaactacaaaaattagccaggcatggtggtgcgcacctgtagtcccagctactccggaggctgagacaagagaatcgcttgaacctaggaagtggaggttgcagtggcagtgagccaagatagcgccactgcactccagcctgggcaacagagcaagactccatatatggagatcccttgagatcaggagttcgagaccagcctggccaacacggcaaaaccctgcctctacaaaaaaaaaataat

SEQ ID NO: 660573 - DNA, 1117 bp, Homo sapiens
  misc_feature (432)..(432): n is a, c, g, or t
  misc_feature (734)..(734): n is a, c, g, or t
  misc_feature (881)..(881): n is a, c, g, or t
  misc_feature (915)..(915): n is a, c, g, or t
  misc_feature (990)..(990): n is a, c, g, or t
  misc_feature (993)..(993): n is a, c, g, or t
  misc_feature (997)..(997): n is a, c, g, or t
  misc_feature (1071)..(1071): n is a, c, g, or t
  misc_feature (1077)..(1077): n is a, c, g, or t
gatgcgacagcggtgtactgcgctcgtggctgctgccgggaaccagatgcgctgcagtatgtgagggtgggcggttgcctggatccgctaccgtgcagtgtgtcacgagatgctggcccagacagccagagcactgagaccgtatacgccaatgaagtggcgtaaccttgtgctccccgtggcacacaggaaatgggctccactgaagtcagacactcgacccgtagtacagaggaagctctgcaagagtgggcagagaagtctctcgcctccagagacacgaaactctgtcaccgtgttcgacttctcacatgcgagtatcattgaactatgtgtctcatatagactggtacggaagagtccaactcagatgaaaacggcatgtagtgtgtgcgatgggtccacccgggtataggaacgtcgattcccagnaagtatcggagggtcgcgagggtaggcttgtgctagtgtctgtatagtttacctacctaagttgccctccggtcgtactaaccaacggaaattaaggcacgaggacgttccgaatgccgacttctcgttgcgggtgcttctcttctcgtcgtaggagtcccaggaaacagcaacttcagagtgtcacagcgactatctcgtagtcttatcacacatagcactgtggacgcgacgggagatacaccgctaggcgtccgcacactgatttattcgtccctacatgttcctcccacttagacagnagagccaaaaaggtctgctaggttcgtttgtgcctcgctcatgttggtcgatggaaagagacctggagaacgtccgaagcgcgtttgattggtatgcaccctatctaggtctgctccgtcgtatgctcgtgtagaggagaccccgangccaccgctttgtacctataaggggcgcacctgngggcacagtcagtgtgcattgtaatttggcttcaccttggcccacccttgtgacttcgtacccggagtagctgtngantccncaagcctcttgtgcgtctgggatgcgacctcgctctgtggcccgttcctattttcggtggcccgtctccgaatngcgtcntagcttgggtttccgaaaccgccgtgaccttcattggggg

SEQ ID NO: 660574 - DNA, 125 bp, Homo sapiens
gaaattgcggtccgggtggccgtccttctcattcattctaatcatcgtatgttgcttcactactggggggagaaggaaacgttgagcctcatgtttcccctttcccggcaggagtgagagggctc

SEQ ID NO: 660575 - DNA, 1060 bp, Homo sapiens
  misc_feature (418)..(418): n is a, c, g, or t
  misc_feature (499)..(499): n is a, c, g, or t
  misc_feature (503)..(503): n is a, c, g, or t
  misc_feature (522)..(522): n is a, c, g, or t
  misc_feature (524)..(524): n is a, c, g, or t
  misc_feature (529)..(529): n is a, c, g, or t
  misc_feature (534)..(534): n is a, c, g, or t
  misc_feature (577)..(579): n is a, c, g, or t
  misc_feature (587)..(587): n is a, c, g, or t
  misc_feature (610)..(610): n is a, c, g, or t
aaagtcctagagccagaaatatattctctcatccctcttagcattctcttgctccctcattcactagggcaaatgtctaaatgaagaaaagtctctctcaacacctcgttcatgcaatcagcattagaattgtaaggaaggaaggggggtggcatgaaaatttccattcttggggtatatgactgtcctgtttcccccaggccactttttttttttttttcctttggagaacaggggtcttggctctggcccaggcagggagtacagtatgtggcaatcacagctggactggcagccttgacctccagggctcaagggatcctccggcctcagtctcccaactaaggggggactacgggcaggtgccaccatactcagctttttttggtttggttttagacaagagtctcgcttggtnggcccaggtgggtctggaatcctggggctcaaggcaatttcttccacctcagcctcccaaagtgctggagattactgggtnttgnagccattggacccaccctncnagatnacttnaaatggtctcggctcggactggaatggagggaatggtaatgtnnncagtggcnggaatatatcagtatatctgganctcggatctttaattccctaattttgggggttccttacttaatttaataacagtctggtctatatttaagggttcctggggagtagtttggtctatatttaatccatagatgtgcctcctagtcatcagtcttatttcagtaaaaccattcttttctggccaaatctctaacacgtttttaacttcagtagtgagggcaatgaagaagatttattaggaaagatccttattaaagggctaattggggtattgaaagcatgctgatataaagtccagtattggaggatataaaggagggtgtgccctgaactgtgctgaattgttccagcatttattatactctaaggggcataaggggttttgtggaccttttttggaaccacaaatggtgaagggggtgaataacggattgacacagaacttgaatttaaaatcctcttgaattggaaa

SEQ ID NO: 660576 - DNA, 125 bp, Homo sapiens
aaggaatatatgacatctattcgcttgcattggtgacttggagagactgtctgttcaggccactgaataaacaaggtaaccaaatgcttgtttaaaggctgattgaaagggaagggattgtggaa

SEQ ID NO: 660577 - DNA, 890 bp, Homo sapiens
  misc_feature (37)..(37): n is a, c, g, or t
  misc_feature (80)..(80): n is a, c, g, or t
  misc_feature (148)..(148): n is a, c, g, or t
  misc_feature (156)..(156): n is a, c, g, or t
  misc_feature (160)..(160): n is a, c, g, or t
  misc_feature (165)..(165): n is a, c, g, or t
  misc_feature (167)..(167): n is a, c, g, or t
  misc_feature (169)..(169): n is a, c, g, or t
  misc_feature (172)..(172): n is a, c, g, or t
  misc_feature (175)..(175): n is a, c, g, or t
  misc_feature (177)..(178): n is a, c, g, or t
  misc_feature (180)..(180): n is a, c, g, or t
  misc_feature (192)..(192): n is a, c, g, or t
  misc_feature (202)..(202): n is a, c, g, or t
  misc_feature (219)..(219): n is a, c, g, or t
  misc_feature (225)..(226): n is a, c, g, or t
  misc_feature (239)..(239): n is a, c, g, or t
  misc_feature (249)..(249): n is a, c, g, or t
  misc_feature (255)..(255): n is a, c, g, or t
  misc_feature (259)..(259): n is a, c, g, or t
  misc_feature (268)..(268): n is a, c, g, or t
  misc_feature (277)..(277): n is a, c, g, or t
  misc_feature (298)..(298): n is a, c, g, or t
  misc_feature (300)..(300): n is a, c, g, or t
  misc_feature (308)..(309): n is a, c, g, or t
  misc_feature (316)..(316): n is a, c, g, or t
  misc_feature (345)..(346): n is a, c, g, or t
  misc_feature (348)..(348): n is a, c, g, or t
  misc_feature (352)..(352): n is a, c, g, or t
  misc_feature (358)..(359): n is a, c, g, or t
  misc_feature (362)..(362): n is a, c, g, or t
  misc_feature (364)..(364): n is a, c, g, or t
  misc_feature (368)..(368): n is a, c, g, or t
  misc_feature (371)..(371): n is a, c, g, or t
  misc_feature (430)..(430): n is a, c, g, or t
  misc_feature (472)..(472): n is a, c, g, or t
  misc_feature (475)..(475): n is a, c, g, or t
  misc_feature (477)..(477): n is a, c, g, or t
  misc_feature (481)..(481): n is a, c, g, or t
  misc_feature (486)..(486): n is a, c, g, or t
  misc_feature (492)..(492): n is a, c, g, or t
  misc_feature (496)..(496): n is a, c, g, or t
  misc_feature (499)..(499): n is a, c, g, or t
  misc_feature (511)..(511): n is a, c, g, or t
  misc_feature (515)..(515): n is a, c, g, or t
  misc_feature (528)..(528): n is a, c, g, or t
  misc_feature (540)..(540): n is a, c, g, or t
  misc_feature (562)..(562): n is a, c, g, or t
  misc_feature (566)..(566): n is a, c, g, or t
  misc_feature (583)..(583): n is a, c, g, or t
  misc_feature (587)..(587): n is a, c, g, or t
  misc_feature (613)..(613): n is a, c, g, or t
  misc_feature (802)..(802): n is a, c, g, or t
  misc_feature (872)..(872): n is a, c, g, or t
tcagagctatgtagtaaatataaataaaccacaatanacaacatccaatcctgctgtcaagagtagagagggaatggggnttgatacccttagtttattgttttcaacacaaggacaggagagggaaaaaaacactagacaccagccnggggagcnaggnggggntngnggnctngnngntgctgtgggggntcatgggganactatacaagggcacangttttnnaactatgatctcntaacctaatngttttnttcnatgcgagtngcatcctcntcgccctgggggggggggatntnatcaggtnntgctgcnttgggttcctctgctgccacttcatcttnntnaatncctagnnctngnttgnttntgcgatagatgcggttggtgtgggtctggggttttttaagggaaaagccagaagatagnaggggggtttcaaacagcagcaccaccaggtccttaactgcnttntntttnttgtnggcctntgtnttntgccgctgcgtntccncaatggggtggtnagggttgatctncaggtgttttttggttttcatntagnccatggtggtagttgtnccgnagtgcctgggctttcatgattcgctncatattggctgttcagttgtagtgttggttataatgcagcaaggtgaagacacaagtctattggagattgtcaccttctcaaccttcttatctaagatttctttcatgagcttgcagaggttctcaaactttgccttgctctcttccatcttcttcttctcctcctccatcctcaggcagctccagacnctcctttggtaactgagaccaggctcttcccatcaaattccttgagctgctgcacacagtactcgtcaangggctcggtcatatatac

SEQ ID NO: 660578 - DNA, 195 bp, Homo sapiens
catgctggtcctacaaatgctggtctatgtagatctatgtctttgggtaggggggggggggggcggctatttagttccatgggtgtatttcttttttctggccccattttctggctttttttttttttttttttttttttttttttttttttttttttttttggggttatgtgggtgtcatgtgacggagggggg

SEQ ID NO: 660579 - DNA, 894 bp, Homo sapiens
  misc_feature (894)..(894): n is a, c, g, or t
ccgcgcgcgagtcagactcgggtgggggtcctgccgcctttgccgcccgtgctgcccggggccgagggcggcggtggaccgcgggttgggagacctggcctggctgcccaaggacaaatgtgagcaactttcgacccctacctgtgccttggatgctgctgcctgtcaatgtgcggatgcgctgagcttggagcactcgcgttatgccagggacgccctgaatctggcacagatgcaggagcagacgctgcagttggagcaacagtccaagctcaaagagtatgaggccgccgtggagcagctcaagagcgagcagatccgggctgcagggctgaggagaggcggaatgaccctgagcgaggagacccggtagcaccaggccagggcccagtatcaaggacaagctggcccggcagcggctacggaaggacccagttgagccgacgcgcgaaattctcctcaagtgcagggcgaatcagcgggaagcaggaggagtccgtgcagaaagcgaggaagccatgcggcgagccaaccgtggagcgggagatggagctggggtaccaaggaatgagatgctgcgagtggaggcctgaggcccgtgggcgcgcgcccaggccgagcgggagaatgcagacatcatccgcgagcagatccgctgaaggctggcgagccccgtcagagcgtctgggagtccatcaggacggcttggaccttgttgggcgacggatccgggcctttgtgaccgactgggacaaagtgactggcccggtggctgggttgaggctgctggctggagggtctactcagcaaaatggcacgcttgtgccggcggttatcgaggacggctggggaaaccgctattgaggggactccgctcacgcgctaagacctcgn

SEQ ID NO: 660580 - DNA, 196 bp, Homo sapiens
tcgggtgactctagacggactcccgtactacttgtagtatcccgtgagtacctgtgtactaagtggtgtagttacacacaaaagtgtgtaaatatgtaacctgttacacactatcattcgctcaatccaaccccgtcctatacaatatcacctcctccccttctcttcatcttatttgatcttaacctcaattcaa

SEQ ID NO: 660581 - DNA, 294 bp, Homo sapiens
acggatgttgagatgacccttcttcatggagtataaaatgtttttcccaaaaaattgagagaaaggactacagagcccggaattattaccaatacaagggcaatgcttttaggtcaaaatgaaggtgacttaaacaccttaaagtttactttaaaagttgtaggtgattaaaataatttgaaggcgatcttttaaaaagagataaaaccgaaggtgattaaaagaccttgaaatccatgacgcagggagaattgcctcatttaatgcctacttgacgcatttactaaacgcaga

SEQ ID NO: 660582 - DNA, 831 bp, Homo sapiens
  misc_feature (487)..(487): n is a, c, g, or t
  misc_feature (490)..(490): n is a, c, g, or t
  misc_feature (494)..(494): n is a, c, g, or t
  misc_feature (518)..(518): n is a, c, g, or t
  misc_feature (532)..(532): n is a, c, g, or t
  misc_feature (536)..(536): n is a, c, g, or t
  misc_feature (541)..(541): n is a, c, g, or t
ggctttcttagccttctgctccgaggaccgcgcaggtttctgagcccagtgcccggcgggctaccaacccagagtgtccagggtaatgtcatcaataatatggaacaaggcagtagaacccatctcagcacacgccttgcagcggcccgtctccaccctccctctggcaagaccaggagctccttggccaactttaggtcctgaggatgaatcccgcctgccaggcctgcaaaggagaccccaagagcacggagaggagatcacgcgtcttctgtcttcccaaggatgaacttgcggtaaaagagctgggcttccaacggctgctaagatgcagggccgtttttggggaggcggtcctctgatcccacgaacgcttctgcaatccgatgccagtggcgaaggtacaagacagaagaggggatctcaataggtattatggccccgatcaaagtgggctccggaagctagaaggcgcggaacccagcgnccngtancagacgcgcggggcaactgggcanggcgcacgggggtncacngggcngacgccattctggggcgcacggcttggactctgctcatcaccggcctctccatcgccctcgactccgccgcagcctggaccgtcctcgcgtcttcccgacacccacgatggtttacaacacacatgcacgtcgctgaaggatgtctgggcaatcccgcctcccgctcggcgtccttggcgacgctctgcaccagacctgccccgaggtcacgcagaaaagacaaagggcatccggccgcacgcagccaggcagaaatatccactagtcagcatccgggaggaactccaag

SEQ ID NO: 660583 - DNA, 436 bp, Homo sapiens
catacgggggggcatacggtgcggcatgcagtgtgtgtggtaagtccaggacaatcgaaaatggtaaggacagaaaggattcaaacagaagcacaccttgaagtagattttaaacagctggttcaccagaaacagcatgccccacttcttagaggcctctataccagcacggctatggggaaataattttttttaagttacataggaaataaaaattttatttataaatcacaaaataaactgcctaaacaaattaatatcttgaggtaagtcccaaagctcaagtcatattcatatcaacttattcatatcaagtcatattcatcaaacaaaataacattatgaaaaaagatgtcttacctgatgggtaaaaataaaagagaaaacaaaccaggaaaatcccaattaactacttgaggaacatccttcccccgca

SEQ ID NO: 660584 - DNA, 582 bp, Homo sapiens
  misc_feature (438)..(438): n is a, c, g, or t
  misc_feature (489)..(489): n is a, c, g, or t
  misc_feature (560)..(560): n is a, c, g, or t
ctctaaaaggatattttgaggattaaagaaataatgccttactaagtgaacagcatcctggcacatttaataagttctcattaaatgttaactgataagatgatgataattttgtattatagcatattagtatttggtaggattatatttcaaaatgcttttagttattcttacatattgagtttctggatttaactttagatttttttttcattctctcaaaaactatttatataggattataagttaatttgggggaaaactgacaataatacttaatgttcccatacagaaacttggtatttcttaccatttatacaagttttccttttgtttttgcaagatttactgatgtttcccttttaaatgtcctgtatgtggttttggtaaaactattttttaggtattttttgttaatatgtatagaaatttttttgntattattttttagcgagttgttgctggtagttacatatttttaacacctgntggctattttatttggtctaaattattcataaattctcagatatttgggtgtttttgctcttttctaactncttgcttatgcattatctcctt

SEQ ID NO: 660585 - DNA, 278 bp, Homo sapiens
aaaaaagagaagaaaaaagagaaacccgtggcactatgtaaataaagtatgcatactttgtttgttagtaaatagatgatgcatgcctgggaaatgctcccttgggcataaatagcaatcaattataattagtaaacaggtttaccaataaaaatgaatttacatgataggttaacaaggaccaggaaagttgagtttccttgaaggagttctttgttcctgaatcacagaaatttgatacctgttagcattcactggcaccatattttaaggagaaa

SEQ ID NO: 660586 - DNA, 418 bp, Homo sapiens
aatgatgtgggcaaaatgaaatacttttcaagttgaaaaaatgagcattttagccacggaccagacaagggagttattagctttcattttcttctgagttacatctactttgtgtctgtgatcatggaattgcccaatggatacttgaaactaatgtgctaagggactctaaaattataggctaggctgcattaaaaacaactcttagtgctttaaaaattgcatgtcatccacattcctcatgaaaatgaacattgaaatgttcttataaaagtacatctggtaacatgcactcacgtatgcctaaattaggtttaaagtcacttgaattttccctgtttttaacaaaagttttggggcttcatgcttttggtttattggtgtacaatttgcattacatgcctacaaaactaaattt

SEQ ID NO: 660587 - DNA, 107 bp, Homo sapiens
taccatctacaacctgaagtgttgatatcacagaggaactctgcattctcgcttcctggagggtgtcgcaatgttgccattgtcgaacacctgctggatgaccagcc

SEQ ID NO: 660588 - DNA, 505 bp, Homo sapiens
acttggaaacaaagcagcacacttctcaataatccatggagcaaaaaataaattaatcagagtgaaaataaaaatacaacatatcaaaatttgtgggacacagctaaaggagtattgagagggaaacaaatagcagtaaatgcttatatcagaaaaagggaaagatacactaagatcagaaacaaggcaaggatagctgctctcatcactcttattcaatgtagtatagtactagaaattctagccagtataataaggcaagaaaaagaaatgatgggcacttgaattggaaaagacaaaataaagccctcccaatttgcaggtggcatgattgtctatgtagaaaatcccaaagaatctacaataaaacttctagagttaataattgagtttagtaaggttgcaagacacaatgtcaacccacaaaaatcaactacattttcaaatactgtgaacacatcaaaaccaaaattcaaaacacaataccatttacagttgctacaaa

SEQ ID NO: 660589 - DNA, 695 bp, Homo sapiens
  misc_feature (306)..(307): n is a, c, g, or t
gatcaggtttgaaacgaagcaggtcaaaactcccgtgctgatcagtagtgggatcgcgcctgtgaatagccactgcactccagcctgggctcaagctgtccacttgcttcagccttccaaagtgctgggattacaggcgtgaaccactgtgcccagccaacttaaaataattaacctaatgatgcatcttaaagaactagaaaagcaagagcaaagcaaacacaaaagtagtagaagaaaagaagtaataaagatcactgcagaagaaacaaaagatcaatgaaatgaaaagttagtttttttaannataaagcaaacatttatgcagactatgaaaaagaacacctcagaaattcgaagcatcctttgtggctactatgagcaactttgtaggccaataaattggaaaatctagaggaaatggatccattcctaggcacatacaactacaaagattgaaccattaagaaatcaaaaactgaacagaccagtaaaaagtaatggacataaaagccgtaataaaacatgtgccagcaaagaaaagcctgcgccctagtggcttcactgctgaattctactggaacatttaaagaagtaataccaatcctactgaaatcatttcgacaacatagatgaggaggtaatacttccaaactcattccatgaggttacccaataccaaaacaaacagatac

SEQ ID NO: 660590 - DNA, 234 bp, Homo sapiens
actcgagctcgagtaccctcgatgaaggggccaagggggcgcaggttataggtggatttaaagattttttgatttctgattggttaaggaagtgaagctttatctaaaaatttgggatccgcagaagagaatgtgagttctggctcatgggtgtgacctcctccaggcccctgtagaaatgtgcaatggtcagattagtcctgagcttccccttatctgaagtccatgtgccag

SEQ ID NO: 660591 - DNA, 630 bp, Homo sapiens
cacgcctgtaatcctagcactttgggaggctgaggcgggcagatcacctgaggtcaggaggtgcgaaaccagccttaccaacatggcaaaacccatctctattaaaaatacaaaaattagccgggtgtggtggcacgtgcctgtaatcccagctactcgggaggctgaggcaggagaatcacttgaaccctggaggtggtggttgcaatgagccgagattgcgccattgcactctagcctgggtgacagagcgagactccgtctcaaaaaaaaaaaaaatcgcatcccgtctaaagcaagctacaaaacggtgattatttatgtcacgatatgacccagccataaattgtacttcaggtaagaagggaccctgacatgatatcttacggatcaaattgcagtcagtaggtatatatgaccttttttctctgtgaagaaaagctattaataagttggacttaataggcctatagtatgcccatactggccaagaattctaaatggatcatccagcggtccgtgtaccgtggaggtgcttattctcatttctccaaagccttaagatcgctgggaatagaggaaatgttgctgccaccagctttgcgggccacattcagagagaataggtgt

SEQ ID NO: 660592 - DNA, 161 bp, Homo sapiens
ctcgagaggcgtcaatccagaggcctccaatcagaggctggttcctctctgggtcatctctcggtcttctctctgggtcgtctgtgtctcctctcggggtcatctctcttggtcctctctgggtcgtctctctgtctcctctcgggggggtaccgagctcg

SEQ ID NO: 660593 - DNA, 836 bp, Homo sapiens
  misc_feature (50)..(50): n is a, c, g, or t
  misc_feature (300)..(300): n is a, c, g, or t
  misc_feature (313)..(313): n is a, c, g, or t
  misc_feature (324)..(324): n is a, c, g, or t
  misc_feature (327)..(327): n is a, c, g, or t
  misc_feature (333)..(333): n is a, c, g, or t
  misc_feature (335)..(335): n is a, c, g, or t
  misc_feature (345)..(345): n is a, c, g, or t
  misc_feature (352)..(352): n is a, c, g, or t
  misc_feature (354)..(354): n is a, c, g, or t
  misc_feature (365)..(365): n is a, c, g, or t
  misc_feature (370)..(370): n is a, c, g, or t
  misc_feature (378)..(379): n is a, c, g, or t
  misc_feature (383)..(383): n is a, c, g, or t
  misc_feature (386)..(387): n is a, c, g, or t
  misc_feature (395)..(395): n is a, c, g, or t
  misc_feature (412)..(412): n is a, c, g, or t
  misc_feature (417)..(417): n is a, c, g, or t
  misc_feature (423)..(424): n is a, c, g, or t
  misc_feature (428)..(428): n is a, c, g, or t
  misc_feature (436)..(436): n is a, c, g, or t
  misc_feature (457)..(457): n is a, c, g, or t
  misc_feature (467)..(467): n is a, c, g, or t
  misc_feature (485)..(485): n is a, c, g, or t
  misc_feature (490)..(491): n is a, c, g, or t
  misc_feature (516)..(517): n is a, c, g, or t
  misc_feature (534)..(534): n is a, c, g, or t
agcggagagggactaccggccaccgcggcgccgccgccgcgagctgtccntgcggcgcgtctgccttggcggagccgaccgcagtgcgctcaggcgtccggtgcgtccccagcctccgccccggcgcgggggcgacggactcgcgcgtgcgcagcgccggagtgggcgcgggctgggaccccctagccagcgcgtgcgccgatcgagcgcagggcgatgggtgggcgccgggcgccgggcgccaggcagtgatgggccttcccgcgctgcggccccactgaggaggaggctcggggacangcaggagcacggngcttgcccgcngcnggtgcngnaccatggcgntcctggncngggccgcgccntgctngacttggnnccanctnngccgccgnacctgcagttcaataangttcngtgctnnaccngggtaccnggcccgccagcagcggctcgnggctgcctgngcagcctcttctacctgnacaanngaacttgggcaacatctacacgcanngggctggccctgctggngcttcctggtgcttggtgccaatgaccatgccctggtggtcagctgggcaaggatggctggctgggaggcacacattgcgtggcctgccttgcaccccctgcaggctccgtgctctatcacctctttatgtgccaccaaggtgggcatgcgctgtgtacgcccgggctcctcgccctggacatgtgtgggtgtctgccttgtcaacacccttggggccctgcccatcatccactgcaccctggcctgcatgcctggctgcgccggtgcctggtgggctacctgtgttgtcggttttgccgga

SEQ ID NO: 660594 - DNA, 146 bp, Homo sapiens
tccgtcccgccgaggcacatactcgcggcgttatggacattcggaggtcagtatggacgaagttgttgcaggtccgagtggacgaagttgttgccaacttcgtccattgtgaccttaagtaagtgtctggtcactcggcgtgtgca

SEQ ID NO: 660595 - DNA, 248 bp, Homo sapiens
tctgtatatctctattaaagtcagatagcatcattatcataatctgccaagaatcacccaggcagttattctgggcaaagtcctttcttcccagggtcttaaaaaagtttgggataggccaggcacggtcactcacacctgtaatcccagcactttgggaggccgaggcgggtggatcgcctgaggtcaggagttcaggaccggcctggccaacatggtgaaaacctgtctctagtaaaaatccaaaa

SEQ ID NO: 660596 - DNA, 450 bp, Homo sapiens
  misc_feature (411)..(411): n is a, c, g, or t
  misc_feature (418)..(418): n is a, c, g, or t
  misc_feature (425)..(425): n is a, c, g, or t
  misc_feature (431)..(431): n is a, c, g, or t
  misc_feature (434)..(434): n is a, c, g, or t
acaacatatttgtatttaatgcaaattactttttgctcatttgcaaaattcattttaacagcctcttgatcatgttggtgtgcataccaccctaaactctttcccagacttcatgaaattcaaatcggtccatttgtggatagctgtagtcaaagccaaaaggctttccctgaaaagattacttggaaagaaagttatagcttcaagccagaacataagtttgcggctttctttacttctccatatcatacggagggtgtctgacgctgatgtttatcaagcaccccatgaatgttagccttcacagtagtcccctcagaagggcattcattgatttcattgtggctgctgctgggtaacagaactccattttaaatccccaggctgggtacgtggctcacacttgtaatnccgcacnttggggnccagcnggnaatcgcttgaacctgg

SEQ ID NO: 660597 - DNA, 426 bp, Homo sapiens
  misc_feature (50)..(50): n is a, c, g, or t
  misc_feature (300)..(300): n is a, c, g, or t
  misc_feature (425)..(425): n is a, c, g, or t
agcggagagggactaccggccaccgcggcgccgccgccgcgagctgtccntgcggcgcgtctgccttggcggagccgaccgcagtgcgctcaggcgtccggtgcgtccccagcctccgccccggcgcgggggcgacggactcgcgcgtgcgcagcgccggagtgggcgcgggctgggaccccctagccagcgcgtgcgccgatcgagcgcagggcgatgggtgggcgccgggcgccgggcgccaggcagtgatgggccttcccgcgctgcggccccactgaggaggaggctcggggacangcaggagaaagggatgaaagagaggtgaggaaaatggagttaatggaagggaagagaatgatggaatgggaaagatagaagaagaaaatgaagttaaataagttagtgatgaaagggtaaagaang

SEQ ID NO: 660598 - DNA, 115 bp, Homo sapiens
tgctttcacctgccccgcctatgcggtgactgagcactgcaacctgcctcagagccatgcctagctggtgcgaactggtgctagtgggctggaagtgtgaacttcagcctgttcc

SEQ ID NO: 660599 - DNA, 145 bp, Homo sapiens
cgggtggatcacaaggtcaggagtttgagaccagcctgggcaatatattagtagaaggaaagaaataataaagatcagagcagaaatgaatgaatttgagactaaaaaaaattacaaaagatcaccctgaaactattgctattga

SEQ ID NO: 660600 - DNA, 86 bp, Homo sapiens
cgccggtcttgatcttgatctgtctcatgcgaggatcggccatggtccctcgagcgccgcgagaaggttgggcggagagccggggt

SEQ ID NO: 660601 - DNA, 114 bp, Homo sapiens
cggcggaccgtatacacaggtatgtgcagaagctccttagtttattagatcccatttgtcacatttggctttagtgccattgctttggtgttctagtgatgaggtctcgcccat

SEQ ID NO: 660602 - DNA, 140 bp, Homo sapiens
gaccaggggcaggcagtctatagctgtgtctccatacacaggtctggggaaactaaatctagaaactattctctcttaagtttcgtgaaactacctgaacaaagcttaggagcccttagttaggctctggggatcctcta

SEQ ID NO: 660603 - DNA, 863 bp, Homo sapiens
atataacgcgtaggaaccgcaggacttttcatcccctgtggtcccactggtcctcaactgcgccccggaggacggacagacccgctcggacgctcgtttggccctaaccctgccgccatggcttcacctggacgacccatctgcgcgcagatcatatggtaaagtgaaccagtggacgacacagatccctagcactttatcctttaatatgtcagacaaggtatcccattcaagatacggaactccctaaagctgaagaatgtgatacaagttactttgaactgcccacgaaattcaagatatgaacaactcagggagaagaaaatggctttccagagtagcactggagatcctcttccagagatcagcaaggacaactcctgcaaagaaaactgtacttgtacctcctgcttgctccgggctcccaccataagtgacttgctcaatgatcaggacttactagcacgtgatcaggcataaagctggatccgtgtcagccaacggtgaccgactggcggaactattgcgagcaaatggcgggatgtcctatgacgaattgtgcttcctggagtaagaggccacagatgccccaccttggaagttctatgactccggaacagtcagaggacggtgggccacgctgagtggagctctgaaggctctaccaccagggccgacgtggaagacggttatgcgcacggtggcgtggacgaggagtggccaagcgggagcgtgacgaagaccatccaggcacttctagaagcctcaatcttacttcactttacttggcctctcggcaatgtgaaacaacccagggtcacagaagggaatgtgactcagtagcacataagagttaggacaag

SEQ ID NO: 660604 - DNA, 422 bp, Homo sapiens
tacgatctctgatctatacgaacccttgagctgtcagagactttatttttgccttctactcgcgctgaaatcgaaaccaaaccaggccatcggcctccacaagtcactatatgttggatgatgatactgttgccttattgggaactgtgagacttatctggtatgggaagccagtaataaacctttgacctgtatcaaccaatgaagattatgaatatgttactatgatgtaaattgctatttaagtgtaacgcagttctaagttttcagtatatgggggattggtttttattatttctttcctaaaagaacaaatactgagggatcttttgataaagttagtaatgcatgtaagattttagtttagcaagcatgttgtatttcaaatatatcaagtatagaaaaaggtaaaacagttaaga

SEQ ID NO: 660605 - DNA, 1019 bp, Homo sapiens
ggtggagcctcctgggtgggcactggtacactgagcccccttggacaagtcagcaggggagtgtataaggccactgtcccggcctgtgcttctggggacagtggttgttccccagcaagtcctgagggcggaggggtggggtatggcgtacgggtctcctcgaggtgtcaggaggcgtgctcgtgacggaccaccggagggggctcctggcctggtccttgatgctggccgcgtagtgcgtagaggggctcagcgtgggtgctttaaactagatggtgttccatcctgctggggcctcggtgggccgtcctttccgtcatcgcttgcatgtgaatcccttccgcctctccctcggttgatcttctttccctgacctattgagtcatcctgtcttgtctccatggggtcccgtagctctgtgcggacctctcgcgcgcgctatgtggagcgtgaaggccagtgggaacgttaggagcagcgtcagaggcgtagtctcgacgctccgacagcatagatcagttgccatgctctagccgagtctaccaggtttgcttgtggccccggcggccctccggcgtctaggtgatagccaatatgatgctcgctcgccgcgcggcttcctagcgcgctgcagtgcagggaactctggcctccgggaggtggacctcgtggcccttcgtgtgccccccactcactcgcccccctgtcggcctccccggctacgtgtctagaggcctcgacagcttcctgctagtctgcgtgatccggggcgtggcagtgaacccgcgggcgattgtccaggtcaagtcccggtctgccgctaatggtccgtctgcccctccctgtcctgggcctgccactttggtcaaagtcccgcgccatttgccttttcgcgccccttgcggcatcaaaggcgcgcccagcccgcggtcgccaaccccacgtgttgcccccggtaggatctcccacgcccctggccctgacacccgggcattcgccctcccccccgcgccgcccca

SEQ ID NO: 660606 - DNA, 237 bp, Homo sapiens
ccgcacatacgcccactggccgagaggatctgttgagcacattgcagctcttattattggtgtatgtatgtatatttaaggttggacataaagactcagaagcaaagatattacactcttattagaaaaaaatacaaaaaaaaagccaaagcatgatgcgtcttgtcagccttttgtggtctctacaccatgtgctgtgctgtgaccgccctgcccgcagagctgcgggaggatgga

SEQ ID NO: 660607 - DNA, 1016 bp, Homo sapiens
ggagagagagaactagtctcgagttattttatattattttttttggggaacatctgttttaattagaggcaccaaaaaaaaaggagggctccaatgtgggggtgggctggaggcagaaatggactaggattgggggcagggcctaaaccgcggaattggcagaaacccacaaccccaaaaggtctagcccttgaaagtgctatgcagcatgtgaccagagaacagggggtctaacggggaactgagagatctaacaggctgctgagacaacactgccactccaccaaaaaagtggaccccccagaaaaccatcacaggatggctactcaggttggcacgtgaaacacaccagcagtacaacgagaccaggaacaaaacttacgcataattgaacagcggtactcaccgtgaggagaacccgtgatagaagacatgtacacagtggagaacatatgagacacacgatagaagtgattaggaaacccgtataaaagaaacatcacgaggggataaaaccaccttgcgaaatcaccattatgcgcagaaaggattcacccccaaaagggaaagagagtctcacacattacattcaacagcccccacaaaaaagtatgacagagataacacgtattaggtgacccccaccaccattgagggggcacagaaaggaacagagggaacaaatgagagaaacaacagagggtgtagaaaaagggtattgacaagagaagaattagtagagacacaaagaagaaaagaaaagagacaccaaacaggaagaacaacaaacaaacacacacaagccacacacagtaaaccgaggacgcccaaggagaggaggaacacaaaaaaacacagagaggagagaagaaacacaagccaaaaacaagagggcacaacgagaacaagccaacacaaaacaatgaaaagacgagaagaaggaaaacaacacaagaaagacaaacaacaaacaaaaaagatgggaaaaaggaaaagagaaggagaacggcatagac

SEQ ID NO: 660608 - DNA, 223 bp, Homo sapiens
agtgagaagaaggaatacagcgtggcgccaaatgtgagctttaagtgcaagtgggaacgcggtgcagttcattgaaaaaaaatcagttcagccgggcgcggtggccatgtgatttctttgacaattacaaaaagcagaaagacaaacaaaaaaaaaaacgcaaggcaatggcagggaaaggacagttggagaagagcggcaagcctccagcggctccttctcg

SEQ ID NO: 660609 - DNA, 6792 bp, Homo sapiens
ctccagtccgcatgctcagtagctgctgccggccgggctgcggggcggcgtccgctgcgcgcctacgggctgcggtggcggccgccgcggcacccggcagggcccgccagtccccgcttccctgctccagagccgccgcctgggccggggcagggcgggcccggggctcctccatgctgccagccgccgggctgcggagccgaccaagtggctcctgcgatggcggcggaagaggaggctgcggcgggaggtaaagtgttgagagaggagaaccagtgcattgctcctgtggtttccagccgcgtgagtccagggacaagaccaacagctatggggtctttcagctcacacatgacagagtttccacgaaaacgcaaaggaagtgattcagacccatcccaagtggaagatggtgaacaccaagttaaaatgaaggccttcagagaagctcatagccaaactgaaaagcggaggagagataaaatgaataacctgattgaagaactgtctgcaatgatccctcagtgcaaccccatggcgcgtaaactggacaaacttacagttttaagaatggctgttcaacacttgagatctttaaaaggcttgacaaattcttatgtgggaagtaattatagaccatcatttcttcaggataatgagctcagacatttaatccttaagactgcagaaggcttcttatttgtggttggatgtgaaagaggaaaaattctcttcgtttctaagtcagtctccaaaatacttaattatgatcaggctagtttgactggacaaagcttatttgacttcttacatccaaaagatgttgccaaagtaaaggaacaactttcttcttttgatatttcaccaagagaaaagctaatagatgccaaaactggtttgcaagttcacagtaatctccacgctggaaggacacgtgtgtattctggctcaagacgatcttttttctgtcggataaagagttgtaaaatctctgtcaaagaagagcatggatgcttacccaactcaaagaagaaagagcacagaaaattctatactatccattgcactggttacttgagaagctggcctccaaatattgttggaatggaagaagaaaggaacagtaagaaagacaacagtaattttacctgccttgtggccattggaagattacagccatatattgttccacagaacagtggagagattaatgtgaaaccaactgaatttataacccggtttgcagtgaatggaaaatttgtctatgtagatcaaagggcaacagcgattttaggatatctgcctcaggaacttttgggaacttcttgttatgaatattttcatcaagatgaccacaataatttgactgacaagcacaaagcagttctacagagtaaggagaaaatacttacagattcctacaaattcagagcaaaagatggctcttttgtaactttaaaaagccaatggtttagtttcacaaatccttggacaaaagaactggaatatattgtatctgtcaacactttagttttgggacatagtgagcctggagaagcatcatttttaccttgtagctctcaatcatcagaagaatcctctagacagtcctgtatgagtgtacctggaatgtctactggaacagtacttggtgctggtagtattggaacagatattgcaaatgaaattctggatttacagaggttacagtcttcttcataccttgatgattcgagtccaacaggtttaatgaaagatactcatactgtaaactgcaggagtatgtcaaataaggagttgtttccaccaagtccttctgaaatgggggagctagaggctaccaggcaaaaccagagtactgttgctgtccacagccatgagccactcctcagtgatggtgcacagttggatttcgatgccctatgtgacaatgatgacacagccatggctgcatttatgaattacttagaagcagaggggggcctgggagaccctggggacttcagtgacatccagtggaccctctagcctttgatttttaactccaaaaatgagaaacattttaaagcattatttacgaaaaaactgtctcaactattcttaagtactgtattgatattgtttgtatcttttattaatgttctaccactttttatagatttgcatcttcctgtcacagggatgtggggaaatacgttttcctcccaagagaaccaagtttattatagactcctttattcagtgaaatggcttataatccactagttgccatatttttgctaaaatatttctaaccaagaatactacttacatattgttttggctttgttttatttttgatgcagttttttttagttgaggtaatgtaatatattgatgttttcctttgtgtctaagattgatttataatagtaggtttgtataatttggaacattttccatgccttgcgaatttccttaattgaggatagggcttacacactttaagaaaacagtgagtacttgaacatttaaagggacagtgcaatttatagtcataatcacattgaatactgtatttgatctttggagacttaggcaagcacagagctgggatatttatgctcagttgagcactttaagatgaattttaagtgagatgatttcttgcttaaaactcagaaagtcaaaagagtttcagctttccttacagaaaaggaaggatcttgggccctagatcttggggattaacctctgcatataagatttactcttaataggccagacgtggtgctcacgcctgtaatcccagtactttgggaggctgagacgggcagatcacttgaggtcaggagttcaagaccagcctggccaatatggtgaaaccccgtttctactaaaaatacaaaaaaaattacccaggcactcactcttgaggtaactaaccaactcccacgataatgacagtccattcatgagcgcaaaggcctcatgacctaatggcacacacctgtaatcccaactgcttgggaggctgaggcgagaggattgcttgaacctgggaggcagaggttgcagtgagccgagatcgcaccactgcactccagtctgggcaacagagtgagacttcatctcaaaaaaagtaaaaaaaaagatttaatataatcactgaagatctctattatagatagattaggtttttgacattggaaacatacttagggatagatttgtcctaaaggaaaaaagtaggcccgggcagattaaatgtcttgtgtaaagtcacacattaaattcagtcacacattaaattcatagagttttaaatgtttaatgtatataaaccagtttctttatacacatttgggaaaacattggtctcacagattaaatgattaactaactgacccaggaactagttgtagctttctaagtaattaggcaattacagttattgcctgtaaccaaaggtaataaaacaaaatgacaagtacatgtttaaaattatgaggcaatgagaaataatttaaaaaccaattttctagttataatttaaaatttggagagcatttttaacagtaattaatccagaggtggctcaaattgagtataagaattaagattatttaaaatactgcatgtctaccttctcggggatcatactttataacactttctgcttcagtagctcttcatagcttgccaagtatgctcccatattttctctctcgtgcctcgcaaatgaaagtcagataggctgggaactcatggggcagccctcagacttcaatgtgggcttcaaatccagtttcctgttctatatggtgctacatctttccagaaaatttccctcagagcccctcgccaaaacaaagcattattttgaccctgcatgctatttctttagctgtaggtgatagattagaacttctgtcagacatgttaatgacaaacataccaacagacaataaccaaagcaaatgtttccttcaagtgtgaaatgtgcaggggctcgtgggcaaggatgtattggcacactgtcctcttgaactgatagtgtcccagcaatgttggaggttggcaccattcctggtccgacacttgaggacctgagagacatcaggtttagaatgagccaaagaaatcctacaagatggggagaattggtgtgcagcagcctaagtgttatagttaagtctaaagaagtatgaaagatcccctgtgttctctaaattgagcagaggggcctgcctaccaatatcactttttaggggactgaaccattgcaggttagacttggcttccaaagagtctgcctaagccaggggtggcagggtaggccatcatagctggatggcctcaaaagcagatgggggcagacttgccctcgtgatgccaggatttgagaggcagagtttctagagggagaccagtgctgcctctcacagtggcagttttttctctttgcaagaggaggggctgttcaattccatagaccagtgggcagatagccagttgaatactctgtgcatggtttgatcctttattagttcgctctaatatttttctgtagatccttttgtcctggactcaaaatctaatccatgcattgtatgataccgtagctctcctaaggtttgtgtttccttcaaaatgttttagttttcttcaactaaatttgatttttgctgttagaagtgacatatttttatggtatacactatgttccttttttctactgcgagtcaattttttgaattttcgtgagaaagaatatatctacaaattgcacgaaagtatcataaaaacagtactctagagcagcgctgtccaatagaaatataatctgagccacatgtataattttattttcttctagccacattaaagaagtaaaaagatacaagtagaactaattttaatgttttaattcagtatatccaaaatatcatttgaacatgtaattaatataaaattattaatgtgatattttacattcttttggtaatactagtcttcaaaatctggtatgtatcttacattgatagcacatctcactttgtactagccacattgcaagtgctcagtagccacatgtggctagtggctactgcactggacagcacagttctaggttccaccctaacacccaagtcctgtggattagaatcccagaatcagagctggaagtaaacatagagatcaaacctccttttaaaaatgaggacgctgaggcacagagtttaaatggcttgcatgaggtcatacagctaaattcagcctcaacagggtcttctgattccaggcactcttcccactccactacattactgtagtggtaattcttagggttaaaaaaagtgtagagtaggccgggcgcagtggctcatgcctgtaatcccagcactttgggaggccgaagtgggcggatcacgaggtcaggagatcgagaccatcctggccaacatggtgaaaccccgtctctactgaaaatacaaagcaaaattagccaggtgtggtggcgggcgcctgtggtcccagctgctctggaggctgaggcagaatggcgtgaacccaggaggcagagatggcagtgagccaagatcgcgccactgcaccccagcctgggcgacagagcgagactccatctcaaaaaaaaaaaaaaaaaaaaaagaaaagaaaagaaaagtctagagaacattatattaagtggttattattgaagtagaccaaagtttataccataaggatatttttccttaaataccatgtttgaagaacaattatttattgatccttgaatctgtaagatcaaataacaagtctctatccatgttaccaaatttaaccttttgaaaataataaactttaaaatatcagatgtgttattacaggatgatacttggaatcaagtgaaatgagttatatggtcatcactaaatttagaaatctattgtgaaacaaagacaaacaggaaagtacagaatagagacttttagtaaataaatggaatttaaaagaaagtgtttatttacagtgtcacgacagaaaaggatgtctttgttgtcatagtctttgagggatctccgtaaaatctggggcacaggtacaagaaatagccaatatttagttcccagaccatgtttagtagtgtccagtttcagatcatgctgccaagaggtatctccccctcaggtgggtcatcactgagccctggaattggagactcatacttgcccagcacaatgttacgggcagacaggccgacatctatgattagctagaagccataaagaaaagctgctaagtggccactaggtgccacttttctgtttttgtaatgctttcattagcagatcttttttttccaagctccatggggcctatgagaggcatttatgatttttgtgcctacaataagtcagcctgtctggtgtgagttgttttatgagaaatgctttccaagggaggtctaggaagatcctgacacataagaactttggcttagagagctttccaggtgtagtgccaataaaaactgacctggaaagaaaacctgcccagcacggaacatgctttctgaactcacttgagagtgtatggtgtatgtcacttctcatatattcttgagtttagatttgtcttttatacaatttttagctcttttccagttcacttgtgctcgtctgtatattggtatttttaaatttttgtggtaaataatgaaaagagtgaaattatattttataattactcatttgtagtttttttttttaatttaataaacttcctccaaaaagtgctcccttaaaa

SEQ ID NO: 660610 - DNA, 767 bp, Homo sapiens
agcggaccggccgcggtaccctagccgtgcaaaggtgaccataatcacttgttcctaaacttagggacctgtatgactggctccactgagggttcgggctgtctcttactccttgaccggtgacaattgtcctgcccgtggagaggcgggcgtaactacagcgagacgacgaagaccctagtggagctgctaattgtataaagtgcaagagcagtagctaacaggatccacgatgtcctaaacgtaccaaagctgcgattaaacaatttcgcgtaggggcgatcttcggagcagaacccagagctccgaggcagtgcacatgctaaggagcttcacctaggtcaaagcgaacgtagctatacgtcatatggcatccaattaaccttgacgcaacaggacacaagattacacctagggactaacgagcgcaactccgtatatctatagtccagtatacaatcaactacgggtggactgaccatcgattggttggatcatggacagtccacaagtggtgcatgccacgcgtattgaaaggttcagtatgattcacacgagttacaagtcctacgatgatcgtggagttcgagaccgggagtaactccagggtcgcgtggcatatcgtaccttgcagaatgccgtccgctgtacggagtaggacacggagaagataagtgcctgacttcacgatgagcgccgttgcctgcgtagaatgcatatcgatctcaaccttagtcattagtacccaggaccagcgcaataaacag

SEQ ID NO: 660611 - DNA, 345 bp, Homo sapiens
gatcacgtgcatgtggtatatactatatgatatattatcatgtgactctaattagaaaatgtatccaaagcaaacagcagatatacaaattaaagaaaagaaaaagacattaacagaaaggcaattatacattgagaatccaatccaatacatttaaacatttgggaaatgagggggacaaatggaagccagatcaaatttgtgtaaaactattcagtatgtttcccttgcttcatgtctgagaaggctctcccttcaatggggatgacaaactccaaatgccacacaaatgttaacagaatactagattcacaatggcacgtggatccacaatggcacgtggat

SEQ ID NO: 660612 - DNA, 123 bp, Homo sapiens
tgagtctcatggctgggagaaggcgagggctcccgcttgcatcatgactgagatcccttccgacagtccgcgctatatgtgagggccgtgctcagctcttgtaaggctgaaggtgagaatcat

SEQ ID NO: 660613 - DNA, 204 bp, Homo sapiens
agggtaggcttgagcagcaaggccgtgtagatccagcaaatctctcttcaggtcctctgtgctcttgttactggtagagctatctgtgcttctggggccctacggcataaggactttaagttatgtagtcaagtcctcagtctcactttacaactacctgcttaccaggttgaagaccccactaaagtaagactaacccacctg

SEQ ID NO: 660614 - DNA, 1388 bp, Homo sapiens
  misc_feature (846)..(846): n is a, c, g, or t
ggtgggtgcgcggaggtgaagcggaacgggttcctcgggcggtgactgaatgcagtgcgggacggggaggacgggaagatctatgccggtgttggcactgcgtcctactctgttacctgaccatgatgaccgctgagagacccctgcttttcttctcgagggctccgttgacctcgtactagtgtcccgggctgtgtggtgcttatcccggcgtgggtcgcagtggagtgtgctcgtggcgtggcgtgttagggtctgcgctttcgccctctggcgtctgctatgaggacagccattgagccaccgtggtctgttggacagtgcctggtagcatcagctggagattgtagttggcgtcgctacgaagagcgttccacgaaaggatagggaacgaaacgctctggaggtcggagcgtcgttgtcgtgcttgtgcacaaaactcgtgcatggcggccatgggatcctcccaagccgagatcgagcgtgtcctttgctggggcatccccgggtacaattctcggaaggttacaattcttgaacttttctagacttcaccaaaaatcgagctcttggaaggggacgcgatcgttgcattctgaaggcatgcgttgcgaggacatccatgctaggcactatttcagccaggagcttaaaaaagcgcatggtgggggcgcaacggtacccgcacgagttcaacttgaagttaatagggatgcttcctatggtgtttccataggagcttttgcaggctgcagtgaaccaacaagctacaaggagggcacacaagagggggcaccatcaaggatatgatgacaaacacctttgtttcccccacccaattgcatncgattctacggacccggccttcacaggtagcagaaatcggacaacgcgcaaatcgacaggcggtgaccctgcgcggcaagtgggggctctgggcagggggcgaccacaaacaataaccatcaacgaactttttgtaaatcccatagcgcgtcctgaagcaattgcccgtggaattgctatgatgcccatggtgtttctcccattgtctgtcacaagagaaaggggtcctgttccaaggcgtaggcctttaggttacacctttgattggccctgggagggcattcgcccgaaaggcactttgcgggaaggagggtgctgggaagtccccgtatgggacacgtgttgatggcgcaactgctccagcatgtgtgtgccttcggaacgcattaagctttggtgagacccacccattcttgtggtgttgggcctcagaggagcgaaggacatttgaaacagcaaaggaggtcttccgcctatggagggcctcagaggcgccttcacaaagaccgggagaaagcacgaggagagaagcgccttaaccg

SEQ ID NO: 660615 - DNA, 237 bp, Homo sapiens
aggtttgtagaatcaattggcagaagctcagctctgtgaaatagctcccgtgatttttcttgggaccctacttagttccgtgggcttcccattgggagctgattaatttctgacaatcagaacccatcgctaacacatcagatgatagtggctttgacctagggaagaagaagttgagcgaataacccccagcaggtatggtttgagagtctttagttgagggttaatttgggcgga

SEQ ID NO: 660616 - DNA, 398 bp, Homo sapiens
  misc_feature (114)..(114): n is a, c, g, or t
  misc_feature (117)..(117): n is a, c, g, or t
ttcagctgccgccaggcgaccagggcgtagtcctccacctgctcctcgcggcgcgagcagtcggcttggcgcaccttgcggctataggcgtaggcgaacaccggctcgacgccngangacacgttgccggccagcagcgaggtagtgccggtgggggcgatggaggtgaggcagccgttgcgcaggccatgggcctcgatcaggctgcgggtttcgtcgtccaggcccttgaggttcggcgcatcgaggatggtcttgtcatagagcgggaaggtccccttctcggcggcgagatgggccgaggcgcgataggccgcgcgcttcatggtctccagccaggactccatcagcgccacggcttcatccgaaccgtagcgcgcgccgcagaacacgagggc

SEQ ID NO: 660617 - DNA, 652 bp, Homo sapiens
  misc_feature (33)..(33): n is a, c, g, or t
  misc_feature (35)..(35): n is a, c, g, or t
  misc_feature (42)..(42): n is a, c, g, or t
  misc_feature (46)..(46): n is a, c, g, or t
  misc_feature (49)..(49): n is a, c, g, or t
  misc_feature (51)..(51): n is a, c, g, or t
  misc_feature (60)..(60): n is a, c, g, or t
  misc_feature (81)..(81): n is a, c, g, or t
  misc_feature (83)..(83): n is a, c, g, or t
  misc_feature (85)..(85): n is a, c, g, or t
  misc_feature (91)..(91): n is a, c, g, or t
  misc_feature (119)..(119): n is a, c, g, or t
  misc_feature (130)..(130): n is a, c, g, or t
  misc_feature (135)..(135): n is a, c, g, or t
  misc_feature (139)..(139): n is a, c, g, or t
  misc_feature (145)..(145): n is a, c, g, or t
  misc_feature (151)..(151): n is a, c, g, or t
  misc_feature (158)..(158): n is a, c, g, or t
  misc_feature (173)..(173): n is a, c, g, or t
  misc_feature (186)..(186): n is a, c, g, or t
  misc_feature (188)..(188): n is a, c, g, or t
  misc_feature (214)..(214): n is a, c, g, or t
  misc_feature (233)..(233): n is a, c, g, or t
  misc_feature (239)..(239): n is a, c, g, or t
  misc_feature (255)..(255): n is a, c, g, or t
  misc_feature (305)..(305): n is a, c, g, or t
  misc_feature (308)..(308): n is a, c, g, or t
  misc_feature (341)..(341): n is a, c, g, or t
  misc_feature (346)..(346): n is a, c, g, or t
  misc_feature (395)..(395): n is a, c, g, or t
  misc_feature (404)..(404): n is a, c, g, or t
  misc_feature (408)..(408): n is a, c, g, or t
  misc_feature (424)..(424): n is a, c, g, or t
  misc_feature (426)..(426): n is a, c, g, or t
  misc_feature (428)..(428): n is a, c, g, or t
  misc_feature (477)..(477): n is a, c, g, or t
  misc_feature (491)..(491): n is a, c, g, or t
  misc_feature (498)..(498): n is a, c, g, or t
  misc_feature (553)..(553): n is a, c, g, or t
  misc_feature (580)..(580): n is a, c, g, or t
  misc_feature (649)..(649): n is a, c, g, or t
tgaggggtgtacattttattggaaaccttaaanantgttcanaaanaananatcttcaancaaggctcttgtgcagcctanananaaaaangaagcttttgggttaggggcaaggaganaaaaagtacanagganaaanaccccncacgangaatgcncttcagccagcttancagcttttgccanancttcttcaatgggtcccaccaaaaanaaggcctgttctgggaganggtcanattcacctgccaaaanctgctggaatcctttgatggtctccttcaggggtaccagcttccccaaanganctgtgaagacctcagcaacctggaatggctganaaaanaaacgctgtattttccgtgcacgggacaaggtcaacttgtcttcctcanaaagttcanccanacccaggatggcaatnanancctggagggacttgtagtcctgcaggatcttttgcaccccacgggcaanaacgtaatgctcantgccaanaatgttgggatccatgaaacgagagggggagtctagaggatccacagctggatanatgcccagctcagcaatggcacgcganaattcagtggtagcatccaaatgggcaaacgtagtagcaggggcagggtcagttaagttatcagcaggnaca

SEQ ID NO: 660618 - DNA, 294 bp, Homo sapiens
cgcttttctatatctactaggagtaactcccctattttagcaataagataggtaatagctctctttgcatttagatcttcaagagcctgttcttcagtagctatatatacttctttctttactctttagctatttgcctgtcttctatttcttatatagtacttcagtaaatgctttattcatcaacaatcagaatcatcagaaagcactgtaaccagccccaggcagccagcagaagcagctatcagaagagtgtagatatagacgagtgcctgtcgatatagaagagtgcag

SEQ ID NO: 660619 - DNA, 110 bp, Homo sapiens
catactggaccttctgtctgcctgcatggtccagccagcccaatacctcacctcctccaggaagcctctggagagcactccagaggcttcctggagaaggtccaggtatg

SEQ ID NO: 660620 - DNA, 237 bp, Homo sapiens
  misc_feature (63)..(63): n is a, c, g, or t
  misc_feature (71)..(71): n is a, c, g, or t
  misc_feature (99)..(100): n is a, c, g, or t
aggaccagctccacagatgtactatgatcaactttcactttcagaaatgtgtatcagcataanctttgttnagatacttgagaaatcagatgtatctgnngcggtaaggatcccggttagacatcatgttcagtgtgagggcaataacccgatttggaacatgagcgtcattccgaggaaacgcttttttttgcccgatagtagtttgtcaaaagttaaaatcttgttggggagctt

SEQ ID NO: 660621 - DNA, 339 bp, Homo sapiens
gtcgactgggagaatggtaggaggaacacagggttagatcaggccaagtttattgatacgggctcactaagcagagattccgcatttagaaagggctctaattggttggttggctgtttggctgaaacatgggccaaaacatggccaccatgggataactggacatgcctggccgcccatggttagtgtagaagaagggattcaaaggcttagggagattggaatgctagagtggatttgtctgccccatgctgctttcgttcccctgctagagtggatttgtcctccctattctcctcttcctcctcctctgcagccctccactaccctcctcctaca

SEQ ID NO: 660622 - DNA, 311 bp, Homo sapiens
aaacattttcccccctttcaagggaaatattttaatttttttttctctttcccaaaatttaggaaagtttaggggaattgggttttgccaacagttcccccccctaagttttgaaattcaaaatttgaaaaaaacccggcatttttggtcatttaaaatttgtttacaaaagggcaaattatttaaagcaaagactttaaaagccttaaaaaaaactaatggggggaaaccccaaaagcgatgggaaaaaattttagggttgaacccggagggggatttttattttaaaaaacttttgggttcccgattga

SEQ ID NO: 660623 - DNA, 1767 bp, Homo sapiens
  misc_feature (192)..(192): n is a, c, g, or t
  misc_feature (224)..(224): n is a, c, g, or t
  misc_feature (335)..(335): n is a, c, g, or t
  misc_feature (665)..(665): n is a, c, g, or t
  misc_feature (771)..(771): n is a, c, g, or t
tgtgctcttcctcgggtcgcccgttttactgtttattggccgctttattttggtgcctgctttccccccccgttgtgtgtagggggtccccgccgctggtggtgtgtgtgcgaccttgcttgttctggagcgtgggggcggtgcccgccaccacgacggcggtagtatgtgtcggtgccagcacacgatagngcgtcttttgtgtgtgcgatcttagagttgcngtctcgcgatgcccgcccgtgttgtgccacaccgcagctggagcacgctcctgtctggggggggggacctaccaaccgggatgcacccgtcctttagcagtgagtgtgtcngccagccaaagctgcgggagaaaattttctctgctgctgtgaaaggggggagcggggggtcatataacgtacctttcctgccccgcgtggttgaggagacgcgacacgacggggggtgtgctcgccccgacacggccgccctctcgttgtgctaagcacccgacggcgccgcgagtttgttttgctgctcgcttgtgtgacggcacgcagcgtcgtgtgtgttgcgcagcgcgctctggttgtgcgatgcttgctcgtgtggtggggcagcgcgcggccgtgttgtgcggccacggagtatgtgaaggttgttggggcggacgaacgganccgcactctcccttattgttgggttccaagctgtagcatactgctgtgtggcgcccgcgacccgcgtttgcctccccttgatgtgtgttgttcgctgtcttgggcngcccacagtcggcgactaataaccttccggccgggaggatggttcaccagccatgtgcgtccacgagctgtcccccccctcttccttattgtggggtaggattttttctatccgctccttcttgcgccgcgacctgttgttccgccgccactgtgttgagagagagttgtgccagccccgccgtgttgtgcgacgacccgccgcccccgtcgttgattagcgttgatcgagccaccccagccagtggtgtgccccaaagtgatgtccggcgcccctcctcgtcagcggcgcttttatatcctgttgttcttgtcgtggtccgcccgtctggtgcgtgttcgttccccccgtcgtaggatgtgtggaggcacaccttgtgtggagcccgcccccttatggtgttgtgctgtcagcccccagcggagctcgcctctctcttatggtgcgcgcagcaccccccacgcacccacactttatataccccccctatgggccacacacccccgccttataacacacaccccgttccgcacacacactccacatgcgcccgcagcatatgaatatatgttcccctatatgtcgcgcctatacaccacactttttctcgcaatctcgcgtccgctatacaccacactctataggagaggcgctccccttggcgcgctatattatactatatccacatccctcacatctctatcgcacaatataatcccccactctcctccacataatatatcccacaccacaccacacaagcacatataatattttctgcgccacctaagcccacatcacctttatttgagctcctagccccacgaacctcctcacttttaaccctgaatccgcgagggaccacacccacgtaagctacccttttacccaccccattggaccacgtagcactccgtactatacttcccccaccatcctaatcctaatacccactatctccctaattggaacaccaaatactccaatgggcctata

SEQ ID NO: 660624 - DNA, 1320 bp, Homo sapiens
atatattcaatgtcagtttgcacagacctccaataacacagcaacaggcacacaaaggcaaatcatacaccccacttcaccatgtgccacagcatactcacagaatgtgcagtttgtattgcatgctgtcaaccagcatgtcaatccatcacaacaacatcaatactcaacacagcattagtaggtctacttatatcaagttatatagcagattccatcggtcaacaatgccatttatcacaacccaaatgcagtcacttcatcatcatgcgatcatctgtcagaactcagcagtctgtagcagcacacacagcaactgtacatcataaggcaaactgcactctgaggacattgacccaacagttgatactgttataggtacatatattataacctgcacaagtaaccagacaggacactttacattaacagtgtgacagcattggttccctgccagtgatgcaaactgcacagagacaagatggctacaaccagctgaggcatcatagctaatcatctggcatcggcatctacctggcatcacagttgtcaacatcaatgcgacacaatggtcaatgtacatcaccatcgctcaattcaatcgaactccttcaagatttatcagcacacaattactcaagcatcacgaggtctatccaacgacgttggaccaacaacataagagaatacaaacggcgtgccattgagccttatgcggacaacatacaacaattgacagtaataccccttggttcggtgcacctggaccacgcacgtaatatacctcacaatcatggaccacagtttaacacagacacgcgtttatcctctacagtggtaaccacatgtgtctctttgaataaaagataagagaaagagtccatggatactcacaatactctacgcaaaagcactttacaagacgccataactatagacctaaactaggaatccatgagactaaaacacacacgatctcaacatagaagcagacacagcagaagagacacaaaataacgaaacgcgtcacacaacactagagccatatgacacgagagcgagggagagaaaaaggaggaggccgacacagtagaggtaggcgagcggccagagggtaagggaaggggaagctagagcagacagcaacacacaaggacgagagagagaacgcacacgataagcgacggcaataaaggaaaacaacagaggagcagaaggcaaagtaaccaaccaactcaacacaacgagcaagcaaggagaaaggacagacaagagcaaaaggaggacaagaacaaagccagaagatgggaagcataagag

SEQ ID NO: 660625 - DNA, 109 bp, Homo sapiens
ttgagctcggtacccttcgtactcgagccgtcagcgcgaaggttcgtagccctccagtgccggcacgctggtcaattggccgtcgacaatggcctcgcatgggttgcag

SEQ ID NO: 660626 - DNA, 152 bp, Homo sapiens
tgtgcacgcagagacctttgctttgatatcatcaactgaagagaatgctgtatgatgggagtgctggaacgcagaaactttgtctatcggaaaaactatactggtatgcgtgagactcaacatcaggatccacagtcttcgcctggggtacc

SEQ ID NO: 660627 - DNA, 154 bp, Homo sapiens
gctcacccgacggggtggcccggggaggcgcgggcggcggccccagcggagactaggccagaactgagcattttcaaatgttcccgaggtagagatggactgccgcgatccccgttcgcatgcgacgatgacttccctgtccgtgtttcgtgac

SEQ ID NO: 660628 - DNA, 462 bp, Homo sapiens
actacgcgttggcctggcgagcagataaagtcgatccggcaggatctgacggggcaggcatccgcaccgagttcacggggggaggtgtacgagacccaggcccggatcgccttggagaggggtgaccatgaagagtttaaccagtgccagacgcagctcaagtcgctggtacgcagagaattggccgggcaatggggggcgagtttatggcctacggaatcctctattacatcttcaccaagaagtcgggagacatcaccagggagtgggcatacctcacaggagaatggaaggagtatccttgggtggcccacgcctgggcattaaggacaggcggggcccggggcaactaccaccgctttgtccggctctatgggcatgcaccctgtatgtctggctacctcggggacaagtttgcagatcgggagcgcaaggttcgcctcaggggcatgatcaaaatgt

SEQ ID NO: 660629 - DNA, 1529 bp, Homo sapiens
  misc_feature (297)..(297): n is a, c, g, or t
tcccttccaaaatggaacaattttttttttaaattccaacaaaactccttttccccaagcccccaacccgtggcgagggcagcccctccctctctctcccatcctcctctccaccccccctctcttaagcccagggctgaagagggaatagtggaaaatgtgaagaaagcccaggagaggagcccctctgtccaggggaaaggtctgccccacaatattgtggtggttgaagccaccagcccacgtgcgccagctgtggtggctgtggggcacagcacaggtgtcccccacagaggntctcctctccctcttattaagtataaagcatttatcctctgcacagcacccaccagctgtgtgtggagaacaagagctctctaaatctgtgtgacagaaacaggcacagagcggccaccagtatccacaggctactctcacaagagaggcacagagaggcgcgcacgcactctcagagagaagactactctcccccaacaccccccgtgtgaggagcaagtgacaacacggtgaggagaggccacaacacagagaagactctgctccagaagagaagaccaccagaccactacagtagagtcgcccagcagggcgcggcgacacaaaacagaggcgggagagacgaactagaaaagtagagcggccggaggggcacaagtatcgcgggcgggagaacaggagagcactcgtgagcgcgccccccaaatacaaacatgactgggcgctcccaccaggcggggcacacaccagagcagaaacatagggcgctccagcgtagtgtgacgccccacacaattttgtagcagagagcagcgctcatatgcgagaagaagaacaggggacgacagggtggcgtactctaacacagacacaaccgacagtggtggggggcgcagccactaagaccgctaactctcgaccactactaacgagcggcgggccaccccattcatccaagaaaccacgtgacgttaccccacagagtcggttcacacgaagctgcctgtcagataacaaccccgccccactcccaacacacacgcccgctgggtggatgatgcaggcgagaccacctaggacgcgagcgcacctcctgactgatagacaacagaacgacacaccctgccgcgtgggaggacagccaccacccatgctcacggaggtcggacacgcaacgcttgctccgtccgccacgtcgcgtcgggcgtacaccacggagcatcactatcatctgctctcctctcctcgcgcctcacccaccttactcgtgctactctactgtcttaccgaccaccgcccgactcgctcgccgccgctgctcgcgcaggccgagcatggatgcacgccacactcgctgtgcgtctcgaccctcagtcgtgtcgctccccctcgcctgtgcgctctgtggctggagcgtacacatcactctcaccgacaggagcgtgcgacaaccttctcccgtggtcgcgctgctcagtcggtcaccgcacctccttctcctgccgcgacgt

SEQ ID NO: 660630 - DNA, 335 bp, Homo sapiens
atgctggtcgaaagccttttttgtcttcccatcgcaggtgtgctcgggattaggactcttagcaggagagttcttacctgtagcctgtgctggaatctctacttctgcattatctgtagtcttctctcctattgctaccagctgtgtcatctcgcctacggataccttcgttgctataacttgtgctaatcctctggcaggtttatacttcccatgctctgaggtctgttccttctttgattcaggtttcttcactgtagtatcagcactttcaggtgccacatcatctttactaagaacatgatgccgattcctagcctgatgcctcttcttct

SEQ ID NO: 660631 - DNA, 913 bp, Homo sapiens
tccctatatgtattcgttggcttgtgatactcatgtcatcgatattgtagtgcaaggctctggcttacgtagtcgcctgcatagtcctcctgcgatgtacacgtccagaagaggagcacttaaaagcgtacgtacccagaaagatattggattctactagcccgatgtcatcttctcggtaacagagtcgtgcttgccagtctttggtctctttttgcagatcctgacctatataaatctcggtgaagcaatctatttagatccagaaggataggaatcatattatgggcccatttcttcaagaatatttttcctgatcagggcgtccagtggtccagaatcttttactgtctagcattacaatggattggaagcagtcgaattatatatgaaccggtcatgtaggtagaaagggactgcagttgtggatgggttatgaatgatcttcatgctatagacggatgacatcgtattaaacgctgtctgaagacaaatggcatacattgagttaatctggaccaagattgtctccttcagtaaattaattgtctaagtatttatacggacgatcttactaaccggatgttgcccgaaggagtccagactggcaattgggttggattaagcctaaacactggtatccctggattacctgtaattaccattaacaacctcattttcccggttcctggatatgttcacgttggtgtggtcctcacggctaatgttagggattgtctatttaccctttgagtgaaattactagccaagtacgctttcatcaccattacacctttggcttcgatcttgtctatccccgctgacgcgacagcacgcgttttttatcttctcacgccactcgacacaccgggcggtcatcagcacacccatgtggacgagccgggataacaac

SEQ ID NO: 660632 - DNA, 978 bp, Homo sapiens
agcggagtgtgtcttttatgagttaaactaaaatggaggctggtttcttgccttaaggagcccattgcctttcccgctgaagtctagatgtggacatgtaataaagcgggcagcaggatggtggtggatgcggccaactccaatgggcctttccagcccgtggtccttctccatattcgagattgcaaatgcacaagattcgagacctatgtatacaagagggccaactttacatacgcacgggttctgcgggccgactgtgggacttgaactatgcgtggattgggcatgttcctcctgctgatcaagagaagcttaaatccagaagttacgtcagtgttgcgtcctcgttggactttgcttctgatccactaagtgacctaaagtggcaaggacgtcaacacgagctgcttcacagtgcaccatggtagcactatatccaccataatcggcaatgtgatcacagagcctatgtacccagaagtagtccatatgttgcagttaacatgtttcggaacattaaccacttcctccaatcctaagggagcgcacattggaccggaggcactgcatgagccaacggttagcaacgcaggcctggactcaatctacagctggttatgactatcatcctaacggacttacgcagttcccagatttccaacctaatatagcgcagcactatattgagcccgaagcctggccttgcgcggcgtttacgagcccttgtgacccctgacaaccctcgggcagacacaccctccttaaaaaacaacccctttaccgaattccattggggacaccccccacgtttggaagagatcctcccgagaacgcacataagtaactagcatacaagctgtatcttataaagcccgcaccacaatgccggacacgccacacgaccaatctatcgggaatactacgcgggacggctcccaccaatagcgcgacacttcatacggtagaacccctcac

SEQ ID NO: 660633 - DNA, 518 bp, Homo sapiens
ctaaaacaccaaagcgaatagcaacgaaggccagaattgacaaatgggatctaattaaactaaagagctttgcacagcaaaggaaactatcatcagagtgaacaggcaacctactgaatgggacgaaaatttttgttgttgacttgttagactgctgaattaatctaagtagtgttgttacttaccttgcgtagagctgccagaaggaatcattgaagaacattattagtcagaccacatgattcctctggttgaaaccctgcagtgatagctttcattgcagttagtgtggcgcctgcgaagctcccatcttgtctgtgactgaacttcagacccgtggcttctttcagttccttcgtggagctcttctcgcggcgccagcacacattgctcgcccctccctcacaatgcttgccctgccactgttcacctcctgctcttcgcctcagtgtcccagtcgcatcctcttggccttcctcccccagcgggcgcccctacccactcgccctctagcgagt

SEQ ID NO: 660634 - DNA, 896 bp, Homo sapiens
ggttagtctgtgaaggagctatggtggggccaatgggaagtgctcccttctggcatctgacgctgccctgcaagtgggtactgctgggcagagaacctgaaaaaggcgggcagactgtgggctactcaaatcagatggggcccatcccatggacaagatagccatgttctgtccagctccatcagtgaacaaaagtcaaaccacctggaggagcttggcaagccttggcggatgggtgtccctagccagtgctccacctcagctgttccatgccaaaccttctggtctcatcacaagctagagttctgtccctgccacctctccaaacagctctgtcagctcaaatgtccacgagggtcgtgggctctcctgcaactacgaggttcttggtgagagtgggccactcctcgcctgtttaactcaaaccatgcaaaggagtcgctgggggtcaggaatgagttctggtgctctgtagtccggtgcagggttcccagcttccttccccttcagcccagagtttatgtcttccttcggtacactctcaatgcctttcttatttgatctgctgggagtgtactggtctgcttgatggtcttgtcttgtggtgggagatgctctcctggcagtgactagttgaccaccttggctttttcctgaatcaaagttcaagactttgactacatctatgtgagtttctaggagggaataccttaaagagttgctcgaactaaggggaggagaaggggacagctagctgaagaagcagactgaggatcgcagaggctctctggggactggacagggaccggtatactaccttgggaactcttagtctaccattcctgcatgtgtctaacctgaacttcgaatttcttacacattcactggagaacatt

SEQ ID NO: 660635 - DNA, 895 bp, Homo sapiens
accatggcggctggagaccctgtacacgtatcctgataagaactggatgggccttcaaggctctcatcgcctgctcagtacacgcggtgggctcaggttcccgtgtgccttctccggatagcacacccacattccaattgtgtgcgccgaaaccaaatcggcaaaccggcctgaatcttcgtcccgcaaaatttccttgctcaggcagagagggtcccgagcaattggagggtgatgactggaatgcgtgtgtgttttggagagcaacagccattagaactaactcatgtgagctagatgagggagcttggggggtgaacagtacctcttagaagggctagtcgaggaccacgacgtgtgggtgcgaccttggggtgaaactcctggtctgaattccggatattaggtgctcccgcgaccgacaaataccctgggatgtttcactcaaaccttgggcgtctatctatggcattcacatataaaaggaggcctatctgtatgactgtcacattggacgcgaatgtgaggcttaagttctggtgcgctactggatgtgccgtttacgtggcaagacgaatgtgacgtctatcatgggtgacgcgaaataatgtgacatttgttttgatcttcgaccaaggttcgtaattgtaatccttgttagtgcgctctaatgacagcagggtctacagagccctaacttatacgcatagtctgtttcccaaatagcaaccgctgtgttcccccacatggattaacacagcccagtatccgcgggtgtgttgggcagagtgacatgtgtgacacatggccgagttgggcgagaactttgaaaaaccacctaaatgcgtactgaaaagacggttcggaagagaccaaccctgtacgggggaacagg

SEQ ID NO: 660636 - DNA, 319 bp, Homo sapiens
  misc_feature (176)..(177): n is a, c, g, or t
agctcacaaacatgatttcgcagggttctacgctgagagagaaagagggaacacagagcatttgacctactctgaagttccttgaccagaagtggcacaaagtcactttcacttgctttccattggttagaaacagtcatgtgactccacctacctgcgagatacctgtgagtatnnccatgtgcctaggaaggagcagagagccacagataggtgaacactgtactcttagccacagtcactgtattcagagattgacatgtgcaagaggctattaaaagagctatttacagatgaggtgacctttactactatctag

SEQ ID NO: 660637 - DNA, 117 bp, Homo sapiens
gaaacggcaagcccaagaaaaaagggaaaaaaaaacccccgggaaaaattgttaaaccacacccccagaaaaaaaaaaaagagagctttccaagaaaaaaaaaaaaccccccccccg

SEQ ID NO: 660638 - DNA, 425 bp, Homo sapiens
gtgggaggccatgacggacagatcacttcagcccaagagtctgagaccagcctgggaacatagtgagatcccacctctacaaaaaatacaaaaattagccaggcatggtggcacacgcctgtagtcccagctacttgggaggcagaggcagaatgatcgcttgagctcagaaggccgaggctgcagagagccaagatcacaccactgtactccagcctgggtgagagtgagatcctgtcagtcagtcagtcagtcaatcaactaacaaacgaatcaagaggatctatggaccaggcatggtggctcacacgtgtaatcccagcactttgagaggtcaaggcaggaggatctcatgagctcaggaatttgagacctgcttggggaacatagtgagactccatctctacaaaaaattaaaattaaaa

SEQ ID NO: 660639 - DNA, 127 bp, Homo sapiens
gtgaagtcaagatgaagaaccattttgcttttcttggggagtcctcggcggttttttattaaggctgttcatgtgaaaagcccaagaagatgaaaggattgttcttgttgacaacaaatgtaagtgt

SEQ ID NO: 660640 - DNA, 124 bp, Homo sapiens
gatacggtataacatagctaggcttgaatgaaggttccagcccgtttagttctgagtgtatgtgtagcttcattcaaagcctagctatgttataccttatcccagcctgaggttgagctacagg

SEQ ID NO: 660641 - DNA, 174 bp, Homo sapiens
gtgtgttttcccacgcgcatctagtgtgtgtgcttgtgtgtgtgtgtgtgtgtgccgtgctcatctgtgtacctgcacgtgtgtgcttgtgggtgtgtgtgtgtacccgtgctcatctgtgtgtgtccctgcatgtgtgtgcgtgggtgtgcgtgtgtgtacccatgctcatca

SEQ ID NO: 660642 - DNA, 486 bp, Homo sapiens
  misc_feature (13)..(13): n is a, c, g, or t
  misc_feature (16)..(17): n is a, c, g, or t
  misc_feature (21)..(21): n is a, c, g, or t
  misc_feature (65)..(65): n is a, c, g, or t
  misc_feature (171)..(171): n is a, c, g, or t
  misc_feature (410)..(410): n is a, c, g, or t
agagttgagcttnganngagnaaccaacatggaaaacaggaagatggaacaaagaattcccaaantgggggtgcgccagacctcatggtgcaattgttgaaataagcagtattaaagccagatcataagagcagagcagatcgaagaagcaagagcctgggcatttttgcnaattgaggcccttaggagaaaatgggggaaagggccaaagtaactggggttacagagagggcatcaggaatcactgcacatgaagacagcacctccacagaaaccaccggcaggaactcagggacttggtgatggactcatatcgtttgagtccagcatgtggggagaaagatgcttataaaatggcagaggagggactgctaagcaatgcacagaagacaatttgcagtaatcacttnatccttggttttgctatccaagagtgggagaaagatatggaggtgcagctttcgaagcaaaatatccacagatgtc

SEQ ID NO: 660643 - DNA, 446 bp, Homo sapiens
  misc_feature (15)..(15): n is a, c, g, or t
  misc_feature (24)..(24): n is a, c, g, or t
  misc_feature (31)..(31): n is a, c, g, or t
  misc_feature (126)..(126): n is a, c, g, or t
  misc_feature (176)..(176): n is a, c, g, or t
  misc_feature (437)..(437): n is a, c, g, or t
  misc_feature (440)..(440): n is a, c, g, or t
atgtatgccccaaanaaaggttangcctgcntgtttttcttttgtgcctttgtttaccccctaattgagataagcagtttgacttacctagattacaactttggcagttcaaagtctttgttgaanactttgaggaaaaagatttggaaaaattgttgactttcggccgggcatgnatgtcacgcctgtaatcccagcactttgggaggccgaggtggcggatcacctgaggtcaggagttcgagaccagcctggccaacatggtgaaatcccgtctctactaaaaatacaaaaattagccaggcgtggtggtgggcgcctgtaatcccagctatgcgagaggctgaggcaggagaatcagttgaacccgggaggcggggattgcagtgagccgagaccatgccattgcactccagcctgggcaacaggagcaaatntcngtctca

SEQ ID NO: 660644 - DNA, 327 bp, Homo sapiens
  misc_feature (262)..(262): n is a, c, g, or t
  misc_feature (289)..(289): n is a, c, g, or t
tttaacaaaacaatgtctacagagcattttgctttgtatgcaaatggagcagtactagaatttttagttccttgttttcttcaatactggaatgtaactttttacaatgccttttactgattattattttttggatgtctcccacccatataggtgagcttctcttacaaggccctgtatttatcaaagaacccagcaacagcattttccctgttggttcagaagataaaaaaataactttgcattgtgaagcaagaggcantccatcacctcattacaggtacagtgnaaagtttgaaaattcaaataaaaaaaactaaacacaca

SEQ ID NO: 660645 - DNA, 166 bp, Homo sapiens
  misc_feature (159)..(159): n is a, c, g, or t
atccccctttccaacaacctcaggaacgtacccttgtactttggtatacacaggctttggcattaccaaatcttatctcattataattactttcgttgaaccacttgccaacgtctgtctactatagcattcattgatgctcttcatctctggtgcatnacctctc

SEQ ID NO: 660646 - DNA, 209 bp, Homo sapiens
tgctacttggaaaggctgaggcacaagaatccctcgagtctgggaggcggaggctgcagtgagccaagatcgtgccacttccctccagcctgtgtgacagagcaagactctggaaaaaaaaaaaggagaaaaagaaggagagaaagagaaagggaaagaggaaaaggaaaaggaaagaaacaagagctcaccttcaaaggaaatttgga

SEQ ID NO: 660647 - DNA, 239 bp, Homo sapiens
tctgatgacaggcatgcgccaccatgcccagctaaatttttttttggtatttttagtagagacgggtttcaccatgttggtcaggctggtctcgagctcctgacctcgtggtccatccgcctcggcctcccaaagtgtcgggattacaggcgtgagccaccgcgcctggccactggtgtgtagttcttgaagagcagttatcactgttccctgccttgtggtgtcatcagacaatgtat

SEQ ID NO: 660648 - DNA, 629 bp, Homo sapiens
gcctggtgtgattccgtcctgcgcggttgttctctgtgagcagggtcttttatctccgtgccgacttcgtctcctagctaagtgcgtgtcgcatccgagtggaaggattcgatggaacatggaccatgagcccccatgtaggtgcccagaatcgtatcttttcggtctgtgaactaagaggccgaaaaagattgatcactttagagggtggatagatgatgaaaattgaggcacgcaggttattcttttagatgaagccgtggcacgtcttagggtggcttggtggccaaatgggattgagtgttagcagcatgttgtttgacaagccagatggtcaatccgacatgtagcggaattgccgggtgcacacatttcacaagggtaaccaatcgttggcagacttctttgagaaaagttgtccttgtgaagcacggcacgaacggcggtttttactcccatttggagggtgggtcgatatctggacagattgaacatattgatcccatggttgttggtctttgaaggggttgttgcaaaggaaggttggggcatacgaatgggtccgaagtgttgtcaattaattataggtgtgggaccaaggtaagtttaattcacgctggtgttgagga

SEQ ID NO: 660649 - DNA, 103 bp, Homo sapiens
caggcgcccttcttaaaggcagcaggtccccattgtcgttgcgagtaccctcgggatagatccacactttgaggttctccctgagcatgcgctcgcccaggtc

SEQ ID NO: 660650 - DNA, 326 bp, Homo sapiens
gttcacaaacagctaactcacttagccagcacctgggttatttaatgggcaaatgctcggattctgttcgttgtccttgccttaaactgttcccacttgatcactccttagaatattacgtcaaaaatatacctatcctttgaactaacttaggattcgggatcaacaaaatactttccggaggccatgcagaggccgctagatcggttgtcatcttgacggcaaaatctagataaggcaagtaagcaacaaaatggttatgatataacctgacatttctgtgtattttacaacagctttgtgatataaatcacataccataaaaa

SEQ ID NO: 660651 - DNA, 355 bp, Homo sapiens
cccctcctatcatgcagttagtggttgggttttgccatcttatcaactgtgtcgttgtgtgaagaaggaggtaagggggcctttgatgtgtaggaggtgggggctctatgggcgctcctcactgcttgacgctcctcacggctctttggggctcttcaaagcctcataagtagaggcttggtctctcccagcgctctgcctcacacactacacgcacttccgggaactcaacgccaacaactctgcgcctggctggctcatgcttgtaatccctgcacctttacgaggccaaggctggaaggagcacttgacgccacaagcttccagcactagattggcccaccatggcgagacc

SEQ ID NO: 660652 - DNA, 262 bp, Homo sapiens
tctggatagggtccccaagaaagaattaagatttgttttaatcctgtctggttaatttgaattctaatgccatctgcaaacgtggttttctgcatggtcatttatttccaaaggcagcccccagtgttgccttttctatgttgggcactctttccttctgtctagagggggtttagcttttgaggctattcatctatccttttttccttaaaacaaatctaattaacattcttgctagttataccttttaaaaaaaaaacaa

SEQ ID NO: 660653 - DNA, 339 bp, Homo sapiens
  misc_feature (2)..(2): n is a, c, g, or t
gngcacccggccccatactcacggagtagaataagttttcttaagattgcgatccctctgactattccggtgggccacctgggatcttcaggggcgggtgaggggcatcaggagcaccaccgaggccccggacccgggttactacagcagtggagggagaccctggaactctcactgctgctgccgccgcggctgtgcaggcttaggagcggcatggtgcggctggcgtggatggtggcgctgggtttatccccttccttctctctggcgaagcagtggcttttgaggattcgctgtagggaggatttcaccatccgggccttctggggctgcactggg

SEQ ID NO: 660654 - DNA, 435 bp, Homo sapiens
  misc_feature (33)..(33): n is a, c, g, or t
  misc_feature (45)..(45): n is a, c, g, or t
  misc_feature (99)..(99): n is a, c, g, or t
  misc_feature (146)..(146): n is a, c, g, or t
  misc_feature (164)..(164): n is a, c, g, or t
  misc_feature (169)..(169): n is a, c, g, or t
  misc_feature (180)..(180): n is a, c, g, or t
  misc_feature (307)..(307): n is a, c, g, or t
  misc_feature (364)..(364): n is a, c, g, or t
  misc_feature (390)..(390): n is a, c, g, or t
gtggctgccccctgagataagcatcctactgtntgtgtccatcgncctttcaggaggactagggcttctggggagctaagaaccccaaggaaacaagtntgggatgtgaggcatcccctgcacatgcaggagaagacaagattgtnttcagctggctgctaatnacctngaggggcgcanaagggtgacttgggatcagaggcttcgctcactccgctctcttcccaggtgcacgtcggcgacggagggactttcgtacaactgcgaagtgtttccaatttttcccttcatgaaaacaagcccttgnaccttatctaactaccagaccaacaaagccaagcatgattgagcttacctatttttngaccctgactttggacaaggcccttnagccagaggattgacaagtaatccttcgtttacccgagggtgcaa

SEQ ID NO: 660655 - DNA, 302 bp, Homo sapiens
gttcttgttgcctgcacttcgacgcttacaagctggacatcttctgatgagtatttggaagtgatcaaggctctgaagaaccatgaggacaagatccgcgtggggctgaacatgtgagaccatatcgagacgcagcagctgatgcgagtgtacgtatccctcatgtggtccctgggcaagatcattaacactcccgaggtggtgagtggctacataggatccttctggtgccaccagctctttatacacgacaaccgcatgctctttgaggccgaggagcaggaccttttgaaggacatcca

SEQ ID NO: 660656 - DNA, 94 bp, Homo sapiens
gggcccgccccccgggggggggccccttttcttttgttgggggggggaaaaaacccaaagaaacaaaagaaaaaacaagaaagaaaataaagca

SEQ ID NO: 660657 - DNA, 371 bp, Homo sapiens
gacaaaaatcagatctcaggatggattaacaacttagatgtaatacctaaaactataaaaccctagaagaaaacctaggaaataccactccagacataggccctggcaaagatttcatgatgaagactccaaaggcaacggcaacaaaaacaaaaagtgacaagtgagacctaattaaactaaagagctctgcacagcacaaaaaaaaaaaaaacttatcaggggggtaaattggacaacctaaaagccaggcagggggaggctcgggctggtaatcccagcattggggaaaccccgggcgggaggatcattggagcccaagagatcacgatgagccggggcaacatagagagacccggtctccacaaaag

SEQ ID NO: 660658 - DNA, 337 bp, Homo sapiens
ggcccgtgcactgaggcaagatccttctaaaaacaatacgaggatagaaatagaacatctatagaaacttttttttaaaaaagttgcttgaatgtaaagtccaatcaattaagagattaatcaaaataaacataaataagaagaaaagggcagggtctgatccttgaatctatttaaatagagttagtaataaataactaaactactatgaattatgattacagaatagaatgtgaatattacaaagctggacaatgtaaaaataataagataatgtgaacactggaacactgaatgtgaactggaatactgtccttatttttcaaagcagtgagcc

SEQ ID NO: 660659 - DNA, 327 bp, Homo sapiens
gctaccggtgattccttgatctcatctcaccgaagacataaaaaaaagagagagagagaaagataccattggtttatgcagcaggaccaggcctaaaagcaactaacactaaccagagaaagttttcaaacctcaggaagaatggacccaagcccttatcactggccttcttattcgaggggaaacttttgatatttttttctccctttaacttaaactcttttgtgggccacccttgttggacgtgtaagtgagccgacagacgtgcgtttatatcgggtgggaaattgaactttggcaagtgaatttacctccaagaaaattgat

SEQ ID NO: 660660 - DNA, 383 bp, Homo sapiens
tgtccgtactcaccagatacttacaaaggcagtactatcacaccttcaagatggggaaaccacggaaatacacagaaacacatattttccctcaacatggatgcttatatcatatctataccatagtaagagtagagagtcacaaacacatgaccatatattaaccagacggtgagaaaagcaatagagacaaactgattaatccaagaaatatccttaaagaaacaaaaaagaacagaagcatacaagggaagccctctcttccaccctctttctcatcacagtttggccctaatcagctaagacaggtaggggtaccagggctgtaaagctcatggggtatatcattaggaccagcactgtacatggaacagctcaaagaa

SEQ ID NO: 660661 - DNA, 330 bp, Homo sapiens
gagttgagacagagagtaaatgggccctgtggtgtggcagtgaggctgaggagggagcctggggagagcaccagtgacggggcatcagtgccagtgcctggaaggtgtggccaaaggggtctctagcttgctgctctgctgctcctgctcatggatgagtttggcgatggggccggtgatgccgcctatcaaggtccagtactcatcgaagctgatgcgcccatcatgattgggatacaggttctggatgagcttatccgcaggcttccggttccctgtgtccgacagcatgtggttcagctctttctggagcatctcgcggaagctgat

SEQ ID NO: 660662 - DNA, 884 bp, Homo sapiens
  misc_feature (884)..(884): n is a, c, g, or t
gtccttacctgtgagagagaatagggcagggtggcatggatactggatcgctggagccagaaggcaagatgttcattgggttgactcctcctgaggatgaggagtctgatcggaccacacattcggccctgggcggtctgagcggatcaaggacagtacaaggagagttgcacgtgaaggatcatagattagtggtctcccaccaagatgactaactggtggtgtgttagttacgccggggctccctgcgattgctgcctcgcgcttacgcctcttggctcgggtgacgtggagtgtcctggatggggtctgtcggctatctggctggaacgcacgagggccagtctccactatagcagcagtgggagccttcttgttggctatgagagacctacctgaagggagcgccatcttagggctgtggccccattgggtggcgaactagaacggtgtggagggcgccccaagggggaatacccttggtgtgaacggcaaccggggcaccacaaaccgaagagggccctcggatttggggtgcggtttcgctacagggaaggggagcccatcgagaagggggccatccgattgaggcgagggccggttggctcgtagaaacggatttgggatcgcctcgtttgatatcagctagcgatcgagcagatgtacgtgagttgcgcaaatcccaaggagggcttgtgggctagagcgggcgttgaacgccgtgtcgattgttaggtgtctaagagccccccacttaggccgtgatccagggcatagcagccctgtacttagttcacgagacctcccatggattgcggcgaggcccgttgggaacaacaagcgggatgcaaagacccctacttggcttcaattggaggtagggn

SEQ ID NO: 660663 - DNA, 257 bp, Homo sapiens
ggtgatctagaggatcccgggacgggagaggtgtgaggatctccaatggcttagaaccgggtacttttattaattggatgttttaaaaaatatgtttatacagatgctggcggtggggcaatcaaggtgggcaaactttaggtgtggggatttaagaagtagaagatcctcataaagccaaaggtacaacactgactcatcataagggtggggcggctattcgacaaaccagtttaagcagggatagcgggggtacc

SEQ ID NO: 660664 - DNA, 434 bp, Homo sapiens
gcaaacagcacaatcagctcttgcgaaaggcctgcaccacctggagccttcagctttggcagtgtggccactggagctttttaaagctgtgcacatgaatgccagagatgccacttctgttttctttaacaaatcatcgcgtagaagccagtggcagtggtttgcagtagagctatgatgttaccagattgcctcatggacaaaactctgcttctgaggggttgaaacacacgagggacagtagtaaacggagaaccaaagtaccctttagttatgattgttagctgggattgtggcccaaacaccgctgatgagttctctgggaatctagggaagaccaggtgggcaagggcaatgtgaaagggcccttctctctttctaagcccaaatcaagtatttgggatttgatgatcatcttgctataggcctcaatg

SEQ ID NO: 660665 - DNA, 125 bp, Homo sapiens
  misc_feature (9)..(9): n is a, c, g, or t
actctacangactcacacgtacgcttcattaagacttctaattaactcttctgtatcaagaacttacaatgtctcagacagtaatggtgtagcagtgtaagagaagtaaagtctgctaggggaaa

SEQ ID NO: 660666 - DNA, 158 bp, Homo sapiens
  misc_feature (25)..(25): n is a, c, g, or t
ccagctgttcccatactgtctagtntaaattatggctgttaaggccgggcgggtgactcaggcaggtaatcccagaactttgggaggcccagacagaaggatcgcttgaggtcaggaatttgagacctggccaacatggtgaaaccctgtctctacta

SEQ ID NO: 660667 - DNA, 393 bp, Homo sapiens
atatagctggcgtgcgagattatcatactaggagcccgcgtgagtggtgatgagcatcaatggtctaccctgttgtattccctcgaccattcggtggtctagagcctcatctatctggtgtcctggatgatgagcatgctgctaacccaagacctcagtcaagtcggtccgaggctcatcatttgagcaacatggaacttccaatcgtctgctcttcgaatctctgatactctctcggttcccagagcctcatactcggggccgcacttgtgccgccgtcattccatagagatgggacgatgggcgatgcacagttggttctaggccttctgacccagattgcccagactgtagactttactgacatcttaactctggggcccaaagcctgct

SEQ ID NO: 660668 - DNA, 470 bp, Homo sapiens
  misc_feature (299)..(299): n is a, c, g, or t
caaaaccccccggaaagcttcttaaaaaccttcttaacttttgggagccagaaaattagaggagtgtaatccttttggatgaacctctcggggcccaaaaatgtggctggcgggggccattctttaaccggttaaccagccgtaaaataggtttgtagatttttgcccccgaaggtggcccccgggggaaatccggcccccttaaaaaaagggtggttttccccccttaaaaatgccggggaccagggggccccctggagccaaaggttggttttttttttttttttcctaaaaaaacnccggttattttccccccccttccttgtaaaaaaacccgttttcccctttgggatttttgggggcccaccaattttcccggtttaccccctttgccggttttatcccggttttttttttttccctttttttggggtaaaaggggaaaaaattaaaaaaaccgggttttttta

SEQ ID NO: 660669 - DNA, 249 bp, Homo sapiens
gaaatagaagggcggagaataaagatacagaggtggtagtaaacacacacacacgcacacgagggaaacacgtgatagaccaccgcaacaagagcgggcgcaccacaccgcttgagtggtcaccagcgtgttcgtacgaacgagtcggaggtaaggaggccgcttgcgtggatgcccgcagcaccaccccccgccgctgccccccggcgggataataaagagggaagacccccgttcccacaaatataa

SEQ ID NO: 660670 - DNA, 175 bp, Homo sapiens
ctttgcttcttgagaccggggtgtgtgtggctcagcttccacggcgttatatggttcggtccatgtgtgtgcgtgtatatacttgaagagacctgtcgtgtctgatatgcactattggaggaggactaaagttcgcctgacaactttatgtgttatgccagatctctgagggcaa

SEQ ID NO: 660671 - DNA, 211 bp, Homo sapiens
gacagccagttcaggtgaactccatagccactgctctgggtcctgcgctgtcgagcactcagaacggcgactgaccctgcaaggacacgcaccaccacagtatggtccctgtgagcaagggaagatgcacagtccaggtgctgcgcagagaaagccacaggaaccttcagaagtgtgctctgggtcatgacatacaggtgctcaaaggtcc

SEQ ID NO: 660672 - DNA, 410 bp, Homo sapiens
ggagagcccacgcagtagaatggctaaattcaaaacaacaatgccaaaagttgtcaaagatgtgaagaaactggaacccttatagactgctcgtaaaatgtaaaacaggtacaacaatcacactgaaatacagtttggtagtttcttaaaaagttaagacacaaatttaccatagaaaccagcaaaattctactcctaggaacctacctaaagagaaataaaaacatatccacacagaaaaacgtatgtgaatgtgcacagcagcatgattcctaatggccaaaaattagacacaatccaaatgtccattaattggtgagtagataaacaaaatgtatattcatgtaatggagttcagcaatttaaaggaataaagtattggtacatgccacaacatggatgaacttcca

SEQ ID NO: 660673 - DNA, 296 bp, Homo sapiens
aacactaaacaggtttgaataacatggccactagaacattaaaaataccaccagtactgttaagtgtctctgcttcctggtccctggttgactgaccaaagcagtcaatattgggaaactcctcatttttttatctgaaatgtttgtggtgtctcttgaaattctgttattatgaaagaatttcaagaactctcatgtttttattcaaagtgtattttgtaattgctttgtatatactatgttgtttatatagactgttaaggttataatgaaatcaaataaatttatttttaaac

SEQ ID NO: 660674 - DNA, 282 bp, Homo sapiens
ctgaccctgacatccattaggctcggcagcttacctgggctgtgctgccgcaaggttccagggacagccctcattacttcagccaagctctttctcatgatctactttctttccacccctccacttctcaccttattcaatatattgatgaccttcttctttgtagcccctcctttgaatcttctcaacaagacatacttctgctccttcaccatttccaacggcatccacggctcaacattttttgtagccacaggcttccacggacttcacgtcattatt

SEQ ID NO: 660675 - DNA, 359 bp, Homo sapiens
aattaattgttttcaaaaagccaattcctgggttattgatcctctgaatgactttatgtagtcgtcagttgtacttcatatttagctctgatttttgttatttctcgtcttctgttacctttggggttgatttgttcttgcttctctaattcttttgctttgtgaagttaggttgttaatttgagatattcctaactttttgatgtggacatttagtgctatgtattcttctcttaacactgctttagctgtgtcccagggattctggtatgttgtattattgttgtcattaattttaaagaacttctttatttctgcctcaatttcattatttaccccaaaatcactcaggagcatgt

SEQ ID NO: 660676 - DNA, 461 bp, Homo sapiens
tcatctaagcttacatcttaaacataatccagattccaagtcgattatcatcagtcaggttcttctgtgttacttttgtccaagttgtgacaaatgttatatgaactgtgtagcgattaaaaagctcactgcagccatataaaatgtgttagccttgtttcccctttatgtagtcaacaagatactgatatacaatgtagatgcctcctcccaccacaaaaacaatggcctcttggaatggatttttatttctagggaactgagctgtcatatgccccgcagaattttgggatcacaatatctatagtcatcagtaacggggttagacttcatctccataagattgtccaaaatacgagtaacaggtcgattcagtggaaaagtatggtgtccagatattagaatcttacgcccaaagttctcctctataaccaacaagctgatcattcttaacagtaaca

SEQ ID NO: 660677 - DNA, 431 bp, Homo sapiens
ttacacttaggagatttcaacttaacttgaccgctctgaccaaaaaaaaaaaaaaaaaaaaaaaaaaaaaaattgggggcggcccgggcccccgaaaagagcctttataaaacaccatgcgcggtgggggcgcgcgcggggccccagagaggtcagaggacaacacggggcccaaagcgcggtatcccagagagaaaaccggggccacaggaaccaagggcgcggggatattttcctaccccataataacaaaagcgccgcgcgggggaaaaccgcggaggcgttccgtgaaacaaacacccaagagaggggaggtctgcgaaggaggaccaaatagaggggaactctatcacaaagagggggacccacaaaggagagaacgagcaaaattccaaaataagacgccccagcccgcgggaagaaaaagacaa

SEQ ID NO: 660678 - DNA, 810 bp, Homo sapiens
gccgatctccgagcggcaatcatgatgccactgtgatacgtggggggcctgcatgagacggtaagtgaaggcgctgctgtgggaactgtttgctcctcgctgtaccagtagtcaatcacccacgtgccaccaggatagagtcactggccagcaccaaggactatggctttgtgtgaattcttgagtgaggaagatgctgactatgccattaatgatcatgaacatgatcaaactctatgggaagccaatacgggtgaacaaagcatcagactcgacaatcaaaaaccgtggatgtaggggccaacattttcattgggaacctggaccctgagattgatgagaagttgctttatgatactttcagtcgccgtttggggtcatcgttacaagacccccaaaattatgcgggagcctatacagcaggcaactccaaaggttatgccgttgagttaattttgctatcatttgatgccttcggatgcagcaattcgaagccgatgaatgggcagtacctctgtaagccgtcctatcaccgtcatcttattgccttcaagaaggactccgagggtagatgcgccattggctcagcaaggcgaacgacttctggcgagctccagaaccctgttcttcccaggggttgattcgccctcatcaggttgtcttgcagatgcacctgctccagccttttgctcccaatctctgttggtatcatcacttggggtctgtggttccatccaccagggtgcctcctctgggcccctttccacaccccggtggcccctccttaggccttccccccgtgtttccctc

SEQ ID NO: 660679 - DNA, 530 bp, Homo sapiens
ggcaggcaggtctggaatccgtgcactcataatccacccgacttgggcagaaatctgaggggatccacagtatctgatagcattaaaagtaatgaaaagccatttactgttatgtgtcgctataaaatctactgtttgtccagatgcctaaactgatgtgcttagtgtagtaaacacactgatggtcacaccttgagatcatgaggtacagtctttgtagaaggtgctggcaacttagtttatcctacctcagaaaacggaatctgcctgcttaggggactcgcagaacacaggaagcctgggttagtggtaggtctcatctctcacatgatttcagcctcgtcgttcgtgctacctctttccacacaccttctctgcagaggagatggacgttgcggttcaggcttttcagtccgagtgggtaagtgtgtgtgagagtttcttaaggaaaacaaccctagcatgtgagaaagggcaggattccaacaaagctctctggctagcgtaagaaattctattactctcataga

SEQ ID NO: 660680 - DNA, 218 bp, Homo sapiens
ctctccaagctgctatctaattcaaacacgagccctaaatccccgggagcaaccaacattggatgtggtgcctacctcagcaccaaagacccacctgccaggtggagagtggcttcaggacaatgggtgggccccctctgtcctgaccgatgcaacggtagacgcctgcattccgtggccggacttgggtcagcagcagagagccattggcaaacagg

SEQ ID NO: 660681 - DNA, 301 bp, Homo sapiens
gtcgagccctggatatagagagagtcctcatgaagtgtactagcaggacttgagggaccaatcggacctaggtgtatcagggacagggcagacccagggctgtagtcagtgccatgggggcaactggacttatctgaaagtcacttctctgataatctcagttccccaggacatagctgagaaccacgaggaaggccaaggagcctctgaagacccacaataggtgccagaaagtacagtcaccagaggccaagtgtgcactgtggacatcatttggttacggcctgggaacctgcttctg

SEQ ID NO: 660682 - DNA, 306 bp, Homo sapiens
  misc_feature (156)..(156): n is a, c, g, or t
  misc_feature (306)..(306): n is a, c, g, or t
gaaggacctgctcatccactgtgttcggcctgcgtcgtgccgttcgcggtgacccttcactgtgccagtcgtgacttgccataaccctggcgggccctgcagcagctagcttttcccgaggcaaggccttcagctaggccacgacatagtggccantagctctagatcctagcttgtttatggtcaactgtccttgctcatccgtagtgccacaccatccggcgatatctttggcagttatcagggtccacctacagcccccagccgtcatcttcatcctcccgcagcatctccggctttggaaan

SEQ ID NO: 660683 - DNA, 892 bp, Homo sapiens
gagatacacagcacggcatgtgtgccgagtgcttgagcgagctccatgagcctgcgtgggtgttgtacacctttgacccggcgcgtgggaacgaacgccaacagcgcgtacgcgatggtccccaccggagtatgcgccgctcccggcctagtagttgcgccgccgtgtaccccttgcaccacggtactagcggtggatccgtgcattgcttccgctctcgcacgctgagtcttagggtgtcgtgctcgtgagcgggtccggccgtcgtgctctgtggcgctcacatcgtcttgctggggatccagagggcttcatcgtggcgcattttgcgagttgccttcgttctgatacgaaacgtttctggtctgtctttgtgccctagggcagatgctcattctactccaaatgtgctgcttttgggaatccgtggggggcgcctacgacttcttgcgggcttcattggttcgggcttgcagtacagccgctgtatcgtgccccggtctgtcacgggcaatagtggttgtccgcaggttatgctcggcggaagatgcgtagcctcttggccttcgagctggtggctgcgagtgaggccccggttggaccaaccccggtctgtgtcgtttggcggattgattcctgttgcactggtgctttgcttgcctggtgagtcctcgtagggttcggcgctttcgttgctgctttgccggctgacctgtcggggaggaggagtaatccgggctggcatcaaccccacaggtggtggggtccccctgttggaaccgtgatggttcccatccttggtgctccatctttgaggcttctgcacttccggtcgatcgtgtggtgacctcccgtgggtccccacctccggcagcctcaggtggggtttcca

SEQ ID NO: 660684 - DNA, 1454 bp, Homo sapiens
  misc_feature (202)..(202): n is a, c, g, or t
gacaccgatatctggtgtatgacgtccggtgcagggcggggtggccctggggcgcccttgtggccctgtgatgggaaaccggggtgggttactgggcgcggagggtctcgggcgcggcgatccgcgggtccgcgtcggtcgcggctcgtcggaccgtcgttcggggcccgcagagccgccgtcgacgtcagcgtggaggccntttgggccgaagccgtgattggcgcaggtggtatgtccccgtcaactcaagtttgcggccgccttggatcgcggacgtgaccggatcgagacgttctcacatgggtatgggagcagtcttatcatcatatcatcatcgttctcgcgaattcatgggaagtgcacgaagaatcaatctggatttcatttcccttggattgcgcccatcctcctcaaaatggagtgcatcggttttgtggagagcaatctaatttgcccacggtggcagaaatacggctaggtatcccttggttgaccttgagtcaagacggttacctcagaggatatcagaagagcacgtataggtttggcttaattccaggtgagaacccgtaaccacaagttgtggcaccagctggattcgtgtggtccattgggaggttcgttctaaatcaggtttgcctttcccaaatgggaaggatgttgtggcccaatccctgggccaagtacccggattggggggtggcccgattcctaattcccctgtgggtcaccaataagggctttgcctttccccaattcgggggtcacacccgcctggattggcctgctaaggcagaggaggctcttagcagtggcggaggggtgaatagcgcacatggaagttcttgcgggcgcgaaaaggagcacaccgcctagagtatacttgggtacgcccgcttttggccgagatggtgagtcgaaaccaatggaggcgccggtctttggccttgcgaccttccctttggttagcgcttggggcgttacccaggccgctctctagttcagcgcgtagacctaagcctccaatagtgtggaggcccacccttagggggcgaactcagagaatcagtgaccccggctgaagccccttggtttggcccgttaaaatggaaaaagaccttggcgttccaatttgtactttgggcttgagggttaattcggaacactaggaaccttgggcgtttaaacgaaacgcgttccacagatacccctgtgggtggcctctatggtgaacatttgtctccaatcacccctttgtgaggtgggctaacccttttctcggctcgaaagagggcgccaaccccgtttttttgggatttgcccccattttttctttagacagaaaccctttaacaagagcttaagccctttggaatccccccccggaagcccttcctcgcgaaatcgtgacggcacctttggtactttcacacgaaaaggtccttcccctg

SEQ ID NO: 660685 - DNA, 1481 bp, Homo sapiens
gctgcattggcgagatgttgcaggagatggggtgggctctactgaacctcctttcgcgctgccgggcatcttcgacctgcttctctgctgggatctcgcttaagttaacccttccctgggacgccttcctgccgactccacctgactctgacggagactcctgtgacctgtacgcgtgttttatgacgcctttactggcagacgggtaccgccgggtattgaaggattcgtaggagttcgcacagggaacgtgggacacgagcccctcttgtaaaacccggagccaggcacagaggtctccgtctctccaccgggggctatcatcctatccagggcagcgagaagagggactccaagacatgggctgaggaagaaagcaagcctggacagcatcagacaccaacctggagactagcacctacgggaagatcccaccgaaaacgggtggacagagcctggcaaatccccatgcggccattccgcacacaagaaatacacagagacagggacagaaccactagaacaaaaacttagactacacacgggcactgacagcgcataggcactcgggacagactcacacagaacacccagtgcgaggaacacaagccagggaaaagacaaagcaaacacaacaacgcaagaaaggaaacaacattcatggaacaataaccccgacacacactaagaacaacgccgttcacaagagagcaacacgtcgaatcacagggaaagagccaacacagacacataagatgacgacagcaaaccccaaacggcacaccaccaagcaggcaacgaatcagacaagttcaccccaactaaaacacacgcgccacagacacagggaaccatccccagggaaatggcgagacggaggcccacggggaggccaggacgatagaacgcacccaacgtacagcgaaccgcgaaggcaacaacgggaaggggaaatacaggcacactagcagtgagaaagacaagacacagacactcgacaagtcgaaacgtacaacaccacactcgagcaatgcaacagccacggcagcggatatcgaccagccagcgagcgacacacgagctacatgaacaccaataacacaaacagacacaacaacctgcagaggcgcgaagcgccgcaaacaatcacgaaagggggcaacagcgccaaaacgagcgacaaaggacaacaccgcgcccccgacacagagacacccccaaggacaacacgacagaagacatcaccatcaaccaaggagacgaacgcagccacgacaaccggaaccgcacacagaccagacaccgcgcaagaacaagccaccagatcaaccacgcagcccagagcgcagaacgaacgacaggagcgacgacgacgcagacaggtgacacaacgcacgagaaccacaccagtacgaacagaggaccaaacacagacagtcgcaagacagacagaacacaccacagacaacaaagcagcaaac

SEQ ID NO: 660686 - DNA, 299 bp, Homo sapiens
cgcacgatattcggacaagataacagaagtgggcgggaccactttttgtcagacaaaagcagaatgtacctcatatgagggaataaaaagtaaggtataggctagcaagggagccgcacttcaagctcagaattctgccaagaccctagagcggttatgcgagacagcggagcatgactgccagaggtcagcgctacccaaacccctggaggtaccctttgttactgctggcgcccctgctgctgcgggggaaagacgggacctcaaggctgcttcctgccatctgaccgaatatcgcg

SEQ ID NO: 660687 - DNA, 126 bp, Homo sapiens
ccgtgggagtatgtttttgccttagcgccgtgcaggtttgggcattatatcaactatttacaggcttgctgaaagggcaatggtgccctcgcatgctaggtttccacctgatggtggacaatctca

SEQ ID NO: 660688 - DNA, 392 bp, Homo sapiens
tcccttgaaaaggtcagattttgaccaaagtccttgactgattcagaagcatgccctgaccattagcccttgaaacctacagttttttttatttgtagccaggtctgatgacaccctaattttcttgataactgagctggggtattggcaggtggcaacggcctgcctctcctgaactcttccatttgttgaatcaggaccaggtgatgccatggactccagcctattccctagaagtaggacagaattcgtttgaactctcagaatcaaaccatttcatgctttctctgtttcataccccttcttcccttgggctctatttttttttctgggatttgcttacaaaatatggttttcaactttataaattgggagagcaaacagacgtctgg

SEQ ID NO: 660689 - DNA, 222 bp, Homo sapiens
cacgttgcgcaggctggtccgatctcctgacctcaccaaagcattgagattacaggcatgagccaccgtgtcctgccgatctgatttctaaaatatattaagcgacaaaaatgaggggcacgagcagtataatatatcgtctatttaattttcaaaaatgcgtggaatgttacgtgttgctatgacatagatgcacttcgcatgcgagaggcatcctcgtag

SEQ ID NO: 660690 - DNA, 2378 bp, Homo sapiens
aagcttgcggccgcggggctgggcggcggggacagcggggacggcacggcgcgcgcagcttctaagtgccagatgatggaggagcgtgccaacctgatgcacatgatgaaactcagcatcaaggtgttgctccagtcggctctgagcctgggccgcagcctggatgcggaccatgcccccttgcagcagttctttgtagtgatggagcactgcctcaaacatgggctgaaagttaagaagagttttattggccaaaataaatcattctttggtcctttggagctggtggagaaactttgtccagaagcatcagatatagcgactagtgtcagaaatcttccagaattaaagacagctgtgggaagaggccgagcgtggctttatcttgcactcatgcaaaagaaactggcagattatctgaaagtgcttatagacaataaacatctcttaagcgagttctatgagcctgaggctttaatgatggaggaagaagggatggtgattgttggtctgctggtgggactcaatgttctcgatgccaatctctgcttgaaaggagaagacttggattctcaggttggagtaatagatttttccctctaccttaaggatgtgcaggatcttgatggtggcaaggagcatgaaagaattactgatgtccttgatcaaaaaaattatgtggaagaacttaaccggcacttgagctgcacagttggggatcttcaaaccaagatagatggcttggaaaagactaactcaaagcttcaagaagagctttcagctgcaacagaccgaatttgctcacttcaagaagaacagcagcagttaagagaacaaaatgaattaattcgagaaagaagtgaaaagagtgtagagataacaaaacaggataccaaagttgagctggagacttacaagcaaactcggcaaggtctggatgaaatgtacagtgatgtgtggaagcagctaaaagaggagaagaaagtccggttggaactggaaaaagaactggagttacaaattggaatgaaaaccgaaatggaaattgcaatgaagttactggaaaaggacacccacgagaagcaggacacactagttgccctccgccagcagctggaagaagtcaaagcgattaatttacagatgtttcacaaagctcagaatgcagagagcagtttgcagcagaagaatgaagccatcacatcctttgaaggaaaaaccaaccaagttatgtccagcatgaaacaaatggaagaaaggttgcagcactcggagcgggcgaggcagggggctgaggagcggagccacaagctgcagcaggagctgggcgggaggatcggcgccctgcagctgcagctctcccagctgcacgagcaatgctcaagcctggagaaagaattgaaatcagaaaaagagcaaagacaggctcttcagcgcgaattacagcacgagaaagacacttcctctctactcaggatggagctgcaacaagtggaaggactgaaaaaggagttgcgggagcttcaggacgagaaggcagagctgcagaagatctgcgaggagcaggaacaagccctccaggaaatgggcctgcacctcagccagtccaagctgaagatggaagatataaaagaagtgaaccaggcactgaagggccacgcctggctgaaagatgacgaagcgacacactgtaggcagtgtgagaaggagttctccatttcccggagaaagcaccactgccggaactgtggccacatcttctgcaacacctgctccagcaacgagctggccctgccctcctaccccaagccggtgcgagtgtgcgacagctgccacaccctgctcctgcagcgctgctcctccacggcctcctgaacgtccgtcctcaggagcacagcctcacggacagtgccaaaccctgtgggtctccaggggcttgggaaatgtgttctttcccaagagaatcaaaggaaagaatcaaatttcttgcccggtcactggcactccagaagacagcgtgccggaaccggcagctctcacctttctgtgacttgttcggaattaactcctctggatggaaacttccatcttacttggttacatcacggctctggttcagatacaacttcatgattttgctactatcatttttcacttttcaaagaatttaacctattttacagcagttcagttctgctagtgagtagttttcctctcctaccttccttctaaaaacctgattcatgcacagcgtttgacacacatggagtctgccagtgtgccttctctgcttcagacaagagatctgccatttcatgcccttgtgactacctatcattggccctgcaataaaatcatttatttttcaaaaaaaaaaa

SEQ ID NO: 660691 - DNA, 345 bp, Homo sapiens
tttgcaggagatcacgtattttataaatgtatttatgctgctagactagtagatcaaatgtaccattttcaaattattaagaattcttatgagtctataaaattagtaaatttctaaatccaatcatgtaaaatgaaactgttgctccattggagtagtctcccacctaaatatcaagatggctatatgctaaaaagagaaaatatggtcaagtctcccatggctaattgtcctatgatgctattatcatagactaatgacatttatcttcaaaacaccaaattgtctatagaaaaattaatgtgattacaggtagaggccttctaggtgagacacttttaaggt

SEQ ID NO: 660692 - DNA, 489 bp, Homo sapiens
tttgcgtgtggcaagttggtgttttcaccttgcttgctcatcctgaaaccttggtctgcagggagcccactctcctggcagcctggccctggagacgctgactactgtgacccaggctggctttctctctgtactctgggaagtggatgttactgagctctggctgtctcttggtttcttgaagacattggtacttctacaaggtgattggaatattggggaacagttacaaagtattaaccattaataaaaaaaagttcttccttcttatgctccttttaaaaggcatgaaagaattactgatgtccttgatcaaaaaaattatgtggaagaacttaaccggcacttgaggtaagactcctttttttttcaatgtgacagttacatactcggtatcctgtcattgcttcatggaacttcgagttgtcacgtatttataaataactttttcctaaccaagacaaagcgtacccggatcctctagaacag

SEQ ID NO: 660693 - DNA, 2383 bp, Homo sapiens
ctgggagaggcctctggagcaggaggcccagtggctcttctgacccaaggccccgccgtccagcttctaagtgccagatgatggaggagcgtgccaacctgatgcacatgatgaaactcagcatcaaggtgttgctccagtcggctctgagcctgggccgcagcctggatgcggaccatgcccccttgcagcagttctttgtagtgatggagcactgcctcaaacatgggctgaaagttaagaagagttttattggccaaaataaatcattctttggtcctttggagctggtggagaaactttgtccagaagcatcagatatagcgactagtgtcagaaatcttccagaattaaagacagctgtgggaagaggccgagcgtggctttatcttgcactcatgcaaaagaaactggcagattatctgaaagtgcttatagacaataaacatctcttaagcgagttctatgagcctgaggctttaatgatggaggaagaagggatggtgattgttggtctgctggtgggactcaatgttctcgatgccaatctctgcttgaaaggagaagacttggattctcaggttggagtaatagatttttccctctaccttaaggatgtgcaggatcttgatggtggcaaggagcatgaaagaattactgatgtccttgatcaaaaaaattatgtggaagaacttaaccggcacttgagctgcacagttggggatcttcaaaccaagatagatggcttggaaaagactaactcaaagcttcaagaagagctttcagctgcaacagaccgaatttgctcacttcaagaagaacagcagcagttaagagaacaaaatgaattaattcgagaaagaagtgaaaagagtgtagagataacaaaacaggataccaaagttgagctggagacttacaagcaaactcggcaaggtctggatgaaatgtacagtgatgtgtggaagcagctaaaagaggagaagaaagtccggttggaactggaaaaagaactggagttacaaattggaatgaaaaccgaaatggaaattgcaatgaagttactggaaaaggacacccacgagaagcaggacacactagttgccctccgccagcagctggaagaagtcaaagcgattaatttacagatgtttcacaaagctcagaatgcagagagcagtttgcagcagaagaatgaagccatcacatcctttgaaggaaaaaccaaccaagttatgtccagcatgaaacaaatggaagaaaggttgcagcactcggagcgggcgaggcagggggctgaggagcggagccacaagctgcagcaggagctgggcgggaggatcggcgccctgcagctgcagctctcccagctgcacgagcaatgctcaagcctggagaaagaattgaaatcagaaaaagagcaaagacaggctcttcagcgcgaattacagcacgagaaagacacttcctctctactcaggatggagctgcaacaagtggaaggactgaaaaaggagttgcgggagcttcaggacgagaaggcagagctgcagaagatctgcgaggagcaggaacaagccctccaggaaatgggcctgcacctcagccagtccaagctgaagatggaagatataaaagaagtgaaccaggcactgaagggccacgcctggctgaaagatgacgaagcgacacactgtaggcagtgtgagaaggagttctccatttcccggagaaagcaccactgccggaactgtggccacatcttctgcaacacctgctccagcaacgagctggccctgccctcctaccccaagccggtgcgagtgtgcgacagctgccacaccctgctcctgcagcgctgctcctccacggcctcctgaacgtccgtcctcaggagcacagcctcacggacagtgccaaaccctgtgggtctccaggggcttgggaaatgtgttctttcccaagagaatcaaaggaaagaatcaaatttcttgcccggtcactggcactccagaagacagcgtgccggaaccggcagctctcacctttctgtgacttgttcggaattaactcctctggatggaaacttccatcttacttggttacatcacggctctggttcagatacaacttcatgattttgctactatcatttttcacttttcaaagaatttaacctattttacagcagttcagttctgctagtgagtagttttcctctcctaccttccttctaaaaacctgattcatgcacagcgtttgacacacatggagtctgccagtgtgccttctctgcttcagacaagagatctgccatttcatgcccttgtgactacctatcattggccctgcaataaaatcatttatttttcaaaaaaaaaaa

SEQ ID NO: 660694 - DNA, 580 bp, Homo sapiens
cgtacataagcgcgtactggtagctgggactacaggcgcccgcacacgcccagctaattttttttttggtatttttagtaaagatagggtttcactgtcctagccaggatggtctcaatctcctgaccccgtgatccgcccgcttcggcctcccaaagtgctgggattacaggtgtgagccactgcgcccggcccagagtccacatctttaaaatgagaacataggataagacgattgccaaagtgtctaggtttcgatgtactgtttctgggggttaaatatagtacaaacattaccattttcttaaaaccactgagaattctcattctaagacactcacatttaagagcagagagtgcagcacgattaacatgcttgcatttagagtctgtccaatacactgtgatcttagaccatgaactcaatttccttaccctgcaaaacgaggtttcgcatgcctgtcttcaccgggcagagaggggcaaagtgaaagcctttagataactcttaagggaagacaagacgccgtgcaaattctaagcaggattaggacaaagctctctgcatacaaaggtaaga

SEQ ID NO: 660695 - DNA, 347 bp, Homo sapiens
gcgcactaggcatagcatctgatttaatagaactataagtctgtgaataagccttagtgttcccgactggtacttcggtcacagcatctctagagaacagacttgcagcttagataaacactaaaggcaaaatagacgcttagctgctgatctacagagaactacttgtaattaaaagatttcacttcatagcaaactggtgttgtaaactattgcagtagctggaacttcttagggtaaccagcattaatgggagaagtgaatcacaaggaaataaagatgagtaaaagcaaagatgatgctcctcacgaactggagagccagtatatcttacgtctgcctccaga

SEQ ID NO: 660696 - DNA, 2523 bp, Homo sapiens
gccccggcgtccaggtagggggctgtggcctctagggatcagggactacttacctgcgaatcccggttgcccgcccgccagcacgtccgttccctaagcagaccgcctggcctcctgcctgacccgtcttctcaccgttgcccggagtctgacctccccacgcttagtccactaacgaagctatccctgctcctgccccacagcttctaagtgccagatgatggaggagcgtgccaacctgatgcacatgatgaaactcagcatcaaggtgttgctccagtcggctctgagcctgggccgcagcctggatgcggaccatgcccccttgcagcagttctttgtagtgatggagcactgcctcaaacatgggctgaaagttaagaagagttttattggccaaaataaatcattctttggtcctttggagctggtggagaaactttgtccagaagcatcagatatagcgactagtgtcagaaatcttccagaattaaagacagctgtgggaagaggccgagcgtggctttatcttgcactcatgcaaaagaaactggcagattatctgaaagtgcttatagacaataaacatctcttaagcgagttctatgagcctgaggctttaatgatggaggaagaagggatggtgattgttggtctgctggtgggactcaatgttctcgatgccaatctctgcttgaaaggagaagacttggattctcaggttggagtaatagatttttccctctaccttaaggatgtgcaggatcttgatggtggcaaggagcatgaaagaattactgatgtccttgatcaaaaaaattatgtggaagaacttaaccggcacttgagctgcacagttggggatcttcaaaccaagatagatggcttggaaaagactaactcaaagcttcaagaagagctttcagctgcaacagaccgaatttgctcacttcaagaagaacagcagcagttaagagaacaaaatgaattaattcgagaaagaagtgaaaagagtgtagagataacaaaacaggataccaaagttgagctggagacttacaagcaaactcggcaaggtctggatgaaatgtacagtgatgtgtggaagcagctaaaagaggagaagaaagtccggttggaactggaaaaagaactggagttacaaattggaatgaaaaccgaaatggaaattgcaatgaagttactggaaaaggacacccacgagaagcaggacacactagttgccctccgccagcagctggaagaagtcaaagcgattaatttacagatgtttcacaaagctcagaatgcagagagcagtttgcagcagaagaatgaagccatcacatcctttgaaggaaaaaccaaccaagttatgtccagcatgaaacaaatggaagaaaggttgcagcactcggagcgggcgaggcagggggctgaggagcggagccacaagctgcagcaggagctgggcgggaggatcggcgccctgcagctgcagctctcccagctgcacgagcaatgctcaagcctggagaaagaattgaaatcagaaaaagagcaaagacaggctcttcagcgcgaattacagcacgagaaagacacttcctctctactcaggatggagctgcaacaagtggaaggactgaaaaaggagttgcgggagcttcaggacgagaaggcagagctgcagaagatctgcgaggagcaggaacaagccctccaggaaatgggcctgcacctcagccagtccaagctgaagatggaagatataaaagaagtgaaccaggcactgaagggccacgcctggctgaaagatgacgaagcgacacactgtaggcagtgtgagaaggagttctccatttcccggagaaagcaccactgccggaactgtggccacatcttctgcaacacctgctccagcaacgagctggccctgccctcctaccccaagccggtgcgagtgtgcgacagctgccacaccctgctcctgcagcgctgctcctccacggcctcctgaacgtccgtcctcaggagcacagcctcacggacagtgccaaaccctgtgggtctccaggggcttgggaaatgtgttctttcccaagagaatcaaaggaaagaatcaaatttcttgcccggtcactggcactccagaagacagcgtgccggaaccggcagctctcacctttctgtgacttgttcggaattaactcctctggatggaaacttccatcttacttggttacatcacggctctggttcagatacaacttcatgattttgctactatcatttttcacttttcaaagaatttaacctattttacagcagttcagttctgctagtgagtagttttcctctcctaccttccttctaaaaacctgattcatgcacagcgtttgacacacatggagtctgccagtgtgccttctctgcttcagacaagagatctgccatttcatgcccttgtgactacctatcattggccctgcaataaaatcatttatttttcaaaaaaaaaaa

SEQ ID NO: 660697 - DNA, 341 bp, Homo sapiens
actgactattcaagaacacaccgggtcacctcatcattgactgctagagacacaactactgtctcctcctggctgatgccaaggctgcctttctgcacctcaagctcctcggtactcaccattgatgggtcaatggccgcgatatttggttcccatggacctggggcatatgtatcactatggcaacagttatacatgcttagtgcagataccgggtgtaaagacgataaccatcagatcctacttcccagagatagagagaaccggtgagcctgacgaacctgaaggaatcggccggctgacgggtgctgataccactgactataccagaacacaccggg

SEQ ID NO: 660698 - DNA, 4035 bp, Homo sapiens
aagcttgcggccgcggggctgggcggcggggacagcggggacggcacggcgcgcgcagcttctaagtgccagatgatggaggagcgtgccaacctgatgcacatgatgaaactcagcatcaaggtgttgctccagtcggctctgagcctgggccgcagcctggatgcggaccatgcccccttgcagcagttctttgtagtgatggagcactgcctcaaacatgggctgaaagttaagaagagttttattggccaaaataaatcattctttggtcctttggagctggtggagaaactttgtccagaagcatcagatatagcgactagtgtcagaaatcttccagaattaaagacagctgtgggaagaggccgagcgtggctttatcttgcactcatgcaaaagaaactggcagattatctgaaagtgcttatagacaataaacatctcttaagcgagttctatgagcctgaggctttaatgatggaggaagaagggatggtgattgttggtctgctggtgggactcaatgttctcgatgccaatctctgcttgaaaggagaagacttggattctcaggttggagtaatagatttttccctctaccttaaggatgtgcaggatcttgatggtggcaaggagcatgaaagaattactgatgtccttgatcaaaaaaattatgtggaagaacttaaccggcacttgagctgcacagttggggatcttcaaaccaagatagatggcttggaaaagactaactcaaagcttcaagaagagctttcagctgcaacagaccgaatttgctcacttcaagaagaacagcagcagttaagagaacaaaatgaattaattcgagaaagaagtgaaaagagtgtagagataacaaaacaggataccaaagttgagctggagacttacaagcaaactcggcaaggtctggatgaaatgtacagtgatgtgtggaagcagctaaaagaggagaagaaagtccggttggaactggaaaaagaactggagttacaaattggaatgaaaaccgaaatggaaattgcaatgaagttactggaaaaggacacccacgagaagcaggacacactagttgccctccgccagcagctggaagaagtcaaagcgattaatttacagatgtttcacaaagctcagaatgcagagagcagtttgcagcagaagaatgaagccatcacatcctttgaaggaaaaaccaaccaagttatgtccagcatgaaacaaatggaagaaaggttgcagcactcggagcgggcgaggcagggggctgaggagcggagccacaagctgcagcaggagctgggcgggaggatcggcgccctgcagctgcagctctcccagctgcacgagcaatgctcaagcctggagaaagaattgaaatcagaaaaagagcaaagacaggctcttcagcgcgaattacagcacgagaaagacacttcctctctactcaggatggagctgcaacaagtggaaggactgaaaaaggagttgcgggagcttcaggacgagaaggcagagctgcagaagatctgcgaggagcaggaacaagccctccaggaaatgggcctgcacctcagccagtccaagctgaagatggaagatataaaagaagtgaaccaggcactgaaggtactgccttgctaagaaccacttctttgctgtcagcttgtgctgactgcccgtgtgctcgtacgtttaagtatcccaacagtcaggtgagagcgtgtggttgaggcagtggtgatgacgtattgacagagaagccaaacgctgctcagaaacgtgtccctcggctgagggcgatgctgacaggtggccgaagctgagcctaggtcttccgactccagttcctccaccatcagctgtgctttcaaaataggcctgatgggcattccctaagggggaagcaggtggcggagaggagggacccgcggatatctttaaacagtggaaaacaggcccttctgttgaagtgaggggccagaggccagccagccccactgcagtgccctgtgccattgctagggaccactcaagccaagccctgagttgggccaggtttccgcaccctggtggggagggcagaatgacacattccaccgaagagcaggagtttgcaggtggcccggtgtgggtgcgggtgccaggctgagctgcagggcggagagtgtgggagaggaggcagacattcgggggcacggcagcctggccttcaagacagccttgcctgcaggagcaccccgcttcggcctcagctgtgccgtggcagcaatgcaaaagcagtccctttgcacactgttccacgtggtgcagagcagggaccctgatgtctctgggcatctaacttccaagtgccaggtcaggggcagcaactaacagcagccgggacttctaggtaatatcagtttcacagcatcagaggatagaaatcataaaacaggactctagagccgccagagctctttgatgtcaggatgaatgtcctgggcacacactggcagccccaagggtatatggctctagctcagtctgtgaggatctatttgtcagcaagaaaatcttgtccagcagatgttaacaggccagaaaagtacctcatgcctttgacttctctggaacaccccagtccctaagcccaaataaatcacaggtgctgcttcgccccgagaaagccctctgaggggccacctttcaaagcctcagccgcctcccctgtggaatggagtccgtgtgctccccagggctggtgaagaatcagggctttggcccgcacggagaagggcttcctcaggcctgtgggacgcagtgcccgctgtcagtcaccttctgtctctccacaaggatcagcgtcagcaagtgtcttagtctcactcagatttggcccttcttccgcgcctgccagttcagctagcacttcggccagtgtctcaggcagggtctagggttgcaggcaccagaagctcgctctgcttacttcagccaaagggaactgattgaaagtgggagtgtgcctgagtgagcaggtgctggagaccgcctggaggccccagggcagcctgcagaggccaagaggtggagcacggagctaggatgcagaaatcccggctgcggccagacggggaaagagccccttgatgacagtcctgtgaggccccatctgatggagaaacagtgcctcactaggaaacaggtgctatgagggacaatggatgtggccagaacgcagctacccactcatcaggggcttagacagaaagtggattctagaatgtcctttcctcttcagggccacgcctggctgaaagatgacgaagcgacacactgtaggcagtgtgagaaggagttctccatttcccggagaaagcaccactgccggaactgtggccacatcttctgcaacacctgctccagcaacgagctggccctgccctcctaccccaagccggtgcgagtgtgcgacagctgccacaccctgctcctgcagcgctgctcctccacggcctcctgaacgtccgtcctcaggagcacagcctcacggacagtgccaaaccctgtgggtctccaggggcttgggaaatgtgttctttcccaagagaatcaaaggaaagaatcaaatttcttgcccggtcactggcactccagaagacagcgtgccggaaccggcagctctcacctttctgtgacttgttcggaattaactcctctggatggaaacttccatcttacttggttacatcacggctctggttcagatacaacttcatgattttgctactatcatttttcacttttcaaagaatttaacctattttacagcagttcagttctgctagtgagtagttttcctctcctaccttccttctaaaaacctgattcatgcacagcgtttgacacacatggagtctgccagtgtgccttctctgcttcagacaagagatctgccatttcatgcccttgtgactacctatcattggccctgcaataaaatcatttatttttcaaaaaaaaaaa

SEQ ID NO: 660699 - DNA, 296 bp, Homo sapiens
tgatctagaggatcccatctcaggcaggacgatacggtaagcacgtattttttttggagacaggatctcacggtggcccaagcgggagtgcaggggcacgatctcagctcaggggagcctcgacctccggggttcaagcgatgcttccacctcagcctaagaccaatctccggggttcaagtgatccctctgcttcaggctcccgggtagtggggactatgggtgtgtgccgccatttctcagcttatttttaaaatttttcgtgtagaagaacaagttctcactatagggctcaa

SEQ ID NO: 660700 - DNA, 105 bp, Homo sapiens
  misc_feature (86)..(86): n is a, c, g, or t
  misc_feature (96)..(96): n is a, c, g, or t
ggtactgctacctagtgggtcttggggaccttcgaaatcgccgccgctctcactatggcttgagaacaaaaaaacaccctacatancggttttcgngggccctcg

SEQ ID NO: 660701 - DNA, 3969 bp, Homo sapiens
aagcttgcggccgcggggctgggcggcggggacagcggggacggcacggcgcgcgcagcttctaagtgccagatgatggaggagcgtgccaacctgatgcacatgatgaaactcagcatcaaggtgttgctccagtcggctctgagcctgggccgcagcctggatgcggaccatgcccccttgcagcagttctttgtagtgatggagcactgcctcaaacatgggctgaaagttaagaagagttttattggccaaaataaatcattctttggtcctttggagctggtggagaaactttgtccagaagcatcagatatagcgactagtgtcagaaatcttccagaattaaagacagctgtgggaagaggccgagcgtggctttatcttgcactcatgcaaaagaaactggcagattatctgaaagtgcttatagacaataaacatctcttaagcgagttctatgagcctgaggctttaatgatggaggaagaagggatggtgattgttggtctgctggtgggactcaatgttctcgatgccaatctctgcttgaaaggagaagacttggattctcaggttggagtaatagatttttccctctaccttaaggatgtgcaggatcttgatggtggcaaggactgcacagttggggatcttcaaaccaagatagatggcttggaaaagactaactcaaagcttcaagaagagctttcagctgcaacagaccgaatttgctcacttcaagaagaacagcagcagttaagagaacaaaatgaattaattcgagaaagaagtgaaaagagtgtagagataacaaaacaggataccaaagttgagctggagacttacaagcaaactcggcaaggtctggatgaaatgtacagtgatgtgtggaagcagctaaaagaggagaagaaagtccggttggaactggaaaaagaactggagttacaaattggaatgaaaaccgaaatggaaattgcaatgaagttactggaaaaggacacccacgagaagcaggacacactagttgccctccgccagcagctggaagaagtcaaagcgattaatttacagatgtttcacaaagctcagaatgcagagagcagtttgcagcagaagaatgaagccatcacatcctttgaaggaaaaaccaaccaagttatgtccagcatgaaacaaatggaagaaaggttgcagcactcggagcgggcgaggcagggggctgaggagcggagccacaagctgcagcaggagctgggcgggaggatcggcgccctgcagctgcagctctcccagctgcacgagcaatgctcaagcctggagaaagaattgaaatcagaaaaagagcaaagacaggctcttcagcgcgaattacagcacgagaaagacacttcctctctactcaggatggagctgcaacaagtggaaggactgaaaaaggagttgcgggagcttcaggacgagaaggcagagctgcagaagatctgcgaggagcaggaacaagccctccaggaaatgggcctgcacctcagccagtccaagctgaagatggaagatataaaagaagtgaaccaggcactgaaggtactgccttgctaagaaccacttctttgctgtcagcttgtgctgactgcccgtgtgctcgtacgtttaagtatcccaacagtcaggtgagagcgtgtggttgaggcagtggtgatgacgtattgacagagaagccaaacgctgctcagaaacgtgtccctcggctgagggcgatgctgacaggtggccgaagctgagcctaggtcttccgactccagttcctccaccatcagctgtgctttcaaaataggcctgatgggcattccctaagggggaagcaggtggcggagaggagggacccgcggatatctttaaacagtggaaaacaggcccttctgttgaagtgaggggccagaggccagccagccccactgcagtgccctgtgccattgctagggaccactcaagccaagccctgagttgggccaggtttccgcaccctggtggggagggcagaatgacacattccaccgaagagcaggagtttgcaggtggcccggtgtgggtgcgggtgccaggctgagctgcagggcggagagtgtgggagaggaggcagacattcgggggcacggcagcctggccttcaagacagccttgcctgcaggagcaccccgcttcggcctcagctgtgccgtggcagcaatgcaaaagcagtccctttgcacactgttccacgtggtgcagagcagggaccctgatgtctctgggcatctaacttccaagtgccaggtcaggggcagcaactaacagcagccgggacttctaggtaatatcagtttcacagcatcagaggatagaaatcataaaacaggactctagagccgccagagctctttgatgtcaggatgaatgtcctgggcacacactggcagccccaagggtatatggctctagctcagtctgtgaggatctatttgtcagcaagaaaatcttgtccagcagatgttaacaggccagaaaagtacctcatgcctttgacttctctggaacaccccagtccctaagcccaaataaatcacaggtgctgcttcgccccgagaaagccctctgaggggccacctttcaaagcctcagccgcctcccctgtggaatggagtccgtgtgctccccagggctggtgaagaatcagggctttggcccgcacggagaagggcttcctcaggcctgtgggacgcagtgcccgctgtcagtcaccttctgtctctccacaaggatcagcgtcagcaagtgtcttagtctcactcagatttggcccttcttccgcgcctgccagttcagctagcacttcggccagtgtctcaggcagggtctagggttgcaggcaccagaagctcgctctgcttacttcagccaaagggaactgattgaaagtgggagtgtgcctgagtgagcaggtgctggagaccgcctggaggccccagggcagcctgcagaggccaagaggtggagcacggagctaggatgcagaaatcccggctgcggccagacggggaaagagccccttgatgacagtcctgtgaggccccatctgatggagaaacagtgcctcactaggaaacaggtgctatgagggacaatggatgtggccagaacgcagctacccactcatcaggggcttagacagaaagtggattctagaatgtcctttcctcttcagggccacgcctggctgaaagatgacgaagcgacacactgtaggcagtgtgagaaggagttctccatttcccggagaaagcaccactgccggaactgtggccacatcttctgcaacacctgctccagcaacgagctggccctgccctcctaccccaagccggtgcgagtgtgcgacagctgccacaccctgctcctgcagcgctgctcctccacggcctcctgaacgtccgtcctcaggagcacagcctcacggacagtgccaaaccctgtgggtctccaggggcttgggaaatgtgttctttcccaagagaatcaaaggaaagaatcaaatttcttgcccggtcactggcactccagaagacagcgtgccggaaccggcagctctcacctttctgtgacttgttcggaattaactcctctggatggaaacttccatcttacttggttacatcacggctctggttcagatacaacttcatgattttgctactatcatttttcacttttcaaagaatttaacctattttacagcagttcagttctgctagtgagtagttttcctctcctaccttccttctaaaaacctgattcatgcacagcgtttgacacacatggagtctgccagtgtgccttctctgcttcagacaagagatctgccatttcatgcccttgtgactacctatcattggccctgcaataaaatcatttatttttcaaaaaaaaaaa

SEQ ID NO: 660702 - DNA, 133 bp, Homo sapiens
gaccaacactcctatagacagtagtaaaaccttttcatcattcgcccagaatgattaggctttcatagacatacatacgcacacacacacacacacacacacgctgtccttatactgatctataggagtggtg

SEQ ID NO: 660703 - DNA, 4123 bp, Homo sapiens
aagcttgcggccgcggggctgggcggcggggacagcggggacggcacggcgcgcgcagcttctaagtgccagatgatggaggagcgtgccaacctgatgcacatgatgaaactcagcatcaaggtgttgctccagtcggctctgagcctgggccgcagcctggatgcggaccatgcccccttgcagcagttctttgtagtgatggagcactgcctcaaacatgggctgaaagttaagaagagttttattggccaaaataaatcattctttggtcctttggagctggtggagaaactttgtccagaagcatcagatatagcgactagtgtcagaaatcttccagaattaaagacagctgtgggaagaggccgagcgtggctttatcttgcactcatgcaaaagaaactggcagattatctgaaagtgcttatagacaataaacatctcttaagcgagttctatgagcctgaggctttaatgatggaggaagaagggatggtgattgttggtctgctggtgggactcaatgttctcgatgccaatctctgcttgaaaggagaagacttggattctcaggttggagtaatagatttttccctctaccttaaggatgtgcaggatcttgatggtggcaaggagcatgaaagaattactgatgtccttgatcaaaaaaattatgtggaagaacttaaccggcacttgagctgcacagttggggatcttcaaaccaagatagatggcttggaaaagactaactcaaagcttcaagaagagctttcagctgcaacagaccgaatttgctcacttcaagaagaacagcagcagttaagagaacaaaatgaattaattcgagaaagaagtgaaaagagtgtagagataacaaaacaggataccaaagttgagctggagacttacaagcaaactcggcaaggtctggatgaaatgtacagtgatgtgtggaagcagctaaaagaggagaagaaagtccggttggaactggaaaaagaactggagttacaaattggaatgaaaaccgaaatggaaattgcaatgaagttactggaaaaggacacccacgagaagcaggacacactagttgccctccgccagcagctggaagaagtcaaagcgattaatttacagatgtttcacaaagctcagaatgcagagagcagtttgcagcagaagaatgaagccatcacatcctttgaaggaaaaaccaaccaagttatgtccagcatgaaacaaatggaagaaaggttgcagcactcggagcgggcgaggcagggggctgaggagcggagccacaagctgcagcaggagctgggcgggaggatcggcgccctgcagctgcagctctcccagctgcacgagcaatgctcaagcctggagaaagaattgaaatcagaaaaagagcaaagacaggctcttcagcgcgaattacagcacgagaaagacacttcctctctactcaggatggagctgcaacaagtggaaggactgaaaaaggagttgcgggagcttcaggacgagaaggcagagctgcagaagatctgcgaggagcaggaacaagccctccaggaaatgggcctgcacctcagccagtccaagctgaagatggaagatataaaagaagtgaaccaggcactgaaggtactgccttgctaagaaccacttctttgctgtcagcttgtgctgactgcccgtgtgctcgtacgtttaagtatcccaacagtcaggtgagagcgtgtggttgaggcagtggtgatgacgtattgacagagaagccaaacgctgctcagaaacgtgtccctcggctgagggcgatgctgacaggtggccgaagctgagcctaggtcttccgactccagttcctccaccatcagctgtgctttcaaaataggcctgatgggcattccctaagggggaagcaggtggcggagaggagggacccgcggatatctttaaacagtggaaaacaggcccttctgttgaagtgaggggccagaggccagccagccccactgcagtgccctgtgccattgctagggaccactcaagccaagccctgagttgggccaggtttccgcaccctggtggggagggcagaatgacacattccaccgaagagcaggagtttgcaggtggcccggtgtgggtgcgggtgccaggctgagctgcagggcggagagtgtgggagaggaggcagacattcgggggcacggcagcctggccttcaagacagccttgcctgcaggagcaccccgcttcggcctcagctgtgccgtggcagcaatgcaaaagcagtccctttgcacactgttccacgtggtgcagagcagggaccctgatgtctctgggcatctaacttccaagtgccaggtcaggggcagcaactaacagcagccgggacttctaggtaatatcagtttcacagcatcagaggatagaaatcataaaacaggactctagagccgccagagctctttgatgtcaggatgaatgtcctgggcacacactggcagccccaagggtatatggctctagctcagtctgtgaggatctatttgtcagcaagaaaatcttgtccagcagatgttaacaggccagaaaagtacctcatgcctttgacttctctggaacaccccagtccctaagcccaaataaatcacaggtgctgcttcgccccgagaaagccctctgaggggccacctttcaaagcctcagccgcctcccctgtggaatggagtccgtgtgctccccagggctggtgaagaatcagggctttggcccgcacggagaagggcttcctcaggcctgtgggacgcagtgcccgctgtcagtcaccttctgtctctccacaaggatcagcgtcagcaagtgtcttagtctcactcagatttggcccttcttccgcgcctgccagttcagctagcacttcggccagtgtctcaggcagggtctagggttgcaggcaccagaagctcgctctgcttacttcagccaaagggaactgattgaaagtgggagtgtgcctgagtgagcaggtgctggagaccgcctggaggccccagggcagcctgcagaggccaagaggtggagcacggagctaggatgcagaaatcccggctgcggccagacggggaaagagccccttgatgacagtcctgtgaggccccatctgatggagaaacagtgcctcactaggaaacaggagggccacgcctggctgaaagatgacgaagcgacacactgtaggcagtgtgagaaggagttctccatttcccggagaaagcctagctctgtggaagagaggaagccacagctaccccacccgctccccaacccgagtttcaggcagtgccttgcagtaagctcagagctagaaaccacgtcctgaggctgcctttgagatcacatgtgtctacaaggcctggctgtccccatctgtggagtcagaagcagaggctgcacagcaccactgccggaactgtggccacatcttctgcaacacctgctccagcaacgagctggccctgccctcctaccccaagccggtgcgagtgtgcgacagctgccacaccctgctcctgcagcgctgctcctccacggcctcctgaacgtccgtcctcaggagcacagcctcacggacagtgccaaaccctgtgggtctccaggggcttgggaaatgtgttctttcccaagagaatcaaaggaaagaatcaaatttcttgcccggtcactggcactccagaagacagcgtgccggaaccggcagctctcacctttctgtgacttgttcggaattaactcctctggatggaaacttccatcttacttggttacatcacggctctggttcagatacaacttcatgattttgctactatcatttttcacttttcaaagaatttaacctattttacagcagttcagttctgctagtgagtagttttcctctcctaccttccttctaaaaacctgattcatgcacagcgtttgacacacatggagtctgccagtgtgccttctctgcttcagacaagagatctgccatttcatgcccttgtgactacctatcattggccctgcaataaaatcatttatttttcaaaaaaaaaaa

SEQ ID NO: 660704 - DNA, 4470 bp, Homo sapiens
aagcttgcggccgcggggctgggcggcggggacagcggggacggcacggcgcgcgcagcttctaagtgccagatgatggaggagcgtgccaacctgatgcacatgatgaaactcagcatcaaggtgttgctccagtcggctctgagcctgggccgcagcctggatgcggaccatgcccccttgcagcagttctttgtagtgatggagcactgcctcaaacatgggctgaaagttaagaagagttttattggccaaaataaatcattctttggtcctttggagctggtggagaaactttgtccagaagcatcagatatagcgactagtgtcagaaatcttccagaattaaagacagctgtgggaagaggccgagcgtggctttatcttgcactcatgcaaaagaaactggcagattatctgaaagtgcttatagacaataaacatctcttaagcgagttctatgagcctgaggctttaatgatggaggaagaagggatggtgattgttggtctgctggtgggactcaatgttctcgatgccaatctctgcttgaaaggagaagacttggattctcaggttggagtaatagatttttccctctaccttaaggatgtgcaggatcttgatggtggcaaggagcatgaaagaattactgatgtccttgatcaaaaaaattatgtggaagaacttaaccggcacttgagctgcacagttggggatcttcaaaccaagatagatggcttggaaaagactaactcaaagcttcaagaagagctttcagctgcaacagaccgaatttgctcacttcaagaagaacagcagcagttaagagaacaaaatgaattaattcgagaaagaagtgaaaagagtgtagagataacaaaacaggataccaaagttgagctggagacttacaagcaaactcggcaaggtctggatgaaatgtacagtgatgtgtggaagcagctaaaagaggagaagaaagtccggttggaactggaaaaagaactggagttacaaattggaatgaaaaccgaaatggaaattgcaatgaagttactggaaaaggacacccacgagaagcaggacacactagttgccctccgccagcagctggaagaagtcaaagcgattaatttacagatgtttcacaaagctcagaatgcagagagcagtttgcagcagaagaatgaagccatcacatcctttgaaggaaaaaccaaccaagttatgtccagcatgaaacaaatggaagaaaggttgcagcactcggagcgggcgaggcagggggctgaggagcggagccacaagctgcagcaggagctgggcgggaggatcggcgccctgcagctgcagctctcccagctgcacgagcaatgctcaagcctggagaaagaattgaaatcagaaaaagagcaaagacaggctcttcagcgcgaattacagcacgagaaagacacttcctctctactcaggatggagctgcaacaagtggaaggactgaaaaaggagttgcgggagcttcaggacgagaaggcagagctgcagaagatctgcgaggagcaggaacaagccctccaggaaatgggcctgcacctcagccagtccaagctgaagatggaagatataaaagaagtgaaccaggcactgaaggtactgccttgctaagaaccacttctttgctgtcagcttgtgctgactgcccgtgtgctcgtacgtttaagtatcccaacagtcaggtgagagcgtgtggttgaggcagtggtgatgacgtattgacagagaagccaaacgctgctcagaaacgtgtccctcggctgagggcgatgctgacaggtggccgaagctgagcctaggtcttccgactccagttcctccaccatcagctgtgctttcaaaataggcctgatgggcattccctaagggggaagcaggtggcggagaggagggacccgcggatatctttaaacagtggaaaacaggcccttctgttgaagtgaggggccagaggccagccagccccactgcagtgccctgtgccattgctagggaccactcaagccaagccctgagttgggccaggtttccgcaccctggtggggagggcagaatgacacattccaccgaagagcaggagtttgcaggtggcccggtgtgggtgcgggtgccaggctgagctgcagggcggagagtgtgggagaggaggcagacattcgggggcacggcagcctggccttcaagacagccttgcctgcaggagcaccccgcttcggcctcagctgtgccgtggcagcaatgcaaaagcagtccctttgcacactgttccacgtggtgcagagcagggaccctgatgtctctgggcatctaacttccaagtgccaggtcaggggcagcaactaacagcagccgggacttctaggtaatatcagtttcacagcatcagaggatagaaatcataaaacaggactctagagccgccagagctctttgatgtcaggatgaatgtcctgggcacacactggcagccccaagggtatatggctctagctcagtctgtgaggatctatttgtcagcaagaaaatcttgtccagcagatgttaacaggccagaaaagtacctcatgcctttgacttctctggaacaccccagtccctaagcccaaataaatcacaggtgctgcttcgccccgagaaagccctctgaggggccacctttcaaagcctcagccgcctcccctgtggaatggagtccgtgtgctccccagggctggtgaagaatcagggctttggcccgcacggagaagggcttcctcaggcctgtgggacgcagtgcccgctgtcagtcaccttctgtctctccacaaggatcagcgtcagcaagtgtcttagtctcactcagatttggcccttcttccgcgcctgccagttcagctagcacttcggccagtgtctcaggcagggtctagggttgcaggcaccagaagctcgctctgcttacttcagccaaagggaactgattgaaagtgggagtgtgcctgagtgagcaggtgctggagaccgcctggaggccccagggcagcctgcagaggccaagaggtggagcacggagctaggatgcagaaatcccggctgcggccagacggggaaagagccccttgatgacagtcctgtgaggccccatctgatggagaaacagtgcctcactaggaaacaggtgctatgagggacaatggatgtggccagaacgcagctacccactcatcaggggcttagacagaaagtggattctagaatgtcctttcctcttcagggccacgcctggctgaaagatgacgaagcgacacactgtaggcagtgtgagaaggagttctccatttcccggagaaagcaccactgccggaactgtggccacatcttctgcaacacctgctccagcaacgagctggccctgccctcctaccccaagccggtgcgagtgtgcgacagctgccacaccctgctcctgcagcgctgctcctccacggcctcctgaacgtccgtcctcaggagcacagcctcacggacagtgccaaaccctgtgggtctccaggggcttgggaaatgtgttctttcccaagagaatcaaaggaaagaatcaaatttcttgcccggtcactggcactccagaagacagcgtgccggaaccggcagctctcacctttctgtgacttgttcggaattaactcctctggatggaaacttccatcttacttggttacatcacggctctggttcagatacaacttcatgattttgctactatcatttttcacttttcaaagaatttaacctattttacagcagttcagttctgctagtgagtagttttcctctcctaccttccttctaaaaacctgattcatgcacagcgtttgacacacatggagtctgccagtgtgccttctctgcttcagacaagagatctgccatttcatgcccttgtgactacctatcattggccctgcaataaaatcatttatttttcaaaaaaaaaaattaaaaaagaaaaaagaaaaaaaaaaaaaaaaaaaaagggggggggggcgcaaaaatgtaacccccgcgggggcgcacctgtaagcgcacaccagcgtttgtgggaacaaaaggaggggcgccccgaaagagaggaggcgtgattaatatgtaagcacgaacagaggtgggcccgaggggttaaaaaagcaccgtgtaacggcagtggggggaagaaacaacggttgttgcttgtgggagcatctttgtgtaggaagacaccccattcgttgggggggtgcaccgttgttgggaagcaccctctccgttagaaagtattaagcggcagtgcggggaaatataaacgttgacgtgtgattttggtgtgacacccacgatcgttataggtaggcggtgaaaaaatttggtggcccaagtagttttttaagaatttac

SEQ ID NO: 660705 - DNA, 3955 bp, Homo sapiens
aagcttgcggccgcggggctgggcggcggggacagcggggacggcacggcgcgcgcagcttctaagtgccagatgatggaggagcgtgccaacctgatgcacatgatgaaactcagcatcaaggtgttgctccagtcggctctgagcctgggccgcagcctggatgcggaccatgcccccttgcagcagttctttgtagtgatggagcactgcctcaaacatgggctgaaagttaagaagagttttattggccaaaataaatcattctttggtcctttggagctggtggagaaactttgtccagaagcatcagatatagcgactagtgtcagaaatcttccagaattaaagacagctgtgggaagaggccgagcgtggctttatcttgcactcatgcaaaagaaactggcagattatctgaaagtgcttatagacaataaacatctcttaagcgagttctatgagcctgaggctttaatgatggaggaagaagggatggtgattgttggtctgctggtgggactcaatgttctcgatgccaatctctgcttgaaaggagaagacttggattctcaggttggagtaatagatttttccctctaccttaaggatgtgcaggatcttgatggtggcaaggagcatgaaagaattactgatgtccttgatcaaaaaaattatgtggaagaacttaaccggcacttgagctgcacagttggggatcttcaaaccaagatagatggcttggaaaagactaactcaaagcttcaagaagagctttcagctgcaacagaccgaatttgctcacttcaagaagaacagcagcagttaagagaacaaaatgaattaattcgagaaagaagtgaaaagagtgtagagataacaaaacaggataccaaagttgagctggagacttacaagcaaactcggcaaggtctggatgaaatgtacagtgatgtgtggaagcagctaaaagaggagaagaaagtccggttggaactggaaaaagaactggagttacaaattggaatgaaaaccgaaatggaaattgcaatgaagttactggaaaaggacacccacgagaagcaggacacactagttgccctccgccagcagctggaagaagtcaaagcgattaatttacagatgtttcacaaagctcagaatgcagagagcagtttgcagcagaagaatgaagccatcacatcctttgaaggaaaaaccaaccaagttatgtccagcatgaaacaaatggaagaaaggttgcagcactcggagcgggcgaggcagggggctgaggagcggagccacaagctgcagcaggagctgggcgggaggatcggcgccctgcagctgcagctctcccagctgcacgagcaatgctcaagcctggagaaagaattgaaatcagaaaaagagcaaagacaggctcttcagcgcgaattacagcacgagaaagacacttcctctctactcaggatggagctgcaacaagtggaaggactgaaaaaggagttgcgggagcttcaggacgagaaggcagagctgcagaagatctgcgaggagcaggaacaagccctccaggaaatgggcctgcacctcagccagtccaagctgaagatggaagatataaaagaagtgaaccaggcactgaaggtactgccttgctaagaaccacttctttgctgtcagcttgtgctgactgcccgtgtgctcgtacgtttaagtatcccaacagtcaggtgagagcgtgtggttgaggcagtggtgatgacgtattgacagagaagccaaacgctgctcagaaacgtgtccctcggctgagggcgatgctgacaggtggccgaagctgagcctaggtcttccgactccagttcctccaccatcagctgtgctttcaaaataggcctgatgggcattccctaagggggaagcaggtggcggagaggagggacccgcggatatctttaaacagtggaaaacaggcccttctgttgaagtgaggggccagaggccagccagccccactgcagtgccctgtgccattgctagggaccactcaagccaagccctgagttgggccaggtttccgcaccctggtggggagggcagaatgacacattccaccgaagagcaggagtttgcaggtggcccggtgtgggtgcgggtgccaggctgagctgcagggcggagagtgtgggagaggaggcagacattcgggggcacggcagcctggccttcaagacagccttgcctgcaggagcaccccgcttcggcctcagctgtgccgtggcagcaatgcaaaagcagtccctttgcacactgttccacgtggtgcagagcagggaccctgatgtctctgggcatctaacttccaagtgccaggtcaggggcagcaactaacagcagccgggacttctaggtaatatcagtttcacagcatcagaggatagaaatcataaaacaggactctagagccgccagagctctttgatgtcaggatgaatgtcctgggcacacactggcagccccaagggtatatggctctagctcagtctgtgaggatctatttgtcagcaagaaaatcttgtccagcagatgttaacaggccagaaaagtacctcatgcctttgacttctctggaacaccccagtccctaagcccaaataaatcacaggtgctgcttcgccccgagaaagccctctgaggggccacctttcaaagcctcagccgcctcccctgtggaatggagtccgtgtgctccccagggctggtgaagaatcagggctttggcccgcacggagaagggcttcctcaggcctgtgggacgcagtgcccgctgtcagtcaccttctgtctctccacaaggatcagcgtcagcaagtgtcttagtctcactcagatttggcccttcttccgcgcctgccagttcagctagcacttcggccagtgtctcaggcagggtctagggttgcaggcaccagaagctcgctctgcttacttcagccaaagggaactgattgaaagtgggagtgtgcctgagtgagcaggtgctggagaccgcctggaggccccagggcagcctgcagaggccaagaggtggagcacggagctaggatgcagaaatcccggctgcggccagacggggaaagagccccttgatgacagtcctgtgaggccccatctgatggagaaacagtgcctcactaggaaacaggtgctatgagggacaatggatgtggccagaacgcagctacccactcatcaggggcttagacagaaagtggattctagaatgtcctttcctcttcagggccacgcctggctgaaagatgacgaagcgacacactgtaggcagtgtgagaaggagttctccatttcccggagaaagcaccactgccggaactgtggccacatcttctgcaacacctgctccagcaacgagctggccctgccctcctaccccaagccggtgcgagtgtgcgacagctgccacaccctgctcctgcagcgctgctcctccacggcctcctgaacgtccgtcctcaggagcacagcctcacggacagtgccaaaccctgtgggtctccaggggcttgggaaatgtgttctttcccaagagaatcaaaggaaagaatcaaatttcttgcccggtcactggcactccagaagacagcgtgccggaaccggcagctctcacctttctgtgacttgttcggaattaactcctctggatggaaacttccatcttacttggttacatcacggctctggttcagatacaacttcatgattttgctactatcatttttcacttttcaaagaatttaacctattttacagcagttcagttctgctagtgagtagttttcctctcctaccttccttctaaaaacctgattcatgcacagcgtttgacacacatggagtctgccagctgctccgcgcgggatctcaa

SEQ ID NO: 660706 - DNA, 124 bp, Homo sapiens
  misc_feature (63)..(63): n is a, c, g, or t
tgctctagaggtcccgattatccccaacactgaacaaatagttagaaagttagagatttacangattttgtcctacaggaagtgaaaacctaaggccttactatagtgttgggcgataacatca

SEQ ID NO: 660707 - DNA, 2519 bp, Homo sapiens
aagcttgcggccgcggggctgggcggcggggacagcggggacggcacggcgcgcgcagcttctaagtgccagatgatggaggagcgtgccaacctgatgcacatgatgaaactcagcatcaaggtgttgctccagtcggctctgagcctgggccgcagcctggatgcggaccatgcccccttgcagcagttctttgtagtgatggagcactgcctcaaacatgggctgaaagttaagaagagttttattggccaaaataaatcattctttggtcctttggagctggtggagaaactttgtccagaagcatcagatatagcgactagtgtcagaaatcttccagaattaaagacagctgtgggaagaggccgagcgtggctttatcttgcactcatgcaaaagaaactggcagattatctgaaagtgcttatagacaataaacatctcttaagcgagttctatgagcctgaggctttaatgatggaggaagaagggatggtgattgttggtctgctggtgggactcaatgttctcgatgccaatctctgcttgaaaggagaagacttggattctcaggttggagtaatagatttttccctctaccttaaggatgtgcaggatcttgatggtggcaaggagcatgaaagaattactgatgtccttgatcaaaaaaattatgtggaagaacttaaccggcacttgagctgcacagttggggatcttcaaaccaagatagatggcttggaaaagactaactcaaagcttcaagaagagctttcagctgcaacagaccgaatttgctcacttcaagaagaacagcagcagttaagagaacaaaatgaattaattcgagaaagaagtgaaaagagtgtagagataacaaaacaggataccaaagttgagctggagacttacaagcaaactcggcaaggtctggatgaaatgtacagtgatgtgtggaagcagctaaaagaggagaagaaagtccggttggaactggaaaaagaactggagttacaaattggaatgaaaaccgaaatggaaattgcaatgaagttactggaaaaggacacccacgagaagcaggacacactagttgccctccgccagcagctggaagaagtcaaagcgattaatttacagatgtttcacaaagctcagaatgcagagagcagtttgcagcagaagaatgaagccatcacatcctttgaaggaaaaaccaaccaagttatgtccagcatgaaacaaatggaagaaaggttgcagcactcggagcgggcgaggcagggggctgaggagcggagccacaagctgcagcaggagctgggcgggaggatcggcgccctgcagctgcagctctcccagctgcacgagcaatgctcaagcctggagaaagaattgaaatcagaaaaagagcaaagacaggctcttcagcgcgaattacagcacgagaaagacacttcctctctactcaggatggagctgcaacaagtggaaggactgaaaaaggagttgcgggagcttcaggacgagaaggcagagctgcagaagatctgcgaggagcaggaacaagccctccaggaaatgggcctgcacctcagccagtccaagctgaagatggaagatataaaagaagtgaaccaggcactgaagggccacgcctggctgaaagatgacgaagcgacacactgtaggcagtgtgagaaggagttctccatttcccggagaaagcaccactgccggaactgtggccacatcttctgcaacacctgctccagcaacgagctggccctgccctcctaccccaagccggtgcgagtgtgcgacagctgccacaccctgctcctgcagcgctgctcctccacggcctcctgaacgtccgtcctcaggagcacagcctcacggacagtgccaaaccctgtgggtctccaggggcttgggaaatgtgttctttcccaagagaatcaaaggaaagaatcaaatttcttgcccggtcactggcactccagaagacagcgtgccggaaccggcagctctcacctttctgtgacttgttcggaattaactcctctggatggaaacttccatcttacttggttacatcacggctctggttcagatacaacttcatgattttgctactatcatttttcacttttcaaagaatttaacctattttacagcagttcagttctgctagtgagtagttttcctctcctaccttccttctaaaaacctgattcatgcacagcgtttgacacacatggagtctgccagtgtgccttctctgcttcagacaagagatctgccatttcatgcccttgtgactacctatcattggccctgcaataaaatcatttatttttcaaaaaaaaaaaggggggggctaaatttccccgggggccagttaccgcccgttttggcaaggcccaggggggataaaaagacgcggtaccggggagaacgccggctgggacccccgggggtgggaccccccaacggaaaagtgggccacgaga

SEQ ID NO: 660708 - DNA, 579 bp, Homo sapiens
aaaactccaaaatataactacgttttgaagcaaagtgaaaggtttctaaatgccagaattaccaaaagtcacgaaacacaaacagcaaataaagtgtaatgttacagctataacaactcacataaagtatgcagaaacaactaggaaacactgagaattttaaatctgattaaggagctagtagagattacccagcattcagctcaccatttgaaaccagccaaatgaatatgtgacaagtctcttttaaaaatcttgcactttgaaaaggaaatgtgttataagtgttactcaatctggaagttgcaatgagcttgacaatgtcaaaacatggatttagagattctcaatgaacctctaatgttttaccttcaataaaatctcttttcataaaaggaaaaaaaagattacccaaattctaccatcattttgccactgggattattttcctttcaaacaatttggatgaccattattattcctggacttgaatgtacacgattctcataaacccaatgtcacactaagtaaaactgcaaaaatcatatacgtcttataattaaagttattatttctttc

SEQ ID NO: 660709 - DNA, 733 bp, Homo sapiens
ttcatttggaggtgggcagatcacctgaggcaggagttgagaccagcctggccaacatggcaaaacctcatctctactaaaatgggaatatttcagattttggatatttggactggggatgctcaacctttaatatgtgcttaatatattatgcaacatgtatgtctgtatacaaacaaacacacatgtatattaaatataataagtaggtcctttatttttacctatatgttatactacctatgttttcattctttcctgcagatttgagcttctatcatgtatcatattctttcagcctgcatttctttaagcatttcttggagcacaggttttttggctaaaaaaatctctgagttcttctctagctgaaaatgtctttacttagctttcattttcttaaactgatacatattagatgtccatatcttcaggatacatgtgattttttgaagcattcatatcaagtgtaaagatcaaatcaaggtaattgagatatctatcaccttgaatattcatattttatttatgagaagaatatttgaattgctctcttctatagcttttatttttttatttatactttgactaaatgtagaattcaatgtagaattctatgtcgacagtttttttcagcatttgaattttatccattgtgaggaccatccatcatctttcatacttccctaattacaggctatttctgctatttagattcttcatttttcttaga

SEQ ID NO: 660710 - DNA, 679 bp, Homo sapiens
gctccgcgagaatcagctcaatgccgataggagatcaaccccgagatgctgaacaaatgtgctgtccctggctgggtggtcgcctgtgccagtggcagcttcgtggacagtgctggtgtgctgtgaagatggcagtctcgtgtgtgctctgtgtgccagctgcctgcctgctgctgctgctgctgcatgtttcccctcactggcccagcatgatgaacttcagtgaaaaatgcatgattgaagatgctgaatgtgtgacaatgaagttagtcctaaagtgtacttcatgaatgcagaccattgtggaattcctgtggcacaatcggacttattcacgcagtggccaataatcaatgacaaacttggcgatttgaggatggatcagttctgaaacagtttctatatctgaaacagatgaaaatgtcccctgaatgacatgagcaaaatgcttttgaaaatgaatgattgccatacaggcaagcccatgatgccgtggcacaggacaggccaatgtcgggtagatagaccatggtgaatttccattttattctgtttaacaacgttgtcatggccacctctatgaacttgcatggacgaatgccttttccggtgaaccatgttcgccagtttcagacgacaccctgctgattgacgctgccactggctgcacagaattcac

SEQ ID NO: 660711 - DNA, 160 bp, Homo sapiens
caatatgactcaagcattagctccagcaattgccagtggttgtctccatggcccgtgcatggattcgatgcagcttttatatagctgcttacactagggcagcaccatccaggggccatgaggataagcactgtctagtgacagcagccagtttctggac

SEQ ID NO: 660712 - DNA, 132 bp, Homo sapiens
  misc_feature (131)..(131): n is a, c, g, or t
ttacgactcgagctcggtaccggacagaatgcgtcggttcagctggaggtattttctgcggtcatcgaacggtggctcgcatcggacggggtagacagagactgccagcataccccgtatgggatctgatng

SEQ ID NO: 660713 - DNA, 233 bp, Homo sapiens
tgctgggattataggcatgagccgtcgcacccggccagttacttctttaaaaaaataatttttcgttgtggtacaatacatattacattaaaattaccattttaacatcccccccccccctttttttttttgggcggacagcgtctctcacctggggcgggagtgcaggggtgctatcacagttcactggagcctcaacctccggggctaaagtaatcctcctatttaagcct

SEQ ID NO: 660714 - DNA, 411 bp, Homo sapiens
gctcttgttgcccagcctggagtgcaatagcgtgatctcagctcaccacaacctccgccttccgggttcaatcggttttcctgcctcagcctcccaagtagggtgggattacaggcatgcgccaccacgcctggctaattttgtatttttttagtagagatggggtttctcatattgggcaggctgggtcttgaactcctgacctcaggtgatctgcccacctcgggcctccaaactgctgggattacagcgtagcaccaaacctggctaccctttcagttttaggccatataaaaattacatgaaattgggctgggcacgatggctcgctcctgctatccagtgctttgggaggctgaggcaggaggatcacttgaggccaggaggtccagaccagcctgggaaatgagc

SEQ ID NO: 660715 - DNA, 477 bp, Homo sapiens
ctgtgtgaaacctgcaatatacggtcctactaggaaaccccctagcggtactatagtatcacattccaacgctactcacaaaattcttttctcttgtttgctttatagtgtacttagctatagataatttccgaatacaaagcctacggtacatataaatgcaatagttaactgatcctgtaagctgatgtcctttttatgttccacaggtgacatcttttaatccagcatcttctcctgtctctagccttccctttttcttcttcttagattctgcttgaggtctgggctcggtgagtgttttagtgggggttagcgatggaggtaggattggtgctgtgggtaaaagaagtatagaaggggtaggaaggttggtggaaactattaatagtgtaggaagctgaataatttatgaacggagaggggacagggttgattcgggaggatccttattggtgcgggggctttgtctgaatt

SEQ ID NO: 660716 - DNA, 216 bp, Homo sapiens
ccccctcccccccagcacccacaattttcagtcccctcccctttgccctgttttgtatacccctcccctgaccctgctcctatcccccagtatttaatgccctgtcagtcccttttagtttgactcaatggtaacctgctgtatttgaattttttataaatgtataaacagggtggggggagtgggcggttttcattaaacgtccccctttcatta

SEQ ID NO: 660717 - DNA, 309 bp, Homo sapiens
aaagggggtttttttggttggccccccccctccccaaatgtcccccgccgattttttgggggggcccctttgggcctgtttgccatttttccggggggattttaatgggtttggggggaaaagcttttggccgggggttttttttaaaaaaaaaaaaaatcctttttttttcccccggggggacgggccccggggtttttcccgttttttgggccaatttttcccaacccgattttttccccttcccgggggggcccctggggttggttttttatggcccccgcccccccttaaaaaaactgggtttta

SEQ ID NO: 660718 - DNA, 132 bp, Homo sapiens
  misc_feature (124)..(124): n is a, c, g, or t
gagctctctctgtggggcgcaggagctcatcccttgtgttctgccaggtggggtacggggttggacactgaggagggtaacctgctggctggagcggcagagcagtggccttgatttggtcttntgggaaga

SEQ ID NO: 660719 - DNA, 1661 bp, Homo sapiens
gcaggtggcgaggacgtgggcgcagactatgcccctagggtgagctgaggagagctctgtgacacatctccattgacaagtcactcttcgaaatcacgtatggtttccatcacatagcccgatgtcagtagtcacgtcggcatggtttagctgtctactagtccgctctcgtcttgctccgtccgattcgcgaagtgtcttccttgggccagacatctcgccttccgaggctcactgttaccttgactactattctgcatggaatgaaaagttatacgtattgggctgggcacatcttacaactatgtaacacatctcataatatgatgcatacacgacacttatacgcgctctggtgtcctccctcactgcgctcatctgtggagtagtcattccggtaactctgtggttagtgacttacccccctcacacaagacaccgtcttccgtcctgtgtgtcccaggagaagagcccgtgcgtgctcctgaccgctccccgcgttcgtgcgtgccctggattgttgcttccaagcacgaagggcggcaggaccggttgcgactcgtttttggttgcccccacttggggacggccccggactccaggcacgacgatgtggggaggcgtgatcttagctttgctcgagcgctaacgccttgcgtgcgtgcgtgtgcgctctacgaaagacaccagaccgggcgccacttcggtggccccttgcgccactcctcgttggtatcggggtggcggttcaggcgcgttgaccacggtccctgtaactcgttgcggttcatcaaagttcccgagccatgttgtgccgataggcgtgtttgctgatgaatcgttgatggaagcgcattggagaaggcagctttaacattgagtttttagtggaaccacgaattggtccacgcttaaatgggcgatccgtttgttctaacaactcttacgaattttgcgtatttgtcctctggaagggacaatgttataatgcacgagttatccccccatgttagcctcttgtgttgtgttgcatggcccgagagccaagtacgcagtttgaaccccctccttggggcagaaccaccggggcatgaaccaaatagaatggcccaagggcagggctggtgcacaaccggcctaagttaattccggcgtctccatcttgtgggagtccttggagagcccctgtgctacggcatgggggcgttatccaggacaattaaattgggccaagccatgtggtaagcggggatgaagcccctgttcaggccccgggggtaacaaggggcctgggttaaaacagggcccttcagaaccctgggttgggccttgggtgaaggtccagaggcagagcagcagagattcctgtgtccccgccacgggagattccctccaagaaacaccggtgggtgccagacattaatggcctcagcgggacttgcgggaaacaaaaagtaatggcgctgtggccacaacagaactctgtcctctacaatcgagacacactctggagaacgaaaaagagcgggtgtcacaccacagtcatcattggaacagaagaagagggtgattcgaacgacgtgatccgacttcctgatgcatctctgcagaagacaagaatcaagaggaatatgatatgcggctcttgttgtattgatggc

SEQ ID NO: 660720 - DNA, 478 bp, Homo sapiens
cgtagttctgccttatccagactgtctgtatagataaggaattacaagtatatagcatattcagatgggcttcacttgatctgcatctactgatgctctatgtctttttatggtgagatagctcatttcttttcagtgctgactaatattccattgtctagatgtgccactgatgattaatccatacgatttactgaaagacatcttggttgtttccaagttttggcaattatggatacagctgctataaacatctgtgcggccgagcacaggtggctaacgcctgtaaatctcagcactttggggagctgcggcgggcagatcacctgaagtcaggagttcgagaccagcctggccaacatcgcgaaactgtgtctctactaaaaatacaacaaatagccgggcatggtggcacacacctgtagtcccagctacttgggaagctggggcagacgcacttgaatctgggaggcagcga

SEQ ID NO: 660721 - DNA, 376 bp, Homo sapiens
  misc_feature (35)..(35): n is a, c, g, or t
  misc_feature (319)..(319): n is a, c, g, or t
agatatggacaagttctgctggagcaggtctgtgnccacgctcatgggcacagaatacctgggtctgttgaagagcctctttcccacagtctggttcttcttccaccagtcatatacaggcacgcccggtccagaagccacaggcactaatactcactaagggactcacccctttggttgggaacattctccaccagtacagccacagaggggtcagagatgccagaaccaccagaatccacacacccaagagcatggcctgaagggttctgaacaaggccttcagcatgtccatgaaggaggtacataggtgtagccntctgacttcttctgcactctgagtgggggctagagtgttacagtctctctcgtgccg

SEQ ID NO: 660722 - DNA, 796 bp, Homo sapiens
gcagtcagccgcatcttctttagcgtcgccagccgagccacatcgctgagacaccatggggaaggtgaaggtcggagtcaacggattggtcgtatgggcgctggtcaccagagctgcttttaactctggtaaagtggatactgttgccatcaatgaccccttcattgagctcaactacatggttacatgttccaatatgattaccacccactggcatattccatggcaccgtcaaggctgagaacgggaagcttgtccagcatggaaatcccatcacatcttccaggagcgagatcactccacaaatcaagtggggcgatgctgggcgctgagatacgtcgtggagtccactggcgttttcaccacatggagaaggctggggctcatttgcaggggggagccagaagggtcatcatctctggcccctctggtgacgcccccatgttcgtccatgggtgtgaaccatgagaacgtatgacaacagcctcaagatcatcagcaatgcctcctgtacacacaaaattgagttagcacacctggcaaggtcatccatgacaactttggtatcgtggaaggactcatgacacagtccatgccatcacatgcaccagaagactgtggatggccctccgggaaacttgtggtgtgatggccgcgggcactccagaaaatcatccctgtctctactggcgcatgcaaagatgtggggaaggaaatccctgagctgcacgggaacatcactgggatgaccgaccgggtcccactgccaacgtagcgcggggaccgcactggcgcc

SEQ ID NO: 660723 - DNA, 247 bp, Homo sapiens
gaagcagcgttacccatgcagagcaaggggaacaaccactcccagtctcagagcgagtgacgtttgaaactctattagcgcacaccccgctaactagctagccatttcacattggttacaccagcctaatctcgggagttgataggcttgaagtcataaacagcgcaatgcttgacgcacatcgaagagctgctggcaaaacgcttgaaagtgctgtttgaatgaaagcttacgagcctgcgtcgac

SEQ ID NO: 660724 - DNA, 456 bp, Homo sapiens
  misc_feature (111)..(111): n is a, c, g, or t
  misc_feature (140)..(140): n is a, c, g, or t
actttttgtttcctaatcttaaaaaaatttttcagggcagtacatttttctcaagttatgtataaagaatgcattgaaaatcttcggggttcaacggcaattaacaaattnttccccccacggcaacaaaccccttttcntctcacgttctttagggatggactaaatagctggtatcatcacttacaaaagtgtcttgcatgctatagagctaatgttcaaaaatatagtttatattttttatcttttaaccatttttccacaaactttttgaagtctccttgaatatgtaccatttataaaggggaaaaattctgtgactgctcatgttgacttaatgctgacttaattttctgttttgtaaatatatacaaacaagttgatacaaattttgtttatagcccttaaacaaatttgtgaaataaatgcattcagaaacaaactaaaacaatgaaa

SEQ ID NO: 660725 - DNA, 533 bp, Homo sapiens
  misc_feature (29)..(29): n is a, c, g, or t
  misc_feature (122)..(122): n is a, c, g, or t
  misc_feature (125)..(125): n is a, c, g, or t
  misc_feature (158)..(158): n is a, c, g, or t
  misc_feature (191)..(191): n is a, c, g, or t
  misc_feature (214)..(214): n is a, c, g, or t
tattccaaaggaagtcccagggccttatnaaccagaggaagatagggtacccatgtgcgattggcagatttgcaagattttttttggttcttaagatgaagtttcgcgcttgttgcccaggntgnaatgcaatggcgtgatcttggctcactgcaacntccggcttcctgggttcgggtgattctcctgcntcagccttcccgagtagctgggnccgcggggtgtgtgccaccacaccaggctaatttttttgtatttttttgtagagacggggttttgtctcattgcccaggctggtctcaaactcctgagcacaagcaatacgcttgccttagccacccaaagtgctggaattacatgggtgagctaccgtgtccagcctcaatttaaaaataaagagcataattgcattgtttgtaacacaaagaataaatgcttgaggggatggataccccctttaccctgtgattattatgcattgcatacctgtatcaaagtatcccataaatatatacacctactatcttacccac

SEQ ID NO: 660726 - DNA, 161 bp, Homo sapiens
cctgtgtacacagaatgtactttactcaaaatggacctctcataccttaaagccaatggtgacttgtcagccacacttacctagaccctactatgcttgtccatttcaatgtaacagaagctagtggctcaccccagagcatagacatattcccatatccc

SEQ ID NO: 660727 - DNA, 869 bp, Homo sapiens
  misc_feature (733)..(733): n is a, c, g, or t
tatcagcgggggtttgctccgggtatacgggggtttttctcacccgccccgtgtgcggtatgcaaggggcccaggtgtctcgttccccctttggcggccaaaaacgataaattaatctcccttcctattgcgaagattttatctttcatgtaatggccacatttctcacccggagacaccctcctttccctgtttggtttccacccccttggggaccccccttttccttggccccaccacaaaggtcctgtgagttaacgccgttgctgggcgaacggccatccctgttagaattcccccgctgtgtcgacagaaaacagcgtgaggttcttttgccctccagaggagacattcctcccacctgggtgacatatatccgcaagcaaatgcttcccccgtgggtataagaaaattgtggggcccccacataatcccgttgcaagatctgaaccattgtccgctctcccacacggagttctccagcagtttgcaagattgttcttgcactagaagcatttgcggtaagtctcttcacgttgtagagaggagacacgtttcatagagatcccaggcgcaaataatgcagcacccccgccaatcgcttccttaacccccctcttaggcgcgcaccccatcgccccatacaggttggtggtacacacaaagatactcttccccgattgttacttcccttgttccaccctagtagccccactacacaacagcacagctnctcacaccgccttaatgaaacactccttcacacaccgcatatgtactgcacacaaaaaacgctgttttctggggttaaccaaaactgagaaaacaaattccaggcaaaaccgtcaaaacaccccgccacatgcaaa

SEQ ID NO: 660728 - DNA, 1470 bp, Homo sapiens
  misc_feature (295)..(295): n is a, c, g, or t
  misc_feature (1469)..(1470): n is a, c, g, or t
ctttactcagtatacacagataaaaccgctggctgtgtgggatagtgaaacaggtgagagggttcataccacggcatacaagggcacatacttcctatgtgaattcctgtaatccagccaggagagggccctcagacttgtgctgcgacttggactagctagtatcggactcggccaacagttctcataagcgttctgaggcacgatcgcgagaagaagagtcagtccattactcatgaccacttttcaagaagcatccgtaccacggctgattatgctgttcgatccattcaantcggaacatcaagctagactcacgaattaatttcatggatgtgcaaatacgtaacagacttgcaataatcaaaggttgcattggagaccacttgcagcacagaacatcacaggcgtaacagcactacctagcactacttgccatgtaagtgacctaatggtccaatgcaactttccaagttcgaatctttgtgtcacttgggacgctatctaaaacgttatacctcgtacacgtgcgtgctcttactaccctatttatggttgccctagagtggactataatcggaagcaaaattgaacgacgctaatcccggtgatcctcgagggaatggtccctgtgcgcattgttaggtgccccgcagataggatgagccatgtagtttcagaggaattatatttccatacgcgcatagattagtagtcaaccaaaccttttgcaaacaggaaccctatcatgaggactgttctttgggtcaacccttgattggaaagccaaaactagcaagcttggcttcagccagacagagtattgtcttcatagtcgtggggaataccacaaagcaaggagacatattggtcacttaacgcttgccctggacaatgcttggcttcccatcacatgacagtggcttttccaacccctgattgaagcccatcattaatcctccagacatccgagtggaccaacgaagacttggtataatgggggaggagacatttcacgtgcacacatactcggccctgggaagaacttccacaggggccgggttgagcatttggagaaaactcccagacaaggggcacaagtgactgccccacatgtttggagctgtttccacaggtagtacaaccatcccattgaaagaacaccatgggtgacaacacacacacgcggcggcgggggaagaatattcaaagaaacaacattggttgaccattaaaaggaggaaataaagaggaacagaggagtttaaaaaaaaggaagatataggaaggaaggggaggaaaaataatatacgatgttagtaaagaccacgcaaaaaaaaagtaggagaagggatcactgcagcgggagtatgataatgtattatgagtagataaatagtgagcaggaactaaaaaaagaagagcgaggagtgtgatgtattattttttgtgatataaataatatgagnn

SEQ ID NO: 660729 - DNA, 80 bp, Homo sapiens
gctatgttgacttcagcttcgtatgcaccttcttgataactgcccccagccccctgccccattaatgacccttgaatcct

SEQ ID NO: 660730 - DNA, 150 bp, Homo sapiens
ttgcacgattctctcttggcagagtcttctgcgggggggagccctctcgtgtctcttgcgcctttcgcccccctgggggttttgcgccttgttctcctgcggctttctgcggccgccttgttggtcttcctgcggtcgcccttggccacc

SEQ ID NO: 660731 - DNA, 324 bp, Homo sapiens
gggtcccccaaaaaggggggaaaaggggcccaatccggcccccgttaacttgggaattaaaaggtagccggaggggggagggtcggctccaaaggccccagtaatttagctggttgcagctgtttatagccttcaggggggggcctgccccggtatgccttcccgtgatgcccccccaagaaaccctttttttttagtttttaaagggtttttgtaaaatgtttttggcccagtaggatttgaattagccgttttccagttttcctttttactaataataaatttgtttttccaatccctctgtggtaaaatgtgaaaaaccca

SEQ ID NO: 660732 - DNA, 291 bp, Homo sapiens
tgtagcttttgacaacttgattatagtttgtttttggatttatcctacttggagtttggtgaacttattggttgtgtagatttatgttttcatcaaatttaagaagttttggactattatttcttcaaatattctttctactcctttctctccaaaccctttgaaattctcaatatgcatatattggtatgcttgatggatccccagaggtctcttaaggtctgctcaaaaaggtcaaacttttatctttcaaaactgaagacagataattataaatgaacccatcttcaa

SEQ ID NO: 660733 - DNA, 502 bp, Homo sapiens
cgtggaactgcaccgaagtagacaatagaccgtgctggtgtgcgcggtggccactgcgctgcggaacatggccttggacgtcagaaataaggagctcatctggcacaatacgcctatgcgacgacctatgtccacagcgcttccagtgagggaacaacgagcaacaacacttgcaagcaacggccatgctcggactgaccacagtgacagcttgtctgcgtgcacactagcacgaatgtgattaccaaggaacatggatgaacgccaagggccttaacgggatgccggaggccatcgacgaagttggtcgcgcatctcccaaaagcaaagggagaataaacactctccaaaaagtgggtccagggctgcatctccaggtcctacaacaagcatgtggcagttaccgaagatctgaaggagtctctaccaaaaagggatggatggtccacaatacccactttgtagccctccgtcttcaaccatcgaggaggggaccggcaaa

SEQ ID NO: 660734 - DNA, 383 bp, Homo sapiens
acctcttttagatcagacttgagtccattgccacattttcagaacacctgtcagcaacttgtgggaataagcgaaggttttcctataagagggaaagaaggcaaaaacgggacaggtatattcaaacacatttgagttcatttcgtgaccaagggaatcttcgcaccattcctacctgaggagtaacagctgcgaacctgtgcaggtctcagtgagagccagctcacttatagctttgctgtttgaacctgttgtggctgcattttctgtgggccagtgacaactgtgtaaccagaatagatgtatggcgctgaccctctgggcggcattggctcttgggttccttcttgtgcacccaccacctctctgcacagccctctgtt

SEQ ID NO: 660735 - DNA, 3592 bp, Homo sapiens
  misc_feature (481)..(481): n is a, c, g, or t
  misc_feature (484)..(484): n is a, c, g, or t
ccagctccagccgccgtcgctgctgcctgtgtagttgcagccgcggccgcctcccgccagctcgcctcggggaacaggacgcgcgtgagctcaggcgtccccgccccagcttttctcggaaccatgaaccccaactgcgcccggtgcggcaagatcgtgtatcccacggagaaggtgaactgtctggataagttctggcataaagcatgcttccattgcgagacctgcaagatgacactgaacatgaagaactacaagggctacgagaagaagccctactgcaacgcacactaccccaagcagtccttcaccatggtggcggacaccccggaaaaccttcgcctcaagcaacagagtgaggctccagagtcaggtgcgctacaaggaggagtttgagaagaacaagggcaaaggtttcagcgtagtggcagacacgcccgagctccagagaatcaagaagacccaggaccagatcagtaanatnaaataccatgaggagtttgagaagagccgcatgggccctagcgggggcgagggcatggagccagagcgtcgggattcgcaggacggcagcagctaccggcggcccctggagcagcagcagcctcaccacatcccgaccagtgccccggtttaccagcagccccagcagcagccggtggcccagtcctatggtggctacaaggagcctgcagccccagtctccatacagcgcagcgccccaggtggtggcgggaagcggtaccgcgcggcgtatgactacagcgccgccgacgaggacgaggtctccttccaggacggggacaccatcgtcaacgtgcagcagatcgacgacggctggatgtacgggacggtggagcgcaccggcgacacggggatgctgccggccaactacgtggaggccatctgaacccgcagcgcccccatctgtcttcagcacattccacggcatcgcatccgtcctgggcgtgacccgtccattcttcagtgtctctgttttttaaaacctgcgacagcttgtgattcctacccctcttccagcttcttttgccaactgaagccttcttctgccacttctgcgggctccctcctctggcaggcttcccccttgatcgacttcttggttttctctctggatggaacgggcatgggcctctctgggggagggcgaggcccgtggggcagggctggaatgggagacctgttggcctgtgggcctcacctgcccctctgttctctcccctcacatcctcctgcccagctcctcacatacccacacattccagggctggggtgagcctgactgccaggaccccaggtcaggggctccctacattccccagagtgggatccacttcttggttcctgggatggcgatggggactctgccgctgtgtagagaccagtgggatgggctctacctctctttctcaaagagggggctctgcccacctggggtctctctccctacctccctcctcaggggcaacaacaggagaatggggttcctgctgtggggcgaattcatcccctccccgcgcgttccttcgcacactgtgattttgccctcctgcccacgcagacctgcagcgggcaaagagctcccgaggaagcacagcttgggtcaggttcttgcctttcttaattttagggacagctaccggaaggaggggaacaaggagttctcttccgcagcccctttccccacgcccacccccagtctccagggacccttgcctgcctcctaggctggaagccatggtcccgaagtgtagggcaagggtgcctcaggaccttttggtcttcagcctccctcagcccccaggatctgggttaggtggccgctcctccctgctcctcatgggaagatgtctcagagccttccatgacctcccctccccagcccaatgccaagtggacttggagctgcacaaagtcagcagggaccactaaatctccaagacctggtgtgcggaggcaggagcatgtatgtctgcaggtgtctgacacgcaagtgtgtgagtgtgagtgtgagagatggggcgggggtgtgtctgtaggtgtctctgggcctgtgtgtgggtggggttatgtgagggtatgaagagctgtcttcccctgagagtttcctcacttacataaagctcccttgaagcaagaaagagggtcccagggctgcaaaactggaagcacagcctcggggatggggagggaaagacggtgctatatccagttcctgctctctgctcatgggtggctgtgacaaccctggcctcacttgattcatctctggttttcttgccaccctctgggagtccccatcccattttcatcctgagcccaaccaggccctgccattggcctcttgtcccttggcacacttgtacccacaggtgaggggcaggacctgaaggtattggcctgttcaacaatcagtcatcatgggtgtttttgtcaactgcttgttaattgatttggggatgtttgccccgaatgagaggttgaggaaaagactgtgggtggggaggccctgcctgacccatcccttttcctttctggccccagcctaggtggaggcaagtggaatatcttatattgggcgatttgggggctcggggaggcagagaatctcttgggagtcttgggtggcgctggtgcattctgtttcctcttgatctcaaagcacaatgtggatttggggaccaaaggtcagggacacatccccttagaggacctgagtttgggagagtggtgagtggaagggaggagcagcaagaagcagcctgttttcactcagcttaattctccttcccagataaggcaagccagtcatggaatcttgctgcaggccctccctctactcttcctgtcctaaaaataggggccgttttcttacacacccccagagagaggagggactgtcacactggtgctgagtgaccgggggctgctgggcgtctgttctttaccaaaaccatccatccctagaagagcacagagccctgaggggctgggctgggctgggctgagcccctggtcttctctacagttcacagaggtctttcagctcatttaatcccaggaaagaggcatcaaagctagaatgtgaatataacttttgtggaccaatactaagaataacaagaagcccagtggtgaggaaagtgcgttctcccagcactgcctcctgttttctccctctcatgtccctccagggaaaatgactttattgcttaatttctgcctttcccccctcacacatgcacttttgggcctttttttatagctggaaaaaacaaaataccaccctacaaacctgtatttaaaaagaaacagaaatgaccacgtgaaatttgcctctgtccaaacatttcatccgtgtgtatgtgtatgtgtgtgagtgtgtgaagccgccagttcatctttttatatggggttgttgtctcattttggtctgttttggtcccctccctcgtgggcttgtgctcgggatcaaacctttctggcctgttatgattctgaacatttgacttgaaccacaagtgaatctttctcctggtgactcaaataaaagtataatttttacctgcgg

SEQ ID NO: 660736 - DNA, 3641 bp, Homo sapiens
  misc_feature (481)..(481): n is a, c, g, or t
  misc_feature (484)..(484): n is a, c, g, or t
ccagctccagccgccgtcgctgctgcctgtgtagttgcagccgcggccgcctcccgccagctcgcctcggggaacaggacgcgcgtgagctcaggcgtccccgccccagcttttctcggaaccatgaaccccaactgcgcccggtgcggcaagatcgtgtatcccacggagaaggtgaactgtctggataagttctggcataaagcatgcttccattgcgagacctgcaagatgacactgaacatgaagaactacaagggctacgagaagaagccctactgcaacgcacactaccccaagcagtccttcaccatggtggcggacaccccggaaaaccttcgcctcaagcaacagagtgaggctccagagtcaggtgcgctacaaggaggagtttgagaagaacaagggcaaaggtttcagcgtagtggcagacacgcccgagctccagagaatcaagaagacccaggaccagatcagtaanatnaaataccatgaggagtttgagaagagccgcatgggccctagcgggggcgagggcatggagccagagcgtcgggattcgcaggacggcagcagctaccggcggcccctggagcagcagcagcctcaccacatcccgaccagtgccccggtttaccagcagccccagcagcagccggtggcccagtcctatggtggctacaaggagcctgcagccccagtctccatacagcgcagcgcccccatctgtcttcagcacattccacggcatcgcatccgtcctgggcgtgacccgtccattcttcagtgtctctgttttttaaaacctgcgacagcttgtgattcctacccctcttccagcttcttttgccaactgaagccttcttctgccacttctgcgggctccctcctctggcaggcttcccccttgatcgacttcttggttttctctctggatggaacgggcatgggcctctctgggggagggcgaggcccgtggggcagggctggaatgggagacctgttggcctgtgggcctcacctgcccctctgttctctcccctcacatcctcctgcccagctcctcacatacccacacattccagggctggggtgagcctgactgccaggaccccaggtcaggggctccctacattccccagagtgggatccacttcttggttcctgggatggcgatggggactctgccgctgtgtagagaccagtgggatgggctctacctctctttctcaaagagggggctctgcccacctggggtctctctccctacctccctcctcaggggcaacaacaggagaatggggttcctgctgtggggcgaattcatcccctccccgcgcgttccttcgcacactgtgattttgccctcctgcccacgcagacctgcagcgggcaaagagctcccgaggaagcacagcttgggtcaggttcttgcctttcttaattttagggacagctaccggaaggaggggaacaaggagttctcttccgcagcccctttccccacgcccacccccagtctccagggacccttgcctgcctcctaggctggaagccatggtcccgaagtgtagggcaagggtgcctcaggaccttttggtcttcagcctccctcagcccccaggatctgggttaggtggccgctcctccctgctcctcatgggaagatgtctcagagccttccatgacctcccctccccagcccaatgccaagtggacttggagctgcacaaagtcagcagggaccactaaatctccaagacctggtgtgcggaggcaggagcatgtatgtctgcaggtgtctgacacgcaagtgtgtgagtgtgagtgtgagagatggggcgggggtgtgtctgtaggtgtctctgggcctgtgtgtgggtggggttatgtgagggtatgaagagctgtcttcccctgagagtttcctcagaacccacagtgagaggggagggctcctggggcagagaagttccttaggttttctttggaatgaaattcctccttccccccatctctgagtagaggaagcccaccaatctgccctttgcagtgtgcagggtggaaggtaagaggttggtgtggagttggggctgccatagggtctgcagcctgctggggctaagcggtggaggaaggctctgtcactccaggcatatgtttccccatctctgtctggggctacagaatagggtggcagaagtgtcaccctgtgggtgtctccctcgggggctcttcccctagacctccccctcacttacaaagagctcccttgaagcaagaaagagctctctgctcatgggtggctgtgacaaccctggcctcacttgattcatctctggttttcttgccaccctctgggagtccccatcccattttcatcctgagcccaaccaggccctgccattggcctcttgtcccttggcacacttgtacccacaggtgaggggcaggacctgaaggtattggcctgttcaacaatcagtcatcatgggtgtttttgtcaactgcttgttaattgatttggggatgtttgccccgaatgagaggttgaggaaaagactgtgggtggggaggccctgcctgacccatcccttttcctttctggccccagcctaggtggaggcaagtggaatatcttatattgggcgatttgggggctcggggaggcagagaatctcttgggagtcttgggtggcgctggtgcattctgtttcctcttgatctcaaagcacaatgtggatttggggaccaaaggtcagggacacatccccttagaggacctgagtttgggagagtggtgagtggaagggaggagcagcaagaagcagcctgttttcactcagcttaattctccttcccagataaggcaagccagtcatggaatcttgctgcaggccctccctctactcttcctgtcctaaaaataggggccgttttcttacacacccccagagagaggagggactgtcacactggtgctgagtgaccgggggctgctgggcgtctgttctttaccaaaaccatccatccctagaagagcacagagccctgaggggctgggctgggctgggctgagcccctggtcttctctacagttcacagaggtctttcagctcatttaatcccaggaaagaggcatcaaagctagaatgtgaatataacttttgtggaccaatactaagaataacaagaagcccagtggtgaggaaagtgcgttctcccagcactgcctcctgttttctccctctcatgtccctccagggaaaatgactttattgcttaatttctgcctttcccccctcacacatgcacttttgggcctttttttatagctggaaaaaacaaaataccaccctacaaacctgtatttaaaaagaaacagaaatgaccacgtgaaatttgcctctgtccaaacatttcatccgtgtgtatgtgtatgtgtgtgagtgtgtgaagccgccagttcatctttttatatggggttgttgtctcattttggtctgttttggtcccctccctcgtgggcttgtgctcgggatcaaacctttctggcctgttatgattctgaacatttgacttgaaccacaagtgaatctttctcctggtgactcaaataaaagtataatttttacctgcgg

SEQ ID NO: 660737 - DNA, 170 bp, Homo sapiens
caagacttggagaatcactacaagaaaaactccttgtggtggaaggttctaaggacgggggatcgtttccagtatgagaattcacaagcgactcatggactggcacagtccttctgagatggttaagcagattacttccatcagtatggagccaggagtggaggtggagg

SEQ ID NO: 660738 - DNA, 467 bp, Homo sapiens
  misc_feature (20)..(20): n is a, c, g, or t
  misc_feature (33)..(33): n is a, c, g, or t
  misc_feature (77)..(77): n is a, c, g, or t
  misc_feature (96)..(96): n is a, c, g, or t
  misc_feature (412)..(412): n is a, c, g, or t
caaacatgggaaaaaatctnactctgtcccccngctaaaatgcaatggccctgtctcggctcactgcaacctcccanatccccggtttcaagcaantctcgtgcccccagcctcccgaatagctgagattaacaggcacatgcccaccatgcccagctaatttttgtattttcagtagagttgggatttcaccatgttgcccagggtggcctcgaactccagacctcaggtgatctgcctgcctcagcctcccaaagtgctggaattacaatcatgagccaccactcttagcctctacaaaaaaaatttttttagttagcaggtgtggtgatgtgcacctttagtcccaggaggctgaggtaggaggattgcttgagcctggagaggtcagggctgcagtgagctatgattngccactgcactccagcctgggtgacagagtgagaccctgtctcaagaaaaaaaaa

SEQ ID NO: 660739 - DNA, 200 bp, Homo sapiens
tacgaatcctatcttgttgttgtactgactctaagaatcgaatacatgtcgggaggccctcactgtctccaagacatggcgtatcactgtggctgcaagtcctacggacccaatgaaatggtgtcatagtgatggatttgggttagtgttgaaagccagcctaattgttctccagatgtactctcactcgtggaataaaa

SEQ ID NO: 660740 - DNA, 180 bp, Homo sapiens
tgggtaatgaaaaaccacctcctgccaccaaatattaaaatagtccattgttatcgtattaggaatcacttctattatatgtcatactctaagatcaaaattttcattatctgctcacctgaagaggatgctctttaagattccgttctagcttaaacaataacagggaaaataaactcg

SEQ ID NO: 660741 - DNA, 127 bp, Homo sapiens
ttcagcggtaccctcattgttagcctcctgctccctattttcctcattagcattcccgttagcagggcgtctcttccattttctgcctcttccacaacttccttcttctcctttaagtctttgctgg

SEQ ID NO: 660742 - DNA, 344 bp, Homo sapiens
tttttttatgtttagccccttccattttcaacccccccctaagattccagggggcctggcccagggcccaaaatggtttagggaagcaggatcccccccctggggtttggtccttgcccctcctgcaggggttggcccccgtttttcaaaaacccccccttagggggggcccaggtttaatggtggtggttttaatgggggacccccgcccttggggggccccccgaaaaacctttttttttttctttgggaggggtgggggacccttcagggaatttcccccctccccccaggtgccaagttgggggtaaaggtccaaaaaaaaaaaaaccttgtttttccga

SEQ ID NO: 660743 - DNA, 234 bp, Homo sapiens
tgtcagtgatggcttcacattttgcatataggaagtagaactgtggactaggaaggtgttacccttcttcctgcagatcacagatgctggggtctccatgcttccagccctccggcccctgggcacctatgtactttgtggaccattattatgtcttttccctgtaccagtttatgatctagttactgaaaggcctgtgctgctaattcctttcatacgtatcatatgtttttt

SEQ ID NO: 660744 - DNA, 229 bp, Homo sapiens
tgatatctagaggatcctttatccgggaggggtatttgtcttccctgacatgagtgggatcccagcgaggcctaggcctcagcagggaagggatcccgggcgggcaggtccaggagcagacctgcctcaggcccacagacacaccccaatctgaaagccatgcgtgtcggtgtatataggaaccatgtacagagcccagagaagccccctacatctccccgggatacag

SEQ ID NO: 660745 - DNA, 772 bp, Homo sapiens
tcagttcctttaatgacccccatctccctgaagggcaggtgcaggcagctaggtgatggcaagagatgttcacttgaagatcttgccctgatggaaggcttggcccacatgctggaaggccccctcccaggaaaagtacttctcgaaccaggcgttcgtgggttcctccttcgcgtgccaggactccagtttctccgccatgtggtgtattgactcgtagtccaccgtgccaatcgtggacctcagcggaagggcaagcctcctgtggcctcggaagacccagactccagaaagtggagctgctatgtgtgggtctccaaaaaggatgacactggcgaaggctattcttcctcagtcttgtccagtcgctggaacattccagtgatgagatggcagctcatgaaggtctgagtgagtacttcagggaagcgatactctgagtaccacagggaccagccgtccttatcaaagtgcctcccagaattttggcagtgccacagagagtgtgtcctcatgggagtactggcgcttaaattcatccaacacaagggtactctggggcaggtgagcgaaggggtcctgtggcctgtgggactaagcagccagcgcctgttcacattcatccaatctcctcctcaggagcgggggaggcgctttttctcctcttccgatcacctggggtactgttctctccgtgaaccttctcttccggggttgtccttaggggtggttcctgaccttttagcttaatgggcttttcccagttctccca

SEQ ID NO: 660746 - DNA, 307 bp, Homo sapiens
aaatgtgcttctctatctgaaactaaagaaataactgtaaattcctcaacttttctgaagagccgatactaacctgacattgtcctttctataaaagatagggaacagaaaaaaacttataaaccaacaaaaacttttaaaacactatcctgggccgggtgcagtggcccatgtctataatcccagcactttgggaggccaaggcaagtggattgcctgagcttaggagtttgcgaccagcctgggcaacatggtcaaacccagtctctactaaaataaaaaaattagccaggcatggtggcatgcg

SEQ ID NO: 660747 - DNA, 337 bp, Homo sapiens
  misc_feature (113)..(113): n is a, c, g, or t
  misc_feature (133)..(135): n is a, c, g, or t
  misc_feature (173)..(174): n is a, c, g, or t
  misc_feature (185)..(185): n is a, c, g, or t
  misc_feature (189)..(189): n is a, c, g, or t
attgccccaccatggaggcccagaccacactgaccacaaatgacattgtcattagcaagctgacccagatcctttcatacctgaggcagggaacccgtaacaagaatcttaanaagaattagaaaggagagcnnnaaaaaaaaaaacccccggatctttacaataatattttnnaaaacaggggntatnagttaccccccacaaccaaaacacctcggacaaaggagcgggagagatatcgggaacgggagcgtgatcgggaaagagacagagaccgtgaccgagagcgagagcgagaacgagatccggaacgagagcgagagcgggaccgagagag

SEQ ID NO: 660748 - DNA, 799 bp, Homo sapiens
tgcttgataacaagttttgtactatgggcgtttgcgcgaggttacttttggaagacttgttgtttttagtcacggaaccatcgatctgcgtggaggtagtcccagtgcaaaatgttcgttcacttcttccctggggtaagagtttatccagtgggttttgttccatattgcgtgtttccgacgatgtttttatgcgagagagatcaattatactgggttatctgctgtatagctcccctatccacagtgacggtggctggcatgtttgttttggcagaaattctatgcaagttcccaaatataggtgttggtatggaagtggtgcttttgtactagaaaaccatgtcttgttttgcctatggtctaatgatccccacaaggccggctcaatagtaccattggccatttagaccactgcgtgcaacagtgtccagaagcccttggaaacagcattcaggttctgactcctgtagtacagaaggtggcagtacatctatgggcttgattccccttgcccatcagtagaggagcatttcaatctgctttccatgccttacatcaaggtggtcaagggatctataatctaatttcagggctcaagaccgacccattttaatgtagacctcacgccagtggggtgaggaattagatgctggatttgaagctacgcactcagcctcaagactccctgggatatccctgagaacatggggtttgacggattgtcacactttttcggttcttggtttgatggttttctgtaagaggaatccaataaagttatagccctttactgcca

SEQ ID NO: 660749 - DNA, 205 bp, Homo sapiens
tagaggatacggacaggagacgtaccctaacaagtcagactgatatattcagtgtagtgacaaccagcactgtctcatgggtcctgggtcccctcgctggccctcctgtgggctccatttgacctgctgtgtagtctttttctttttttctttctttctttttatttttttttagaggaaagggtatgtattaatgggggcctgg

SEQ ID NO: 660750 - DNA, 808 bp, Homo sapiens
  misc_feature (625)..(625): n is a, c, g, or t
gtcttaacaagcacttaaattcattagacgcatagaaaataaccatttattattttattatttttatttttatttgagaggaagtctctgtcacccaggctggagtgcagtggcgcgatctcagttcactgcaacctccccttcccaagttcaagcaattttcatgccgcagcctcctagctgggattacagggtcccactctgttgccgaagctggagtgcagtggcgcgaacatgtctcactgcggcctcaacctcctgggctcaggctttcctcctgcctcagcctcctgtgtagctgggaccacaagcactcgtcaccacacctggataatttttgatgtttgtagagacagtgcttcagtttgttgcctgtgctggtcttgaactcctggcctcaagcaatccttctgctttggctcccagattgctgagattacaggtgtgagtcactgtgcccggctcccttctgcttctttcctggatttgtcagtttgtcttgccttatttgtcatgttttccatgaatctctatattgtagtttgttgtccttctgggaaatattcattaggttttttttcggagcagatttttttttttttttggggggaacccctctcaaaancgaaagagaaaaatttgagccagtgtccttatggtggggggcgcgaattccatggaacgagttgggaatatcccgtgattggggggtccctttcttttgtccaagggttatacttcattgtacctttgggtgaaaaagggtggtggaaggtgggatgaaaggtgcgggaataggggaattaga

SEQ ID NO: 660751 - DNA, 284 bp, Homo sapiens
ggggcagcagagagagatccgtctcagaaccaaacaaaaaaaaagcaaagatttttttttttaggagacagggtctggctcccatcggccgggcggaacgatcgggagatcatagctcaggggaacgtcaaactctggggtccaagtgatcctctcccctagggctcccaaagggcggggataacgggcgtgagccatgtgcacggagccaaagcagaaatttttttcctgggatctcacaggtccttgatattttaatgggaaatttcggaactataaaaaat

SEQ ID NO: 660752 - DNA, 371 bp, Homo sapiens
  misc_feature (32)..(32): n is a, c, g, or t
  misc_feature (72)..(73): n is a, c, g, or t
  misc_feature (76)..(76): n is a, c, g, or t
  misc_feature (80)..(80): n is a, c, g, or t
  misc_feature (101)..(101): n is a, c, g, or t
  misc_feature (107)..(108): n is a, c, g, or t
  misc_feature (114)..(114): n is a, c, g, or t
  misc_feature (118)..(118): n is a, c, g, or t
  misc_feature (122)..(122): n is a, c, g, or t
  misc_feature (130)..(131): n is a, c, g, or t
  misc_feature (135)..(135): n is a, c, g, or t
  misc_feature (148)..(150): n is a, c, g, or t
  misc_feature (155)..(155): n is a, c, g, or t
  misc_feature (161)..(161): n is a, c, g, or t
  misc_feature (165)..(167): n is a, c, g, or t
  misc_feature (169)..(171): n is a, c, g, or t
  misc_feature (195)..(195): n is a, c, g, or t
  misc_feature (207)..(207): n is a, c, g, or t
  misc_feature (225)..(225): n is a, c, g, or t
  misc_feature (227)..(227): n is a, c, g, or t
  misc_feature (290)..(290): n is a, c, g, or t
  misc_feature (368)..(368): n is a, c, g, or t
ggccttttatatttacattccctttattaatnccccctcccacccacccaccctccctctccttccctcccnnagncagncatccactttttttcccttcntttccnncatatnaagnaagngagggctnngcanggagagggaagannnaaganggaagncggnnncnnncatttctttacatttctttttctnttattccttcanctccatttccatttacancntctattattttcttttctcaacactcttctcctaatccccctcttccacccctttctcctccntattcacctcccattataattcctttcttctcttttttctcctacccctattttctcatccctttctcccctttcttntta

SEQ ID NO: 660753 - DNA, 298 bp, Homo sapiens
ggtgccccacacaggctctccatgatgggaaccagtggttagtggcttcaaaggcccagctgacaccctccacagcctaatggggtgtcctaaaagtgcctccccctgtattccccttcccagggcagcccctgcccagcacaaaagcccaggaccctggtctctgtcacgcctggggcagggactttggagtgtctaggactctgtagttttctaaagtcccccagctttctccctggctctcctgttctgaacataaaggattgaaaagcggtaaaaataaaatagaacacagagg

SEQ ID NO: 660754 - DNA, 127 bp, Homo sapiens
atctagaggaggtggacagcacagagaggatcttcaaaacagacaacttgacgagtttcattcgccagctgaacctctatggattctggaatacatccttgcctcctctgtgcctcctctgtgctgt

SEQ ID NO: 660755 - DNA, 228 bp, Homo sapiens
gggtgatccctgctctctgcagcccctttctcacccctggtccccacggcccctggctctctcccctctgctagaatctacgctgagggattggtaggggagggggtggtcacgcactgggtgggagatctaggtgcccccgtgaaggccggacatgaaagggccagggcggacaaggtctttagagacactcggtggcatccctgctccgtgatggccctgggtccc

SEQ ID NO: 660756 - DNA, 338 bp, Homo sapiens
gatcaacacctcataagaataggatctttgaaatgaaccctctttttgcttaccctgacctttattctactctctaacacattgtggacattttcaatgaataggattctcattatctcagggtgttaactgtatttttagaatgaatatcttttcctctttatctaaatgaaaaggattaagacgaagttggaatctccataagatgaaaatatttcaaagcatcttctaagcaggacaaacaacagtaagcatggcaagtgcaataattcagatgagcacacagatgaataagtcaaagcatcgccttaaggaattcatttgtttctctgctgcct

SEQ ID NO: 660757 - DNA, 259 bp, Homo sapiens
gaggatccccattcattaccgggggaggggtgtttaaagtggcgttggctatcggtataattgtctgggtcgcctacgaagtctggtgtacacatagtgttaatgtcattaacgagataactgaatacgaagtacgccgagggcgtctttgattgtgtattaagggtggaacgtgattttatcggaatgggagtgtgattccctaggtgggtagttctgggctaccgagcctcgaatttcgttaatcctggttcattag

SEQ ID NO: 660758 - DNA, 396 bp, Homo sapiens
ctgacttgaggatcccatcgccaacacaggactctcctaacatgtaggaagagtgagagcaaatctgacagcatggactcatcagggtatgaagatggtttgggtgttttgtttgttttgttttgtttttgagataggatctcgctgtgttatccaggctggtctcgaactcctgggctcaagggatcctcccacttcagcctcccgagtagctgggacaacaggcatgagccaccccacctggctggtttggggtttttttgtttggtttggggttttgactacttttttgggggaaatgtttgggcaagaacatgtgaggacagggataaggccgacagggggctatctggcatttagaatgtgttgggcgataacatcacgggtaccgagctc

SEQ ID NO: 660759 - DNA, 445 bp, Homo sapiens
gggatggtaaagtacagtcgtgcttcgctgcgaagtcggatctggtccagttaaagagtgtcgcagacaaagtatctgacagattagagaagaatcccccccaagatgccccaacactgaactacagacaaacactattttatttaaatatcggagacagctttctaaaagtatacattctctaataaaaatagtttattattttgaatgattaacggctttctacacaactttacatcacaacatgtaaccttctcagcacgtaacatctgattctaacagcacatcatgctattccttctcatagagccttcagagattcaatgctaaacaaatttccttagctggcatcaaggcactgatcactctacaggcttcaagcacaatatccaaagactgcacatgcctctgagtgacagtgtctatcccatcactgaagcccacg

SEQ ID NO: 660760 - DNA, 207 bp, Homo sapiens
acgcgttgattacagggttgggaacagctcgtacacttgccattctactagcatatactggttagtgaggtgaacctgtcgctcttctttgcgctgagctaaagcttaatacaatggctttgtagccacaattctacctttcaattctgtaactgctttagtggcttcttctggggaggagaaacatacaaaaccaaaaccatgctg

SEQ ID NO: 660761 - DNA, 415 bp, Homo sapiens
ccaggagagctagaaagaacttaagcaaatttacaatgaagagaagaagcccatcgaaaagagtgggtgaaggatatgaacagatacttctcaaaagaagacatttatgcagtcaagcaaacatatgaaaaaaaagctcatcatcactgggcataagagaaatgcaaataagaaaccacaatgagatgagataccatctaaccccagttagaatgatgatcattaaaaagtcaggataaaacagatgcttgagaggatgtggagaaataagaatgcttttacactgttggtgggagtgtaaattagttcaaccattgtggaagacagtgtggtgattcctcaaggatcgtagaaccagaaataccatttgacccagaaatcccattactgggtatatacccaaaggattattaat

SEQ ID NO: 660762 - DNA, 1255 bp, Homo sapiens
ttgagcggccgccgagcgggtgcgggtgcgggcgcatctggtcatcaccgcgcgggtcgcgcagtgtgacaccgtgcgtaccggtcatgcggctgcccgtgccaccggggcggaccggggtaaacccggaggcctatgtcccattgaaaacgagttaagggtgtctggggacacactttatcctccccctaagcctggattatccggggggggtgcccctgagccactcttatgccccccccttattggttctgccatcacaatgacctcgtggggtcgcccttgtaccgttggtgggcgcctttatgcacgacgcctgtccctgcgccactgacggtgtcagggccttacctgccttgctgtgtcagcacgtgcaggcgctaccgaagggatgcgtcagtgcaaacacagtctacccatttcaaacgggtacacatcgaggttgtcactcctacccagttgtccgtatggttgagagttgcaccgtgatttcgcctcctaacatagtgtgcgctttaccctagttgactatgcgttgtggaacccgcttcttagagtcccccagaaaaaatgcccgggattgagagagtaaccacctttgagtctaacgtttgcagcaaaaattggaatcgtaccgggacggatatttggtaagacgattagcgtaccagcgccaccttaatgtggccaagcaccacgacgtgggtgctcgaattttccccccttccggaggggggaaacaccccctcggaggtccaaatactcaaccgaggaatccctgagaggacagacacgactagtagagcaaccggtgtttggccgcctagtgtacatctactggggtagtgacacatcgcatctgaccagtgatggccaagcgaaaagtccacgagcagtcgaaaaccaacagaaggatcatcttccacgagatcgggcgacgaacaagacaggcacttggccgccaacagcactataagaaagttgagcggcatttgagtatgattggagtactagtggttcaaaagcgttcgccctcaaagaagaccccatctgggcctaggcacaagagtcgtatgcccaacagcgcttttggaaatagagtaatgcatacaaagggaggacgctacacatgtacattcccgcctattacacacatagagaggtgtttccaacgagaatatattcccacctgtttaacacagaagccccattgctaaggtacaataatttcaccctcccccggtcgcttatcacg

SEQ ID NO: 660763 - DNA, 397 bp, Homo sapiens
  misc_feature (35)..(35): n is a, c, g, or t
  misc_feature (64)..(64): n is a, c, g, or t
tgagtaaattccatctcaaaaaaaactactttgcntcatccacagaagcaactcttctagcatntagaatggtgaatgatctccagaagcttttcaatttactttgcccagatccatcagaggaatcagttatctatgacagatgtagcctagcaaaatatatttcttaaataagaagacttgaaaggcaaaattactccttgacctatgggctgcagaacagatgttgtgttagcaggcatgaaaacaacatgaaccttcttgtacatcttcatcagagctgttggatgaccaaatgtattgtcaataagcagtagtattttgaaaggaatctttttgtgaagccagtagctctcaacagtaggcttaaaatatttaataaaatatgctgtaaaca

SEQ ID NO: 660764 - DNA, 416 bp, Homo sapiens
gcctgtgtacaggcttgcagtgtagcaggatgctatctctactcagaatacaaaattagccgacatggatggcgctatgcgactagatcccagctactcgggaggccaaggaaggagactcacttggacccagggttgctgagactagcagtgagctgagatcacaccactgcattccagcctgggtgatagagtaagactccatctcaaaataaaaaaaacaaataatcattattctagtacatatctacctcaacccaaacatccagtgcaaataggtcatcttaaaaagacggattgccatgaaaatcatgtccgatcacaccctgcagcctcggctatggccatgaggcggtcaccctcttctatccctatgagttggttaaactccccgggagagtaggaacctgggcccc

SEQ ID NO: 660765 - DNA, 403 bp, Homo sapiens
ccactaggcgcacttctagattgtgaaaaatagggaaggcaggcttgtctagctgaagagagtggtctatgactactggctagaatagaaggaatgtgtcacatactcgggacgtcctgaactttagcatggcttactttgcttagatgttatttagcaaagcccatgaatataccaggattacgatcgttatcagtgcttaacctggcttatatcagaatgacggagtagggttttttttgttctgttttttctttgtttgttttgagaggagtcttgctctgtccccaggctggagtgtcagtggtgcattctcggctcattgtctcctccacctcccagttcaaatgattcccctgcctcagcctcctgagtagcttggtgcagaagtgcgcctggtgtg

SEQ ID NO: 660766 - DNA, 625 bp, Homo sapiens
  misc_feature (19)..(22): n is a, c, g, or t
  misc_feature (71)..(71): n is a, c, g, or t
  misc_feature (353)..(353): n is a, c, g, or t
  misc_feature (443)..(444): n is a, c, g, or t
  misc_feature (446)..(447): n is a, c, g, or t
  misc_feature (451)..(453): n is a, c, g, or t
  misc_feature (455)..(457): n is a, c, g, or t
  misc_feature (460)..(460): n is a, c, g, or t
  misc_feature (462)..(462): n is a, c, g, or t
cataagcgtgattggcatnnnngggcaagaaaagccgcgatggggatagcgggctgaaaggtattcactangagcttgagtaaccgtacaccgccggctgtgaaaaggttgtgaacggccagacacgagaagcccggcgcatggccgggctctctgaatgaaacttatcaatcaagctgcgcttctgcgcttcattgcgatggcaattgaacgcagaacactttcgtttgcgtttactaggcgcagatgagatgtgacgtagctcactcctttctccaaaaccataacgccaaaaagctcgtcagcgaaggattcagaaatagaatgcacgttgccgagatcgattgtgaatnttgggccgctttctagctggcaaggatcgcccggcgctcttgagctgccaaatttcttgatgcggatccgttctctcaaaggtataggcnncnntgannngnnnccngntggtacataatgtcatctatttcagcagatgtcgggatcgcctatagcttgcgccatcttcgattcctgaagggttagcgagattgcgacccccttccaagcgaattagactcttaaagctcaatttccttttaagctgcaaatggtgtccgatacatgttag

SEQ ID NO: 660767 - DNA, 265 bp, Homo sapiens
gggaatggggggcccgggggggggttttaccaaaaaaaaggccccttcttcaaaggttcctttaaagggggggtttcccccggggggaaaaaccccatatttttcgggggatcctttgttaacccccccgcaaattttttttttttcggccccataaggtccagaagccgggagaaaggttttttcaaagggggggggaaaaaagggacccccttagattttttgggccaaaatggggggcaaaaaaaaaacaggtttggccata

SEQ ID NO: 660768 - DNA, 192 bp, Homo sapiens
cgtagccgcactgttacagtttaccgtgcacactgcgttcacgatatcttctctggcagttcaattcgttgtgacccatacgccaagaagaaacttcaggaatttggtgatgatagtccatatccttatgatcatcgcctttccctaaggactctccgagcgcctctaactcttcaattgtggtgtattcct

SEQ ID NO: 660769 - DNA, 136 bp, Homo sapiens
gaggaagtgtgagagcggagaaaaggtttgttagcagaatctcaacaaacggtgcagatttcgtgcagactgtaaaggagagtggcatggtgtaggccctcgtcatagtaggagagccgtgtcaagaagcatgagc

SEQ ID NO: 660770 - DNA, 373 bp, Homo sapiens
  misc_feature (44)..(44): n is a, c, g, or t
  misc_feature (61)..(61): n is a, c, g, or t
  misc_feature (229)..(229): n is a, c, g, or t
  misc_feature (255)..(255): n is a, c, g, or t
  misc_feature (333)..(333): n is a, c, g, or t
  misc_feature (338)..(338): n is a, c, g, or t
  misc_feature (364)..(364): n is a, c, g, or t
ttctttttttttttcgatatggagtctcgccctgggcaacaagngcaaaactctgtctcanaaaaaaaaaaaacaatctaaaatctttcctggccgggtacgtggctcactcctgtaatcccagcactttgggaggccgaggtgggtacatcacctgaagtcaggagtttgagaccagcctggccaacatggtgaaaccctgttggggttaaaattctaaaaatacaanaatacaaaataaaaatacaaaaattnaaggctgggtgcgttggctcacgcctgtaatcccagcactttgggaggctgaggcggggcagatcatggaggtcaggnagatnggagaccattcctgggcttaacactngtggaaacc

SEQ ID NO: 660771 - DNA, 203 bp, Homo sapiens
gacatctgaggatccccgtccttatcatacctacccctcatttgtacattataactcagaaatgccccacctacaacatcttttcatgttccactgcatggaacaaacttggctagtagtttagttctttctataattctgaatactttttgactgctaattctcttgggaaaagccaggatgaaggtaggtatgatgaagga

SEQ ID NO: 660772 - DNA, 684 bp, Homo sapiens
caagcgtagggaataacggtgacatgtaaactccgttgcgatgacgctccgggttaggggccccctacctccgggtgtatgtatcgggcagcatatatcttgtgcgtttcatggcgcttccgggactggatatgccctccacttcgggatgattgacttactccacgatcgccgcgataactcgtgccctctccgaaccaagtagtactcaaaataaccgctcttctaacaaggggtcttcagaaatcgttagtccgccaaagaagagttttgtaagggaagatttaggaccaagaagatgttagaaatcttttgcggccgtgcctcccccgttcacaccactcactgggggcgaccgctctggcgatgattactcccgggtgttccgagtgcacgaataaatctcacgtctctccggagcgcccgagtgtggttcaccacaagatcaggttgccccccgccttatttctcttgcttaaataatttcccccaccaccctggggtggtcacatacctcacgccgcccactgatgctaacaattacccctcctgtctcccccggtggacccctcttcattgttttacccccttctcctcaactatctcctccctagtccactctccactccccgcgaactatttaccgggtatgttctccccccaatcaaatatcaaacaaaaacc

SEQ ID NO: 660773 - DNA, 759 bp, Homo sapiens
cagagaccatggagggaacatctgatattggaaaaacatgaagcttgtgatacagctcagctggaacaaagctattactatggtgctttaactgcctttataccctttgcagaaatcaagccacccctgtgggctcagggctcacgtggagggttgcgggctttgtggcgcatccagagggaagacaatacatccctgaatcttgtggctaataatatctccccttagagacctctcagtacatgacagacatggaaagacatgatcagtcccagtgtggcacctgatgcatgctgtcccttgaagctggagggcactagcatagtgaggcactagagtccagacccaggggcttgaaatgataagccgaggcacttccccagaggaacaggtaagcacctgccctcagtttccccgtctgctcatggtctacctctgtcctctctcccaggatgattggtttcccttcctctagcaggtaacgggaacagccccgtggtgtgtgggggaggcagagttgtgcctcccattcactgcccctaagtggtgggtgggagctggcggggacggtgagggcagccgagtcgtcgtgggctctcgcagtgatagtggcatgcggggagcagctcgcgggtggacaagtggtcattcgctcactgtatctttgccttttgacctcttgattggctctgcccctggagcagctatttggctgacttggtgaacgagccatcttctggggactatcatagagtctcc

SEQ ID NO: 660774 - DNA, 237 bp, Homo sapiens
attcggcatcgggtgggaggattgctaggaggtcaggaaactagcctgggcaacactcgtgagaccctgtctctatggaaaaaatacaaaaattagccaggcttcgtggtatgcacctgcagtcccagctactccggagctgaggtggaaggactgcttgtagcccgaggggtcgatgctgcagtgagctatgatcacactactgtactccagtctgagtcacaaagtgagactctg

SEQ ID NO: 660775 - DNA, 259 bp, Homo sapiens
tagaggatcccctccataatgtgtgcccaggctggcctgaactcctgggcccaggtgatcctcctgcctcagccttccgagtagccaggaatatgggcatggcggcttcaatctttttgattcaagaggcaattattaagttcaagaagccgcaattattaagttcaagatggggttatctaaatgaccacattacttaaataagaaaatactgcaacaaaagcccatttgataaagcaaatgggcacacattatggag

SEQ ID NO: 660776 - DNA, 845 bp, Homo sapiens
  misc_feature (793)..(793): n is a, c, g, or t
  misc_feature (809)..(809): n is a, c, g, or t
  misc_feature (825)..(825): n is a, c, g, or t
aacaggtacgaaaaaatcaggctactaagcccactgttaatatagacgcagaccaattgttaggaacaggtccaaattggagcaccattaaccaacaatcagtgatgcagaatgaggctattgaacaagtaagggctatttgcctcagggcctggggaaaaattcaggacccaggaacagctttccctattaattcaattagacaaggctctaaagagccatatcctgactttgtggcaagattacaagatgctgctcaaaagtctattacagatgacaatgcccgaaaagttattgtagaattaatggcctatgaaaatgcaaatccagaatgtcagtcggccataaagccattaaaaggaaaagttccagcaggagttgatgtaattacagaatatgtgaaggcttgtgatgggattggaggagctatgcataaggcgatgctaatggctcaagcaatgagggggctcactctaggaggacaagttagaacatttgggaaaaaatgttataattgtggtcaaatcggtcatctgaaaaggagttgcccagtcttaaataaacagaatataataaatcaagctattacagcaaaaaataaaaagccatctggcctgtgtccaaaatgtggaaaaggaaaacattgggccaatcaatgtcattctaaatttgataaagatgggcaaccattgtcgggaaacaggaagaagggccagcctcagccccccaacaaactggggcatttccagttcactggttggtcctcaagggtttcaaggacacaacccctacngaaatacccccacttnagggagtcagccaatnccacaattcaacagttgtcc

SEQ ID NO: 660777 - DNA, 791 bp, Homo sapiens
  misc_feature (141)..(141): n is a, c, g, or t
  misc_feature (163)..(163): n is a, c, g, or t
  misc_feature (165)..(165): n is a, c, g, or t
  misc_feature (171)..(171): n is a, c, g, or t
  misc_feature (234)..(234): n is a, c, g, or t
  misc_feature (303)..(303): n is a, c, g, or t
cggcatttccaacgagctccccgacattggagatgctgcctggctggaggactatctgagaacctcaatgtctagtggaaacttacgtgccctcgattccaaccaggctctaccccatgaacaaattactcttgctgagcnccagtgtgagtagaaagagctncnatatcnaagctgctaggaggattacctaagataacgcagccttgctcaagacaaacgttcaggaaatcnaaatcggtttggagatgaaatgggaaagacaagagcagctccaaggagagaagaacgtccagaaaaccnagaaataggactggtaaagggtgctgaccaggtccctggagctgcaccccgccccgtgcgcctccccagccccccggccgcaccgtgcccaccccgcgctcgtcgtccccctcgcccccagcgccaccctgcactgcggacccgggaccgcctgggaaacgccctggtctgacatggcttggggctctgggcagaagccaggtctgaaaaccaaggttggggcctcatgtgttagtctggaagcaccaagcaccgcataccaaaatacctcgaggcaaccgtatggcttttttttttttaattaagttgttcccgggcggtggctcacgcccgtaatcccagcatgttgggaggctgaggcgggcgcgtcccttgagcacggaagctgaggctgcagaaggctgtggtcgcgccactgcactccggcctgggggacagagtgagcccctgtctcaaaaatataaaacaaaataaaaaattaataatta

SEQ ID NO: 660778 - DNA, 461 bp, Homo sapiens
  misc_feature (12)..(12): n is a, c, g, or t
  misc_feature (416)..(416): n is a, c, g, or t
  misc_feature (458)..(458): n is a, c, g, or t
ctaaaagccccngttaggaaaccccccggagtatgccattgtccatggtgggtaaaaatccgtccagtggccagccatggatgttgccctatggaaagccagaggaaggaatcctcaaataaaggcccaagggtgtccatgggtcacctgacaaattattgccatagactgaggttcaaaccccggtatctgtgctgaacgtggaggctcacatctgtaatcctcaacactttgggaggctgaggtaggagggtcatttgagcataggagttcaagattggcttggacaaaatagcaagacctcatctctaccaaaaaaaaaattagccactcatggtagtgctactcaggaggctgaggtgggaggcttgcttgagccaggagtttgaggctttagtgaaccatgatcacaccanccgccctccagcttgggtaacaaagctagaccctgtctcttnaat

SEQ ID NO: 660779 - DNA, 272 bp, Homo sapiens
  misc_feature (68)..(68): n is a, c, g, or t
tagagcgactccagccgcaggtgttataatttggcatctataattcattcttatttcttgttcctatnttattgtctgtccctccagaagacatctgagcaatatttcagtaggcctcctggcttattcctggccttactggaaaatcatcagtgcttcaccattaactataatgatcactgatagcttttaatgaataattgtcatcaagttacagtttcttttttttttttcgttttgggtttttttttttttttttttttttttttttt

SEQ ID NO: 660780 - DNA, 217 bp, Homo sapiens
cagttgtgacccgcttgatttctcataacgacctaacttatcaagacgttgtctgtttcgcgccggaaacaactcgaattgggtcatttgatagttgtttccacgttgtcgggcatgtgatgcctcctggtttggtcatgtggtggacaggacagagcacgtaaaggactccagccgctcctcagccgaagagcctcagtgtgcctctttctgtggc

SEQ ID NO: 660781 - DNA, 457 bp, Homo sapiens
aattcggcctttatggccggaagggaaaccatttttattacccagttttgggaatggcagaccaagggctggtttgggtggtttttcttttttaggaaaaccttgcctaaaaggttaacctggcaaaaggcttgtattgggaatttcctacgttttagtcgagtattttaaagccaaattttaaatttttttcaaattgggagtttaggatttagctgtaaagggggtttaaattcctttagaggcctcataaaaggagacttttaatatgttaaggtttattaaacctgaaccaggattattttccatttgaaattttggaatagtttaaaagggcttccgaattcttggttggaattgggccattgcaaaactttagggcagagtttatatttagctaacctgtaatgttaattaagaaaggcttaaatcttcaattcttaatattggtaattct

SEQ ID NO: 660782 - DNA, 107 bp, Homo sapiens
caaaggtttttttaaattccgggccagctatccaatggaatcctttccaaaatggagagttccataagataaagcaaatgaataaagccaaatgcttgtgttgccca

SEQ ID NO: 660783 - DNA, 998 bp, Homo sapiens
gagggactgtagttatgtcggtgcctttacctgtaccagtggacaggataccaggtaggttcgcagtggatcctcgaattattacacatcgaggcagcaatggcctataatcatgaacgctattacagacaacatggatcgaggtatctcgctattccttatggcgcttggacatcacccatgctgtcaccataggccagccacaaaatcaggcatcaggcagaaggcatcaaccatgagcaaaatcggaaatggtaaaagtgatacaaataattccggacctgaaattaataggattcgaacactcgagagaaaaagccgaactagaaccaaaacaggtgagttggaatcagatccacgagaaagcagaagtcctgaatcaacgtcctagtgtggtttatcccagtaccaaatttcctcgccaagataatctcaacccagagaacacatagaaggatcttgccccttcctgtctccccagcgcagagtatgcaatccctaatcgccactttcatccccttccccagctaccaagagcaccgcttgccagagttccacagcagcacaccttggtgaaatcagggagcgagaataagttggctgaacaaccagatcgggataccagctcagcgaatgaggtagtccagcagcaaagtcagttgaatcagcagctcagcagccacctcctcagcattgtctcctgctatcaggcggaaccaaccagctttgtaatagtgcactgcccatcggcacagactcctcccggagaagctgattcggagcagagaccctccatgtggagaaaggccagtctctgggagccagacaacggcgcgcactcctgatttcgaaagtctgggagaccccgggtaccaagggggcgcacgctaaggaggggcggcaaaaagagacgggagccacaggggacaccgcacaggggaccaacacacacaaagccgagacaggggacacaaggaaaacagagagcagcaaaacca

SEQ ID NO: 660784 - DNA, 102 bp, Homo sapiens
  misc_feature (4)..(4): n is a, c, g, or t
catngcgaactcgcgaacgatctccagggtctcgctccagcgggcgccgaggccgccgtattgggtggggatgctaagggccagcaagccgctttggcgcag

SEQ ID NO: 660785 - DNA, 198 bp, Homo sapiens
tagtcgagctcggtcgaaacctaatacgtctccagcattattattttatttttaattttgtcttttgtctttttagggctacacccgtggcaagtggaggttcccaggctaggggtctaattggagctgtcgctgccagcctacaccacagtcacagccatgccagatccagaattgcatctgcaacctacactactg

SEQ ID NO: 660786 - DNA, 2089 bp, Homo sapiens
gaactttatagttttttcaaaatggcagatacttgccttatcagagcagaaggttagcttggtgattgtacaagtgttgtcaatttctagtttatacttaatattcctttttctcacctgctacttacatcaccaaacactcacacagtctgattataaaatattgagactgacagtcatatagaaccagtttcataacctcattaccatgtacacccagctcagtacctctccagactgcaaaccctttgagggttccggcctggcttttctttatatttggggaaatgttagagaaaacagcatctaaaactggaaaccttgacttaaattagccatttcttctcatcctaaattgagagacatgagttctaaatggcagagaccatttataggagaatgccaaagagagcagaagagaatgggaagcctttcccacagcagaaactttccacagcagagacaatagactgatccctatcacatcccctaaatatttcttctgacacctggatgggttttgacaatcatagaagcaaactggacagagtgccatttacttctgtgccatttcatactggggctttgcacagaataggaaatgcattgtctaggttcctctagacctctaggttcccttctattctcagaagaaacttaagttatgcttgagtataacttgagtaggggccaggtaggggcagcattgtgggattcagccacaatggtgtgattcaatctgccctctggtctttggttccatttaacgtgcatttattgagcagctaacttgagtcagcactgtactaggtgctatataccagggatgtacaaaacagatttgatgttgctgattaagaaagtatctgtacaagttacaaactcacctcccagagcacttgccctggagccctggagcttgccccagtcttcctcctttctaagatcaccacttacccaactgggaagagatcttggtctgcttgttttccatacctctctggtaggaggcaaagcgatctgcttgaaaatatgtctgaaagataatcagcaaataatttcaaatcttggaactgtcattatgaatttactgccattagattgtattgaggtccctgaagtcatggataaccagaagggggaatttgaagattccatttaataaaaagaagttgatacaaagaagctaagatatataataaaatttcatagttggaagagaacatgatgcttctgtattccaattactgattataccttttgttcatagtcttttaaatctgagctctttggcaatcccatttcagccgctggtctcattaggtaccatcctttctccctcagaattaattttcgcttctggaatcagaatgtcattcttaagggtctcccttattagtacctttaggaccaagttcaaactacctagcaggacataacaggcccttcacaatataactccattctattattttgacctcttctctccaacctcctttatgcactagccacagtaagtgtctgctattcacacttcagcacatatgtctctatgctttcatgcctctgtagaagttgtgccttctgcctgcaacgcctctcacctccacactcaccacaattgcaccctccttcacttcctttccatcctttgaactcttgcctatgatccttttgtagttcataagcatgatgattgagtgttcatacacatgtgtgaggtatgtcgcccccaaaccttttatgacattggcacattacctgtctgacatgaaagaaaaataataataaaaattttaaaaatgggcagccaggcgccatggctcacgcctgtaatcccagcactttgggaggccgaggcgggcggatcacgagatcaggagatcgagaccatcctggctaacacaatgaaacaccgtctctactaaaaatacagaaaattagccaggcgtggtggcgggcacctgtagtcccagctactcgggaggctgaggcaggagaatggcgtgaacctgggaggcagagcttgcagtgatccaagatagcaccactgcactcctgcctgggcaaaagagcaagactccatctc

SEQ ID NO: 660787 - DNA, 378 bp, Homo sapiens
gacgatcccgggtcgaagttgccctcacatgtgagttccagaaacactactgctggggtctgaatgtttgaccctcacattggatgccagaagattcctgcctgtggtctgaaagttttattacatcacatatggactccagaatatctgcttccagggtctgaattttttgtcaccttcacatatgtagttccagaaactatctcctgccttatggtctaatattttttgtatcctcacattggatacgagaattctcctcttgtgctctgaatcttggtccctcacctaggattcgagaatattcacgcggggatgtgaatgcttgcacttaacataggatttaagaacactgctcctggggtctgaatgttggtc

SEQ ID NO: 660788 - DNA, 382 bp, Homo sapiens
gagtcacggcaagataaatatatctcttctgtactctctgtggtagaaattactgtcaggtaatgagatctgataaaggaaattatatcaaaacatagcttctattaactctctctaggcagcataggaagttaagagtcatcagaaagaaggagaatgccaacaaaacaattagaaacaaagtaatactcaggtgagattttaaaattttctacaaagtacacatatatacacacaaacacatgtatacatatgcacaggaaaaggtctgaacagctgtaagccaaagacatttctggaaacttggaagaggagactggaattagaagtggcggccgggtctctaatttttagtattctttatcaggactatttatttatg

SEQ ID NO: 660789 - DNA, 215 bp, Homo sapiens
tattatactatataagatctttctgacttaccaattatgactcagtactgcagttgacgaatcacttacttgtagcttttccttctctctctgaagcatctgataagctgtaacaagctaaaatatagtcatcaacaacattagtcattcctaaataaatgcaattattctaaagtccactaaaaaattctctttatgatgagccgactgagtcc

SEQ ID NO: 660790 - DNA, 166 bp, Homo sapiens
  misc_feature (47)..(47): n is a, c, g, or t
tgagagagagagaccgagacagggtcttgctttgttgcccaggatgntccgaacttctggcttcaagcgatcctctcacctcggactcccaaagtgctggtatcacagatgtgaaccatggcacctggccctgccttttccatcttagcacttctcacatactgtg

SEQ ID NO: 660791 - DNA, 663 bp, Homo sapiens
aaggacacacgtgaaggcccaacagtgataagaagcttggcatcaaaaatcactagaaagtctcatgctttttatcgctatttaatccaagtgactgtcacttaattttaataatgctaaacaaactagtttgagagaaatctcagccaatataatttccttaagggcaaggccaatatttcctgaacattaaaactttgtacccatgtaatagtttttcctcattaccctaaggaaaaaagagttgaaaccaattcaaattactgattgaactgaattaccttggaagtaaataccattgaaatatttttactctttacttttctaaataacaaaataaatactgtactatccctgttcagaacttataagaagtctttcatttttgacgaggaaccttaaagttcttatagctctctaggtcatcagaggtaggcaagaccaatccaattttaaatgtctggtgtgttctatcattttttggagctatctttgcttagaaattttagataaacagagcaaatgataaattgctggtaaggcattggaaacaaaatgactactcatagaaccaaataaaagccttccatttgaaacctaaaaaccccaatggttttaatatcctgggtatttaggaaaaaccctaaaggggaaccaaaatgc

SEQ ID NO: 660792 - DNA, 248 bp, Homo sapiens
ccgcctgctgctgaggatgctggagaagcggatggaccgagcggagcacaagggtcgcttcagtacagacacgatgaaagggcagctgccaaggatgtgcacaggctccaaggccagagctgtaaggaacccccagaagttcagtctttcagggagaagatggcatttttcacccgagcctcggaattaatatcccaggctctctctgcatgcattccacaaccgggtaccgacggctcgaacttcga

SEQ ID NO: 660793 - DNA, 238 bp, Homo sapiens
aagagagagagatttcgctctccaaaaaagaaaaaaaaagtaagtcgcccctcactcacagcggacactaaccacatacctttattagtaacgcacaaaagcctaagcctcttaagctttcggtagtacccagcgccatagcccccccaaccccaatcactcaataggcaagcagcgacactccatggcgaccctaacccgtacccttcgacgctcaacaacgccgatacgcgctata

SEQ ID NO: 660794 - DNA, 952 bp, Homo sapiens
gccaaactttttgtggaagaatttttatgagtcgcccccccaacaattggttaaaggggaggttctcccagacccctatcttgagagctcaccccggagtattttggggagacagcttggtatagagccggcgaaatctcgagagtgtgtgccccctctatagaatgtcgccccgcccacgcgctgtttaagagaagacgtccctcttttcgtggggaagtaaaccaccgcactgtgtttttgtgttctctctttccagagacacccctcgcggttagtgcggagatacacgggcagtagaccgccccccactttttgggggaacccacactttctctctggggtaggctacacgagccgcacttataatttgtgtgtatggacttatgagggttatgggacccctgggggtccccttctaggagcggcgttacacagagtgggagcgtgttgaattttggcttgccccgacgtgaacagatcgttgtgtatgcacagagcggggccgctctgcgttcacatcaccacgattaaaaccccctctgtgttacacacagtatgacacccttccccgcagaacttcttttggtttatgcacaggggcaccaccacctgaagtgcgttagagatgtcttccccgcgtgaattcttatatggcccgccacgctagttcttgactgaccccgagtcctcttttttccgctcctttattgggaaactacaactgggggaccacacaccacgcaatcgagaccagctgtttgcaaactttctggggggggggaaggaccctctcttgtgcgtctattcccggagagcttggacatctattttgggatgtatattgctcgcgttgttgtatttaccccgttgattcatagtcactttttatgggattgattggccttgaaccccccaccgttaattttaaagaaatgggtgtaaaaaaaaa

SEQ ID NO: 660795 - DNA, 1335 bp, Homo sapiens
gtggtcgtcgtcatgtattctggggtgggtgtgcgtgctggcagtcgttgtattcgtgctgcgctcgttctcgtttgtaggcgtgtacgtcgtgtgtgggggccccgcgcgctggttgtgccgcaccgtgtttcccccgtattgtgtgatgtgggggcaaaagcacgggggttgtccggagggtggttgtctagaggcgcccgctgcccctattatagtcgtcggcctctttccccctggcgcaggggtgtccccccccccgtggtagaaccattgcggggccccgcctttttggcgctgttgtgcacgcccacgaggttgtccccacgaccgcccttccttggtccaacgggaaaaaatgtggaatgggagaggggtcctgtgacaaaaccaaaggggttgcaagggaaggtcacaaaggttgaggaaccccacgtgagcgccaggaattaattgttaataccggggcgtatattaagaccccccggatgttcgccccagaggggccccctccccgtcgcgcgaatagtgcatgccctatgtaggagggccgcgccgcaatgagagatagatttatagggagaattccagagggagattgaggacccccaggggtctaaacagccgcacctctatacgtctgggtaccgcccgcgaacgtctccgatgtgaccggaccgccagtactcccccaggtgacacccccttagagcccaccaagagtgcgccaaagaggcacctaaacgccaccccgagtcccgcccgcgtgagaatttctgtcccgctctcccgaaggcttgacgccaggcgccggggcctgaggtaaaatggcccggcgttttaccacatcttcgtgacccatccatacccggtgttttagtcgcatccccccaccgaggagagaatatatatagagaatgtcccgacgcgcacattagaggaaatgtgcacccaagagattgggtgagctcggagagcaccctcaagagtggcgttgcgtttgttgcccccgttgcaccccagatgaaatagacacttatttcgccatttatctatcgccacgcccatggggttttttattgattgtttcaccctagaagacagtcttcttttgttgggtgaatacaccaaaccgtggtgtttttgaaaaaagcctcggttgtttcctccatacgcctcttaaaggtgttttaaattgtgttgcatatgctgggtcccacgttggagatttttaagaacttcacttgtttaatttgtaataaaagtttaccacttgattttttccaaaaagtccaccaactgccagcccctgttaataaaggtttttaataatta

SEQ ID NO: 660796 - DNA, 140 bp, Homo sapiens
ctgttcttcagttttatgaaggctgagagactggttcatgacatttaaagggaaaaaagccatctccataacataaaagtgcaaggtggctctccctctctccctctctccctctctccctctccccttctctctccact

SEQ ID NO: 660797 - DNA, 635 bp, Homo sapiens
  misc_feature (2)..(2): n is a, c, g, or t
  misc_feature (132)..(132): n is a, c, g, or t
  misc_feature (136)..(136): n is a, c, g, or t
  misc_feature (138)..(138): n is a, c, g, or t
  misc_feature (149)..(149): n is a, c, g, or t
  misc_feature (154)..(154): n is a, c, g, or t
  misc_feature (201)..(201): n is a, c, g, or t
  misc_feature (203)..(203): n is a, c, g, or t
  misc_feature (300)..(300): n is a, c, g, or t
  misc_feature (305)..(305): n is a, c, g, or t
  misc_feature (312)..(312): n is a, c, g, or t
  misc_feature (316)..(316): n is a, c, g, or t
  misc_feature (321)..(321): n is a, c, g, or t
  misc_feature (336)..(336): n is a, c, g, or t
  misc_feature (351)..(351): n is a, c, g, or t
  misc_feature (357)..(357): n is a, c, g, or t
  misc_feature (410)..(410): n is a, c, g, or t
  misc_feature (419)..(419): n is a, c, g, or t
  misc_feature (421)..(421): n is a, c, g, or t
  misc_feature (423)..(423): n is a, c, g, or t
  misc_feature (446)..(446): n is a, c, g, or t
  misc_feature (458)..(458): n is a, c, g, or t
  misc_feature (554)..(554): n is a, c, g, or t
  misc_feature (559)..(559): n is a, c, g, or t
  misc_feature (586)..(586): n is a, c, g, or t
  misc_feature (615)..(615): n is a, c, g, or t
tntttcttttttttggtttgtggtggaataacaatagcgggctctgggactcacattgctttgggggaggctcaagcttcccagaatcccttgtccctccccactttgggcacttaggggtggggctggggngtgngngggccaaggcngggcntgattgattaaagctaacgagcagacagaaggcactggtgggtcacntntcgggcctgggagagggagggcgtgggccaggccccatgtgacaccaggggctccttggcatccaggcttggcgtctagtcctttcccttccctttnttggntttggcntttnctttngtctctggcgggctnccgggcttggtgccncggatngtctcctggcactgagcattgtagcgcgccttcttcagggtgccttggcggtntttggtgcntntncccccatcacacgcaccccagtnctcaaacttgtncttgcagtcggctccaaactccttcttccagttgcagggcaccctgcaccggatgcgctgggtctgggccccgcaggtttccctcttcggtaaccngggcnggggtccttgctgctgggggtgggggnccccccccgccccctccccgcccctcgcnccccgggccgcccttctctc

SEQ ID NO: 660798 - DNA, 249 bp, Homo sapiens
ctatatccagcaaatttggttcttccccaatgaaggagaaataaagtatttcccagacaatcaaatgccgagaaaattcattactactaaactcaagggagtcctacaactggtggtgaaatgatgatagttactatcatgaaaacacatgaaactataaaactcacaagtaaagcaaacacacaaaggaggaggagaaaggactcaaatgattctactacagaaaaccaccaaaacatggtgacaaat

SEQ ID NO: 660799 - DNA, 130 bp, Homo sapiens
attactccggaacgtggtgggtactgggctgaggagatccccaggcgatcccgaacctaccgactcaaataccagtaccaccagagtaaccaccctactgccccgatcccagactcgacacctatatgat

SEQ ID NO: 660800 - DNA, 530 bp, Homo sapiens
  misc_feature (60)..(60): n is a, c, g, or t
gagtgaaccggccttttctgggaaagtaattccaggccaagtgagcgccgctcctctggnctctgggagtggagacccaaaacgaatgcctgggagactttgggcttcctgaaccctttcccgatgaaaaaccccaatgggcccaccccctcccctttgaagttgggtttttcccctgccccgcccccctcctaattaggggcctagggaaagtcccctttgggcaggaaaacctttttctttcccttaagcccctttttggttttggtttttgccaaagatcttggattccccttttttttttttttttttttttttaaaagccagggttggagaggctttctttcccctaatggaaaccctggaaatttcccgggggggggagagggggactgttttttccccaaattacccctccctttttaaaaatttttggccctggggtttttttttttcccggtccaccctttgggcggccccgggactcttggcccctttccataaaattgtttgggaaataacccccccca

SEQ ID NO: 660801 - DNA, 539 bp, Homo sapiens
agcggaacttgcaacactccgaggcaggaacgccgccgtctggaacgggcaggtcccagcagctggggttccccgtcagcccgtgagcggcatgtccaaccccagcgccccaccaccatatgaagaccgcaacccctgtacccaggcctccgccctgggggctatgggcagcatctgtctgcaggaggtatctgctactggctacccgcagcctggctacggtcaccctgctggctacccacagccatgctctccgaccacccgatgcccagaacgtacggaccaggcatggactatgacgcgcgacgagagagaggagagtgatagacccgggcctgcacagtggcatgaacaggactgagcgaaacacatcaatacagaaaggaaaccaccactcatcaccctggcccacgccacagtcacctgtcacacaccactggatatcatcaccacagcaggaacatgaacaccgcgtcagtgagagagacaagtgcagacaaaacggagaccaatgatgcctccgacgaaaactaacagac

SEQ ID NO: 660802 - DNA, 291 bp, Homo sapiens
ccctgttttccaaaaccccgcccccgggtagggggggccaaaaagggtccccctttcccccccccccaaaaagggggggggccccggggggggggccccagggagtttttttggcaccccccggggggcccccccccccttcccaaaacaccgggggcccccgggggggggccccccccaaaaggcggggggcattttaccaaacccccaaggttgccttttttcccgggggggggtttttttttacccccccctgggaatttttttttaaaaacgggggttcccttggga

SEQ ID NO: 660803 - DNA, 344 bp, Homo sapiens
aacattcagaggccttcattagcacaactctctgacccccttctgttcattcaacaaacccctccccaatgtgagctccaccaggacaggggccagggctgccttatttgtcactgacagcacccaacacagtgccttggcccctgacacagccacactttatcatcccacaatttggggagcaccatcctctaacccaagaacaagcgatgaacaagacaaagcacagctctcaggaagcttatggtttaggggaggagacaaaaaaacatcaaacagctgaaagagtgacaatgctacaaagaataaaaggtggccaggcgaggtggctcacacctgtggtc

SEQ ID NO: 660804 - DNA, 495 bp, Homo sapiens
  misc_feature (51)..(51): n is a, c, g, or t
  misc_feature (249)..(249): n is a, c, g, or t
  misc_feature (464)..(464): n is a, c, g, or t
aggggtgtgaccctaccatgaagaaggacatgaaaacattttgggattctnccaactccaaaaaggttttaacagactgtgatggttaatattgagtgtcaacttgattggattgaaggatgcaaagtattcttcctgggtgtgtctgtgagggtgttgccaaaggagattaacatttgagtcagtggactgggagaggcagaccaacccttaatcagctgccagcactatctaatcagctgccagggnggctaggataaaagcaggaggaggaaagtggaaggactagactggcttagtcttctggcctccatctttctcctgtactggatgtttcctgcccttgaacatcagattccagggtcttcagcttttggactcttggacttacaccagtggtttgccaggggcttttgggcctttggccacagactgaaggctgcactgtcagcttccctactttngaggttttgggactcggactggcttcctggc

SEQ ID NO: 660805 - DNA, 722 bp, Homo sapiens
  misc_feature (43)..(43): n is a, c, g, or t
  misc_feature (76)..(76): n is a, c, g, or t
  misc_feature (113)..(113): n is a, c, g, or t
  misc_feature (117)..(117): n is a, c, g, or t
  misc_feature (122)..(122): n is a, c, g, or t
  misc_feature (141)..(141): n is a, c, g, or t
  misc_feature (149)..(149): n is a, c, g, or t
  misc_feature (153)..(153): n is a, c, g, or t
  misc_feature (170)..(170): n is a, c, g, or t
  misc_feature (188)..(188): n is a, c, g, or t
  misc_feature (213)..(213): n is a, c, g, or t
  misc_feature (321)..(321): n is a, c, g, or t
  misc_feature (448)..(448): n is a, c, g, or t
  misc_feature (467)..(467): n is a, c, g, or t
  misc_feature (555)..(555): n is a, c, g, or t
  misc_feature (590)..(590): n is a, c, g, or t
  misc_feature (617)..(617): n is a, c, g, or t
  misc_feature (645)..(645): n is a, c, g, or t
  misc_feature (703)..(703): n is a, c, g, or t
attactggcttatgaatggctgaaacactcaacaaactaaaanactcttatgaagagcagctttataaaacctacnagaaacattacggccaagacacaccagaaccaaagcntagncatcnccagggaagacggtaacantgattccnagancatcatcatcatcattntcaagtccttcatcactntctttagtaatacactgggcacgtntctctcctgggtttctttttttcttatgaatatatgaggagttatttttctctttgatctggggatgtaagtgagtgatcgtttccctttccaaagcatgcggtaggnagtggtgaaacctctcaattcttttcttgtgttcctccattttttgatttgccaaatttaacaggaagtgaatatattcctctgtgaccatcagttttcccttatggcttaatggaactcctaagcnatgtgtccgccggacagcnaacagagtttttcctctttttcccaccgttatgccagagttcctgaaaccagaatctattgccatggaatgcagaatctgtgcatccngcaattgtcgacacttcacaagaagaacaaatggnttaaatttcaaagtggcatcaccattngctttcttcagagccacaatcacatcancttttacacaaagtttgtgtgttaacagttgccagccacagttttgtttctgaacctnaaaaccatttataccccgg

SEQ ID NO: 660806 - DNA, 932 bp, Homo sapiens
ggtgatagcggtgcaccgcagtatgcctcaacatctacgctcacctccggacgcagctgatggcgagtacttgtgccatgccgcgttcacctacgcttaccacgacaaagaaactaacagattggcatgcacatatgtgacagtaataagagtccgttgtcgttaatcatagattccctgaatgacagtcgcaccgactgagaagaagtgagtgatggtggtgagtcgaatgcgcgtctctcagggccagagcaattagccacgaacgtgccatgtaccttccatcaatctaatacgctttgcatattccctatacagagggacgatttacctatctgggaggttgatctcctaatgcttgggtgagtgccatgtgcgagcaacgatttcgcatactgagaaagacctgactcagagcacctttcagacacatgtaggaccaaggcgcgattaaagaagactagaaaaggattgaacaatacaatcctcacataccgcatgcaatgggaaagccggtataccccctagtatctattgtgagtttcaggacagcaagtgcaactaagggcgatagggaaaaacagactagtgacttggaattcgtaccactttcgaagcacgttacacatctatgggggaaaaacccaatttggcacacagatactgagttaacttagagagaacaattgttcaattgtgggagcgaacatccctatgccaagagtcttgtgtatgacaaggaaccaaattcgtacccaattggaagtatgggagcaccaagaattgaaggtgagtgaataagtgccattaaagtaagtatgacgttggcaactacaatcataagaagatagtgagaaaggaaaaaaaggagagtgggaggaagggatgaattcaaagaaagaaagaacaagaaaaagaaatgaaatgaaaaa

SEQ ID NO: 660807 - DNA, 227 bp, Homo sapiens
cttaccatttgcatttgactaattagttgcttttcaaggactccctatagattattgagtgctggcttgataagtagggccttcaaggatatgttttaggttctccgcaatgattttaaggacagctcttagcttttgccttcaagaagtttgtataggaacttgttcttttccttatcagttcagcttatgagaggcaaattctgagaggcaaaattcttataatt

SEQ ID NO: 660808 - DNA, 1710 bp, Homo sapiens
gcgcatgcgtcagctgcttccacgatgaagctgaacatctccttcccagccacctgcgctgccagaacactcattgcaagtggactgatgaacgcaaacttcgtactctctatgagaagcgtatggccacagcaagcttgctgctgcacgctctggcgtgcaacgcacatggaaacgggctcactctgctgcgtcctgcacactcacgctggctggcgaagcgcacacacaccacaggcctatcccccactgcaacgaccagggctgctcctctagaccccaatgcgcctgtgctcccgccctgccctaactgacgactacacgcggcgcattacctggccgcccacggcaccgcaaagcgcagcacacatggcaccgaaccgcaacacgacgacacacctcccacgccatcgccgcgcatccgccacctcgcccggcactcgccaacactccctgacgcccgatcccgtcaacaccctccgcccacccactcgccaaccaccccagcggacgaccgacagcgggaaatacttcccacattcgcgacccattggacccattgacataacatcacacaacgctcggcccctccggcccaggccattagggggccccacccaaacacagagacgccttaccgccagcgaacactttccacggcaaaagaacacctcctctaccaacacagtccgctctgtcgtacaacagacgcaaccagcaccatcgacgtggcgtcacccagcaggcaaggacagcttcggccagggataaaaccggaaacacgagccccgcctataaaaaagctaaacacaacgaacacctgcggctcaaggcaaacgatcccaccaagcgaggacgccccaagacatcgcccacccccccagacggaacctttaccacaggcccggagccattccggctgcaacacatcccacagcccggcttagatctcccctcggccagagtcgcgacaactaaaaccccgcgcccggcgccctccaaccatagcgcgcctacctcgcgcgcacgacaacacagcatcgaccgatcaacccccgaagccgcgacacacccaacactcacgccacggcacacgcgacaccgccccttgcaccagcacgacctacctcggcccgaaaaccagcctcacacagcggctcccaacccgcgctccgccacacctggcacacgcggcacgggcaccatcaccgcgcaacgcacacatcgccgcccccaaccgaccaccccaccaactctcgcccgccacaccggcaagccacgcggcacgccaccgaccatcgtccaccacactccctggccggaccgacgctcgcatactacccactcatcacgcggtcatctgaagcgtctagccggcactcagccagaacagacagtagcacacaactaccagaggagagctacgacaacacccagacaacgaccagacacccaaggcacgcgcctgaacaagacagacaccggagcacagacagcaagaacagaacacccacaggcggcaccacaaagcagcgcggggccagcgcaagagcaagaccggacactagaagacgcgcagaagacaaggcaagcaagcaggaagccgccacaccacacgccgcgtcgctagggccaagcgcgaggaaaccggtcagagcgccccccacgcgacggcgcgtacacacaccccacccgaaccgcagcccatcg

SEQ ID NO: 660809 - DNA, 629 bp, Homo sapiens
gttactcagaggaatacacctaccttaaaactcccccgataaaataaggtctctaatagctaattaattttggaagaaaagtgattccccagcaatggctccaggcagtgcaggtggcctgtacctagaggcaacagcagtagctactcctctataggtaattcctaccaggaactcagcagaggccccgaagcaacatttgcaacagcaacagcagcagcagaggctgatgaaatcagaaagcatgcctgtgcaattgaacaaagggctaagttctaaaaacatcagttcatctccaagcgttgagagtttgcctggaggaagaagaattcactggctatccaccttcatctgctaataaaaaagattccttttttagcaacatctcacgtactcgctcacacagcaaaactatgggcagaaaagaatctgaagaagaattagaagcccaaatttccttccttcaagggcagttgaatagacctggatgccatgtgcaaatactgtgcaaaggtgatggacactcatcttgtaaatattcaagatgtgatattacaagaaaatttggaaaacgaagatcaaattctgctttcctaggcgggataaaacagatcaagacttctaaaagg

SEQ ID NO: 660810 - DNA, 298 bp, Homo sapiens
ctaagatcctactaatgcttcagtactctgtcgagcagttttgtacagtgtaaatcatgcacacaacagtcaacacgcagacacacatgacacaatgcaatatctatgctactgccaagacactatcagtatcatcccatcttcccatcacaccagccagccagcagcgttctagaaacagccctttggattgtcgatcagcatctccaaagtaagtggcatcttcctccgaacagggagcaggtagtccaccagtagtagaaacaacaaacactagacctccaaacagccatttggt

SEQ ID NO: 660811 - DNA, 569 bp, Homo sapiens
  misc_feature (107)..(107): n is a, c, g, or t
  misc_feature (165)..(165): n is a, c, g, or t
  misc_feature (233)..(233): n is a, c, g, or t
  misc_feature (238)..(238): n is a, c, g, or t
  misc_feature (404)..(404): n is a, c, g, or t
caagcccccccggggcgcgcaggaaagggccccgggtccccggattataaggggccccattgggggcccaaggaagggtcccctcaaatgatttccccaggagggtntggagaggcccccaccttaaaggggtggggttctgggaccgctcccgcgccctcttcncctcccggggaaaagggggtttctaaaattaaaaattcgtggggttaggtccctggccatgaaaaggnccaanccctgggtttcccgggcaaagaagttctgggttgttgtttcaaaaccccaaagggccttttttttgggccgttgggcaaaaatccgggccctccaaaaattgggcccccccccaaaaaaatagggggccccccccccggggaaggggggttccctaaggaaaattnttcccccccccccttgtgaaaacaacaaaaacgggggggccctcgggccgggccgggttccttaaaaggggcccccggggccccgggcccggggggtttttcccccccccccccggttttcccctttggggtttttttttggtttttaaacggggggggctttta

SEQ ID NO: 660812 - DNA, 569 bp, Homo sapiens
  misc_feature (26)..(26): n is a, c, g, or t
atcatttataaaaggaagaaactatntcatgaactagttccattaatcagacataagcatatgcaacatctggaaatattttcttcttatggggaaagttgaacagatcagcttaacaatatttttttccagcatttttgtaaggcattctaacaccttttaaatgcatctgtttgtttctccctgaaatgaaagattattctcatagacatagctgtaaatatgataaagcagccatgtgaatgactcatgtgtgggctgtttttctgttgtcagtaaagttgtatttcctggtgtttatcttacgaataatttggtgataaatgtgttcacctgaaaagttgtcaagatacaagatttagtcatataggaatgtatttctaaatgaatagattaattatgtttgtatagttttatcaaatagccaaaggtcttgagcttagatatccaaaaataaccttgtgtagtaattatgtctttaaataacaggtgcctattgtaatgccatggagtctgtatttaaatatattgataacatgtaaaatgttgataaagaagtttcactgtta

SEQ ID NO: 660813 - DNA, 1034 bp, Homo sapiens
aatgccggccgcgagaccaagggggaggaggggcagtgctggtgctgggtaaaactactgcacaatgcgaaggaatctgggcccccagacctctcgccgcccagctctccagaggcagactgcaccttgcctccttctgctcgagccccaggccccacagactccgggcaatacccacaaacccacagatggcgcgcaacggcggcacccccgtaactgcgtcacgcaccctcgactcgccactcgcgccagagcccgcgagctcgacgcacgccgcgcgattccgtcacagagcggtgcgagagggtggcgcggtggacgcctgccagcagccctggagcccgcgagctgcggcacacgcccggcccgctgcacacgacaaagccccgcccccgcagcgccatccccgcgagccactcgccagctgcgcgaccaacggacctccgacactggcatccccgggcgcagcgccagaccatcccgcgcacacgccacaaacacacacccctcggcgcccccccactggccatacggacagaaaaactcctagcacaccagccagcagctgcccccaccacgcgcgctcgagccactcgggacggcacgcaccgccgcgacacccgcgccaccgcctgccaacaccgcagcgcatcgctcgcccgacccccgccctcgccctaacagcccgcgtccactgcccacgccaccgcccgcaactccccacgggcaacaccggccaacacacccgcacccacgccccccccacaccccccaacggcaccaacccacggcccatcataacaagacggccaggaccacacccacgccacaccccgctcggccccgcccctcccgcccgcacggcacgggatccacactggcaaccgccgccacgcggcccccaactcaccgagccacccccatggcacacacaccacgccaacccactacacacccccggccactcgcccccaacccagcgcatcgccgaccacccgcactcccacaaccacacacgccaacacaaccgccct

SEQ ID NO: 660814 - DNA, 369 bp, Homo sapiens
  misc_feature (131)..(131): n is a, c, g, or t
  misc_feature (135)..(135): n is a, c, g, or t
  misc_feature (271)..(271): n is a, c, g, or t
  misc_feature (316)..(316): n is a, c, g, or t
  misc_feature (321)..(321): n is a, c, g, or t
  misc_feature (358)..(358): n is a, c, g, or t
ctgtggatttggtcaaggcccttgacagagacacagtcctttgctctggtgaattacccttctttaaaggcaaatccggagagaccctttgaagtccaaggacaccgaggaagaccacttccacgtggacnaggncgaccaccgtgcaaggtgccccatgatgaagcgtttaggcctgtttaacatccagcactgtaagaagctgtccagctgggtgctgctgatgaaatacctgggcaatgccaccgccatcttcttcctgcctgatgangggaaactacagcacctgggaaaatggaactcacccacggatatnatcancaagttcctgggaaaattgaagacagaaggtctggcnagcttacattt

SEQ ID NO: 660815 - DNA, 205 bp, Homo sapiens
gcacgtgtgcatgagtcgcgattgtgccattgtaccagcctgggcgaagagcaaactctgcctcaagaaaaaaaaaaaaaaaaaaggccattgtctgtctctcgggaagaatttctgctttgaattacccctagggtctcccattgccaaacatgcctccgatcttgccccgaaacatcattgcaacacggtcggggatcctcta

SEQ ID NO: 660816 - DNA, 137 bp, Homo sapiens
agaggactccgctctcacccacccaggaacacctctggctctgcttcacttatttcttctatgtgattgatcaaggagagacggatgtctatgttaacaatgaatgggcaaccagtgttggggtgggtggagagcgg

SEQ ID NO: 660817 - DNA, 93 bp, Homo sapiens
ctagaagattcagcaaagtacttttgtgctcttggggaaattcgggctgggcttcctatcgtactgtgccttactttgacagcacaactcttc

SEQ ID NO: 660818 - DNA, 1138 bp, Homo sapiens
tgtcgtgaaaagtacccctatatagccaaaatgggaaaggagaaagactcatatcaacgagtggtcgtcatgggacatgctagattcgggcaagtccaccactacgtggccagtctgatctataaatgcggatggcttcgacgaagagagaccattgaaaaatttgagaaggaggctgctgagatgggaaatgggctccttcaaggtattgcctgggatcttggtataacatctggataggctgaggcggtgaaccgatggtattcaccatgttgatattctcgctgtgtggaacaatttgatgaaccagacaagtgactagtggtgacgtatacatctgcagtgccccagggatcactaggagtactttgatcgaaaatagcatgtattacagggtaccatctgcagtggcctgactgctgcctgtcctgaatggatatgctcgctctggtgtcagcgtgcaattctgcatagcgtgggtcatgctcccacagcaactggcgacagtaccccgagtagcaatgccacttgctggcgtctacactacctagggatggtgtagagagcagctacacttgatccggtgcttgacacacatactgcgattccagctggagccgacccatagagcccagacagagcatcatgcacggcacacatcgtccaagggaagtcagctactgaccattaacgaccacatgggccttaactaatctcacgacaccagcgagcatccggtgccaagtcgccggcgcctggaaaggtgacaaccatgcctggaagccccaagtgctagccatgccttggcttcaacgggactggccacacgccaccccgacacggatgcgcagtgcgcagttgggtacccaagctggccacgagggcctcgggcaccaggtaacctaaacagccaattcggcgcccaacttggaagaaacctctgggagaccgggactcttcccaacgaactactccccaccatctggggggggcataggcgccactggcatgttggcacccatgggcaatccggcgtgtaccacagaaccacggcatagaggatgaacaaatacgaacacacaggaacaacgtgaaacaacaaagagaaactctgccgaaagaccgccagcaacatcag

SEQ ID NO: 660819 - DNA, 188 bp, Homo sapiens
ctacggcttatgtgggtcttgctgcttctttgtagccttcatcagtgtttgctgaagatggctggtatatatggctgagcaagatggtggtgacggttgatcggggtttatcgattacagaacagtgctcctctatgcgggatatgacagcaccgccagtgtcctattgagttttaatgcttgtggct

SEQ ID NO: 660820 - DNA, 482 bp, Homo sapiens
cacgagggctaccagtacctcgccgagtcgatccgcaagcacccgccgcaggacgagctcaagggcatgatggaaacggccggcttcgcgcgctgccgctaccgcaacctcagcggcggcatcgtcgccatccacgacggcttcaaggcctgagtgcaggtggcgcggctgtcgaaccgccgcggcacttccatcctctgcgtgccgccgcacccgttgtaggcgcgcctgcgcgcggtcctgcagggcgcgatgccgatgcgacgagaggatctctgcgtttcctggggcgttgcggcgcaatgtcccctgccacagcgtcgtgatgcagtgcctcgctcggcacggcgcatcgtgtaggagcgcgctggcgcgcgatgaggcgcttccgggaatgcccgtcgcgcgcgagcgcgctcctgcagaggcggacgtgcgcgcgggttggcgcagcgaaggacgatcgtgcgatccgcgccgat

SEQ ID NO: 660821 - DNA, 820 bp, Homo sapiens
tagtcccaaaataaaataactggttgtttaacaaggagggatgttcaggacaaaccagaaagtccaagcatgtcatgaacattggtgtaagtcatgataagattttatatatatatatacacacacacacaccccaaaagcttttatataatcaagttgtcatattattattaagttgtggtttgcttagggaagaaagagctaatttttaaaaaatcaaggttattacatccatgtatcttcctgtgtatgcttttaaagtccttgtaacattgagttacagggctttaactcctgtgtctgaaaaatcacaaacactgatgacaatcaaagcctcatcttaaggccccgtagaagatgccaatcaaaataaactgcattcctgaggcactaggcaagaaattaaagctattcaactcctcaaggcccagggactattgcggaagaggtgggcgcgtaagattgtaagggccgattttgaaagatccagtaagttcagtttctctatgaactaatcattcaagtcaaaggcacactgatgcaaaatcagtatatggacccctgtgtctgattagcaaggttttcttgaaagcattaaccaactccttcataaaggttataaaaggcttatggaagttatattttaataatcaagattaaatcttatagtttgtttacaaaattttgaaaaccaaatgtgattggtttcaggctgttatattaggggcttcttagtaaaaaaaggttaagtcaagctctctcaaagaatgaaggtattaggctttgtttgaaatctttgaattatcacgtgggattactg

SEQ ID NO: 660822 - DNA, 113 bp, Homo sapiens
agaccatttagtattctgtagttgtttaacacacacttaaatggtcttatgggggaagggaaaggggaggttaaacaactacagaatactaaataaaaagtttggccaaaacc

SEQ ID NO: 660823 - DNA, 146 bp, Homo sapiens
cttctcgtctgtctgtgtatgcccgcctcttcacgggcaggctcaatttcactggttaatagtagagactgcaagactagaagaccctatggagctttactttattaatgcaacctgtacctaacaaacccaatggtccaggtatg

SEQ ID NO: 660824 - DNA, 352 bp, Homo sapiens
tactctgtgcaaataaagaagtggcttgttgtttgagaagtttaacccggttgcttgtgctgcagccctgtctacttgggcacccccaccacctgttagctggggttgtggagtgtcttttgtagctctggactggaggggtagatggggagtcaattacccatcacatgaatatgaaacatttatcaggaagggtgccattttaatgggatgattttcttcgatctcataattaaaatgacctgggtttggggagagtagaatgtgccgggagccataggaatgtctgtatgttggatgacttgaatgcgacagttttaaaaaaggaaataaggttataatataactcaga

SEQ ID NO: 660825 - DNA, 239 bp, Homo sapiens
attcgcgaatcacctatgtgttctcttaattttgtgctagactcagggaactggtgcatcaccctaccaccagaagttaccaacaggtttctaagagcatttttcatgcagagttcctcccaagaattatagctaatttgagggcctttttggataccacctttttgcacaggaggttaaatggcctttaggcgtgaatgttaaatgtataatgccagacttggaagcacactggcaca

SEQ ID NO: 660826 - DNA, 873 bp, Homo sapiens
ttggtggggttacacgcgggttcaagatgcgtatcgaaaagtgtaattatctgttcgcgcgggcccatctatcctggcacacaggatgatgttcgtccgtcaacgattgcttagggtgttcagattttgcaaaatcgtaaatgtcataaaaaatttaaaaagaagcgcagtcctcgcaaatgttatggtggaccaaagcattcctggaaaggagctggtagaagagcgttacagtggagtaattcatttgagatttggataggacgtagaaatgaacctatcaaataccagtgagagctatggaatagaaattagtgatgcgatgaagagagttgaagaaatcgaacagaagcgccaagctagatttataatgaacagatcgacgaacaaatacatagagctacagacaaatggtcaggacttctcacagagacgtcaggcaaaacagtccaatcttatgcgagcccctcttgcgggcgaagggaacacagttggagagagacagatggttgcagcagttacacgaggatgtggacgtggaagatgctccttagagatctgtgtagccatatctttgcatgtacatgtgaaaatgccgttggatactgtggtaactgctaagttatgtatgttttacgtgaggtcactttgagtgaaaagggatttaaaagagatctttctggcttggcatctacataatgtctgattttagggggaaaatggattcaggttaatctttccggagacgtctggtaatgtgggaactttcatgtgcttttaaagaaagggcggaaaggggggattggaaaggggggcgtggttgctctgggagatgggggggaaaaaatttgggaaaccgtgtaggggggagaa

SEQ ID NO: 660827 - DNA, 171 bp, Homo sapiens
  misc_feature (28)..(28): n is a, c, g, or t
  misc_feature (59)..(59): n is a, c, g, or t
ttcacagcctcctgatttcataaccagnccggaccaccgtgcatagggtggaaaccaanactgctccagccgggttatttaaaagaaaggcagagtttgtggtggctttttttttttttttttttttggattgtttgtaatttttttaaataaaagtattttggaaggaga

SEQ ID NO: 660828 - DNA, 285 bp, Homo sapiens
cggttttctgattatggtgtacactcctccccactgggtgtctgttcttgaggccagggtgagaggtggaggaggatggttcacgcagatcagtactcgggggaggcagtgtaccattgggaaggaggagtacaggctgttcagaagtctgagcgaagatgaactggcgcagattgccatcgagcagagtctcagaggacaagaaaaagggtccaaccactactgatgccaacccgtcttttattttccaacccgacaaccctcccaattcttaccctcgttcca

SEQ ID NO: 660829 - DNA, 102 bp, Homo sapiens
  misc_feature (72)..(72): n is a, c, g, or t
  misc_feature (102)..(102): n is a, c, g, or t
gcgggtgaaaaagttgagaagccagatacttaaggagaagagaccgaagccaagagggttgatgcctgggtnggcaaggttgaaaaagggttaacctcaaan

SEQ ID NO: 660830 - DNA, 113 bp, Homo sapiens
tatagcagggtacattctcctatgccagagatggtgagtacagtgatgattccttgggactaggaatcaccgggagaggcaggtcactgtgaatggtcatgcagcatgcacac

SEQ ID NO: 660831 - DNA, 249 bp, Homo sapiens
ggtagagcgtctgcttggatccagttgctgtggctctggcataggctggcgttacagctctgattagacccctagcttgggaactccatatgctgtgggaagagcctagaaaaggcaaaaagaccaaaaaaaaaaaaaggagagaaaacgaaattttgtttggggggaaagatgctttggggcccgaatatagttgaattatttttgaaggggctttttggtttcccaggaaattaagggtttccaatt

SEQ ID NO: 660832 - DNA, 664 bp, Homo sapiens
tgtatttcatccacggaccggggctttcagtgataagattagctggtccgctgggtcgacaattaacatgagctcatgacccagctgtaagtcgctccttctggccatatccttctgtatatggctgcgcccaaatacaggataaatactgtacagtgaggtgtgtacatcaactgttcagcttcctgggaaagtagtatcgcggtcacaggagctactacaggtatcgggaaggagacagccaaagagctggctcagagaggagctcgcagtatattatagcttgccgggatagtggacaaagggcggaatatggtaggccaaagagatccagaccacgacagggaaccagcaggtgtctggtcgcggaaactggacctgtctgatactaagtctaattcgagctattcgctaagggctatactctcagctagaggcaacaagcacctccaacgtcttctgatcaacaatagcaaggcagtagattgatcgtcgtccgtactcgaaagacagcacgatcggcttcagacgatagcacatcaggagtcaaccactatgggtcacttcctcctaacccatctagctgctagagaaactacacggaatcagccccatcaaggatagtaaatgtgtcttccctcgcacatcacctgggaaggatcca

SEQ ID NO: 660833 - DNA, 126 bp, Homo sapiens
aactggaaaactggtcgtcctggtgagcgtgggcctcctgggcctcaggatgctcgaggattgcccggatacagctggcctccctggaatgaagggacacagaggtttcagtggtttggatagttg

SEQ ID NO: 660834 - DNA, 376 bp, Homo sapiens
acgaacgaaaagaaaaaggaaaaaagtatctatatagttagactataggtcaaagatataccttcataaaagaaaaaaaaatcaataaaatttattcacatggccatgcaccatggctcacgcctgtaatctcagcacgtcaggaggccgaggtgggtggatcacttgaagtcaggagttcgagaccaccctggccaccatgatgaactcccatctctactaaaatacagacattagctgggcgtggtgataggcacctgtaatcccagctactcaggaggctcaggcgggagaatcacttgaaacctgggcggcagaggctccagtgagccgagatcgcgccactgcactccagcctgggcaatcaagcttgggt

SEQ ID NO: 660835 - DNA, 1663 bp, Homo sapiens
  misc_feature (985)..(985): n is a, c, g, or t
cctcctttgttgtggtggttcgtctcttctctctattcctactagtctattgtgttggtgcgatgtaccactaattatccagtatgagttgtggtgcgtctgtttagcactatgttgtgcgtggtgggttggcttcgttctcgtgctgcgaggccgcggcttctgtctagttcatatatctggttgtggctgctctcctgcgtctctctgttgtgttgagtggctctccggcggttccaacccacttgtttgatgtgtacccccgtgccccgccccctttgttgggggggtgtttcagtatggaccgacgccactgttccccagatattttttatgtcgtggcacaccccgcttctatgttggggacccgtctccggaataaaggggggatgccgccgccccgacagaggttgtttgggtcgcccccagactctcagtagacctccaaagggcctttgttggttacaaaaaatcctgctccccgccgccctctcacgttttatccgtatatattcacccacggggtccgccatcaaaaaagggtattttcccggaagaggcgcccccattgtggccgtttgtgcccgcgacaaatttttcctcgcgcccaccccctagggggatttccccccctttttgcggcagaacagaaacacaagcgtggatatttaccgctttgagtttgggccctttctctggacaaagaaatatttcctctgctgggtgggacaccttcttggggggcccaccctctcgttgagaggagattcccccaccttattgtcccccaccgccccacctgctaaggatgggggaacaacacctcctatataaggcgcatttcccaacttatgttatctcaccggcgccccccaccacttcttctcgacaacaccatctgtgtccgcaccgtcccccctgttgtggctcgcgtccccacacccacatggtgatgattacagagacagtttttgttgttcacagncacgcacagcgagagagagtgaccccctactgtgtgtgacacccttttgtgttccccgcagagaggcccacaccctgtctcacccacccccgctttttcttcgtgtttctgtgaggccctctttgtttttgtgcgagaaacccacatgagttattcccacgagactctttaattgttgcgccacacactcgctttgtgttcctggtgtgttatacacacgcgtgtgaggcgcccacacgcgtataataactctctctatatcccacatgggtcttaccacacaacgcacacggagaatttggagcccacacgcggcaccacccgcgttctataatgtatacttacaccctctccgcgcctaacgcctctttccgcgagacgttttgtacaacatggcgtgaacttcgttctcttttcccctcgtcccgctttataggaaaatggcttattaacgctccccatttagttcacggaatagactttataccggtttgttccttggagataacctcaaagaggataactctctcttcggataatctctcattattcgccctaatttcttactttcatagctttgaatagactacatcccgttctgcaccatataccctctggctcttccttttttaccttcctggcatccctttttttacaaattacagaccttttcagatc

SEQ ID NO: 660836 - DNA, 161 bp, Homo sapiens
  misc_feature (140)..(140): n is a, c, g, or t
cgctactattaccgggtgtaattttttacctctctctacaacggttttttcctagttgtccaaacgacgcggttcctcttgggacctacccacgttaacactttaccacacggggacttttacgacgggtttctgggtgnggcaacactttacacacgtgg

SEQ ID NO: 660837 - DNA, 924 bp, Homo sapiens
  misc_feature (13)..(13): n is a, c, g, or t
  misc_feature (73)..(73): n is a, c, g, or t
  misc_feature (99)..(99): n is a, c, g, or t
  misc_feature (126)..(126): n is a, c, g, or t
  misc_feature (138)..(138): n is a, c, g, or t
  misc_feature (161)..(161): n is a, c, g, or t
  misc_feature (180)..(181): n is a, c, g, or t
  misc_feature (227)..(227): n is a, c, g, or t
  misc_feature (252)..(252): n is a, c, g, or t
  misc_feature (263)..(266): n is a, c, g, or t
  misc_feature (271)..(271): n is a, c, g, or t
  misc_feature (274)..(274): n is a, c, g, or t
  misc_feature (277)..(278): n is a, c, g, or t
  misc_feature (282)..(283): n is a, c, g, or t
  misc_feature (286)..(286): n is a, c, g, or t
  misc_feature (289)..(290): n is a, c, g, or t
  misc_feature (292)..(292): n is a, c, g, or t
  misc_feature (294)..(296): n is a, c, g, or t
  misc_feature (317)..(318): n is a, c, g, or t
  misc_feature (321)..(321): n is a, c, g, or t
  misc_feature (331)..(331): n is a, c, g, or t
  misc_feature (334)..(334): n is a, c, g, or t
  misc_feature (338)..(338): n is a, c, g, or t
  misc_feature (340)..(341): n is a, c, g, or t
  misc_feature (347)..(347): n is a, c, g, or t
  misc_feature (369)..(369): n is a, c, g, or t
  misc_feature (385)..(385): n is a, c, g, or t
  misc_feature (423)..(423): n is a, c, g, or t
  misc_feature (471)..(471): n is a, c, g, or t
  misc_feature (484)..(484): n is a, c, g, or t
  misc_feature (622)..(622): n is a, c, g, or t
  misc_feature (635)..(635): n is a, c, g, or t
  misc_feature (851)..(851): n is a, c, g, or t
  misc_feature (924)..(924): n is a, c, g, or t
cttcttacctgcntaggctctcgggggtcaagggctctaaaaccatagcaagaatatgctttaaatttctttnttttaattctgttaagatgtccagtntttctatacccattttcttgccaatcngtcctgcaagtntacactgcagtacagctattttntccccatccccttgctctnngaattcatgtccactattttcctgtaatcttttcctcttgcttttnatgaacagctcatgtaccaattgcnagggggggggnnnnggganggnggnngggnnagnggnngnannnccactctcatcactactcagnngancctctgaganggnaggngnngctgcngctcttttttcagagtcagggngggcaatctgcttttnctcttctgtctctgactgcgagctttgttcccgaaggnggacagtcttctcgaccttccaagatgtcttgtctttcttatggtgtncccaactttgggngtccccttatgtttctgcagtagttcttgaaaagaaccctcctggtcagacagggaatcttctgatttctccaagctaagtgagttaaaaccactgtcttcaggcgttgaaatactgcctctcacttcaggtggaggngaaagtatttganttgcgttaaatctaatgtttgccacaagattacttatcggagtcacaaatatgtcctcatctgttccacaagttgttccactaacagaggagcccaggagctctggacatgcattctcatcattaatgcataaactgctatcactaaagtcatgtgtgatagagtctttaaaattattgccctggattggagatatacattcaacttcaaataggntacaatcatctttggaatcatcaattgttggaagtcttttgctgagaaaaattaagcctcaatttttgactgn

SEQ ID NO: 660838 - DNA, 134 bp, Homo sapiens
atcccctctctgctcccagattcaacgcaattctcgtgcctcagccttctgattagctgggattacaagcgcccatcaccatgtcccagctaaatatagagatggggtctcactatgttggacgggactggttt

SEQ ID NO: 660839 - DNA, 86 bp, Homo sapiens
caaaaaattattaaaaagctttttttccccaggattttctgtattattttaatgtttatggcaaataaaatgtaaagggacatgca

SEQ ID NO: 660840 - DNA, 494 bp, Homo sapiens
tagaggatcccgttggtcgatcactgtactatatgcctgtttttcatctacctgagcaattgtggtatttttttaatctactttttttttaagaggtgagggtcttgctatattgctcaggctgacatcaaactcctggactcaagcactctttctgcctcagcctcctcagtagctgggtattatggtatgtgtacatatatacttttagagacagggtcccgttctgttgtccaggctgaactacagtggtataatcatggctcactgcagcctccaacacctgggctcaagcaatcctcccacctcagcctcctgagtagctagggactacaggcgtgtgccaccatgcctaatctttttttttttttttggagagggagtctcgcctcttcccccgggcgtggagttccggggactcgaccaaggttggtcgatcacggtccttttgattagggacaaggcccttttttggtttccacttaaggactagc

SEQ ID NO: 660841 - DNA, 108 bp, Homo sapiens
ctccttgcaaaagcgtgtatatgtccaatagcagaatgtctcggacaccttgtggtcaaattgttccactctggtctgaagcccccagacctcaaacctcacagtgct

SEQ ID NO: 660842 - DNA, 599 bp, Homo sapiens
ggggcaacggagtcatgcaaaggatcccacttcactagaagaagagatcaaagagattcgtcgaagctggtagtagtaaggctctggacaacactccagagttcgagctctctgacattttctacttttgcgcggcaagaggaatggagaccagttatggactgatgaggtgcacaagagagatatctcagcgagaacgaactggaggtcctggagatctgctgagcagaaccgaattatagacttccagtacgatcagccattcggctcacggatcctgtgtggggtgaggactgctgattcgggtactggcttgcctcgtctgtgcgacgtcagggatacgtcagctggactttcatcaccggtattagcccttctgcatggctgctggcaacctaactggtctgtgtcggaggatattacttgttccaaagatggagaacgtgtcctagaggggaggtcgctgtcgactatagacacctaggtcacgctcttgaaggtggtaacatcccgggccagtcgtcgacactcgtgtgacctgccctgacgggtcgcaggccccggagccgaaccattgcctcttggcttacgtagtaacc

SEQ ID NO: 660843 - DNA, 260 bp, Homo sapiens
ggcgtccacgtacgtcgcgcatccagcgttcagccacgacgcttcgagcgatccctatcgggactagatgccgggatcggaccatgaagcgccggtcctcggtggcgattacggccttggcgaaatatcgctggaattttcgtcatagctcattgcctttctcgtgacttctcgcgcatgcgcagggccgccgcctgcctcacgcgcgcggcgacgggattcaacgtgtggaagtacacgtcctgccccacccacaaggc

SEQ ID NO: 660844 - DNA, 229 bp, Homo sapiens
ccaaaaaaaaacaggttttggaaaagacaggaattagctcctgtagctagttcccaagcatttttgtacataatcaccaggttcatctcaactttttttgaggcatgattcacattcaatgaagtgcaggggtaatcacccaatgggttcttcttgctcgctgcctagactgagccaatttatcaaggcaggggaattgcaatagagaaagagtttcattcacacagcg

SEQ ID NO: 660845 - DNA, 784 bp, Homo sapiens
gggtccgctgccttgctgctgcggtggcggtgggccatggtggtttggatatgagcctgggcccggcctggggctgccgagtcggagggggtggcagtgagctggggagaggctacggggctcggtttggctgactggggagtcggcagtgcgtgcatggaaccatgctgatggccatgcggagcctgctgctgggccctggccctgcctctgcctcctgcctccttctgctgctagggttacagtgctgccgctgtccacctctactccggggtctagtacatgtgctgtgctgctactgtgcaatggtcttgcctgcgctccctgctctagcaactcctttgggggcagttgacacctgcttgttgattgctgcctttgatgcctgtctacttgtgctggtagacaagtgtgatcctgctggtttggagttggttgttcgtggtcctggtgatctgtgcttgacatggctccatttgtagctatcgcctaccttgtgttgtcctgcctctcatcctccgaaacctactcaggtgccacgatcttgctgacatttcttctatagaccactgaatctagatcctgatttgtcttccactaactaccaatgccatcaccaactccggctgggtacccatcccagggcatgaattatatcagcagcgctccatctagtaaagtgctttacccaggacaccgaaaaacattgagatctgacggttgctgagatgacacgatccctggtaaaattgtggcatatacatggaaaccaaggaaaagcagg

SEQ ID NO: 660846 - DNA, 487 bp, Homo sapiens
gttaagctatgaccgtgagttaggcttcacggtacgacgtaaacatccggaaacacgtctttaccatagaaaagagtttaaaaggcattctatgtgacctggaggacaaaggtaatatacagaaccatccacaagacaactacagaacgtatctcatatgaatatagatgcaaaaatcctccacaaaatactagcaaacctaacccagcaacaatataacagaacaatacaccatgaccaagtcggaattattccagaaatgcaagatagtataaacaatacaaaaatcaatcagagtggccgggcacgatggcatcaaccctgtaaatcccagcactttgaggaaggctgaagccaggtggatcacttgaggtcaggagtatgagaccagcctagacaacacggtgaaatccatctctactaaaaatacaaaaaatattagctggctgtggtggtgcacacctgtaatcccagctagtcaggaagc

SEQ ID NO: 660847 - DNA, 505 bp, Homo sapiens
atccgggtgctatctctctttgatgtactcgctacaggcctcctggttggtgaaggacttgggcattcaggtggaccgctacattggcctcggaggtgtgtgaggactccatcacggtggtcatggtgcggcaccaggagaagatcatgtacgtcgggaacatccgcagcgtgacacagaagcatatccaggagtgggcccattcgatcaggttgattgggggcaagtccctgcaatgaactctacatcgtaaaccctgctcgcaagggcctctacgagggcactggccggctcttctaagagttctaccgcctcctgcatgatgcgcggcccaaggagggaaatgatcgccccttcttctggctcttagagaatgtggtggccatgggcgtaagtgacaagagggacatctcgcgatttctcgagtccaaccctgtgatgattgatgccaaagaagtgtcagctgcacaacagggcccgatacttctgaggtaaccttcccggt

SEQ ID NO: 660848 - DNA, 870 bp, Homo sapiens
ctgccggcacccgtgttttggaactgaggggtgcgcttttgctccgggcggcccatctgtcttggatatttgaaggaagcgccttctgcccggctggcccccgtttcgggaaggtttcaggaggcgcctttttgccccggccggccccatcgtctggggagcgtgtaggggcgcctctgctccatgccgcgcactcctatctagggacgttgatggagcgcctctgcccaggcatgccccgttctgggaagtgaggagcgtctcttgcctggccaccgcccatctgggaagctgaggattgtcctctgcctggccgctgtgcaatcttccaagtggtgaagggacaacgccttttctgcaggtgtatcctacagctgtgaagagacagcgatccatccgagaaccgggccatgatggcgactggcggttgttgtcgataaggaaaggggggaatgtgggggaaagataagagagatcagatgtgtatactgtagtctgtgtgagaaagaagtagacattaggaagactccatatcttctgtacattcagaaaattcttctcgccttgggatgctgttgacatctgatgaacgcttgacccccaaccccgtgctctctgaaacacgggttgggtccactcagggttaaatggattaagggcggtgcaagatgtgctcttggtaaacagatgctcgaaggccgcatgcttgttaagagtcatcaccactccctaatttcaagtacccagggacacaaacactgcggaggccgcagggtcctctgcctagggaaaccagagacctttgttcacatggtctatctgctgaccttctgaccactagtgtcctagtaattccgagtgtcccccttt

SEQ ID NO: 660849 - DNA, 847 bp, Homo sapiens
  misc_feature (15)..(15): n is a, c, g, or t
  misc_feature (20)..(20): n is a, c, g, or t
  misc_feature (53)..(54): n is a, c, g, or t
  misc_feature (60)..(60): n is a, c, g, or t
  misc_feature (72)..(72): n is a, c, g, or t
aaaaaaaaaaaaaanaaaanaaaaaaaaaaaaaaaaaaaaaaaaaataaaaannaaaaanattctttatttnttacatgaacaggaactccacaatcatccgctctacagcagccacctacttcaaacccagcaccgtagattgtgcaggctgtgtcttcagcaccagcacttgaaactgactcttcccctccaccatatagtagtattactgtggaagtacctacaacttcagatacggaagtttacggtgagttctatcccgtgccacctccctatagcgctgctacctctcttcctacatacgatgaagctgataaggctaaagctgctgcaatggcagctgcagcaacataaacatcttaaagaattaaggaggaagagtgtccaccaacagatgacttcagcgatgcagaccagctcacagtcgggaatgatggcatcttcatgctcccctctccccatggtcctcattttcaactggctcggattttgttcatccttctgcaccaccaattccataccttggaaggtacggctatatctccggatttcgcgcttccttgatcaactggatccttagtgacacgggcttctaactctttcctctggactttccatcagacaaacacttcgcccccctggtcacttctcgtctttcaccttgcctcccacacggacataacttgcttattaatcttacattcctcatctatcacctgccagtgtcgccaccttaaccacataccactttttctctttcttaacacaccaactccgtctccccaacacatcacttttcacacccaggaacagttcttgacattcctcgtaaccacctccctccg

SEQ ID NO: 660850 - DNA, 435 bp, Homo sapiens
cgagagagagatgagatagtagtaaaggaaaaaacagtgtaccctattcctttaaaagccaggtaaatttaaaacctataattgataattgaaggtcttctccgtgacactgtaacactccaataccaccttgtccagtgtaaacaagggcatagcccaaaagcactgaggccactgacaactcgtagccttcctatcaaaaatccttaacccagtaacccgcagatggccctaatacattcaatctgtagcgacaactgttttgctaacacaagaaagtatgaggctattctgttaaaaaaaaaaaaaaaaaaaaaaaagagggttatttcccttttacccattaaaattccctttaccccaggggtttcccaaaggggtccaaatttttaatacttgtacaaggtctccgacaagcccttgggagacccccct

SEQ ID NO: 660851 - DNA, 547 bp, Homo sapiens
  misc_feature (28)..(28): n is a, c, g, or t
  misc_feature (84)..(84): n is a, c, g, or t
  misc_feature (90)..(90): n is a, c, g, or t
  misc_feature (94)..(94): n is a, c, g, or t
  misc_feature (96)..(96): n is a, c, g, or t
  misc_feature (302)..(302): n is a, c, g, or t
  misc_feature (354)..(354): n is a, c, g, or t
  misc_feature (382)..(382): n is a, c, g, or t
  misc_feature (385)..(385): n is a, c, g, or t
  misc_feature (398)..(398): n is a, c, g, or t
  misc_feature (434)..(434): n is a, c, g, or t
  misc_feature (437)..(437): n is a, c, g, or t
  misc_feature (454)..(454): n is a, c, g, or t
  misc_feature (507)..(507): n is a, c, g, or t
  misc_feature (511)..(511): n is a, c, g, or t
cagctccaggctatctggcaataacaangaaagtggcagttccttacaccctgctgctggggttgattttgaactggagtcatnttctgnaagnanagaagaggagaaggaagaattgatggaatggtggaaaatgatgtcagaaactttaaatttttaaaaaggcttctagttagctgctttaaatctatctatataatgtagtatgatgtaatgtggtcttttttttagattttgtgcagttaatacttaacattgatttattttttaatcatttaaatattaaatccaactttcccttnaaaataaaatagcctcttagggtaaaaaatataaggaccttggatatatttncattccccttatatagtattccattttnccntaccccattattnacacaaaaaaagttttaggaaaaggttttaagtaanttngcccatcctagggcttnaaatgccatattcccgggtattatttacaatgcaggattttttgagtaattcnaggnttccaaaattaggtggaggtcctttaccgtaatggg

SEQ ID NO: 660852 - DNA, 343 bp, Homo sapiens
gaatactcccatataatctctgtcttcataaataatcttttgtaacgcttatacactgctggtgggaatgtaaattagttcagccattgtgaaaagtagcgtagcaattccttgaaaaacttaaaatagaattaccgttcaacccagcaatcccattattgggcatatacccagtggaatgtaaatcatcctgccataaaaacacatgcacatgtatgttcattgcagcactattcacaatagcaaagacatggaatcaacctatatgcccatcaatagtagactgaataaagaaaatatggtacatattcaccacagaatactaagcagccataaaaaaaaa

SEQ ID NO: 660853 - DNA, 237 bp, Homo sapiens
tgtggtgctctagaggatcctctctggatgcaagtgtcggcaagaattcgaccaagggatttggaagagtttttctctagcagtaggaagaggttcgagatgtgaggatgatttctgacagaagttcaaggacgttccaagcggaatggctatatgtgagagttcgtcgtactgttagctcagctgcctcgtagcaatacggattaactgtgccaatcgagttaaaaggctgtgcca

SEQ ID NO: 660854 - DNA, 1026 bp, Homo sapiens
  misc_feature (3)..(3): n is a, c, g, or t
  misc_feature (6)..(6): n is a, c, g, or t
  misc_feature (15)..(15): n is a, c, g, or t
  misc_feature (23)..(23): n is a, c, g, or t
  misc_feature (30)..(30): n is a, c, g, or t
  misc_feature (42)..(42): n is a, c, g, or t
  misc_feature (47)..(47): n is a, c, g, or t
  misc_feature (65)..(65): n is a, c, g, or t
  misc_feature (70)..(70): n is a, c, g, or t
  misc_feature (108)..(108): n is a, c, g, or t
  misc_feature (120)..(120): n is a, c, g, or t
  misc_feature (129)..(129): n is a, c, g, or t
  misc_feature (132)..(132): n is a, c, g, or t
  misc_feature (140)..(140): n is a, c, g, or t
  misc_feature (151)..(151): n is a, c, g, or t
  misc_feature (171)..(171): n is a, c, g, or t
  misc_feature (184)..(184): n is a, c, g, or t
  misc_feature (222)..(222): n is a, c, g, or t
  misc_feature (235)..(235): n is a, c, g, or t
  misc_feature (239)..(239): n is a, c, g, or t
  misc_feature (259)..(259): n is a, c, g, or t
  misc_feature (264)..(264): n is a, c, g, or t
  misc_feature (280)..(280): n is a, c, g, or t
  misc_feature (283)..(283): n is a, c, g, or t
  misc_feature (295)..(295): n is a, c, g, or t
  misc_feature (301)..(301): n is a, c, g, or t
  misc_feature (315)..(315): n is a, c, g, or t
  misc_feature (322)..(322): n is a, c, g, or t
  misc_feature (337)..(337): n is a, c, g, or t
  misc_feature (339)..(339): n is a, c, g, or t
  misc_feature (361)..(361): n is a, c, g, or t
  misc_feature (416)..(416): n is a, c, g, or t
  misc_feature (428)..(428): n is a, c, g, or t
  misc_feature (450)..(450): n is a, c, g, or t
  misc_feature (512)..(512): n is a, c, g, or t
  misc_feature (518)..(518): n is a, c, g, or t
  misc_feature (521)..(521): n is a, c, g, or t
  misc_feature (537)..(537): n is a, c, g, or t
  misc_feature (567)..(567): n is a, c, g, or t
  misc_feature (602)..(602): n is a, c, g, or t
  misc_feature (605)..(605): n is a, c, g, or t
  misc_feature (623)..(623): n is a, c, g, or t
  misc_feature (659)..(659): n is a, c, g, or t
  misc_feature (664)..(664): n is a, c, g, or t
  misc_feature (674)..(674): n is a, c, g, or t
  misc_feature (679)..(679): n is a, c, g, or t
  misc_feature (719)..(719): n is a, c, g, or t
  misc_feature (729)..(729): n is a, c, g, or t
  misc_feature (738)..(738): n is a, c, g, or t
  misc_feature (752)..(753): n is a, c, g, or t
  misc_feature (770)..(770): n is a, c, g, or t
  misc_feature (790)..(790): n is a, c, g, or t
  misc_feature (805)..(805): n is a, c, g, or t
  misc_feature (816)..(816): n is a, c, g, or t
  misc_feature (819)..(819): n is a, c, g, or t
  misc_feature (836)..(836): n is a, c, g, or t
  misc_feature (838)..(838): n is a, c, g, or t
  misc_feature (848)..(848): n is a, c, g, or t
  misc_feature (852)..(852): n is a, c, g, or t
  misc_feature (884)..(884): n is a, c, g, or t
  misc_feature (905)..(905): n is a, c, g, or t
  misc_feature (917)..(917): n is a, c, g, or t
  misc_feature (931)..(931): n is a, c, g, or t
  misc_feature (936)..(936): n is a, c, g, or t
  misc_feature (940)..(940): n is a, c, g, or t
  misc_feature (951)..(951): n is a, c, g, or t
  misc_feature (1014)..(1014): n is a, c, g, or t
tgncanaaaaaaaantaaaaaangaaagtnagtaaagaaaanaagtnagtatccacaaaagaggnttaancagccaagggtgcccccaaaaagaaaaaaaaacccaancccacttgaaancaaaaacanaancccagtanaaaaggaacanttccacccccttttgacaanatgcccgtaaaancaccaaaaaaagtaaaaaagaaaaagccccaacaaaancaaaggagaaaanaaanacaaaaccaacaagccacancccanacaatcccacccagcnccnccgcccccaganccgtcncccggccccccccncccagcncccccgcccccggancnatgtctcccggccccccccccnccccaccccaaaaaaataagcccccaaccccaccccaccttgtaaggggggaggnccaccaaaaganggggcctgtccagaagaaaaanaattaaagggcagtgcaagtggaaaagaaagtaccaaaagggggagagggccgccccccccnttaaancancaaaagagggtaaacnaaaacccaagagtgtccctaaaagactganccccgaacaaggctttggccccacaaactgctgcngtncaaaacgtgaaaagattntgctgaatccatttgatgtctctctttagtggtctnctcantagtggtctnctctncaaatgggttgttttctcactaggaaaaaaaatgtcccanctctggaatnaacgttganggtgttttgctcannctgaaagtttttatccncccttctcaagcatgccctntttggcatgatttanaaagttcatanacngggtggccagagcgganantttgagggtntggngggtgttctcacggtaacacttaagaattttnggcctgcagaacagcacaaantggatgagactnaaatcgcttgaacnttgcntccncctcttcagcngctttctgaaattgttcagtggtgactctgtagaactctgagcccctctcccccagtatagcnagcggtccttgg

SEQ ID NO: 660855 - DNA, 1508 bp, Homo sapiens
  misc_feature (292)..(292): n is a, c, g, or t
  misc_feature (318)..(318): n is a, c, g, or t
caaagtgcacatatgcgtgaaactgagcactggatatgtgactacacgtgactcatgatacatagtaggatacttagtgccaactgatgtgggacaacacttcatatagtgattgagccacattgaccacaggaaggatacaggaatgcactacccacatctacgtgatgcgacataccggaggctagtagacgatctaggtatcgagtgttagaccgatatccacactcaaggcacgatagaaagtagctcgtgcagatcgtagatggatatgagaggaggacccatgttntgtactggtccaaggacgacatacancatgtttcaaccgttacatgagcttggtgcaccacttggtcactaatgacacagcaccacctagagcatgtattttcatgttctcctacaccaagtgccatgacagtgctatgtaacaacataagcagttcgtaatttggtagagcctgtcagagctcgttcctctataaacgatacttgagggactaaaaggtttccccgtgcttactccagaatgcgtgggccaagggtttccacacaccgattgacgtcccgcgaacgcaattctatagagaacactgcgttggggcgcggacacaattgcacgcactatgcaagagaaggtctcgacttacccatagcaatctctatatttaccatacgccggtatgtgacaccatggggtcaacattgaaaatagcatacatcagctcccttgttggccaactcctataaataatttcgactaaacctaaaggcattcaagacaaattgttgtgccaagcgtacaaatctctaaggcgcgaatacaaggagacatcgacgcgactagttagggaacaacgggttatacacactcttattgaaggatacgtttgcgccaacacgaactaggcgcaaagttgcaagagcgaagatgaacaaagaggaacgctgcccattctttgcacacagtacccgagaggatcctccagttgatttgagacacgaataaggcggccttgaaacaagaatggaggggtaataggcctagatgcagagcatcttggtttccaaggaccactacacactttccgagtgacagcatatgtggagagagataagaaggagagaagaccacaagacaaaaagtgccgagaatcagcctaacaggaaagtacagcaacacacacagcagtagagaaaaaaagacgtcaatcgacagaggaccaaaaacgtgtaaacgcaacaatgaggaacgaaacggtataggaaacagcgggaacaaacaataggaaaccacacaagtgaattaaccgactaacccgacaaatgaaaacattagaaaaagaaagaacgagaacagaacacagtaaaagaaaacaggaagcaagagacccatagagcaaaggaaacataaaccacgagaaacaaaagacaaaaagccaacgataagaagacagcacaacagagagccactgaacaacacaagaacaacccagaaaaacaca

SEQ ID NO: 660856 - DNA, 122 bp, Homo sapiens
gaggatcccccgcccggtttgcgctccaggctcccggacgtcctgctcctgggctcaagtgctctgcccgcttaggcttcccaaagggtggggattacaggtttgagcgcgacaccgggcgg

SEQ ID NO: 660857 - DNA, 113 bp, Homo sapiens
ctcaggatcttcactttacgcaggcttacacaactattataacagaagaggggcacgcaaaaaaggtgggcaaaagtggtccattcggcgggggaatgctttgaatactggat

SEQ ID NO: 660858 - DNA, 447 bp, Homo sapiens
gaaacaacatctggaacttcaagtaactcctcccacagtactttcaactctggggtggccccaaatccaactaatgccaccaccaacgcggctggtggcgccctgcaaccaacagccaatctcttcgcggtctcactctctcttctgcatctctactcttaagagactcacgccacgaaacgtcttctaaatttccccatcttctaaacccaatccaaacggcagttggaagtccaatgtggcaaagaaaaacaggtcttcatcgaatctactaatcacacaccttgtattgacacacaaaatgttgcaaatcccaaatttgattgatttgaagaacatgtgaaaggtttgactagatgatggatgccaatattaaatctgctggagtttcatgtacaatatgaaggagaggcaacatccaaaatagttaagacatgatttccttga

SEQ ID NO: 660859 - DNA, 901 bp, Homo sapiens
ggggtgggataaagcaatgaactgtagtataaacaaatcccaggctatatctagcaaattatattacggtgaaatacagtatatttgccttactggagtgagtcatagaagctgtcaatatgtatctactgtacaggtactaaatagtatgcattgatgagatgagtagtgtatgggtggctaggggttaggggaaaatgagacttggaaatcgtagcttctatccgaagtttctgagtatgaacatgagggtattgtatttgtatttttgtaacctaaaagactgaaatgccatatagatagaaacagcattgtttttacagttggtatgtaagtaactttttaaagattttatcacataaaagaatcttgtctatagtgagtccaaagcaatgttctaataatggtccgtaagttcactgtcatgttttaatagaaacaaagttcgagagaaatgacattggttaaaacttagtagataaggaggtgaaccatgtgacattgggcgttctgtaagtcaacaaagaggttcagatatggtaagactaatattcacagtgtgtccgtcatttgtaatctcttgaaatacaaatatactaaggtttctaaagggactcactctggaaaaacgtgagtgcactggccagatgctacgtggacagttatccattcttgaggaattatcttgaggcgacgtttctggccaaggtttgtttcgctgggccaggctttaccgttacccgtggaaccaacctggcccaccgttctcgtgtgtggggacaccgctcaaaacacgggttgtggcaccagcacaaaaaaacattggggcgcgccgcaaaaaatatggcggcgacaaaggagctcacatcattgtaaaacacgacacgaattttgttcaaaa

SEQ ID NO: 660860 - DNA, 445 bp, Homo sapiens
  misc_feature (416)..(416): n is a, c, g, or t
tgtgtgaaaacgcgacggggttttcccgatcacgacagcagtgatatctctttcctctgttataataagcgcgatggtgattttgcacttcccctaattaggggaattccctttataacaacaaccgagatagcatttcacaccagtcagaacggctattattcaaaaagtcaaaaactaactgatgctgatgaggttgcagaaaaaagagaatgcttatacactgcaaatgggaatgtacattagttcagccattgtggaaagcagtctggaaatttctcagagaatttaaaagtaccgtttaacccagcaatccctttactgggtatatccccaaaggaatataaatagttctacctaaagacacacgcacatgtatgttcactgcgggactattcgcaatgagtacagattanatctgtactcattgcggaacttctttaca

SEQ ID NO: 660861 - DNA, 971 bp, Homo sapiens
  misc_feature (958)..(958): n is a, c, g, or t
tgcgggggtggttttttcttctctttcttctgttttctttattttgtttttttttggcttctcttttctgttgttttttttttctgtttcctcttttgttttttgactcttggtcttgtttctctttttattcctcgtgctccttacttgttactgttgcgtatcgttatgatctctgtcttgtctgtgttttcgcgtttctgtctattttagggttgttacgctgtccgtgttttgtcgttctacgtctctggttgatttccgttcctctccacccttcctttctttcttgcggtttgtgccgtgtgtttagtactcgctcttcttttggagtgtactggtctacaagggcctgagtaggtggccctagccagggttggagctgtgagggtgatggtagccccaccctgaggtgccgtgtcactcggggttagagggtcactgcggttacaccggtgcggtggcttctgtgatttattttcttgatggtaacttctcagatcatgggcctgattgggacatctagtcagccagatgcacatggaagccaccctgcctgctggggaggagggacctcacacaagccccctcggcagtttgtccccccagcttctggtatgccttcagggaaaggtcatcaatctggggaggaaagcgggggggacgcctgtcacccctggcagtgtggtgaggttcaggtgggggctccctgctgcccccaggccatgggagcttgaagccctcccggcatcatggcatccgagcctcccgcccatccagggtgcgcttccctctcttgcccgcagcatacacgagggcaggcagtggccattgtcacatgtatcattgcatcagagacaaaggaggacccgcaattattagccctgatgcgggaaaatgggggaggggcccagggccagcgcaattgtgcaactggtttacatttaaatacgtacangggtgattcatcg

SEQ ID NO: 660862 - DNA, 119 bp, Homo sapiens
tcttgagtgctatcatgggcgtgagatgaccatgtagggcttcagcagggtgccttccaggtagatagtggtgctcactcagagccttgtcgagcgcagcgctgtcgggctagtcgcgg

SEQ ID NO: 660863 - DNA, 123 bp, Homo sapiens
aggatccgagagggtgggacactgggctggcctcgatcagaaggacttgggcccccacgagcggcgagtgaacagtggaagagcccagcgccgaatcccgcccgctgggggggcccggacatg

SEQ ID NO: 660864 - DNA, 408 bp, Homo sapiens
gtcactgcatgtgtgagaactttgttgctttttaggagtgaaaaatattccatcctgtgttgtattagtcaggtttcgctagagggacagaattaataggatggatgtatatatatggggagtttattaaggagtattgactcacatggtcacaaggtgaagtcccacaataggccatctgcaagctgaggagcaaggaagccagtccgattcctaaaacctcaaaagtagggaagccaacagtgcagccttcagtctgtggctgaaggcctgagagcccctagcaagtcactggtgtaagaccaaaagtccaaaagctgaagaacttggggtctgatgttcgagggcaggaagcatccagctcaggagaaagatgaaggccggaagactcagcaagtcaagtccttc

SEQ ID NO: 660865 - DNA, 1089 bp, Homo sapiens
ccgaagtgaagaaaagaggcgagggcaagggagggccagaaccagggagagagaaaggaggggcagcccaccagcccgctgtctcgccacagaaccggctcagctccaagctccaggagtcactcagctgcagaggcagtggcagccctactcctcaggcaaagggcagcagacagacagacagaggtcctaggactggaggtcctcagtcattgaccactgcagcctggcccagccccatggccttcaatgacctcctgaaacaggtggggggtgtcggacgcttccagctgatccaggtcaccatggtggttgctcccctactgctgatggcttcccacaacaccctgcagaacttcactgctgctatccccgctcaccactgccgcccacctgctaatgccaacctcagcaaagatggaggtctggaggcctggctgcccctggacaagcaaggacgacccgaatcttgcctccgctttcctttcccgcacaatggcacagaggccaatggcaccggagtcacagagccctgccttgatggctgggtctatgacaacatgcaccttcccttcaaccatcgtgactgagtggaaccttgtgtgctctcatcgggccttccgccagctggcccagtccctgttcatggtgggagtgttactggagccatgatggttggctacctggcggacaggctgggccgtcggaagggtggtgatcctgaactacctggcaacagctgtgccgggaacctgtgcagcttatgacccaactatatggttatggattccgggctactcgggcatgtatttgggtacattgcatcactgtgttgacataaaacgggagtgatggccattcaacaccgggcctattgggaccatggtagggaatcgaaagcgtgagggcacacccggggcggaggatcacgcaaagtgacccagggtcacccgcgaaggggacagacgcatagtaagcacacaactgggagcataaagatcagacgaaaccacggagggacaacccagcctgcataggcgcaacaaaagactaatatcacaccgaagacagatgacgcgcacagtggga

SEQ ID NO: 660866 - DNA, 621 bp, Homo sapiens
  misc_feature (621)..(621): n is a, c, g, or t
aaaaaaaaaggaaaaaagccccccccgccccccgagaaaaaaaggcggggagcggtttttttgtttcgtgtggggagaaaaccctttgggggtttttcacctctcgttaattagtgagaaacttggggttggtcaaaaagtccgttggagaaaaaagagaatgctcagggaacaaagcgcgggacacagcagaacgggaaagcagacgcgtggcaacaacggcagattggcccctttgcgcacaaaggagctctatgatgagagggaaaacatttgggtacagccgaaaaagaagcccctgaaaagatccccgccaccggctgttttgcttctgttccgcccccagttttttgtggggggggcgctttaaaggtttagcaaaacacttggggaacaaaaacgggggaaacccaaagggggcaactttatgaagccgaagccaaatggggaaacacaggggttttacacattttgagcctttgtcgattgcccctttggggagcttcgtggtggagaacccctttttaccccaaagcaccttctggtgggtgacgaggcgctcaaaaaaccgttacccgcaagaaacaaaaggggagtcagcgggccctcccacaggcgggn

SEQ ID NO: 660867 - DNA, 257 bp, Homo sapiens
gtagtttatgtcatcaggctgcgaccatatgaaagcttgcacatacttcacattctgtagggtttctcgcccagatatgaattttcttatgtacgttcagtgttgtggaccgtgtaaaggcttagccacattcttcacatatgtaaggtttatgcccacgacatggcttctcttgtgtacatataacgagttgacggatcggttaaaacgctttgccaacacttcttcgcacgctgtacgggtttctcttccagtac

SEQ ID NO: 660868 - DNA, 168 bp, Homo sapiens
ccggtatcgcatgtacttcattcctctctcgctctcatcagccgccttctcggcctcctcccagcttctgcagggctgtagccaggcgctcctgggcccggtcccagctcctcctccaaccagctgaatgcggcggttcagggaggccacatctgcctccgcatccgt

SEQ ID NO: 660869 - DNA, 160 bp, Homo sapiens
catggattcggtgagttattagattgggaggcgagagtgaaagaagacaaggataaattctggatttcaccaagtacaatatttcggaaagagtgctggggatacatctggaacagagctaaccactacaatgtgtatgagttactgacgggggcggatc

SEQ ID NO: 660870 - DNA, 305 bp, Homo sapiens
acagcccgagaatacaacacagaagattattttcccccacagaatttcgtccgctggaaattacacgcgagaacacgtaattcacacacaccgcatggtgaggggttgtgatgcagattctagagcatggtgtgagcctagaggagggcaactagcctagcctaagagtttaaagaagtcatgtggtgacagactagactgagcaactgcaggcattcaggcaagcagttccttcaacatcacaacagcggggcacagtgtctgggcacagcacagtcactaggcatcaccagtcagggcagcag

SEQ ID NO: 660871 - DNA, 279 bp, Homo sapiens
cacgcaggagcagccgacacaggccagtctgcggaaggagcagatgcgagtggacgcccatggcacaggacgctggagcagacgaatcaagaaatagaagaactcaccaagattatgtgacgaacctgattgccagaaatggggaacaagctaactctgacaccgaatgtattggacttaacctgttgagtgcaatatgaccgtcgtgcacactgcatgttcctcccagttccatggcacaggttctagttttcactttatacgtatgcgactcactgt

SEQ ID NO: 660872 - DNA, 254 bp, Homo sapiens
acaggcacccaggcgcagctccaggtgcatgcctggcccacccagcccatgccgtggccgtggtcagctccggcttctggctttccacccacagcagcagtgtttcttccactccacactccaggtggccattgtggggtgcacctctccacaggcccaggccttccggttgcacttgttgggctggtctgggctcagatcggggcaggctcatgtcggggaggggcatcctctcgacgtcgacccgtgcacgg

SEQ ID NO: 660873 - DNA, 1368 bp, Homo sapiens
ggccggtgcggcccaggcccgtctcaaccgtgggagactctgaggctgaccgtcggtcgtgaatactcaactgcggtcgtcgtccggctccaagctcggtgtcgagcccgtgagcggatgctgcgagaagcccggggccggctgaaggcgccgtggtacaattgggatgccgtcgcgttcttgacctctagacaaacctggcacattccgtgccaggccgccaaaaaggctctgtcatggatccctgctacatcagcagcggacgctggggttcaatcagagcagagagctagttggctggctgcgtgctgtagccttcttcatgacactacgcgttgctcccacgtcgtggtgccgtgggcgcgctcggaaaccggcacggcttgtggggtcactcggtcttggtaggcgtgctgtgtgttaccctgtatctgggacggcatcggggtgccgtccgggacccaccaacctgtgtctttctgggctagttgtgtgagccgtccttgagagcctggagggcatgccgatcgcacagtttgggagcacctcttgtcaactctgagccggctgttgtccgaaacgctgtctggagacaagacactgtgcgacagaacttttagatctggaggtttctttccgtggtggcctagatcgacacaggacttagcttgccgaaggggctggcacggacgctttgtgccaccgctttttagaccttggggccgacgctacttagtctctttgtgtgcttcgctggccttgctcacatatcttatgtcatccttttgcggggcctctggtgccccccttaggggacgtttccattccaggggcgggatgaaagctctcgagccactcccctggtggcctgcttacacttggcccacctgggtacgggcttttttggtggtgtttgcttgctttgtcccgctgcagttgctttgcctttgcgaacgtgggctttgtcggcgcctcgcaacccattgtgattagggctttgctctgtcgaaacggacgagtcggtccagtggctgcctgccccttgaattgggagggtttgggccctagtggggttccgagcttatctaattaccttccggaaattggctcccatcccggaggagggttggggtgcccttggcaccttggagttggtaacccaagcggaagcgcgggggtgttggccaagccttaattttaggcccacacttcctttgagagcatgtcagttggaaggcacccctctggttgtgaggaataagcccaatgagttagcacaggtatgagagtggtgagagcactattcatatttttatctcgatacatctggtcagccccccctttgagaccagggacccaaaccacttg

SEQ ID NO: 660874 - DNA, 401 bp, Homo sapiens
  misc_feature (31)..(31): n is a, c, g, or t
  misc_feature (72)..(73): n is a, c, g, or t
  misc_feature (79)..(79): n is a, c, g, or t
  misc_feature (109)..(109): n is a, c, g, or t
  misc_feature (132)..(132): n is a, c, g, or t
  misc_feature (136)..(136): n is a, c, g, or t
  misc_feature (138)..(139): n is a, c, g, or t
  misc_feature (148)..(149): n is a, c, g, or t
  misc_feature (213)..(213): n is a, c, g, or t
  misc_feature (347)..(347): n is a, c, g, or t
aggccctctcccttcccagaaggggcgtggngtggaggaaatctaccacccagcacatggctagaccttggnnttggcnaggcagcgcacacaataagctgggcctttnctaggaggcaggcggggttttgngggngnnaggctgaanngctaggccactgcaacagtgagagacccggggagcccctctgctatctcagccaggaggaaggngagaccaaggcacagagccttaaaaaagacatcctctcccggcctcccatcccaaagccctggcccctaggccagtctagacagaaccaggaaagccaaaaacaaaaggcacctagtatgttagttcatggggngatcgcaggcaggtgtgggaagctcccacctccaaccccgggccttggatactg

SEQ ID NO: 660875 - DNA, 932 bp, Homo sapiens
gtcaggagttcgagaccagcctggccaacatggtgaaaccccgtctctactaaaaatacaaaaattagtcaggtgtggtggacgcctgtgatctcaatctcagctactcgggaggctgaggcaggagaatcacttgaacccaggaggtgttgcagtgaaccaagatcacaccactgcactccagcctaggcaacagaatcacttgaacccaggaggtgttgcagtgaaccaagatcacaccactgcactccagcctaggcaacagagactctgtctcaaaaaaaaaaaaaaaaaaaagaaactcccaggaaacaggcagcctagtttccggaggtggtagaagcttgtgcttgtagaaagctaaccatgttaaccaccaagggcaaagcagcccaggtggtgattaggaacagagcggggatcaaaattttcacagaagacgggtcacgctgaggggcctgcacacacggggttgttgaggacccacagattgggcgccgagaggcctgcctttggccgggcccaggctcacccccaccttggggcctcaccttcctccaggaagcctttcccagttacccgaagctcaggtggccttcttgcaggtccccgtagcacctgagcctgtacctggggtggcccttgttatgctatcctgtgctagccgttgtgtgcctcgtctcggctgttagatggtgagtctcccatggcgcagagcaccactgttcgtctccccggtgtgtccccagcccggtcctgtcacttttgttaccttgaaggaacatggaggccagtggtaaggtcggccaaggaaatagcacagctccagtgggggcgaaactggggccggacttgtggcgccgagttactctgtttcgtacggtcaacatcccgtgtgtggcgcgcgcaaccaccggtgtctcccgcttttg

SEQ ID NO: 660876 - DNA, 139 bp, Homo sapiens
catggaggtatgagtcaccacgctgacaggccacataccaggccgtgtatagtagcagaacgtggtcaagctctacgccctccatcctgcagcagaaggagcaggccggggtaagcagcatggaggaattcctgcgggg

SEQ ID NO: 660877 - DNA, 572 bp, Homo sapiens
ccatgtgggccaggcctgtctcaaactgctgacttcaggtgatcctctcgcctcaacctcccaaagggctggggattacaggcgtgagccaacgcgcccggcatggattccagttcttagggggtgtgtgataaccgaaaagatgtttaaggaacacctttttttttgggtagctccagttaaagggaacactatgctggggggaaaaaaattagcaaatatgcgtagataaacatttaagagagtgtccaatctgtaaaaagctaagggatcaaatccagttttcttacatagaatacattgggcttttaatatgggaatatttccttaaatcatttcggagaatcagaagtttcccagtatttcagcattttaagttaattgggcggagtgacgggattaagtgaatctatacagttaatttctaaaacagtggtatctcataaccagtcatgaggtcaatagctattggtatcgggcagaagggtttcaaaagcacttggacccttgtgaatagttgcgggtggaattcagtcctcggtgcagcatttcgaggcatgtggagtcatctc

SEQ ID NO: 660878 - DNA, 459 bp, Homo sapiens
atcttgcacctgccattctacggggacctagtctgcctggaatggaccactctgcccacaggaagctccatcaaactttcaccccaaacaacagccatcggtaacctcagacctggaggtgaacataatggctgcatgtttggcttttgggggatagacccaagaaggaagcccatgtatgccccagaaggggacttcttactgttgaacagggaatcccaatttctgagcagctggaccatgagcacaaagatggaggggctagggcagcatgtccccttgggtgctggattccttgcctttggagagaggtgtaagcctaggaagattcagggcagaaaccctggtgcttagtcctgacgagcagtactgggattacaggtgtgagccaccacacttggccaaaaagccaactcttacagatgtgcatcagaatggacatggtggcttgttatggct

SEQ ID NO: 660879 - DNA, 1048 bp, Homo sapiens
ctctacaacaaaatgactttaaactatctgggtatggtggtgtgcctatggtgtccggctgaagtgggaggattgcttgagcccaggagtttgaggttgcagtgagctatgattgcaccactgcactccagcctgggtgacagaatgagagcatgtactgaaaaaaacaaaacaagctgggcacagtggctcacgcctgtaatgctagcacttagggaggctgaggccaggaagatcccttgaggccaggagttccaagaacaccctggacaacacggcaagccccatctctacaaaaacttagccatgtgtgctgcagcatgcctgtacatcccagctacttgggaggctgacgtgggagaatcatctcagactgggcaggtcacaggctgccgtgaaccatgattacaccactgactccagctgggtgacagagaccctgtctccaaaaacaaaactgtgaacacacaaactggcctaggcaccagtgggctcaccacctattaccccctcaggcacattttgctcagcgcccacaggtggcacgggattcacttgaaagaccacggaggtatcaaagaacaagcacttgagctcggcatcctagagcccccatttgctatctaatttaacctatctctactactttaattattcaggggtactgactcacatatctattcacaaattaaacaatcgtccactttccggctggacgtggtcgtacccaccgtatatgcacaacagtttgtgtcggccaaggcggcagaatacaacgtacggacaatagcaacctccctggccaagtcggtggaaccccggaccacactcgtgtcacccacttgtgggcgcaatgtggccacgtcactcacacccgagcagcgcaacagagtaaccgaagtcacttaacgacaacctacactgcctcgcgtgaacgacagtttcaaaaacagtcgggaacatacaggaatcacccgtaagcgcacgacaaaacgacgtcatagataaaacacacctcgctcccacataactccagcactaccagcct

SEQ ID NO: 660880 - DNA, 367 bp, Homo sapiens
acttaattttgtgaggataccacataacctcgattcatatagccagtgctgaccactatacacttgtgctaaggaatgagtattgggtatagcacttgggagagcgcaagctaataccgatgaatccagacgagctagctaagaacagctttgagtgcacacccagctatggagcacctgagtgataagagtgataggttgaggcgataaaccgagcgcgtctggagagagctgcatgtgcaatgtactaacttacattaacaccaacagtgtacacagaatcttttcaaatcctttgcagaatgtgtcaggccaatgaggtacaagtctttgtacactaggaggtcaccaattaagatgcgctcgg

SEQ ID NO: 660881 - DNA, 401 bp, Homo sapiens
aggagccgacaggtctgatcccagctcactacaacctccgactcctgggttcaagcgattctcctgcctagcctcccgagtagctgggattacaggtgcccaccagaacgcccagctcatttttgtgcttctagaggagacagggtttcaccatgttggccaggctggtctccaactcctggcctcaagtgatctgcctgcctggcctcccaaagtgctgggattacaggtgtaagccactgcaccctgcctcagtacctccattcttcccacacaccctcctcacgtgctccttcctgacttctgggcccttccttccttcttttttttttttttttttttggggaaaagggtacacacccaacacccaaaagggaaaaaggggggggcacacagagaca

SEQ ID NO: 660882 - DNA, 196 bp, Homo sapiens
tgtagccgctgcaccagcctgggcaatggagcaagactcagtttcaaaaaaaaaaaaaaggccccagttgggttgttaaatttttcccactataatataccccaagctgtaaaaaattggattttaaaattatatttaaggggcacccagaaaaccagccagggttattttttttcattctattaactcctttata

SEQ ID NO: 660883 - DNA, 626 bp, Homo sapiens
  misc_feature (539)..(539): n is a, c, g, or t
gcattttacagatactgttctttttacaaattgaaggtttgtggcaaccctgcattaaacaagtctattggttccattttttctaacagtatgtactcactttgtttcacattttgggaattcttgtaatatttcacaatttgtcattattattaattacatctgttatggcgatctctcatcagcgacctattatgttactattgcaatttctttcgggcaccacaaattacacccatataggatggtgaaataatcgacaaacattgtgtgtgttctgactgctccaccaaccagccatttccttggctctatccctctccttgggcctatttcaagacacaaccatatggaaattaggccagttaataaccctgcaatggcctctaactgttcaagtaaaagagtcccctttctcacttaaatcaaaagctagaaatgattaagcttagttaagaaagcatgccaaaagctgagacaggtcaaaagctaggccttcttgtccagttagctgagttgcgaatgcaaagaaaaagatnaagttcttgaaggatattaaaagtgcccctcccgtgaacacaaacacccaaatgattgataagaaagccaaaccgttcttatttgtt

SEQ ID NO: 660884 - DNA, 460 bp, Homo sapiens
  misc_feature (11)..(11): n is a, c, g, or t
  misc_feature (71)..(71): n is a, c, g, or t
  misc_feature (103)..(104): n is a, c, g, or t
  misc_feature (129)..(129): n is a, c, g, or t
  misc_feature (170)..(172): n is a, c, g, or t
  misc_feature (199)..(199): n is a, c, g, or t
  misc_feature (267)..(267): n is a, c, g, or t
  misc_feature (408)..(408): n is a, c, g, or t
  misc_feature (414)..(414): n is a, c, g, or t
gctttggcatnaggacactcccagaacttgcattacaacaaagaaatgaggtgtctttgttattcataatnagccaataattgccaagatggctgccgtcagnncaaaagggccagtggacggtttggnggcttctccaaggaacctcagctgaaacctctgggggattnnntgattgtctgccaagagaacaggcggnctcgcttttgttctgaaatcaaatcctccaagtacggagagggtcaccaagcgtgggatcgttggcanttgtggaaaagggaaaccgaacggcccggatccattgacaagccgcgagttattgaagtcctgcctcgtggggccacagctgctgttcttgctcctgacagttcaaatgcctcctctgagcctagctcgtgagatgcaaangaaccngaacgttgtttgggaccctctaagagccattgtcccacaattcaac

SEQ ID NO: 660885 - DNA, 395 bp, Homo sapiens
  misc_feature (324)..(324): n is a, c, g, or t
tggcctctccagctacatgggggaatttcttatagataatattttgaagtatgtttttcaggttgtttccattcttctcatttctttcaagaatgctagtgagtcatagatttggtctctttacataagcacatattttacagagattttgttcattctttttattctttattgttgtcttattttggaaagccggtatttgacctcttaagtctttttttatcagcttaagtctgttctgctttgatatttgcaagtgcattaatgaaatttttatagtgtgtcattcagctctatcaggttgattatgtccatttttttttntttttagagtctaactgttacccagagtggagtgcagtggcacgaatctcggctcactgcaacctcagcct

SEQ ID NO: 660886 - DNA, 105 bp, Homo sapiens
gcgcgaagaggctggactctggattctgttgcctgagcaatggctgccatcctggaagaaactggtgatctgttggttgatggagcctgtggaactgacatgctt

SEQ ID NO: 660887 - DNA, 220 bp, Homo sapiens
  misc_feature (10)..(10): n is a, c, g, or t
  misc_feature (102)..(102): n is a, c, g, or t
  misc_feature (139)..(139): n is a, c, g, or t
  misc_feature (149)..(150): n is a, c, g, or t
  misc_feature (199)..(199): n is a, c, g, or t
acgttgctangcaccgctgtgctatcctatacgcctctggcgtacattggcatcgtgatggagtccgctgacggggtcacccacaatgtgcccatctacgangggtatgccctcccccatgccatcctgcgtctggacntggctggccnnggacctgactgactacctcatgaagatcctcaccgagctgcggctacangcttctacctaccactggctc

SEQ ID NO: 660888 - DNA, 588 bp, Homo sapiens
tcagctcggtacccttacaggcttggagccctgtagtactgagtctcatgtcctcatctgtgtggatctttaccagtactaatcctgagcacaaggctggctgcgaggatgaatgtgctcgggaagcacggtgtttgggaaactggcacacgctcgcattcagtggagggtatcgcctacaacagagctgcacaacaggagggtatcgcctacaacagagctgaccacacgggggtatcgtctacaacagagctgaccaacaggagggtatcgcctacaacagagctgaccaacagggcggcgcctggccacatctggctctttacagtcaacattcaaccaaaattcaacaaaatgtgtcactttggttcctccaccacactggccatatttcaggtgctcagatggaccacaggtggctaccgcattggccagtgcagatacggagcgttagcatcatcacagacgatcctgtcgggcagtgccagtctcaactcatttaggctacaaagaacttaaaagctatcaccaagaaagtaagatcaaataaaacacaagagggatgtatacttctcccatgagatatct

SEQ ID NO: 660889 - DNA, 425 bp, Homo sapiens
actttttttatctagccacttcatggggacactacgggtttcatgatctgtgatgggatgacctgatcgatcctcagttggtaacacccctttttttcccttggtaggggtttaaacaattctaaaagagatgctttttttctggttttacactgacaatttcatcccgaacgttcctcctgtgggaggcattagaccatgtgtacaggatctcatcttcattcttttctcactctcatacaccttctgaaattggtgtggagacgctgaccatgctgtgtccgtccaccaacaggaagaaggcctgattagcattgagctgtaagcgccttctatttatcttgatgagctcactctatgttgactatggtcaggtacaaggaatcttggtttttatcccagaaacaggaagctgttcccacccg

SEQ ID NO: 660890 - DNA, 1335 bp, Homo sapiens
atgattgaagacaataaggagaacaaagaccattctttggagagaggaagagcgactctcattttttccttaaagaatgaagttggaggacttataaaagcactgaaaatcttccaggagaaacatgtgaacctgttacatattgagtcccgaaaatctaagagaagaaactcagaatttgagatttttgttgactgtgataccaacagagaacaattgaatgatatttttcatcttctgaagtctcataccaatgttctttctgtgactccaccagataattttactatgaaggaagaaggcatggagagtgttccttggtttccaaagaaaatttcagacctggaccattgtgctaaccgagttctgatgtatggatctgagctagatgcagaccaccctggcttcaaagacaatgtctaccgtaaaagacgaaagtactttgcagactcggctatgagctataaatatggagaccccattcctaaggttgaattcacggaagaggagattaagacctggggaaccgtattccgggagctcaacaaactctatccgacccatgcttgcagagagtatctcaaaaatttacctctgctttccaagtattgtggatatcaggaagacaatatcccacagctggaagatatttcaaactttttaaaagagcgcacaggtttttccattcgtcctgtggctggttacttatcaccaagagatttcttatcaggtttagcctttcgagtttttcactgcactcaatatgtgagacacagttcagaccccttctataccccagagccggatacctgccatgaactcttaggtcacgttccccttttggctgagccaagttttgctcagttctcccaagaaattggcctggcttcccttggagcttcagaggaggctgttcaaaaactggcaacgtgctactttttcactgtggagtttggtctatgtaaacaagacggacagttacgagtcttcggcgctggcttactttcttctatcagtgaactcaaacatgtgctttctggacatgccaaagtaaagccttttgatcccaagattacctgcaaacaagaatgcctcatcacaacttttcaggatgtctactttgtatctgaaagttttgaagatgcaaaggagaagatgagagaatttaccaaaacaattaagcgtccctttggagtgaaatataatccctacacacgaagcattcagatcctgaaagacgccaaaagcataacgaatgccatgaacgagctgcggcatgatcttgacgttgtcagcgacgcccttgggaaggtcagcaggaagccgagtatctaa

SEQ ID NO: 660891 - DNA, 509 bp, Homo sapiens
ccacgcgtccgatcacttgaggtcaggagttagagaccagcctgaccaacatggtgaaacactgtctctactgaaaatacaaaattagctgggtttggtggcgcacgcctgtgatcccagctacctgggaggttgaggcgggagaatcgcttggacctggggggcggaggttgcagtgagccgagatggtgccattgcactccgacctgggcaacagagcgaaacactgtctcaaaaaaaaaaaaaaaaggtaacaggaaaaaagagtgaaatatattacgctatcttttattctggagccaaaacttggacagatgtggggaaatctccatatacgtggtatgaaaattccattggtacaggggaaattatttccctcggtggtcttttcttttactataaagtgatctcagaattttacgtggttcctataaaattatgcaaagtatggtgacaaaactggcatcaattggtgggactattaaaggtgctccttgtgaacatttaag

SEQ ID NO: 660892 - DNA, 170 bp, Homo sapiens
agatagacactgagatagtgtcactgtactccagacctggagggacagcgatgagacctcgtctccgaaaagaaaagcaaaaagctaactggaagacaaaaagtagttgcaagctgttacagagctggaacagaaaatgcatttagcataaaagtgtagtgtagaaattg

SEQ ID NO: 660893 - DNA, 180 bp, Homo sapiens
ctgagcagtattgtgccattttattaccctttgtggatgtgcctgcatgacgaagtctggggcatgtgtggaaaagatacttcacagctgaagggggctgggagggtctctttggagacattaagtaaactgtgtgttgtgtatctagcattttgactggtgatccatcatactgaggtc

SEQ ID NO: 660894 - DNA, 691 bp, Homo sapiens
cccctggtgccctggacagtcgcccctacagccctttccccgggcagagcaacggaatttcctgagatcctctggcacctcccagccccaccctggccatgggtacctcggggaacatagctccgtcttccacgcagcccctggacatttgccactccttcacatctcagggagggggccgggaacccctcccagccccctaccaacaccagctgtcggagccctgcccacgcctatcacccagcagagctttaagcaaagaataaccatgggattccctggatttgagaaaagcgggggcacagcacgagcgcgtggcaacaggggtggtcgtctggaggagcagagagtacccaggggacggggtggtgataccaaagaggaacagacggacgttcgcctacgactcagatgtcaccgggtgcgcatcaatagtacctccacacagagggcttctctgggccctctccaggtgacggggcatgggctatggctatgagaaaactctggaaacattaccagatgatgtctggtagtccgtgagaaatttgaaggagacatcaagcaggaaggggtacgggcattcgagagggggctgcctaacaaggccggagtgacctgcagctgtggaaattatggtggctggtggatgaacaaaaactgccattcattgctggaaggggcgggaatg

SEQ ID NO: 660895 - DNA, 323 bp, Homo sapiens
agctgacagatagccgcgtaggctcgccattagttccactctctagccttgcttgcttgtcttcagctcggtggctgctattaggtatcgcaatacttacaagctatccaaggggtctacgcgactcatgatgaaatcttctcctggtgagcctctgaggtgattctggctatgagttcccgtgcgactgcttcggcgtactctatggcctttccaacattagaaacttcgtcagttggcagcatttcaagcggcaatcggtatgaacacatcgccttgaccgctgctcgtccgttcaattcagtctcaaagaacggtctacg

SEQ ID NO: 660896 - DNA, 214 bp, Homo sapiens
acgtgtacaaggatcccactgcgagtacagtggtacgtaggccgtgatttgtacccagggtgtaagggtctacattccatgctcttcccacataactgctttgtccgagatttgctgcaccaggtatttgggggccatgcagggggaatgggagaatggtaagatgacacctaaaaatgtcttttgaaggaaaatgctggaggccacggaggct

SEQ ID NO: 660897 - DNA, 164 bp, Homo sapiens
cctgtgtgacttttttgtcccacaatgggcttcagcgagagggagggcagcatatacctcaatgacttcgcgcgcgtggtgagcagagaccatgaggccgtgaacggcatcctgcacttcattgaccgtgtcctgctgccccccgaggcgctgcactgggagcg

SEQ ID NO: 660898 - DNA, 186 bp, Homo sapiens
aaccaaattaatgagcaatcaggattttgtggaccataagacaggtgagacttaaaccccaaggactgtcagatcctgatactcgtagttatcccctgttgtttctgggccataggtctatccccatccaggtcgtgactcatggcagctgtttctcatgaagctaataaaattcgctttctaaag

SEQ ID NO: 660899 - DNA, 240 bp, Homo sapiens
cgttcagaagcatctgagttgaggcagagaggtgggtggtgtagaaaggcgctccgcattatggaatcaaccatggaatcaacctaggtgccagtggtagactagataaagaaaatgtggtacatatacaccatgtcatatcacgcacccatgaaaaagaatgagatcatgtcctttgcatcaatgtgcatggagctggaggtcattatcctaagcaaactaactcaggatgcttcttga

SEQ ID NO: 660900 - DNA, 685 bp, Homo sapiens
gctgcaggaattcggcactagctggtatgtactaaaccgggaccctgaagcaggttgtttacggatggattatcgccaatgtaccgacgaacgctcagtgcgtgacagctgatggggcctctgaacgcgggcacggtgccggccgacaccgacgtaggttgttctgcacctactgcctatatcgactctgcccggcatacgctcgatcccaagattgctgtggctgcgcagaactgctacaaagtgactaatggggcttttactgtggagatcagccctggcatgatcaaagactgcggagccacgtggatggtcctggggcactcagagagaaggcatgtctttgtggagtcagatgagctgattgggcagaaagtggcccatgctatgacagagggactcggagtaatcgtctgcattgaagagaagctagatgaatggcaagctggcatcactgagaaggttgatctcgagctgactgtcatcgtagataacgtgaacgactgcagcaaggtcgtctggcctatgagcctgtgtgggccattggttctggcaagactgcaacacccgcaacaggcccaagaagtacacgagaagctccgacgatggctgaagtccatcgtcatttatgcggcggcttatagcacccgattatttattggagtttgttactgggggacctggg

SEQ ID NO: 660901 - DNA, 202 bp, Homo sapiens
caggagggaggcggtggtgaacagccacctttcggggtcggcccagctctgcacggagcctgttccccatctcgatgagctgctcttctccaggcggaggctgatgattttctggctgcctccttcagctttctctggagtcggtgcatagataaggtctggggggcacgtgccactgaccggaggtgcaggaaaagctccc

SEQ ID NO: 660902 - DNA, 297 bp, Homo sapiens
agatatgccaagacagacggatgacctggaatgtcccaagccacaggacatctatgttccggggaggatgaatgaatcaaatcgcacctattttgaggcaagcaaggactctgtgacttcaggagccctggtgggtggacagaagctccctgctcccccagcctgtctacccagcagcgctttggccagtcccattcctgtacttctgagcctgcctgtcagtccctcctcacacgcacaccgtggctttgtgcctggtactgagtgtcccggagcccccggggagtgatgctttga

SEQ ID NO: 660903 - DNA, 455 bp, Homo sapiens
  misc_feature (7)..(7): n is a, c, g, or t
  misc_feature (141)..(141): n is a, c, g, or t
  misc_feature (235)..(235): n is a, c, g, or t
  misc_feature (360)..(360): n is a, c, g, or t
attttantggcccccactggaacaggggaggaagcagaggaagaaggcggcatttttctaaagtgcagagtgcagcagcctctgcatcaccccactgcagggagagagccacgccctttgcagttgtgaaaccagacccgntggacagttcgcctccaagcacacagtgcatattggatactgacaggccagggtggcagtggggctcctgggacccacgtgacaggacaagagntgaggctcagccagtcgcccccacaaggccagccgaagaatgccagggaccgagagctgaggctcagtgagccatcccacccatgccagcgggagaatgccaggtacatcgctctccatgctgtngtcctcaaaccccagcacaatgcctcacccttggtaacattcagccttcagctcatttgtcttgcaaataaaaaggttgaacttggaagaaaaaa

SEQ ID NO: 660904 - DNA, 731 bp, Homo sapiens
aagtgtcttgctccagactacaaagtgcatatcatctcctttaatagatccctaagtcccatgcatattgacgcataccttcaacatcattggaacctgcgtatagttgctttcctaacacctgtactcgacgcatgtcatccgagtatcgatctatttcaagtaaagctagtgatggtactatcattcactcctccaacgaccaatctatcccgaggacgatcgatccattctgggatgtcatccaaatggctttccatgaatgtcttaatgctagatgaaaaacgtgttatggtggatgccaatgaagttccaatatcatcagatgtcttgaaaagctgggtatcactaccatttaaagtctgacattcgtaataccaattaccctgggtaggaggcttccattgctggatcctgcgatgtcctggcgccgaggcaccttactagtcctacttggactgaacaggcctgatggagcttgtagctgggctcagatactactaagaagcttaggggcaaggtgtcattctcctgctttaagagaagtgcatgaactgatagtgcttgtcaacaatccatctccttaacagcggtcgaaagcctggtttgctgctattacttgtctttgacatacagaaaataacttcatgctagagtattactctctactcctaaagtcattcactatttcggctactagtatcacaattgggtgactgtgtccccagaaa

SEQ ID NO: 660905 - DNA, 149 bp, Homo sapiens
  misc_feature (7)..(7): n is a, c, g, or t
  misc_feature (12)..(12): n is a, c, g, or t
  misc_feature (16)..(16): n is a, c, g, or t
  misc_feature (68)..(68): n is a, c, g, or t
  misc_feature (106)..(106): n is a, c, g, or t
aacccgngaccncctntggcttttatggcttgagcatatttcctttcaaacaattcttcaacttgttnacgtagatcagtgatgcgagcattccatttctcgaagntgaactccctcactttccgcttcccagcaaaggggtcgattga

SEQ ID NO: 660906 - DNA, 790 bp, Homo sapiens
tctccggggtccaccattgggcctctacccgccgggtggggttacacaaagccaagggaaacagaaggagaaaaaaaaagaaaaacaaaaccacgccgcctctcagcccgggtgagtggtccacacagttcagaagtactcagcagacggggtgaaagagactcttcggcgtgacccctttattccatcttctgtggagtgagagacagagtgccttcgcgtgaactcgcgtggcaccaagcacacagcacttcttcgctgtgggtgatcacacgcgggtgtgacaaaagtatctcttatacagcgtgagacgcgccacagcgtggtctcctctcgaggcgtctcacaagatacacctcgcgtggagcagcgagcccacacgaaggaatcgcgtggacaaacaacatatagagcacacagacagaaagtgaacatagtgcgcagagtgcatcgggtgtgggggagaacacggcaggagccccacagaaagacctccgtgtcatcaggcgagacacagtgaaatgtgagcgtagagcagtgacacacaaggaaaagcacctctcaacgaggaatgaggggcacttgggccccccagctaccgctccagcgcaaactccacgcaacgggaaaaccagcctaacagtgcgccccatcggaaacaacatatcacccaggagtgatgaaagtggggattcgagagggaacaacacagcatcgacgagcaaacgtcacccctaaacaaggggagcgacaacaaacgaaacaggacataactccccaaggagacaag

SEQ ID NO: 660907 - DNA, 227 bp, Homo sapiens
gggagctcaggtctggcttatagacattctacagcacaaggtttgtgggtgcaggacacctcagccacctctcactcataacctgaaaagacacgtgtgggtgctcctaagaacagagccatggaacaccgagagaacacagacgagcaggccctgtggccattcaaggacacacactgctgtctgcagctccaacagggtaagtggtcagacatgaagtttccaag

SEQ ID NO: 660908 - DNA, 151 bp, Homo sapiens
  misc_feature (38)..(38): n is a, c, g, or t
  misc_feature (84)..(84): n is a, c, g, or t
  misc_feature (112)..(112): n is a, c, g, or t
  misc_feature (119)..(119): n is a, c, g, or t
  misc_feature (140)..(140): n is a, c, g, or t
ttaattttcaggaaaaaagggaaattgcagctcctcancccccaggattgacctttggggagtgatggtagcgttggtgccagnccgtgggttcaggtgtggcaaaagcttncaaatgngtcccaagggaaataaagtgngttggggttta

SEQ ID NO: 660909 - DNA, 183 bp, Homo sapiens
gtacataagcacagtaccccatttaagcactggcctaagacgggcttggcaaccaattttcaaatttgtttgcccaccattaaacccattgatttggttaccttttattcttgtttagccccaattgttttgttaattgttgttgcaagccttaaaattgtattcaagaattgccgtgccctt

SEQ ID NO: 660910 - DNA, 475 bp, Homo sapiens
caagtctagacagccgtctgtgacatcccacctcgtggcctcaagatggcagtcaccttcattggcaatagcacagccattcaggagcttttcaagcgcattttggagcagttcactgccatgttccgccggaaggccttcctccactggtacacaggcgagggcatggaccagatggagttccccgaggcttagagcaacatgaacgaccttgtctttgagtatcagcagtaccaggatgcccccgcaaaaaaggaggaggatttcggttaggaggccgaaaaggaggcctaaggcagagcccccatcacctcagggttttcagttcccttaaccgttttaatcaactgcccctttcctttccctcaaaatttgtgtttgctgcctctatcttgttttttgttttttcttctgggggggggtttaaaacagtgcctggcacatagtaggcgctccataaatacttgtttgttta

SEQ ID NO: 660911 - DNA, 346 bp, Homo sapiens
ggagctcgccctgttgaatgaatccacaaataatttattactaaacattaatttcaaacggctaaaaaaaaaaaaaaaaaaaagcgcattttcctctgcattcccggtcacggccccaggttttctaacaagaagggaggtaagggttgggttaaaagggggccaaagatggaaccggaggagcaggtgtaaaatgcaaaaaaccgggaaaacaaggggttgtgtgtctcaacgagtgagctctgggagtttaaaagtttcacagacaggtacttacgggtacctttaaaatttccaggacacagcacttacgggataatttctcttggtctctaaacgcgggttt

SEQ ID NO: 660912 - DNA, 2922 bp, Homo sapiens
  misc_feature (2315)..(2315): n is a, c, g, or t
  misc_feature (2319)..(2320): n is a, c, g, or t
  misc_feature (2327)..(2327): n is a, c, g, or t
  misc_feature (2329)..(2329): n is a, c, g, or t
  misc_feature (2335)..(2335): n is a, c, g, or t
  misc_feature (2339)..(2339): n is a, c, g, or t
  misc_feature (2348)..(2348): n is a, c, g, or t
  misc_feature (2365)..(2365): n is a, c, g, or t
  misc_feature (2371)..(2371): n is a, c, g, or t
  misc_feature (2376)..(2376): n is a, c, g, or t
  misc_feature (2386)..(2386): n is a, c, g, or t
gcacgtgctcattatacatgaaagaattcatacaggagagaaaccatatgaatgcaatgaatgtcagaaagcctttaatacaaagtcaaaccttatggtacatcagagaacccatacaggggagaaaccttatgtttgtagtgattgtggaaaagcctttacattcaagtcacagctcattgtacatcaggggattcacacaggagtaaagccctatgggtgtattcagtgtggtaaaggattcagtttgaaatcacagctcattgtacatcagagaagtcacacaggaatgaaaccttatgtatgcaatgaatgtggcaaagccttcaggagcaagtcataccttattatacatacaaggactcatacaggagaaaaactccatgaatgcaacaattgtgggaaagccttcagttttaaatcacagctcattatacatcagaggattcatacaggagagaacccctatgaatgccatgaatgtgggaaagccttcagtcggaaataccagcttatttcacaccagagaactcatgcaggagagaagccttatgaatgcaccgactgtggaaaggcttttggtttaaagtcacagcttattatacaccagagaactcatacaggggagaaaccatttgaatgtagtgagtgtcagaaagcctttaatacaaagtcaaacctgattgtacatcagagaactcatacaggagagaaaccctatagttgtaatgaatgtggaaaagcctttacgttcaaatcacagctcattgtacataaaggagtgcacactggagtaaaaccctatggatgcagtcaatgtgcaaaaacctttagtttgaagtcccagctcattgtacatcagagaagtcacacaggagtaaaaccatatggatgcagtgagtgtgggaaagccttcaggagcaagtcataccttattatacatatgagaactcatacaggagagaaaccacatgagtgcagggaatgcgggaaatcctttagtttcaattcacaactcattgtgcatcagagaattcacacaggagaaaatccctatgaatgcagtgaatgtgggaaagcctttaataggaaagaccagctcatttcacatcagcgaactcatgcaggggaaaagccttatgggtgcagtgaatgtgggaaagcttttagcagcaagtcatacctaattatacacatgagaactcattcaggtgaaaaaccatatgaatgtaatgaatgtgggaaagccttcatttggaaatcactactcattgtacatgagcgaactcatgcaggggtcaacccttataaatgcagtcaatgtgagaaatccttcagtgggaaattacgccttcttgtacaccagagaatgcacacaagagaggaaaccatatgaatgcagtgagtgtggaaaagccttcattaggaattctcaactcattgtacatcaaagaactcattcaggagagaaaccctatgggtgcaatgaatgtgggaaaaccttctctcaaaaatcaattctcagtgcacatcagagaacacatacaggagagaagccttgtaagtgcactgaatgtgggaaagccttttgtggaagtcacagctcattatgcatcagagaactcatgtagatgacaaacattgataattttacgaaactctgaaaagtggattcacaagagatagaaacaatcatatataaagagaaactctgtaagtggaatcatcttgtcatcttccagaaaactcatactgaatagaactttatgaatgcacagcatatggaaaggcatccacagaaagctgttctttacatgcaaaaagatagtagacaatacacaggaaaactgaatttagtaaccactctgaaaatttttagcagcaagtcatacctttttttaaaaagttcatacaggtgaggaaccatgttaaacgttgtaaagtcattttactaacataagattcacaaagaggaaacttcatgaaccagatgaatatagaatagacttctttgaaattcatagtttacagaattttaatgagagaaattattgagctaatgaatggcagaattaacaaaattacaaacattttatgtatcggaagcatataccttggagggaccatgctatgagggaaagtgtaaatctagaaatgagaaacccctagggaaaaaatatatataggagtgaacatcttatgaatgtaccaaataaaccacagctggactgttaacctcaccttagaagcttcattctaaaaaaaaaaaaaaaaaaaaaaaaaaaaaacctgttaatttttctttaatatttaantttnnaaaaatntnttcccnttangaacctctnttaaaaaaatttaattnccaggntgtcnccaaaatttncaggcgaacacggcgttcggacagaacaattctcctcaagttattaacattaaattaaggattccaggatatacttccactcggtccacaggtcgcacttcctacgatcaaggggagggtaaacggaattacacgacaattaacattcccaagagccatacagggggaactactctaaggaataactctcgctcatatgtgggtgtaccagaccacataattacggtgaactcttggccagatcggggcaatttttaaaccctgtgggtgaactgtgcccatctatgtgctgcaacggaaccaaaacaagatctccaatctcgttctccaaagaaagaattttccccagagaaaatttcctctgggcacaatacggaggacaaaataactcccccggtgaattatctggaccgcagaattactcactgtcctgccccagaaagaaatttccaacacctccgggccaattacccaaaccattctgggtctcccttgggaggctcttacacccaagggtgcccccctggctaaccctc

SEQ ID NO: 660913 - DNA, 3303 bp, Homo sapiens
  misc_feature (3156)..(3156): n is a, c, g, or t
gcacgtgctcattatacatgaaagaattcatacaggagagaaaccatatgaatgcaatgaatgtcagaaagcctttaatacaaagtcaaaccttatggtacatcagagaacccatacaggggagaaaccttatgtttgtagtgattgtggaaaagcctttacattcaagtcacagctcattgtacatcaggggattcacacaggagtaaagccctatgggtgtattcagtgtggtaaaggattcagtttgaaatcacagctcattgtacatcagagaagtcacacaggaatgaaaccttatgtatgcaatgaatgtggcaaagccttcaggagcaagtcataccttattatacatacaaggactcatacaggagaaaaactccatgaatgcaacaattgtgggaaagccttcagttttaaatcacagctcattatacatcagaggattcatacaggagagaacccctatgaatgccatgaatgtgggaaagccttcagtcggaaataccagcttatttcacaccagagaactcatgcaggagagaagccttatgaatgcaccgactgtggaaaggcttttggtttaaagtcacagcttattatacaccagagaactcatacaggggagaaaccatttgaatgtagtgagtgtcagaaagcctttaatacaaagtcaaacctgattgtacatcagagaactcatacaggagagaaaccctatagttgtaatgaatgtggaaaagcctttacgttcaaatcacagctcattgtacataaaggagtgcacactggagtaaaaccctatggatgcagtcaatgtgcaaaaacctttagtttgaagtcccagctcattgtacatcagagaagtcacacaggagtaaaaccatatggatgcagtgagtgtgggaaagccttcaggagcaagtcataccttattatacatatgagaactcatacaggagagaaaccacatgagtgcagggaatgcgggaaatcctttagtttcaattcacaactcattgtgcatcagagaattcacacaggagaaaatccctatgaatgcagtgaatgtgggaaagcctttaataggaaagaccagctcatttcacatcagcgaactcatgcaggggaaaagccttatgggtgcagtgaatgtgggaaagcttttagcagcaagtcatacctaattatacacatgagaactcattcaggtgaaaaaccatatgaatgtaatgaatgtgggaaagccttcatttggaaatcactactcattgtacatgagcgaactcatgcaggggtcaacccttataaatgcagtcaatgtgagaaatccttcagtgggaaattacgccttcttgtacaccagagaatgcacacaagagaggaaaccatatgaatgcagtgagtgtggaaaagccttcattaggaattctcaactcattgtacatcaaagaactcattcaggagagaaaccctatgggtgcaatgaatgtgggaaaaccttctctcaaaaatcaattctcagtgcacatcagagaacacatacaggagagaagccttgtaagtgcactgaatgtgggaaagccttttgtggaagtcacagctcattatgcatcagagaactcatgtagatgacaaacattgataattttacgaaactctgaaaagtggattcacaagagatagaaacaatcatatataaagagaaactctgtaagtggaatcatcttgtcatcttccagaaaactcatactgaatagaactttatgaatgcacagcatatggaaaggcatccacagaaagctgttctttacatgcaaaaagatagtagacaatacacaggaaaactgaatttagtaaccactctgaaaatttttagcagcaagtcatacctttttttaaaaagttcatacaggtgaggaaccatgttaaacgttgtaaagtcattttactaacataagattcacaaagaggaaacttcatgaaccagatgaatatagaatagacttctttgaaattcatagtttacagaattttaatgagagaaattattgagctaatgaatggcagaattaacaaaattacaaacattttatgtatcggaagcatataccttggagggaccatgctatgagggaaagtgtaaatctagaaatgagaaacccctagggaaaaaatatatataggagtgaacatcttatgaatgtaccaaataaaccacagctggactgttaacctcaccttagaagcttcattctaaaaaaaaaaaaaaaaaaaaaaaaaaaaaaaaaaaaaaaaaaaaaaaaaaaaaaaaaccggtttttttttttttttttttttttggggaaaattttttttttggaagaagatcgttttatgacaaaaaaagtttttttccccgaggggggccaccacaagattttgagagaaaaggggcggtgggacaaaaattcttctcatgatgtagtatatagtatataataggaaacaaaagtatatatttcttcatggttgaaacaagggagagtcatcttctcatataataggggggggtgtaacaagaattagagagaaaacatagacatctcgctcgacaagaagcacatacagcggaggatattaatggaaaatatcttcccatcatgggtgtcgtcatcaaccaaaaaaagtaaatcatcttggcaggaggtggaggaagtcattactgggtgtggaagaagagccatcttggttggagaaaaaaacaatctcttctttcagcagaaagatattatgaggatattctcgtgggagagtcgggagcaaatgatatctggtggatggataaaacaaatattcttcgtccgcagaaagatttattatctgcggagtgcaaacacaacaaaattggttctgtgtggggtggtatacaccaccaaagtgagcaggctggttgacccaagaagaataaggtacgtgattttaaaaacagggcgttcgttatccccccacagcggaagcacatactattcttatgcgaggagcacataattacgcacgccgctattggaggagaaacgctctctcggaggagcacaccacactcttgatgatacatactacacatatgatggaggagcgccaaccaccatttcggtttagtgagtgagagtcgcncgacagagaaccaatatatgccacccacaacacggagggtagacagacacatagtgatcaccccactcattaagaagaaacacatccaccacaacagcgagcggaatgtgatacgtcactaggaaggaacccccaccaatgtagagg

SEQ ID NO: 660914 - DNA, 2868 bp, Homo sapiens
  misc_feature (2261)..(2261): n is a, c, g, or t
  misc_feature (2265)..(2266): n is a, c, g, or t
  misc_feature (2273)..(2273): n is a, c, g, or t
  misc_feature (2275)..(2275): n is a, c, g, or t
  misc_feature (2281)..(2281): n is a, c, g, or t
  misc_feature (2285)..(2285): n is a, c, g, or t
  misc_feature (2294)..(2294): n is a, c, g, or t
  misc_feature (2311)..(2311): n is a, c, g, or t
  misc_feature (2317)..(2317): n is a, c, g, or t
  misc_feature (2322)..(2322): n is a, c, g, or t
  misc_feature (2332)..(2332): n is a, c, g, or t
gcacgtgctcattatacatgaaagaattcatacaggagagaaaccatatgaatgcaatgaatgtcagaaagcctttaatacaaagtcaaaccttatggtacatcagagaacccatacaggggagaaaccttatgtttgtagtgattgtggaaaagcctttacattcaagtcacagctcattgtacatcaggggattcacacaggagtaaagccctatgggtgtattcagtgtggtaaaggattcagtttgaaatcacagctcattgtacatcagagaagtcacacaggaatgaaaccttatgtatgcaatgaatgtggcaaagccttcaggagcaagtcataccttattatacatacaaggactcatacaggagacattatacatcagaggattcatacaggagagaacccctatgaatgccatgaatgtgggaaagccttcagtcggaaataccagcttatttcacaccagagaactcatgcaggagagaagccttatgaatgcaccgactgtggaaaggcttttggtttaaagtcacagcttattatacaccagagaactcatacaggggagaaaccatttgaatgtagtgagtgtcagaaagcctttaatacaaagtcaaacctgattgtacatcagagaactcatacaggagagaaaccctatagttgtaatgaatgtggaaaagcctttacgttcaaatcacagctcattgtacataaaggagtgcacactggagtaaaaccctatggatgcagtcaatgtgcaaaaacctttagtttgaagtcccagctcattgtacatcagagaagtcacacaggagtaaaaccatatggatgcagtgagtgtgggaaagccttcaggagcaagtcataccttattatacatatgagaactcatacaggagagaaaccacatgagtgcagggaatgcgggaaatcctttagtttcaattcacaactcattgtgcatcagagaattcacacaggagaaaatccctatgaatgcagtgaatgtgggaaagcctttaataggaaagaccagctcatttcacatcagcgaactcatgcaggggaaaagccttatgggtgcagtgaatgtgggaaagcttttagcagcaagtcatacctaattatacacatgagaactcattcaggtgaaaaaccatatgaatgtaatgaatgtgggaaagccttcatttggaaatcactactcattgtacatgagcgaactcatgcaggggtcaacccttataaatgcagtcaatgtgagaaatccttcagtgggaaattacgccttcttgtacaccagagaatgcacacaagagaggaaaccatatgaatgcagtgagtgtggaaaagccttcattaggaattctcaactcattgtacatcaaagaactcattcaggagagaaaccctatgggtgcaatgaatgtgggaaaaccttctctcaaaaatcaattctcagtgcacatcagagaacacatacaggagagaagccttgtaagtgcactgaatgtgggaaagccttttgtggaagtcacagctcattatgcatcagagaactcatgtagatgacaaacattgataattttacgaaactctgaaaagtggattcacaagagatagaaacaatcatatataaagagaaactctgtaagtggaatcatcttgtcatcttccagaaaactcatactgaatagaactttatgaatgcacagcatatggaaaggcatccacagaaagctgttctttacatgcaaaaagatagtagacaatacacaggaaaactgaatttagtaaccactctgaaaatttttagcagcaagtcatacctttttttaaaaagttcatacaggtgaggaaccatgttaaacgttgtaaagtcattttactaacataagattcacaaagaggaaacttcatgaaccagatgaatatagaatagacttctttgaaattcatagtttacagaattttaatgagagaaattattgagctaatgaatggcagaattaacaaaattacaaacattttatgtatcggaagcatataccttggagggaccatgctatgagggaaagtgtaaatctagaaatgagaaacccctagggaaaaaatatatataggagtgaacatcttatgaatgtaccaaataaaccacagctggactgttaacctcaccttagaagcttcattctaaaaaaaaaaaaaaaaaaaaaaaaaaaaaacctgttaatttttctttaatatttaantttnnaaaaatntnttcccnttangaacctctnttaaaaaaatttaattnccaggntgtcnccaaaatttncaggcgaacacggcgttcggacagaacaattctcctcaagttattaacattaaattaaggattccaggatatacttccactcggtccacaggtcgcacttcctacgatcaaggggagggtaaacggaattacacgacaattaacattcccaagagccatacagggggaactactctaaggaataactctcgctcatatgtgggtgtaccagaccacataattacggtgaactcttggccagatcggggcaatttttaaaccctgtgggtgaactgtgcccatctatgtgctgcaacggaaccaaaacaagatctccaatctcgttctccaaagaaagaattttccccagagaaaatttcctctgggcacaatacggaggacaaaataactcccccggtgaattatctggaccgcagaattactcactgtcctgccccagaaagaaatttccaacacctccgggccaattacccaaaccattctgggtctcccttgggaggctcttacacccaagggtgcccccctggctaaccctc

SEQ ID NO: 660915 - DNA, 138 bp, Homo sapiens
tgagctacctttgggagggcaggaccatttcagcacctgtgtcctctttgcactatgggatttggtaaaagatggtgtttacttactaacccaaaagcagtgattgaatttggaggatggatggagctgctgtagttg

SEQ ID NO: 660916 - DNA, 221 bp, Homo sapiens
gggggggggctttttttttttggggggtttttgggggaagggtccaattcttataaggaaattgggaaatttttatagggttttggggaaaggccattttggggctgaaaaaaaattgcccattcccttttttgggggtttttttcccccttttttggggtttttttttttttggggggttttaaggggtaaccctttcccttaaaggttttttttcccca

SEQ ID NO: 660917 - DNA, 350 bp, Homo sapiens
ttccgggattgcttctgcttctctctatgcctaatgtgcgtgtacacgctcactagtgcatacgtcttgctgatgttattatcatactcaattggggcttcaatcgggagtactactcaattgtcaacgtccaggagtcgcatgtcgcctggttctatgcattcactgggggatgctatgtagcgcggttgaacgcattagtcccgccgtactctgtgtacccattggttctctcacctttggtgcgcccattgatttgatggtcaggtagggatcgtttacctcgtcttgttctgtcccggatgtcgtgcggatgggcgggcgctgtggcctaggatgatggccggccg

SEQ ID NO: 660918 - DNA, 539 bp, Homo sapiens
aacgatggtcctcgagcttggatagagaaactgaagccaaataacatcaatttcaaaatgaagccaggtttccatcttggggcacttgttcaggacacttactaaaaagcagcagcatggccgggcacagtggctcatgcccagacctttgggaaggcgaggtgggcggatcacttgaggtcaagagttcgagaccagcctggccaacatggtgaaaccccatctctactaaaaatacaaaaattagctgggtgtggcagtgcacacctgtaatcctagctactcaggaggttaaggcagagaatcgcttgaacctgagaggcaaaggctgcagtgagccgagatggtaccactgcactccagcttgggtgacagagcgagactccatttcaaaaaaaaaaaaaggggtccaggtgcaggggctcacgccggtaatcccagcactggggaggccgaggggggcagatcactagaggtcaggagtgggagaccagcctagcaaacagggaaaaaccccgtctctactaaaaatacaaaaa

SEQ ID NO: 660919 - DNA, 115 bp, Homo sapiens
gtaaaacccagccccatgtcccttacagggccctactgagccctcctaatgaacctccagacctagccatgtggatttcactgcactccataacggtctgatactagggctacta

SEQ ID NO: 660920 - DNA, 355 bp, Homo sapiens
ccattctcacgacctgcatggcttgcacctcatgtctcttaggtctctactcaaatgttatctctctgagcagactccctgactaactctaatctaaaacacttgtgcagttgccctatattccaccttatcctgccatcattatattcctccatgctgctttaggtttttcctcctggcatttattcctcactgacattcatgttacctatttacttgtgaatttcttacctcccctgactagaacataaacttcatgataacatcagtatatcccagcacttcgtatatgctgtctgaaagaagctacttaccgttgtcaaaacacgcataattgtgtctatatgccatcgta

SEQ ID NO: 660921 - DNA, 546 bp, Homo sapiens
gtgtttgtatccataataaaagaaaaatttgtcagaactgctgcttcaatctaatcccatttgagagaattgtctttactgtcttaataactggatgaattatcactctgaaaatgtatttattgaactaaagttagtttaggcttgataaaacactccagacatttttactacagactgtttctataaaactgccattgcttctaatggagaattttattttaaaagaaataaaattgctgagtttatctgcaaaacctttctctaagtcttatgggacgtaaggagacacctccataattataagagccgttgtgctcagagtctccatgctggcttgaatgtatgatccacactgttaaaacataggcagcagctcagggccctggacagcctgagtcaacctagagtagctggaaccattttgacatgtaatggataagaaaattatccattgagaagctgaacaataaaccaaagaacgggtgtattttatccttaacctctgtaaaccacgttacactgagaacacttcagttcttccta

SEQ ID NO: 660922 - DNA, 480 bp, Homo sapiens
  misc_feature (41)..(41): n is a, c, g, or t
  misc_feature (457)..(457): n is a, c, g, or t
atggtttactctgtggcccaggctggagtgcagggagtgcnatcaacaaagtaattcgtttttaagaaagctctgatctacaagccttagggacttgtctacttaccaaagtgaagcatacccatataatgacaactacctctgctgatctgcaagattttataataggaaatcttctttacaacaagaagtatgtggcttataaataatatataataaaacatttatgctatgatgacaaaattagtcttattcttgccatcaaatatgtatttgacaatgaaactgctatctgtattgaatgactatataatttgtttgccatatggcaagtacatcagcactgcatactttgtggaacagtatatttccacagaacagcagtgtattaaaacattctaaatattaagaaaaagaatatcaattttgtaaattacccattgtaaagcacagaaanaaaaactgttttcagaatgccgg

SEQ ID NO: 660923 - DNA, 134 bp, Homo sapiens
ttggggctccatcagggagggacttggtacaggaagaaatccggtgtctccaaccacactatctacccatcatagacccctttcctatcactcacgggccccagccggagcacaaaggagatgcatacagttct

SEQ ID NO: 660924 - DNA, 325 bp, Homo sapiens
tggcgctgtctactctggatgcgcacggtccacagcggttagtgagctgctgcacggtaccagctcgtcgtcgaagcacagttctttcttttcagcattggagacggatgcagcggactatagaagggctccggcttccccagtgcctccaagagcttgttaagggatgtctgggaactgggtcgctgatgcttggtggcttttgcgggttgtgcaggtgcagtaaggacttggtggtgcggtcgtgcagagtcatgctgatgatgagtttcagggacttggagtctagtaggttcgccggaatgatctggttaagtctgatacc

SEQ ID NO: 660925 - DNA, 341 bp, Homo sapiens
cacggtagattgcactaattagttctcgtcggagtctcagaggagtcgagtgtgtgtgtgtagtagtgtgtgtagtgtgtgtgtataatcacaaacacacaggaagccaaacggatgctagtctttctatccctccccaatactctgtgtgtataaaagccccaaaaacaggagagagagggcagcgcaggagagcccatctgagaaaattctaaaataccagtgtctatatgacactgggcttagaaatagaaagtcacaattcagtctataccgctttacaacggatggcccaaattcgacccacgctaagactggcgctgccccagtgagcgtagggg

SEQ ID NO: 660926 - DNA, 246 bp, Homo sapiens
atgtgatttacctaaatagctgttaccttaattgctgtaatagctctgaatagctttcagtttatgtcttacatttcactaggataatgcgtgctaataacagttaatatatgcttcgaggtcaggctgtacattgattcaccatctagagtgacctggcccagaacaaattgcatccagttcctttgacctcactgaattgctgtaacaacactgtatgactaaaagtcctgacagtcatttagg

SEQ ID NO: 660927 - DNA, 1220 bp, Homo sapiens
tagtgttgttgttgtgggattacggcttggtagatgggtttatgcagagtggaagttgagtttaatgctatggggacagagagatagaatgtgtgataacagtgggggaatgttgtgataagaggtgcaatgatgtctagggagggaaatctcggtagataggtatatggagtggtgtaaaggcagttgggtgggtaggtatttacttatatgatagtatgtggtgtaatggggttctgtcgtccatcctagctggtaggtttattgttatttttagatgaaagggtaggtgtgatataattatgttgagcgtttgatagtgatggttttatacgtaatgttcttagggtattcttatggggtaaagtgagagttgatagggggaatggaattatagagttggagagatgccgaaaagttagtgggtgccataggggtgcattcggagatgtttgtgtggagtgttttataggttggtctcgcgaataattattccttggattcgaagagttgagtttagtttatgagtgaaggtttgcttactatataggtgtccttaggaagggttgtttttactctaaactgaggggtgcgctgagcaaagtaccctgcgtagaggtgcaagagatggtgagtctgaggctgcagaggacggcaggttagtctgctaggagactaccggtttgcgcggaatgacacttagacgacgtatagtggcttttcgtgagcacgccttggcgtgtgatgattcagtcgttgcagctgtgtctgaatgtcacggctcagtgggtcattacagttacgacgttcatttatagcgaatcttgagacaaccaggacgtgacaccttacaggtcataccagagtcaatctcagatatgactagatgtattatagcaaaatttctggtataaaaggataaataatctgttactatgagtatttaatgccaatattcgttctaaacttcagtatattgtagcttatataatactttttgtcaattgaaaattatagtcaataggtagtatgcacttgctttaatatatctctcaactgattctctttcgcagggtgttcatttagaagaaagcaacagctaatgattcatacagcttcctgaattttgtgttgtctcacagaaagccttatcataaattccataattctaatttatttaccaagattatgtaattacatataacttcgtgggtatacag

SEQ ID NO: 660928 - DNA, 961 bp, Homo sapiens
ctataacggggtcatcagatgctccttccaaacttgtggccggagtggtttaagactgcctatatgtctccatcaacgcactgtgccaggcacccctttgggcgcagtgactccttactcaccggcctcaaacagtccaactgcagcaacactgttgcccgacaccgggtccctgttccttctccgcgggtaaagtaagcccgccttgccgccctccctacgccctctcttgtcgtgcttccggagaccccccttggagtcccccgctgtcgtgccaaagcttccggccccggtgtttcaaaccgtccggcttcggctctccgtccggttcacgggcgccgtgactccactagaaaattatatatgggccgcgattcagcaaagcgtgaattcagtgtgttgaatcgaagctgttcatacccggcggcagtttcctactgacattttcttccaacgtgcgaagtttgtcggccgtacgaggcataaatcgcctatggtgattacatcaggcctcaatttttgggcccccttggcaaccccccgcggctggtttccccgtcggatcaccccccctgtgcagacgttgaccctcctgtacgccgcgtcccacccctggggagaatccgcccctctacacccaccctctgggggggtaccacacgcgcgattggagcagatgtctcacagtacacctttcacaaaaagcgatctcgattcttttcaataagaacactaatttgctcgcaggacacgagagatgagtagatagcaatcatttccctacagcatcacttggaaacgaatgcgaaagatctgcaccgatgcattcatgtagtagacgacaaagagcacccccctgtggtgtaaacaagcactcacaccacctttatttcctggagaaaaacttagtttccgaagccctttccaatacaaccactttttctgcccgatcattagacaa

SEQ ID NO: 660929 - DNA, 158 bp, Homo sapiens
ccgcgtgcatgtgctaggatatcgctagctacttctttcaatcatcataatacctgtaaattacatgctcttatctcggaatataccagaactggggttggaaaaatatgtctaacttcaaaactggaaaatttttttactacaataattcggccatt

SEQ ID NO: 660930 - DNA, 729 bp, Homo sapiens
atttgagttgaaatttctgatgtttaaaatctcacatcctcttcacagtggggacagtaactttctgcatctttctgcttttccctcagagatttttctctttctgccaggagggaatcccttgcctgttgctgtgaacaacacttctcactaatttccctctttcagttcctccgatccaaactgaaacttcctttttctttctcttatctttcttttcttttcttttttcttaagacagggtctccctctgtcacccaggctggagtgcaatgacacgaacacagctcactgcagcctcgacttcctgggctcaggtgattttcccacctcagcttcctgagtagctggaaccacaggcatgcaccaccatgcccggcttatttttgtagtttttttggagagacagggtttcaccatgttgccgaggctggtctcaaactactgggctcaagggatcctcctgcttcagcctcccaaagtgctgggattacaggcgtgactcactgcgcccggcccaaactgaaactttctaaaaggaagtgttactctatgactcccctgcttgaagtcctgggactctccagggtttatttaaatgcaaatttagtttacggaatttgtcactacttccaatccccaagcctgcttacagcacacagacacacgcgcgcacgcacacacaacacacgcacaacacagttctccagccatagtacattatcccta

SEQ ID NO: 660931 - DNA, 92 bp, Homo sapiens
gcggccgcctactactactactactgctcgaattcaagcttctaacgatgtacggggacatgtaataaaggtgtttattgttttgttcccac

SEQ ID NO: 660932 - DNA, 458 bp, Homo sapiens
  misc_feature (83)..(83): n is a, c, g, or t
  misc_feature (126)..(126): n is a, c, g, or t
  misc_feature (128)..(128): n is a, c, g, or t
  misc_feature (156)..(156): n is a, c, g, or t
  misc_feature (162)..(162): n is a, c, g, or t
  misc_feature (176)..(176): n is a, c, g, or t
  misc_feature (195)..(195): n is a, c, g, or t
  misc_feature (202)..(202): n is a, c, g, or t
  misc_feature (249)..(249): n is a, c, g, or t
  misc_feature (259)..(259): n is a, c, g, or t
  misc_feature (261)..(261): n is a, c, g, or t
  misc_feature (266)..(266): n is a, c, g, or t
  misc_feature (273)..(273): n is a, c, g, or t
  misc_feature (285)..(285): n is a, c, g, or t
  misc_feature (310)..(310): n is a, c, g, or t
  misc_feature (359)..(359): n is a, c, g, or t
  misc_feature (366)..(366): n is a, c, g, or t
  misc_feature (368)..(368): n is a, c, g, or t
  misc_feature (370)..(370): n is a, c, g, or t
  misc_feature (390)..(390): n is a, c, g, or t
  misc_feature (434)..(434): n is a, c, g, or t
agccatggcaggaatgcacaggactgtggcatttgcagcatcaaatcaccctagtgccatgtttggttatgagattgtaaatnattcgctcccccgtcctcccctcccctcattttcagtggcaananaggacccttgttgtacttcttgtttaanttgcanataatgtgtaaaangctttcgttgaaagaaaantgaaganactgaatgtgtatgtctgtgtgggtgctctgtccctgtggttgtcanagccagtaananttgancactganaccccgtacaanaaattgcataggtaagaacctcganctggtgttctctgcgtggctgtaagggactgtatatcttgtaaaaaaanacttgtnanangcttgaacagttacagcaanagctgaagaaacatttcctcaaatgtattattttaacaggaatnatgttctaatttcccatcctttaa

SEQ ID NO: 660933 - DNA, 82 bp, Homo sapiens
tcctgccttaggtttttttgtacaaatagcacaggaggaccccagccccatgcaaatgggaccccaggggcgggggtggggg

SEQ ID NO: 660934 - DNA, 705 bp, Homo sapiens
agaaaaaagctaggtagagaggctgagatggcgctgtcttccgaactggaaccaagttatccacagcaaaccatgctggcatccaacaggctctggcccagcttagtagccgtcaatgggagtgtaacttgcaccagtgagagtcatccaaggacacaaagcctgggcttccccaagaccccatcagggaccccatcatccataagacccacacaacaccgaatacgagaccccaaaagggatcaacagacgagaccatcagaaatcatgaccacccacaactattgaagagaggccaggtggaccaaatggatgagaagtgaggatagaggttgagagacatcactcagaggaacatcattgctcagtgtggattaagatcaccatatataccacccatacaacagtcatggtgagacatggccatccccaagaacaaaccaaaacgacattgcatacaaaggacgggaactcattatgcacaacacatcacatccatagacatcatgagcaattacattgtgagacatactaaaaagacccttagcaggtgggcaccccaagatgcacccataccaaggtggacaacgacagtacccaataacacgcaataaccatgaggcaaacaaagaaaggtggcaccccattgaaaaccacccatacaaacaataccttaggagaaaacccaagatataaaaattaaca

SEQ ID NO: 660935 - DNA, 743 bp, Homo sapiens
gggaaatttgtaaaatgcaaaactgaatgaaactgttactaccataaatcaggatatgtttcatgaaaaaaaaaaaaaaaaaaaaaaaaaaaaaaaaaaaaaaaaaaaaaaaaaaaaaaaaaaaaaaaaaaaaaaaaaaaaaaaaaaaaaaaaaaaaaaaaaaaaaaaaaaaaaaaaaaaaaaaaaaattttcccccccttttgcccaagcaactttaaaactaaacaattttaaaaatcgcccccaaatttggacccaattgccaaattgccccaaaagggaggcctttaaaaataaaagggcccggttttaaaaacccttaaactggaaaaaccctggggtaacccaattaaaagcctttggaaaaaaacccctttttccaaattggggtaaaacgaaaaaggccccaaccaataccctttaaaaaaattgccaacccttaatggaaaagggaaatttaaaacctaaaaatttggtaaaaatccggccaaaatttttggaaaaaaccctaattttttaaacaaaaggcccaaaccggaaaaacccttaaaaaccaaaaaaatcccccaaaaaggtttaaatgtgttcccaatttggaaaaaagaccccttttaaaaaacgggccctcaacctaaaaggccaaaaaacctttattagggcagagccccattggaaaccttcccccaaacaaattttttgggccaagagcccaaaacgctaaaattgccctggcccccctttt

SEQ ID NO: 660936 - DNA, 166 bp, Homo sapiens
catgctgctgctgctttagcgcgccgccgcccaggctgactgccttgacaatgatggcgcagtacccttggaggccctgaatccagcagctctgcactgctctgagtccagccctgaaccttgcctcccagtgtttccagctctccagcctctttaccccccagca

SEQ ID NO: 660937 - DNA, 946 bp, Homo sapiens
tgccctttctgtgccccccaggttctatctccccgtacacacccgacggcctggcttcagtgatgtgtgatgctggagcatgccacttctccatgtgcccctgtgtgttgcccctgtgactgtgttgcagtctgcttgctcctgtgtggtgtgaggctggtggtgtgggatgcacgtgcctcgatgtgtgtgtgcctggtgccgtcctccagccccgcatgctccctggccagcccccttgtcgctgtcggtccctgtctaaccatgatgccttaacatgtgtgagtgtacctgtgggtgcctcactagcctctaactccctgtgtctgcatgagcatgtggcctacccctgtcccttccccggtggcgaacccagtgacccagtggacactgtggggtgtgcttgctgctgctaccccagcccacacagtgcctggccagcctgcccaccattccctggacagggctgtggagattggctccggcggcttggggaaagccaaattgccaaaactcaagtacacctcagtaccataccagtgaggcttgggtatagtcccttgcctcatgccattttctgatctcaagcggagcaagtgcccaagagacacacaaacacagaccaaaagagcacctcaagagaaaaagacatacaacacaaaaaaacatgagaacaaaacaaagacacagaaatagacaatcaaaaacaaaaaggacaaccagaacagaagcacgaaaacaaggaacaacataacatgacgacatgaacccacaagaaacacaaaaaccacaaaccaggaaagcataaccaaacagaccagaaaaaaaaagagaacagaacacaaaagaagagccgccagaacaacaccaaaacacaacacagagagaaacaaaaagaaaacaaaaacaaaaaagacgagaaaaaacaccagaaaaagcaacaaag

SEQ ID NO: 660938 - DNA, 1515 bp, Homo sapiens
  misc_feature (375)..(375): n is a, c, g, or t
  misc_feature (1479)..(1479): n is a, c, g, or t
ggtggtggccatttgcaacgccaggttgtgcatgctcagggctatgcgggtgcgtgggcgagggctcgcacgcgactgcccctagctaattgtcatctcatcggagcgctgcagcttgcccgggggcgtagtaggcgctagcagaggctgccggcgtcacgcttcgtggggcgtcaacggctgccttagctctccatcgtatcatattctcgagcctgcgccttcatagtacccgatactgactggagcgccgtggacatattactgccaaaatgcaccggacacgtgacaagtggttgtgcatacgagacgctgggcgacacatggctggggtacgttgcgcgggtatcccccgctcggaacagccaacgggcncaagtgttctaccttcgaggcaaaaagaccggttgcgacacgtagaacgggccataggcattgacttttcctgggaaactcttccacctcccattcgggtcaccccgttcccaggggcacgtcgaggtagtattggcgaggtgtcagcacgcaacccataccgtggtgcaacttggctttccggggaacaggaaatagagggtagcaacacagcgttagacagccgagttagcgggggcgtggggcaagcgaccaacctactccatgtacggacacatgtacccatcgaccgttgggtagccgcgcttggcttagcgtgcaccgaggggaaccggaaagggattcggcaccggaggcgaatgagtttggatcccgggaacctcccaaaaagcttctgatggaagccttggctgttctcatgccctgcggggtagtcctcccaacgggactcgtacttgttcggttcggtcacaaatctcttgcaagtacattggctcccatgcgcgcttcgttcgccaccaagcaagtttgtggcctaggaacgctctaacaagccggaagggcacccaaggacaggccttgggtttaccgcaaagaagccagtttggccacgattcgggaggccccttgtttagcggattgcccacaataacggcggtttgttttggaccctctagacaaggcgtacctaggggttgccctaaagccggaagacgttgccgcgcccacccaaattcccgtaggccacacggagtttgggtccatatatgggtccttggaattgtccaccatgggccaatgccggttgtctctctgggaagaaaggccccgcattagccgaagtcgttagtagaaggagggggagacattttgggccttcccaaatagaacccttaacaagtaacttgccgcaaagggaaattgactcctcggaaaaagcgttctggcgcggaaaaaatttcttactctctaccgggtccggagggaaaatgcgtttttggaactaggcgcgttgccttgtgccgatgaaatacgcgcatggttccgtgtgttgccccccagaaagtccaccacggggaaccacagggtttctggcgcctcatngctttgaaattcagacaccttagggcaaggcgtgtg

SEQ ID NO: 660939 - DNA, 266 bp, Homo sapiens
tgtgaacctgaggattcggctgtgcatgcttacaactcgccagtattgactgttgtttgccaggtctctggcagggtctggggtgacgaacgcaggactgacccgtcagtgcaactatcctgtgtcgtactggctggggctgctcacgtcctggaaagtgagagaaaggggccgtggccagtgatgccctggtgtggcacatccagaacgcctgggtcaccacggagcagcaggagcgataattctcccaggatgggccgggactt

SEQ ID NO: 660940 - DNA, 1842 bp, Homo sapiens
ccaagataactaaagcagggaagtgatcaggtttagtgtcttagaaaagtgttgccagtgttgcatgctaaatgtgcactcagcacagggtgcacttggcaaccatggcattgacaggggtgggcagcatgggcagcacacaggcacatgccagtactggccagccagcttaccagccagtcccaggtgggcaaacacccagcagccttgcaactcacaggttgtaacacactcagcaggggccatcagggctgcgcacagcagcatgcgcatctccagcagcatagtctgcacccacagcatcaacagctccacgtcagagcacttctcacacagcacctgcaccaagttacacggcattttctcacccaaccacagtgtgcagacagacataggtggagcacatgcacactatggtcctctcagagacatagcgtatagccacgactgacagagattcgcatcgcatcttaatcgagaatcacacacaggtagcatcagcagtcccaagcagagcgtcagcacacatatatcaggcgttcagaccagatcgaccgagagcacacaacatttcccccccacatttccgtccacaggcgggcaatatctcaacgcaccttccagcgtccctctaacaaccgataactttgttcaagcaaaaggaatatccaccaaggtacaagcatacaacaagcatacctctcaaaagagataaaattcggaccacattcaaacaatatccccgaaaatttcagcgtagctataagcggccgcggcgggcccacctaaccgatgggcccatccaacccaccacgatgggacacacatgcccgcaaagaccaaccactacatgaggcgaaaggcggacccacgacacgggaccacaggtgccgaggcaacacccaaacgggaacgcacgttccacaacggcaccgacttcaccaaagacacagggcaacgcacacagttggggacagccccacgcacccactctggaggtagcaaaaaacagcacccaaccaggctcccagtcccataacccattcacacccgcaaacgtaacccaacacaaccaacacaacttctaaggccgcatagggcgcgccaacttggctgctaggcggcgccgccacatgggccacgatcaataagacaagcccgcactcaggaccctagacgcgtcaagcggggccaagggcacgctgaacacgccacccgcggacggcacaaccctacggccagtacggcaacccacccgcggtggcagcggcacagcgccacgagacatggacacaacgagaacgcgccacacgcgacaccacacgccgcaagccatcacccgaccactccaccaagaccactgataggacgtaaacacgagacagcgggaacaccgactcccctggaccagccacagcaacagcacaaagagcaacgacaagcccacgaaaagcacgacaccacagcagccagcgagaccaacgaccagagcatcgcacacacaaagacaggacagcagacaccagaacaagaccacaaccactcgaccgccacctcaacacgcgaacagacaaacaacacgcgcagacccccacagccgccacccccgcgccccgcacgccgccccacaagcggggcgccacaaccaggacccgcacacacacagacaccagcacgatcacaacgacgccaccagccggcaggccacaaacgacaacaggaacagaagtgagcgacagacagaaaccaacacgaacaccgctcagcacgacacatcagacccagaagaacaaagcagacacagagcaaacagcagcacgagcagccacgacgccgcaccag

SEQ ID NO: 660941 - DNA, 422 bp, Homo sapiens
tcccctcttgtgctcagtcgccctgtgttttgaggtctcttttctctactccatggttctcaatttattgggggggaaataccttgaagcaaaatacaatggaaaaaaagtttttacccttttctgtcaaatgttcatttttatcccttcctggtctgaacaaaaactggttatgggaatcaacaccaccgagctctggtgggagaaaaaaagaaaaaccgtgttcccttcgctctgctggagaacgctggagagggtggctaggcccctgtgtagtagtgcatagaatcctagctttttccctccttttctctggtatatggggccttcagagagtacactggtgtctcctagttgtgaaattatgagcacagtttagcttttaccaacattgttatcgttgctctactttctcctggttt

SEQ ID NO: 660942 - DNA, 209 bp, Homo sapiens
ctaatggttaagggactacttcctgagaaacgttataatttatgtagggtattgagcttgaattttttttaatcataaaatcttaggctgggcgtggtggctcaagcctgtaatcccagcactttgggaggccgaggcaggcagatcacatggttagaagttcaagaccagtgtggtcaccatggtgaaaacctgtctctactaaaaaa

SEQ ID NO: 660943 - DNA, 395 bp, Homo sapiens
ctgtggccttcaaagtagcagcgtctgtcatatttggttttgatgatccctcaggattataagtcagttgaatggcttttaccaggtgtttgacttctgatgttgtgttttcaccttaatgtaagatgtcttccaaagactgtagtcccttgtccacttgggtgtgataagtagacagggaatatgcaatgccacagggagttgcgcaatagcgaccgagtctttcatctaagatgcagcagtggtctctggtagcaacatatgcgacacatgttgaagagagcaataagagagcatagaagtagagagttacattccgggggcgcgaggtgccactcatcatgtgtgagtgcccggagctgcgagccgtgctcgtgcagaattcgcgcagcccg

SEQ ID NO: 660944 - DNA, 422 bp, Homo sapiens
gcgacactcttgagtggaaggtacttaaaaaacaggaaaagcgtgtggaaaatgccttgtcttagcgactctcaaatgcaatgtaataaatgctggctctgaggacaacgtacaaatcaggcaatctcaggtgtgatgccaagagggaaaatgaggtattcattcaataatagttcattggctgggcgcggtggctcacgtctgtaatcccagcactttgggaggccaaggtgggcggatcacgaggtcaggagatcgaaacaatcctggccaacatggtgaaaccgcgtctctactaaaaaaagaaaaaaaacaaaaaaggaaacattttatccagataacgtggtagattccattgtgtggttcgaaagaaattaattacgcggagaactgtgcatataaccggttaaccccagaatcca

SEQ ID NO: 660945 - DNA, 904 bp, Homo sapiens
tacaatccactccggaatgagtctctgtccatcagctggaggaaggggcttctgggtccaccccacacggagagagctgcacttccccatcagcttcatccctggggcccatcctgactcctctgacctggggacgatagtcccactaccctgtgctccttcttcccccggatgagcaacctgagtgctggccaaacccgtggcatggagtggtgcgcccagtggtctacgtggtggagccagagaatgggcagatgatgatgggagaggggatcgtaggggcaggccatgccagactcaggccccctacccctccctccaggacatgaacaaagctgagtggaggacggacggtgcagcagtgacttcgagagtgtgaaaggtgggcacacgcatatgagtgagagacgaaggaagatggacccagaccacagagagagcatatgtcaataaagcccacgctgggggcaaggcatagcaatccacaacggaccaaaagatcataggggaacccggtagatattacctaccttgagttccgagaaacaatgggtttgtagtggaaggatccaacaaagtacaaaatagccgtagccccttgagaacattcaacaaacccatgaacatccaggagttcaaccaaaaggcatgagaccaatcaagaatcatgagtagtagttgaagtagattgaagaccgaggattgctcaatggataccaaacaacgtgcacgatgtaaccaagacacctgataaaccaggacaacatacacgctactatcccatgcggagaggaacgtaaaccctgaaaatatagattggaatttgcaacacacatacaaacagtatcaaaaaaaatacaacccattagacaaaaactgaaacagaactagtaacaacaatgga

SEQ ID NO: 660946 - DNA, 179 bp, Homo sapiens
cacctcacctagctcacttctcgatgtcgaacagtgccctggtggcgtgggtagcattggaggagggcaggtccccgcgcgcgcctcacggacagaggtgaccttaatgaaacgcttggtcccggcgcggttgtctcggggatcatgcagcggaatccatctttggtagaactggccat

SEQ ID NO: 660947 - DNA, 313 bp, Homo sapiens
ctgagtgcagtggcgcaaccatcagctacactgtcaacccccacctcccgcactcaggtcatcctcccgcctcagcctccagagtagctataaccacaggcatcaccacacatccagttaacttttgtatctattgtagtgatgggtcacgccatgttgcccaggctcacaaattaactatagctagtggtccccttaataagcagtagagtcaggattcagcgcccggtatcaaggctggactctcagattcacgctgtcaaatcacactgccttaactgtaaaaccagcagatacaattctggataagtga

SEQ ID NO: 660948 - DNA, 236 bp, Homo sapiens
ttcacagacccagatggccgggttggacccgaattaggccaagtaagacaagtttctatgctaggtggtggcctgcggacaggatatgtgaagaaacttcagagaagggacaagacgttctattactacaacaaacggagggaatgtgatgacaaggaagtccacaaagtgaaaatgttagtgcttacgagcgtgtcttcgttgtattacttgtcaattatatgttaagtattcgt

SEQ ID NO: 660949 - DNA, 148 bp, Homo sapiens
cctatttgtttccggggaacaatgacggggtgggaaaggggaaaggaaaaagtttgggaaagggagatggaaaagaactcaaggccattgcaaccctgcccggggcagatttgattttcacatttttacctggacattgagcctccag

SEQ ID NO: 660950 - DNA, 551 bp, Homo sapiens
ggatccccgattgtgaataggtaggtaggataagagaatcacgatgcaccaaaatggtaagaaaggcagctatgaacatggggaagacaagtgtgaacatgaggaagacagagatgaaggtgtgaaaacagatgtgaggataagaagacaggtgtaaaggtgagaaagaggccgggcatggtggctcacgcctgtaatcccagcactgtgggaggccaaggcagatggatcatctgaaatcaagagttcgagaccagcctggccaacatggcaaaaccccgtctctactaaaaatacaaaattagccgggcgtggtggcacatgcctgtaatcccaggtactcgggaggctgatgcagcagaattgcttgaacccaagaggcggaggttgcagtgagctgagaacgtgccattgcactccagcccgggcaagagagcgagactccatctcaaaaaaaaggtgagaaagataggtgtgaacatgaggtggcaggtgtgaagataggaaaggcaggctcatgttcacacctacctatttcacgatcggggtac

SEQ ID NO: 660951 - DNA, 351 bp, Homo sapiens
  misc_feature (255)..(255): n is a, c, g, or t
tgtgttcactgtataatgtgttgtctaaactgggacacgtttggaaataagagggatcatgtgttaatatatatagaaggacagcagacttaagccaggcctgtcctggaaaaccagaatgtatgtgtcacctcagagagacatgtggtaaaccctttaaagatactgtctcttggtatctcctattcccttagacaaagtatcatgtgtggaaagagcacaagctgtattcttcttcttgtatctctctctcanaataggagaagagtctgtaagggggaggtaggtacagaagtactccatattatactacaggcatcctcagatgaatgaggtattgtgctcgtgccg

SEQ ID NO: 660952 - DNA, 115 bp, Homo sapiens
actctagcagagatgcctgatgggtgctcatcccccgccgcggaacgactcttcaggccccacattcactgggagcttcctgtcaccctgtgcaccagcggtcacttgatgccct

SEQ ID NO: 660953 - DNA, 211 bp, Homo sapiens
gcgctgggggtttgggacctttaaagcctgccctggttgtgtggactccttaaagccaatcattttttcacttttttgggacacccagggggcctgtttacaagtgtggaaaaactcctaattttaatgtcccagacaatgtcctagtgttggctactacaatgttgatgctaccctgttggaattattaaactgattattttttttatta

SEQ ID NO: 660954 - DNA, 164 bp, Homo sapiens
tcgtgctaagattaaaaatgccctaacgcagttcttaccacaaggcacacctacacccctgtatccccatactagattattatcgaaaacatcagccatactcattcaaccaaatagccctggacagtacggcggggataccgacgctcgacattcgatcaatc

SEQ ID NO: 660955 - DNA, 298 bp, Homo sapiens
tgttgggctctctttctgcagctctttcaggctgtctttctcaaagcgtctgcagcaccacgcggccacggccctgaccgacgccggtgttgctcttgcccagcttggagccggcggagctcagccagcctttgtccagcagcttgttcttcaggtcggcttcgatgcccgggaattgcttgggctctttggtctcgatgtacaggccgggtttgtgctgcgggttgccttcggcgatcttgatgatgtcgtccaggctctggatcttcaggcccacgaagcctgggcgcgcgcggtc

SEQ ID NO: 660956 - DNA, 169 bp, Homo sapiens
tttaccacggggttaggctggtctcgaactcccgactcgagatctgcccgctttggcctcccaaagtgctgggattacaggcatgcatcatgcatcaccatgcccagctaatttttttaagaagttttttctgagccactgcgtctggccttctaacaatgctccgtca

SEQ ID NO: 660957 - DNA, 221 bp, Homo sapiens
  misc_feature (53)..(53): n is a, c, g, or t
  misc_feature (55)..(55): n is a, c, g, or t
  misc_feature (59)..(61): n is a, c, g, or t
  misc_feature (67)..(72): n is a, c, g, or t
  misc_feature (75)..(75): n is a, c, g, or t
gctgggccgtcgggcatgttcccatcatcacggacgggcactgggtagttgtntncgtnnnctgttnnnnnnganggagtacttgaagtaggggctcaatgggggcagaattacagcgaggcccccgacgacgaaggacacgaccagcactggctccttgtcccaggcattcttggggaaggcgccgactctcgcagccatctttgtctccccgggataca

SEQ ID NO: 660958 - DNA, 434 bp, Homo sapiens
  misc_feature (31)..(31): n is a, c, g, or t
  misc_feature (136)..(136): n is a, c, g, or t
tggtcctcaaacctccctggaccctccatgnatcccgcccggcctcggccctcccccaaagtgctggggattaacaggtgtgagcccactgtgccccagccccccacttttttgtaaattgccacctgatcccagnaaaatcctaaatgccctgagaagctctcttcccctggaattatgagagtagcctattcgtgtataaaaattcatccctaatttacccaaaaattacacagtcccacagagttaggctactttgaagcagcaaagatggcagtgtccacaaatgacacacatagaatatacagcctgaatgcagaatgtgaacctgtgagcctaaatacccaagagccttaaatctgaagttaatgtgaagggaataaacagttccagtggaatggtgaatgcatagagtgtactagtgtgttagcaaa

SEQ ID NO: 660959 - DNA, 154 bp, Homo sapiens
aaccacattttagttatgtcttttattggccatgatcaaggttccagcccctaaattaaaagaagtaaagctcaataggtaaggaagaccacagccaggattggaaaattttgcaacctagtttcaggtaggggatggatttggaatggattaa

SEQ ID NO: 660960 - DNA, 122 bp, Homo sapiens
cgcaacaggtcagaaaaaacctttaataccttttaagggtggccacttatgctttcttgccagatgcctttgaagcaggtgctatctgggctggagctatttgacccatctgtcgtcttctc

SEQ ID NO: 660961 - DNA, 611 bp, Homo sapiens
gggtgcagtggctcacacctgtaatcccagcactttgggaggctgcggagggaggattgcttgagcccaggagtttgaaaccagcctgggcaacataggcctccttgtctctatgaaaaaaaattagccaggcatagtggcatcttcctgtagtcccagctactccagaggctgaggtgagaggatcccttgagcctggaaggttgaggatgcagtgaaccgtgatggcaccactgtagtctatctagcctggtgacagagcaagaccctgtctcaaaaaaaaaaaaaaagtagaatgaaggacttttcataaatttttgtaaatggatgatgatgggtatgaaattgctgcggcttttagccttcttctgatgcatttacaagagatgcaattattttaacctatcagctttaccgctgccgcgccagacttgccaaatgcgtctaattacacctaatccattctcacacgccaagcaaccatcaatcgagtaaccacacaacctaccgactacgaccccatctttacccattacgcacccactcagccctaatcccgaacgtctccggcacctcaaccacctccaggcacctatctcccatcgccggcc

SEQ ID NO: 660962 - DNA, 140 bp, Homo sapiens
atccagaactcacggtacggtcagaaaggtagcagcttctccaggtcagcacgcaggtgtgaaatcactcaggagggtgacgtcccggatggccatgccagacagccccaccttgccgttccgctagatgcacacggtgt

SEQ ID NO: 660963 - DNA, 332 bp, Homo sapiens
tcaatgtgacctcgcgcatgatcgccaactagctggagccagacaaagagatcgtgcatgacggcgaccatatgatcatccgcacgctgagcacttttaggaactacatcatggacttgcaggttgggaaggagtttgaggaggatctgacccgcatagacgaccgcacgtgcatgacaaccgtgagctggcacggagacaagctccagtgtgtgcagaagggtcataaggaggcccatggcttcacccagtgtatcctggacgatgagctgcacctggagattatagtgcaaggtgaagctcgcatggaagccctcaagggtcaacgcagc

SEQ ID NO: 660964 - DNA, 311 bp, Homo sapiens
gggaactgcattccccaggctggatgcggtggctcacacctgtaatcccggcactttcggaggccaaggtgggtggatcaccggaggtccagggagttccacaccagcctgggcccatctcttactaaggatacaaaaatttagccaggcgtgtttggtgcgctactcttggtgcccggctactctgggaggcttgagcaagcaaatctgctttaacccctgaggcgggaagtgccggatggacaaagattgtccctttgcaatcccaccttggggacgaggagactatccctctcgagcacacaaaagag

SEQ ID NO: 660965 - DNA, 1009 bp, Homo sapiens
cattggttccccttgtacgtggtgaagttttcttccctgtcgctgactaggcttctctcttgtgctatgggccccatcgaatcttcggcgtttatgaaaggatatctttaggtctcacaatatgatagttaattagttcttccaaaggggaacctttttgaggcaagcaagtgtagtagcattcctaactgtgcaaccgtcgcatagccagagcccatgtaggcgtctgtctgtctaatgcagcgtactgacgtatgtccggaatcttcacagacgtgtcaaatcacaggcagtattctccaactagcacggcacagggactcacgagactattgtctccttaacccaggactagagttccctcgttactgtcacttcctttggtcagtacatgccctgggcttgctcgcactttggccggtcctagacgctgcttcatgacctcctctgtcctgacatgtctgcatctccttgccaggtcagctcattcacaagagtgtgctcccaagcctggatgaggttgcaccttgcatcttgagcatgcatttctcacaataattatctaagctgctgtgataatgttctgcatttcaggacactcatccattatcttggtctgtgagctcctagggttacgggtaccttgtatgtctaatcttatatccctagcacaaagcaagtgcctggcacatagtcagtgccctaagtattcgtagacgtgaagaatgaccagccatctcttgtgcctggtttccttatgtgttgaatgtggtagaggttatgtccattgctagggagagacatccagtaatgaaatttactattctagatgcttctacggtaatgtctgatctgcccacatcatctttcttagtaacacaggagaaatgtgtgacacctatattatacatgaaaacaatctgattaccactagttgatctataatacacaaatttaacttgcattttaaagcattcttgatatgtgctttgctacacagggtatctgg

SEQ ID NO: 660966 - DNA, 458 bp, Homo sapiens
ccctaccccggggtttgcctcacagggggggggggccccttttttttgaaaacaaaaagggggtattcagttgggccctgttttttccaaaaaatccccggggggcccgggggccccaccggaagggctaaacccggtgggcccttggccaggggcattaaagtttccccccccccccctgggcccccagggggcccggggggggttgggggtcccttgcccaaaaacctttttggggggcccattaaaaagttggggcccaaaaaaaaaccggccaaaaagggggccctccgccgccttaggggggtttttttcccccttccccgggggcccccccttttctttgtccccccccccccactttgtttttaagttttttaaatttggggggggggggggggggggccgggggccccggggcccgggttttttttttttaaaaaaagttggaaaaccca

SEQ ID NO: 660967 - DNA, 324 bp, Homo sapiens
cccagggaaaacagcctgtttattccagcgtctagaggtggggatgcaaaatgcaggggtgcccaaaggagggggcgcctgcaccccaggggcggaccgggacaatgcccccaatccaaatacagttcacccggaagacacggcagagcctcccacgttccaaaggctgacacaaaccagcagcgtgttgtgttggggggggggttcgaccaccatggctcgccccgacggtggggggggagtggccggtttctcatgtatcagctttcggccctcggggggcacatattttaagggggaccgatgttattaatacacaggttg

SEQ ID NO: 660968 - DNA, 138 bp, Homo sapiens
gagagtagaatcgagtggaccgaatctcgaaagtgtgcacagtttgttatttaagctcagggtcaagttctgtttcatttagtcgttccaaagtacaaaaagaaaaaagaaaatcaggggtgggagggtggggggggg

SEQ ID NO: 660969 - DNA, 302 bp, Homo sapiens
  misc_feature (280)..(280): n is a, c, g, or t
gggggggtgtgtgaactcgtgagtttgtgtaaatgtgtttgtgtgagtttgtgtttgagtctgagtctgtgtatatgtgtgtcagtgtgagttagtgtgtgtgaatctgtgtgtctgtgtgtgtgtcagtctgtgtgtgagtcagcgtgtcagtgtgagtctgtgtatgtgtagggtgttagtccgtgtgtgtgtgagtccgtgtacaaacgtgtgtgacaatgtgtgtgctcactgacaatacactggactagtagtactaatcgacccgggaattccngaacggtacctgcagcgtacca

SEQ ID NO: 660970 - DNA, 967 bp, Homo sapiens
  misc_feature (23)..(23): n is a, c, g, or t
  misc_feature (158)..(158): n is a, c, g, or t
  misc_feature (161)..(161): n is a, c, g, or t
  misc_feature (190)..(190): n is a, c, g, or t
  misc_feature (201)..(201): n is a, c, g, or t
  misc_feature (207)..(207): n is a, c, g, or t
  misc_feature (209)..(209): n is a, c, g, or t
  misc_feature (213)..(213): n is a, c, g, or t
  misc_feature (220)..(220): n is a, c, g, or t
  misc_feature (223)..(223): n is a, c, g, or t
  misc_feature (233)..(233): n is a, c, g, or t
  misc_feature (235)..(235): n is a, c, g, or t
  misc_feature (238)..(239): n is a, c, g, or t
  misc_feature (241)..(242): n is a, c, g, or t
  misc_feature (245)..(245): n is a, c, g, or t
  misc_feature (269)..(269): n is a, c, g, or t
  misc_feature (278)..(278): n is a, c, g, or t
  misc_feature (307)..(307): n is a, c, g, or t
  misc_feature (314)..(314): n is a, c, g, or t
  misc_feature (319)..(319): n is a, c, g, or t
  misc_feature (326)..(326): n is a, c, g, or t
  misc_feature (360)..(360): n is a, c, g, or t
  misc_feature (391)..(391): n is a, c, g, or t
  misc_feature (427)..(427): n is a, c, g, or t
  misc_feature (466)..(466): n is a, c, g, or t
  misc_feature (469)..(469): n is a, c, g, or t
  misc_feature (535)..(535): n is a, c, g, or t
  misc_feature (560)..(560): n is a, c, g, or t
  misc_feature (728)..(728): n is a, c, g, or t
  misc_feature (765)..(765): n is a, c, g, or t
  misc_feature (807)..(807): n is a, c, g, or t
  misc_feature (810)..(810): n is a, c, g, or t
  misc_feature (850)..(850): n is a, c, g, or t
  misc_feature (896)..(896): n is a, c, g, or t
  misc_feature (903)..(903): n is a, c, g, or t
  misc_feature (906)..(906): n is a, c, g, or t
  misc_feature (939)..(939): n is a, c, g, or t
ctaaatgtttatttgcaaatganctacagacacactccttgagtgtccactttcaggataaggaactcataaaggcaacaccatatttacaactttgcatcagatctctctcctggtgtgacttttctgaagcactgcacatgaattcatttgcaggnggntgtcctacattacacttatactgtttttntgtagtgtgtnttctcncntgtngccttanggntgggggggantnggnngnnttngcacaatgcttacattgatagggnttctctccngtgtgcggtctcatatgtattggtaaagntgatggncattngggggcnttcccacattccttacattcatagggcttctctncagtgtgcgttctcacatgttgttgcgaaanttcaggccaactgagagctttcccacactgcttgcntttatagagtttctctgcgcgtatgccttctcatatgtnttngtgagggtatgtggcaatagaaagctttcccacatagcttgcattcataggatttgtcttcagggngcattctcacatgttctcgaaagcnagcagacaagctgaaggctttcccacactgcttacattcatagggtttctctctagtatgtgttctcatatgttttcgtaaagatatgggccaattgaaagttttcccacattgcttgcactcatagggtttctctccagtgtgcaccctcatgtgtcctcgaaaggnggaggggtgactgaatgctttcccgcactggttgccntcatagggtttctctccaccatgagtcctttcatgtcttcgnaangaatgggggataaatgaaggtcttcccacactgtttgcantcgtagggtttctctccagtgtgaatcctttcagtcttcgaaaggntggaganaangaaggtttcccacatgtttgcatcgtagggttntctcagtgtgtgtatcagtgtctcgaaa

SEQ ID NO: 660971 - DNA, 287 bp, Homo sapiens
  misc_feature (8)..(8): n is a, c, g, or t
  misc_feature (142)..(142): n is a, c, g, or t
  misc_feature (155)..(155): n is a, c, g, or t
  misc_feature (196)..(196): n is a, c, g, or t
  misc_feature (220)..(220): n is a, c, g, or t
cgaggtantggaaggtggagtaagtggaatacaggtcaagggcagagctcctggcctctggtgggcagggcgaggaatggaagatagagtacgtgggatacaggtcacgtggcagagctccttgtgcctcaatgatgcctcnctgatctatcgcntgggcctgtgacgaccaaacactgtggatgactgatgagcnagaatggtcatgaatgatgcccanaaatcagggcccatgatgttcagtgcacttggctggtgtttggcataggccttgggcccctggtcac

SEQ ID NO: 660972 - DNA, 209 bp, Homo sapiens
tttctttattggtcattaccttcttatattgttcaattatttgtaaaatgttgacttttttctttattttttctggtattcttttttctctttttggggtatttttcccttccgttttgtttatccctttcctttgttatatattgattctttatatatattggttccccattggtttctctttacctcgtctttatctttctatacct

SEQ ID NO: 660973 - DNA, 357 bp, Homo sapiens
  misc_feature (110)..(110): n is a, c, g, or t
ctgcatgttgactcttcatgatccccctgttgctatgcaagctgagtgatacaggcttagtgttgagtgaaatttctgcagttttacagtcagtcgtgactgtgataacnccttgcgatatcatttttgctaggtgtattatcttgtcaaatgcttgtttgttcatatcttctcgtctgtgagaaccctctcgcgtagtcttttccagatgcaaccttaaaatcagtgacaagaaacattccaaacaagcaacagtcttcaagaaattaaactggcaagtggaaatgtttaaacagttcagtgatctttagtgcattgtttatgtgtgggtttctctctcccctcccttggtcttaa

SEQ ID NO: 660974 - DNA, 156 bp, Homo sapiens
cgccttcgagcaccagagagtcctcgcaatcctcaaagagacccactaaaacttgagatcatgttgaagctaaacccatatcaaagaccatgcgccggacaccattcttcgccaggccagggattaaaagctccgggtggataaggcaacttctga

SEQ ID NO: 660975 - DNA, 605 bp, Homo sapiens
  misc_feature (60)..(60): n is a, c, g, or t
ccattacacaatggaaaaacagggccggcagggcgagcagcccccccagttacggtggtngaggcttcgctttgtcggggtcaatgccgacaagtggacgaggtgatcaattttgtgggggaagtggtcatcgccagcgccggggccaacctgttggcgcgcggcagttcgaacgggccgttgcaggaatccacttcggtggtgtcgggactgatggaggaaatcctcgacggcgcgttgcacctgcggatgatccccatcggagacaccttcaaccgtttccgtcgtgtggtccgggatgtcagccaggaactgggcaaggacatcgaaccgttgatcagcggtgccgataccgagctggacaagaccgaggtggaaaaaatcggtgatccgctgatgcacctgttgacgtcatgcgatggatcacggcatcgaatccccgtcgctgcgcgaggccgccggaaagcccgccaagggccggttgcagctcaacgcatttcaagattcgggcagcattgtcctggaaatcgcagacgacggcgccgggctgaaccgcgaccggattttgcaaaaagccgtcgagcgcggcctggtccctgtcgggg

SEQ ID NO: 660976 - DNA, 987 bp, Homo sapiens
ttaaaatatctcttcagatgaaactgtccagattaattaggaaaaggcatatattaacataaaaattgcaaaagaaatgtcgctgtaaataagatttacaactgatgtttctagaaaatttccacttctatatctaggctttgtcagtaatttccacaccttaattatcattcaacttgcaaaagagacaactgataagaagaaaattgaaatgagaatccgtggataagtgtttgtgttcagaagatgttgttttgccagtattagaaaatactgtgagccgggcatggtggcttacatctgtaatcccagcactttgggaggctgagggggtggatcacctgaggtcgggagttctagaccagctgacaacatggaaaacccatctctactaaaaatacaaattagctgggcatggtggcacatgctggtaatctcctgcctcagccacctgagtagctgggagtacaggcatgtggcaccatgcctggctaatttagtatttctaatagagttgagatttcaccatgatggtcaggatggtctcgaactcctgactcgtgatccgaccgctcggcccccaaagtgctgggaattaacgagtgtgagccacggcggcacagccaggaaagcgtcattaacataagacgctctgtgtaaattataccactggggaaaacactcggctacgctcagggaataatccttaccaaaagacatacttacagtctacataccaactcgtcggaaacgccaaatggcacgattccattacaagatgtcaaaggccttcgaaagacacgtacagcagacctacacacagctagaacacaaggacacacgggcacaggaacacaagaagacacacacaaccgaatagaaaagaacaggcaaggaagcacgacaacagccaagacgacgcaggaatgacaacaagacacgacacagatcacaacaacagcaacaacacacactgagaaaaaacac

SEQ ID NO: 660977 - DNA, 263 bp, Homo sapiens
gctcgaccaaagcgctccaaatctccacttgcacattccacaacaagagtgtttccaaactgctctatcaataggaatgttcaactctgtgaggtgaatgcaatcatcacaaagcagtttctgagaatgcttctatctagtatttaggtgaagatatttccttttccaccacaaaccacaaagccctccaaacgtccacttgtagacactacgaaaagcatgtttcagaactactctatgaaaagcaatgtgaaacgtcgacg

SEQ ID NO: 660978 - DNA, 641 bp, Homo sapiens
  misc_feature (629)..(629): n is a, c, g, or t
tctcaccacccactcctgcatggcgcacaaagtgagaccccgtttcatcaaccaatcaatcaatcaaacataagactttgaaaggtggagagaaggcagaacaactacggacattgggacccaaaacaacacattggtgagttctttggttttctttttgtctcatacatactagactggatactggagaagcctgcaacccacaaacaccaacagatgcagaccaaaaaaatagcctttctccagataaaggaccaagaaaggggcagcctggcaacgcagaaaacttagataatgaccattgtactccagccacacacagtggaaaaactctggctccacccccaccctcactgagagaagagcctagagtctccaggctgtgttgaggtgctcaaatgtccctccactcactgaggtggtgtcagagaaagccaagtggagaacatgaacttctacctccatctggcattaatgaggtagcaccacaccttttcctgccagactctgctcaaaggagttcaactcacgaagattttactgaattccagagtcttataacataataacccaaatatccaggtttcaataaaaagttgctcatcatacccaggatcagggaagatctnaaattgatgggg

SEQ ID NO: 660979 - DNA, 108 bp, Homo sapiens
agaggatcccattcgtgatcccgatgtgccagacatctgatttcagaagcccactattgcccttgtagtgctttcggcccagttctggcctcagcctcaaagtgcacc

SEQ ID NO: 660980 - DNA, 1291 bp, Homo sapiens
gatgaggatgagaacagtacggggaacaagggagagcagaccaagaatccagacctgcattaatgaatcggcagtgaacagaccaccacgatcatcattcccagctacgctggctgagttttgactgacaatgagtgttcatgccattgaagcggagtggctctccccgaggtactcccgaacggcaagaacaatgtccaagaagtccagagatgctaccgtggactatcgaaacatataactgatatgagcaccgttgaccgagctgaagccccacaaggagctatctatgacctcgtaccggccgtgaccgagcgagaactcgtagacggggtggatgatactgtggccatcagtggagggatccaatggccgttaccttagaatgagatgtgcgggtctatcaattgaacgtacgcgagcgtaggaatcgcgtgcagaaggtcggaacgcaaagacgccgaagtggggggccctcgcgccactaacgcttcatcgacttcacgatggtccatatgggcattgaacaccacgcgatctaggggactccggtagccatccatgctacaggctgccaaagggaacaaacgcagtactagagcaggtaacctcatcagttgggctttataccgcccaatagctacacgagtggcggtccagagccatttggtcgcacgtgggaatccaataggggggctcagacaggcatggcacaaagcacgagaacggaagagacgaagtggctgagaacgcacacgttatatgggaggacgtatgacagcccaacacggaacacaggtttgcgtataccgacgtagagatagaaggatgaacgaaaagttgggtttacccacacgcataaccacagagagggaaacgcccaaaatggggacttacgatcatgcgtgccaacggttgggcgctacacattacccggaatgcgaaaagatgggggtgagcaagcgaaaaacaagagggggataaagcacccccctttggcgtttagccgtaccccttggggtaaagagacgatacatgcggagaaccatgtgttaaccaaaggaaggaagtaggaaccttcgggacaaccaaaaaacggatgggtccccgacaaggcgagtgctggggcggaatcgacgcacgacaggagaacaacgggcaccaggaaggctaagacactcacttgtggcagagttacggagctatcagaggcgatacaccgcaaattggcggaaatgaaagccccaaccaaccattgggaggggacacttccggcaagggggccttcccc

SEQ ID NO: 660981 - DNA, 154 bp, Homo sapiens
ccttacaacatctcatggcgcgcatatgataattttctggaacatcaaattcaggtttctacagccagttagtctacaaaccatgcagcagcaccatcaaaccagagtctgccaccttggcccagcaatcatccagcgatgagatgttggaagg

SEQ ID NO: 660982 - DNA, 323 bp, Homo sapiens
  misc_feature (83)..(83): n is a, c, g, or t
  misc_feature (130)..(130): n is a, c, g, or t
  misc_feature (197)..(197): n is a, c, g, or t
  misc_feature (261)..(261): n is a, c, g, or t
  misc_feature (322)..(322): n is a, c, g, or t
gccttccttcctgcttcgcctccgcgcctcgcgctatgggacagagcccccgatccgccagcaccactgagggatccagaaancgccccagcgatggaagaagatcaggaactggagagtatctggaatngaagacctcaatggctgaaggcgagaggaagacagccctggaaatggtccaggcagctggaaacagntagacactgtgtgaacatttgttattgcacgagggaagacccataccctagggaaattcttctnacgttaacatgattcatgaagcccggaatggtttgtggttacactacgacccatccttcgng

SEQ ID NO: 660983 - DNA, 126 bp, Homo sapiens
aactcctgacctcatttgatcgcccgcctcagcccccaaatgtgctgggattacgggcgtgagccgccacgcccggctcttggcatgaatttctttgagtttatcctgtgttgggcgataacatca

SEQ ID NO: 660984 - DNA, 1172 bp, Homo sapiens
ggacaaaactggttcaagctgtagcgaaaaccctttctaaaaacgagtaaccgccatgaccattaaaactaactatacattgatcaacccaaaatgtccagtggtgttgggctatagtggtctgtcaattccaggcacttgcgcgtaggctgagaccaggagaatcatctatatatgtcacaaggccctgggttcatcctagtgtcccaacgggacaaagtagtaatgattaacggggctagacgagctcacgtcacgtgggataagcagctgcttgcaggtccagggtgttagcttgcctaaggcattgttgggcagctcacaaccacttgtaactccagctccggggcatgctctcttctggcctctgcaagtcgattcataagcatgcacataaacacacatacatatacactacacataagtaatctaacataagtctctaacaaataatctaaactagggctgaagcagatggctcagacacttaagagcactgattgctcttctagagttacaattgcccagaaaccacatggctcacgaaccatcttcaccctcttctctggtttatctgaggagaacaacagtcgtatacagcattacctacacacacgtacctggaaccaaacacattacgcgtacagcacaacacctatcgaacctacctaatctacactgcattttaactcatggacacatctgcgcgcctgtatgccacaaacgactagaacgggaaacgttgaactcaactgcaacaagcctagctcctcaattccctcgggggcccaacgtgactatgcctttcataggcggtcccctaacagcaacagcacgtgcctgggaccaacttcctcaataactggcctatgccctgtaccatggagaagctaatggtacaattacacactccggcacacccacagcaccaaacacggctccccaaacacacaccaccgcaaacgactattaacaggcgatccacgacagaaagctcaccagacaactagaagacaacaacaacaatcactccctataaaacatacactcagcgaacgccccaactaacaacacacaaaccaggtacacaaaacatacacagctagatagccacccaaagtagcactcacctaacacatacgcaccgacgactgaatctactacacaccgac

SEQ ID NO: 660985 - DNA, 1016 bp, Homo sapiens
gtcagatcagaagtctcactgtttgttaatggctcctgtgggtacatctcacagtaggaaagccaaagttatgcagccacggaaaagaaatgaagcatgaattcacactgcaacgtggatcaactgaaaacatgatgctgatagaggccagacatgaaatgacccatactgtatgattccacatatatgaaatgtacactaagaagattggggactgccagggctgtgggagggaggttcttggaagatgacagtctcatgttgatgcaggatgttttttcctgggggtgatgggaattagtgtagttgggtgatggctgcataatatccgtgaatcaatctaatagataccgaactgaaatatgtgcactttaaaaaatgaatttagggccggttgtggtggctcatgcctgtaatctcagcactttgggaggtcaaggcggacagatcagttgtagggcatggagtggcaatatcactctaagctcttgcactaagaacagtgaatagcctgtctctactaaattgatacacaaattagccaggcacggtgatgggcgtctgtaatccgcagttctggtggagactgagtgcgggagaatttattgaagccggggggaggtggaggttgcgtgagctgagatcatggcattgcatgccagctggggatggaggagtcttgcgctcgaaataaatgctaatagatggtacagtttggcctgagagccaggggttcacacctggtaatcccagcactttggaacgacaatggccgggggtgcactgaggtaggagttcagacaaggcgagccaatggcaaaacccggtctattaaaatacaacatagccggctgggtggcgctttaaccgaccgagggcgaacagaacccgacacaggggggggctgccacaaccgtccccgcggaagaacctcacacaaccgaacggtcaaaagcggccaacaggacgagcttagcaccacacgacacgcgcaggaggccagggatacccagggg

SEQ ID NO: 660986 - DNA, 1175 bp, Homo sapiens
  misc_feature (473)..(473): n is a, c, g, or t
tttgtgtcgtcgtgttcagccaaagaaatggtctacacacgacttgttgatcggccgggtcgcccagtcgctgtgctctctgctgctcgtcgctcctcgtcgcgctcttcccagatgctgactagatgaacacgagcgttgttgaccccgcgccttgtgcaccaatgttcacagtcataaagtgttgtaatactatattagtagcatttaactagtatcacccaccaactactatagcttagcaacgaagggagactacgatctatcattgactcatactatgctgtgaggagtactcaaccgtctgccgtgatgtgtggtcactagtgtgcgtactgactgcgtgacgtactagaacgaagcagggtaactgtcttgcaactcatccaaatcaccccttgctgagctgattacaacaactccttgaatcagatcaacccaggtatttatcctaacggtcagcgcggcaactngactcatgtactccatcacaacaatcccactataagtcggaccaacgtaggcgcgatgccttacttcagtaaggtggatcgagcctgttacacattccttcagttacttacttgtcaccacctaactatgtatgtcacgccctagatatattacacgcactcgcccacctatttactaaccatgattagcaacgaccgacactgtaccacgttaccctacaacaggacagttagctcttaagcgttcggtgcaagcaatggtcgaacctcctttcgaagagatagttagtgggcagaaccctcctaccttaaatcacgtggagaggaccttcaaggcgaagtggatcgactcagggacagctcactcacatccctccgttgcgtacagagtatggttccttcctcccagggaactctacatttatatagttgtccaccccacctatctaattcaagtctccgccccacagtaccttgcgcatggaaagacgggatcgaacataacttatcgccgccaaagcggggcagtagagttgaccgcaacttaccagacggatcctccacatacattctatataggaacaatacaccaccgcatggaggagcaggaaaggatggcgagagtttagtgtaacatcactgacggacagtcttcagacaaatcgctgacacgacaaggagaggatatatcattaacaaagg

SEQ ID NO: 660987 - DNA, 681 bp, Homo sapiens
  misc_feature (72)..(72): n is a, c, g, or t
  misc_feature (88)..(88): n is a, c, g, or t
  misc_feature (200)..(200): n is a, c, g, or t
ttatcagcaattacattgttcggattcacaaatgtagacgggctacaaggatatgaagcagctctatcaatnatagatgatgatcaanattagtcacattcgagcacatactaattaccagggccctttaactaaggcaaatgaacaagctgatttgctagtatcatctgccttcatggaagcacaagaacttcatatcntgactcatgtaaatgtaacaggattaaaaaccaaatttgatatcacatggaaccaagcaaaaaatattgtacaacattgtgctcagtgtcaagtcttacacctgcccactcaagaggcaggagttaatcccagaggtttatgtcctgatgcactatggcaaatggatgttacacatgtaccttcatttggaaaattgtcatttgtccatgtaacattgatacttattcacatttcatatgggcaacctgtcagacaggagaaagtacttcccatgttaaaagacatttattatcttgttttgcagtcatgggagttccaaaaaaattaaaacagataatgggccaggatattgtagtaaagcatttcaaaaatttttaaatccatggaaaattgcacatacaacaggaatcccttataattcccaaggacaggccatagttgaaagaactaatagaacactcaaagctcaattggttaaac

SEQ ID NO: 660988 - DNA, 912 bp, Homo sapiens
  misc_feature (241)..(241): n is a, c, g, or t
  misc_feature (246)..(246): n is a, c, g, or t
  misc_feature (251)..(251): n is a, c, g, or t
  misc_feature (253)..(253): n is a, c, g, or t
  misc_feature (269)..(269): n is a, c, g, or t
  misc_feature (319)..(319): n is a, c, g, or t
  misc_feature (828)..(828): n is a, c, g, or t
  misc_feature (893)..(893): n is a, c, g, or t
ggacgagtggagcaccagtaactgttatacctcgcccagaagcacctcggtgtgccatcccactggcaatcatatgcagatggtacgctgatgcccactctatatctccactgaccgcttcacctggccagttgatgactccgccacacggtgtattgtatgctcgtactcattatgtcccacggtggtccacattgcatgttagtatgggtcctggctgggtcagcccggacaatgtggncttgnaagtngncaatgccatcatcggncactatgactgcacttatggtggtggcgtgacctgtccagcccactggcnttcaggtgctgtggccaacaagctatgccagagtttccagaccttcagcatctgctatgcagagacgggcttgctgggtgcacactttgtctgtgaccgaatgaaaatcgatgacatgatgttcgtcctgcaagggcagtggatgcgcctgtgtaccagtgccacggagagtgaggtggcccggggcaaaaacatcctcagaaatgccctggtatctcatctagatggcactactcctgtgtgtgaggacatcggacgcagcctcctgacctatggccgccgcatccccctggctgaatgggaaagccggattgcggaggtggatgccagtgtggtacgtgagatctgctccaagtacatctatgaccagtgcccagcagtggctggatatggccccattgagcagctcccagactacaaccggatccgtagcggcatgttctggctgcgcttctaggcgggaagcctatgtaagcaagagggcagggccggggtttgtggtccccccnccaccacaaacacagcacttcggctcctctaacctgtgccacaggtgaccaccaatatatatatnactttaagaaaaaaaaaaa

SEQ ID NO: 660989 - DNA, 262 bp, Homo sapiens
ggcttttgaaacttagggattttaaatttttcccccccagaacctttttttaaaagacagaattgccatcctccttaatttgcagggctgccttgggggctttgtttgttgggacaaggcccccaacctgggcctctcctattgacccctactttgaattcaaaaaatctatttaaaagtttaaaaaaagaggccttttttgattcccccccagttttacccagtttcccaaaggaaaaaaaaactctttgaataaagtgga

SEQ ID NO: 660990 - DNA, 950 bp, Homo sapiens
gttcagaggtgcagacaagaggtggcgagaggcccccatcatgcccctcaagctatcccgtagccttctgcctacaatataaaaacgtgcatgctggaatgatctcagtcacatttggatcttgttaaacactgtatagacggaagagtctgcattgctctgaccgaaccttcaagttggtctgcgagtatgtcgtttttctacttgtctgtctcctccccccatcatcctgtagactgatgtttctgattggcccccttgttagttcgtgttggtcggctgtaacggctgcctgcctggcacaggggtgagggtgctctgcctgtgggaaaacagagctgatggaatgatgctgctcctcccagacagagctcacacagatcttcgtggatcaacttgtctattcgcgtgtaccgcacgattcacgctcatgcctggctcttgtagtaaacaagcagacttggtgcattgtggctgaacgcatcaccccttggtactctgctagtagtcattcgtagagagacactgcatgacactagattaatgatacagacctttgcaggacctgatgagtgacccgttcgtggaggctggccaggtaccatctgctaggcaggcgagaccaatcaatcactgaaccatgcctcatgggcacccacaagtgaaatcagggacagagcaggtagtaagcccaggctgggggaaaatggggcgacttcctggtaccgcctacaaatattcctacatgcagcatgtggcgaacagattgcttgcgtattgaatatcagggtcttgtcgtggacagcagagggaccctggtgtggataggttaggtcaggtgcctggaaataggctgtcccagattgatcacggacgcaggcctgtgaagcccacattgggggggaaagggcagattcatgttgacctggggatgctgtgaatttcatcgc

SEQ ID NO: 660991 - DNA, 873 bp, Homo sapiens
  misc_feature (112)..(112): n is a, c, g, or t
  misc_feature (117)..(117): n is a, c, g, or t
  misc_feature (122)..(122): n is a, c, g, or t
  misc_feature (124)..(124): n is a, c, g, or t
  misc_feature (140)..(140): n is a, c, g, or t
  misc_feature (190)..(190): n is a, c, g, or t
  misc_feature (789)..(789): n is a, c, g, or t
  misc_feature (854)..(854): n is a, c, g, or t
tccatgcgcttactggcagtgagatcgcaacgtgatgagttgatctaccatatattgcccacgtgcgcattgcagtagagggtcctggctgggtcagcccggacaatgtggncttgnaagtngncaatgccatcatcggncactatgactgcacttatggtggtggcgtgacctgtccagcccactggcnttcaggtgctgtggccaacaagctatgccagagtttccagaccttcagcatctgctatgcagagacgggcttgctgggtgcacactttgtctgtgaccgaatgaaaatcgatgacatgatgttcgtcctgcaagggcagtggatgcgcctgtgtaccagtgccacggagagtgaggtggcccggggcaaaaacatcctcagaaatgccctggtatctcatctagatggcactactcctgtgtgtgaggacatcggacgcagcctcctgacctatggccgccgcatccccctggctgaatgggaaagccggattgcggaggtggatgccagtgtggtacgtgagatctgctccaagtacatctatgaccagtgcccagcagtggctggatgggaaagccggattgcggaggtggatgccagtgtggtacgtgagatctgctccaagtacatctatgaccagtgcacagcagtggctggatatggccccattgagcagctcccagactacaaccggatccgtagcggcatgttctggctgcgcttctaggcgggaagcctatgtaagcaagagggcagggccggggtttgtggtccccccnccaccacaaacacagcacttcggctcctctaacctgtgccacaggtgaccaccaatatatatatnactttaagaaaaaaaaaaa

SEQ ID NO: 660992 - DNA, 223 bp, Homo sapiens
accagatatctacaaatggactacttacttccctggtttggtggaaactcctgtggcatctgacgcttggaagagtgaggacagtgggaagtagttggggacattgatagtgttggaccatctatgtgaaacaactgacccagtcagtgtcttaatacagtcgtgtgtcataacctgacctggaaaagatcagtcgatgatctagtaggcggtgttgaggaga

SEQ ID NO: 660993 - DNA, 258 bp, Homo sapiens
gaaatttgggcccctttttttaatccggggggcctttaaatggggaaaaaaaaggtttttggaaaaaagccgggaaaataagccccccttttaaaggttttttttatggaagcctcttttaagattttggaaactattttgccctccccagaggttatggtttttgggttttatatggtccccccccaaaaaaaatgggggtttttctttggggggcccccttacccaaaaagggtttttattaaaaattggaatgga

SEQ ID NO: 660994 - DNA, 230 bp, Homo sapiens
cccatctctatagaatttatttaaaaaattaccgatcatggtggtgtgtatgcacctatagtcctagctacttgggaggctgactcaggaagaccatttgagccccaggaatttgaggctgcagtgagctatgatgacaccactgcactccagcctgggcaacagagaaagactctgtatttaaaaaaaaaatggaaaaagaaaaaaagttccgttgaagccgtcgggta

SEQ ID NO: 660995 - DNA, 168 bp, Homo sapiens
gatcatgaaagttctgcctcaatttcctgtgtaccagtcataattcagactgaagattacacacattgattttgcctgatttttcagcctgtctgacctgccctacaatgtttgaagtttctaaattccacaatcatgtaagctaactcccttctccgtgtggcgtgg

SEQ ID NO: 660996 - DNA, 127 bp, Homo sapiens
aaaagttggctttaaaatgtttgcaaatgtctttttttttttaaaactggaaaaaaaaatattttgttgtgtttcatacagggcttaggatgtttttcccaaagcttattaaaaagatgaaacctga

SEQ ID NO: 660997 - DNA, 834 bp, Homo sapiens
  misc_feature (57)..(57): n is a, c, g, or t
  misc_feature (78)..(78): n is a, c, g, or t
  misc_feature (148)..(148): n is a, c, g, or t
  misc_feature (155)..(155): n is a, c, g, or t
  misc_feature (159)..(159): n is a, c, g, or t
  misc_feature (169)..(170): n is a, c, g, or t
  misc_feature (173)..(173): n is a, c, g, or t
cgcttcctccgggcgcgagaagaggggagccaggccgagccccggccctaccgcgcngcgcgccatgtggccccagancccgacccgacgcggaacccgagcctgccggaggcgtcccgtccacggccccgcggtccccgggctccgngccctgnatgncggcgcgggnnttnccatctgctctctcaaaggcctgcgctcctgcctgagacccgagatcgggacacatcagtacatcacttatactctgctattgtggcgtcctcagcaatctgccatttcactcacagaagcctcatgcatggaggtatccatggcatgacccttgatactaccatccatttgcgtgactacgccatgacaaccattgaaatgacacagatgcgcaagcggacatatgatgcctgaggcccaacttgacttggtacgtttcacattgcaggcactggtgtaccaacccgtcgagagacgcgcacttccgaatcccaacacgtatgtggcgataagtcctcacgaattcaaacagggacgcccaagcacagaccgccaaaacgaggtacacacactgaagcacattggcggggcatacacccaccaaaacgccccgggcgatgcgaccacgactaggataaagaccggaggcctacccactctacagacacgtcacccacacgtcgcccgaggcaacaggacgcaaagcagctcgaccctagaccgagcacaccagtagacacgtcctaatacaagcgcgaaacgagaagcggcgccaaaccaactcaccaatcagcaagacaccacaccggacgggaacccacaccatagcacaacgagaaa

SEQ ID NO: 660998 - DNA, 1002 bp, Homo sapiens
  misc_feature (780)..(780): n is a, c, g, or t
gcatatatctgagcagctgatcattaaggcagcagacggtgtgctaactatcgtccacgtggaacttcggtccataagcatgattggcctcaggatgatttctcgagtctactcgtacctcatgtgcagtaggagttttcgaaccatagtcatagaatgggcccaggtcgatcaaaccaagtagcgtacttggaagcggctttcccgagtgtgcgcatgtatgctcgacgtgctctactcaagctcgtgtaactctttactctagaggacgagtgggtacctacacgtcggtaggcctactgcactattgcaaaaattaaccgtctccacagcttcccttgtcaatgcacacggtgttgcaccggtgggaacaattcccggcaaaagccacccttgtaacctgctctaaccaaccagttgcttggtcttggacgcgacagcacaaacccaagttgtttatcactcgtgggaccattttgaccctggcatcacggggacttgccagcgcacacaggggacggcagttcaaccttgtcgctcctggggtcgaagcacctatgcgcaacatactcggaatgaagttctaaagggaattcaactatgacgttccctttctcattgaagatcaggcaaagggttagctgttcgcggtatggtttggacacattcagggtcgtgggtctttcccaagtacacgtggggccccctactgacagttagtttcgcagaacactatattcaccaaggctacggcacttggcttggcggacattccaatgngcatacacggccaacggtgcacggcttacgttcgaactcagtacaagggtcctcctgaggatttctccagctttcccacagagttactcggtgtcctcatagtccctggtccacaagcagttagtctcttgtcactataagtcgcggcacgagacaccctaaatatggtacctcatcatcaagggcttctggcgcggatgctaatcacagaggccccgtttg

SEQ ID NO: 660999 - DNA, 627 bp, Homo sapiens
tctcgggaatatttagaaattgtggatattgagatgtatgcgcattttggaaattaattggacaacacgtaatggctctcagatattatatattagtaagtgtgcctttaaaatgtatgatatatttcaaaagtctgagtagccatatttaagagtatatttttagaatctaatatgtgttctaaatggagctgatattcaggagaatgtgcacagtcactggtgtctttaatgtcctgctccaccacagcccagcagagtcactgctaatactgggcacacagaggaggtcaaggcgtggctctcagccttaaaccgatgtggaaagtttccttttatgcacaagacgtaattaccaaaagagcatgtgtttgtatttcccaagcagaatgtgctcaactcccttctcacctctcccatatctgactcctaattatttctcctgaatgggtgccctcccacctccctaaccattaccccacagggatgctgctcccttaggttgctgaagctcccattcttggaatgctgaagggaggccattaattgttggtcatcctgtcaatatggctcacgttcaggttctgtgccgtgtgttttcctctttctggaagagctaaagacaga

SEQ ID NO: 661000 - DNA, 203 bp, Homo sapiens
tgaatcagtaccagagctgaagaacagtgattccacccatggcaacacacaacaagcccagctggtggagaatgtgaaatcgatgaagaaccagtcagtaaagcaaaacagagtcggagtgaaaagaaggcacggaaggctatgtccaaacgtgtgtcttcggcaggttacaggagttactagagtcactatcagatccggca

SEQ ID NO: 661001 - DNA, 250 bp, Homo sapiens
agaaaaaacaagaaagaaaaaagaaaaaaaaaacaaaaaaaaaaaataaaaaaaagaagaaaaacaaaaaacaaacataaaaaagcgaagagaacaaaagcagaaaagagaagagaaaagacaacagaacctaggagaaagaaagaagagaagcaaagagacgaaaaatacagaagcgcgaacgcagcaaaaaggaaaaaaagaaaaacagcgaaacgaaggatgcagagaaaaaaaaagaggaaccaaa

SEQ ID NO: 661002 - DNA, 1132 bp, Homo sapiens
  misc_feature (520)..(520): n is a, c, g, or t
  misc_feature (568)..(568): n is a, c, g, or t
  misc_feature (585)..(585): n is a, c, g, or t
aagtaaagcacttattctaattcatatagaggtatctaattaacacagtcacattgtactaattgactagcgagtagacagacttctactaactctccctctatgaattcttataatgtcccttttctctgtaacttcatgagacgagcaactctgcgcaatccagggatggcagccatggtctgattacgagtccaaatcctctgacatgtctcagttcgttcgcacgtctacttagactcgatctatttgcgtgcaatgctccttgatcattatgctatggcggctacataagatgatgttgtcgcagactctgcttcacttgtgtgatataagttgtagtactcagcgaaacacatcatcatcaagcgtagtcacttggaccatggcatcatggccttgaccaacaagtagtagcaatcgtacatgctggactaagcacaaaccgagaaggtcttaactttagttagcccattgacatccggctacaccctttgtggtagatcgacacctaagaacntaagcaagcgcaagattgattgcgtgtgtcactctgagcccttctgtnccctctagtatcctccnctaacaataactactcttgcgctattaaccaatcttacactgcagctgtaggcgttttctatagtgcggtgtctatggtccagtgtccatcgggcattgcaatgtgatcatctattgagtgatattatatataaaccacccaagtcccactccaaaatacatactacattggcctccagtgtatcaaagattctcattacttaaggaattttcatgttccttaaaatttttagaagcaaatatcgtggaacaactgtgtaaagccatattttagatttttaattatactaagtcttgaagattgtgattcgttaaagatttcgtaagactttgggccttctttagaatacatcttcgaacttgcagaatcttaacccgaatgtcaccttgttcgatgaaagtattatgttcagcagatataatcctttgggagaccgtttcacaattgaggaaaaagctaggtaaggcatgttcccacctgtgggggtacattttgcgatacccttcaatgtttggccaggtatcagaattggttgaacagcccaca

SEQ ID NO: 661003 - DNA, 207 bp, Homo sapiens
tcaaaactacaaaaaaagcaaataactaaatcattcaaaattggctttttttgttgttttaaaaataaagtttaaggctaggagcggtggctcatgcctgtaatcccagcactttgggaggccgaggcgggcggatcatgaggtcaggagctcgagaccatcctggctaacacggtgaaaccccgtctctgctaaaaatacaaaaaa

SEQ ID NO: 661004 - DNA, 367 bp, Homo sapiens
cctaagtgcgttctgggagacatctagtagccacaaatcgagagatgcccagagcccaccttctgataccagaatcagatgtttacttacaagacagagagaatctgaaacaacgggctacaagaaatttgggaaatgacatttgatctcatttgcctctcaaatggaagtcatagatatccatgaatatcaaatggaaaaataagctcagaagtaggtgagaataatgatctctaaaacgccggtccagatttctaatccttctcacaaaataccggatcacaaattgagggctgatgagaagatcttacaccggaggcactaactgggcctaatgtgagtcagcaacatgtgacaggctaatcca

SEQ ID NO: 661005 - DNA, 425 bp, Homo sapiens
aggtcttgctcgtccttgatatgcaagtcgcagagatagggtccttcaagtaatttgtgccaaaccaacgtgttcgcagctctatgccgtcccagggccaagcagggggcctatcgtctgctggtgtctcaggagtccctcgtggaccttcatccgcagtatgcgcgtattcttcaccatcttacggtacttgcggtggttcttctcacgctggcgaatcttcagcccgttcacgcggtgatctgaggcgcatccgagacgccttcagccaggtgctcggcaccttcccctatctggctgggcgcacattggtaggattgcgggatagccacagtccctacggtcccggtatgcagtctggacagcacacatcggtacgtaaatcagctctacaggggacttacgcacatctttctggggcacag

SEQ ID NO: 661006 - DNA, 308 bp, Homo sapiens
ttgagacccccctatacaaccagacctttctcatacatacagctacgacatgtatcaatcttcaatgccataatttcaggttcaactggctttgtcatacaactcacaagtctaagaatgtagataaagctacaaatctaagtatcacagatgtgtctaaggcttggtaggtaacaatctagaagcaatctgtatacataaagtgccaccaaaagcattttaaacgaaaccaatttaagggccaccaaatcataagcctgctataccatgggaaactatgaaatctcacaccgtaaattctagacaga

SEQ ID NO: 661007 - DNA, 322 bp, Homo sapiens
tcaggcattctttcttcagtcagagcattcattcctcaagccattcacacatttaggcctcatgcttttttctgtctttcatcacatccatttccaccatcattgagaggtaatctagcagtgtgggtttaaagggggtatgtgggtggttaatcaagtctggcttagaatcccagctcgagatgaaaatgtcttgactcggatagcaaagagacatggtgtgagaattgaatgaattcaaataggcaaagcgcttagaatagttcctggcccagagtaagtgcgcttttaagtgtttaatagaaccctagatttgttttta

SEQ ID NO: 661008 - DNA, 1685 bp, Homo sapiens
  misc_feature (1337)..(1337): n is a, c, g, or t
ggaagcaaggaggcggcggcggacgcacgcgagtggcgagatagtggatcacgttgcttctgagtgggagacccaaggatgacctgtgttctagacgacgttcaatgctgaacccagcgcacccagaggagtgagcatcatctctccagtgaatgattcacagtgctcgataaaccatcaccgaagatagacttggcttgtcatccatcctggagaccctcgtcgcaataacgatcgacaatacaactgcctggccccgagaccagacaatcaagaatgtcctgcgacactccgacacgatagcgccacaacaacacgaagccgagtcatacgcagaagccacatgcgacaccttgaacagacccgtattcataaccgcaaagtccatacaacagcacaaatggcacataggaaacgatcgaaacagagacccatcaaacaactcatgtcaaactatcgaacacgagctgcccactgaacacacattctcacaacaccaacaacctagagactccaacaccaacacaatacaactccaatatcagtacaacagccacaccacacaccacacaaccactccacatctgcacaccctccgtaataccataccacattgaatgactacatccacagacataccccattgccattccacacaagatacaacgagtcgaccacaccgcatcacaacataacccaaaacaaccactagccacaaacaaacataatcacccacaacatcactaaaccacactatacagattaaacaattacacctagaccacaaacgcgaccacttgcccacaccatataaacacacacaaccctatcaccactcacacgacctacaccaccaccagaacaccaccgcacacaaacacaacaacaaatataaccacacaccacatcacaacaaaacacaacaagacttagaccccaacacaaaacgatacacccatacacacataacaccacaacgataccaacgtcacaaaacacaaaagcaaatctacccactaccaaaacaatactacaaacctcacacaccacaacatcgacacatcataaaacactaaagaacctacaacacacatcattacactatccgtaactcaatcagcaactcaaattcacacacagacttcaatagcagcaaaacacacctaacaacgataacaaacaacacatccacacacacagaacctcatcaaacaacaatattcgcgtactaacacaacacacacacacacatccatagtcacataacaatcacacaatcacacagacaaaactcacacacacacgcaacacaccacgaacacaactactcctagctncacgacactcacacactatatagcacacagatcgagacctatccactacgcaacataaacagacaacaatcactcaagcatcacaaacctaactcgaacatctacaccacgatctacaacaatggcgcaacatagtacaccacacacagcacaggcacaacaagaaacgacacacacactaagagataaaacatacaaaatctgatatacataaacctcaaccacagcaaacaccacaccaatcaaacatcacataaaccagaccacacaaccgacaccacaaccttcctatctactacactacatccaaaacaacataccacttacatcaagcacagactaccacac

SEQ ID NO: 661009 - DNA, 104 bp, Homo sapiens
ttgtatgatgagaggtgtgctgtgtgcaatgtttcgtttgcctcagacaggtatctcttcgttatcagaagagttgcttcatttcatcttgcagcatgacaaca

SEQ ID NO: 661010 - DNA, 781 bp, Homo sapiens
gaaccagggcatatctgaagaatagcattgcaggcagtcagaatagcaggtgcaaagtcctgaggtaggatcttgtgtctttcctgcaaggctgactgcctacacttggacagccaaaagtttgaagaattgctcactgtagagggtctagggatgcattttatgaatttgtccatgtgtttactcaagaagtacttactaggtactgatgaggactgcagagacaggcttcctgtccacaaacatcttttttttttggggcaacagagcaagactcttgctaaaaaaaaaaatttaccttcataagggaactggtggcccgaatttgggattgggtgaggtggagattggcgaagaagggattatgggaaattgggacgcagagggagacagggaaggacgcttagaagggaagaggccaagtttcccagctgtggcatgcacttgggaggcaagttggccacctttgtgatttcaacaatagatcatacaagtgagggaggagaagcattagggtgacttgatgaagctcagagtttgcactttgctgagttggagggtgtctcaagcattctcaggcggcagttgaagaggttccagcaattcaattagcgtcgagtggacccgtgaagttccaccgggcagtaggcgaaagcggggggaatacgggattcgagaacttcaccagcctggagactggtcttgtgaaacccatggagactaactttgattaccttcccagggaaaacgttctatgacgttggaactggacaacattcgg

SEQ ID NO: 661011 - DNA, 872 bp, Homo sapiens
gctctgggatacggttgctgctgctggagggcatttgttcccgcctgcccggctactacctgcgctccctggaggaggagcggacgccctactcccgtgctctataggcctcatggggtgcccagttcactgcatcaacgcctcaagtaatcggtgcagcgtggcatgcgtgtggcggacgtgcccattcccatctactttccccccgaatcccagcgggtggttgtggggcggcgagggctggatcctgggacacttattgccaacaacgacaagctctccaagaggctgaagaacgtgtggaagccacagcgtgtttgagcagagtagattcatacagtgaagatctatggacaaagcaagttcactagtgactgtgaccatgtcaggaccctgtgaatctcatcgatgaggctaacgggctcgacttatacatcctcaagaccccgaaggaggaccgtgtgctccaagttagggaatggacctgaagcgagggaatgctgactgtcgggattgcccggttaggaaccccagagtgcaccccgagtaccccgtagcggcgggcatccattctacgtacaaggtacaaggaatttgccatcccagtaggaggaggcagactgggtggtgcctcacgctggagcgaggcgcattgagaaggcagagacttttgagagagacaaggacgcctgtatcccgtgtgcaagatctatgtggcggagctgatccagacaggttgcaggcagcagtgcagctgtccaggagccggttggtcggtgcaaaaacagagcaagtggccagatgaccacatcagggtcttccatgctggagcaaccagggccagttttccctgtcgggcccctttgcggtga

SEQ ID NO: 661012 - DNA, 245 bp, Homo sapiens
gacatgcatcctacgcgcacggaagggtggtgagaaggcgagcagtacatcccggtctcggcgaagcttccttcgggcgatctgtggataccaggagcttgggatgggcaggcattatggtccggaaatgaaatgggtagatggaggcaggccactgctgaaaatgtcgcactcatctggtttctacagtgtatactcaggatcaggatttacgataatatggtccatgtactgtcagaaaaccg

SEQ ID NO: 661013 - DNA, 279 bp, Homo sapiens
ctcttctatgttgtgccatactgcccaaagcaatttatatattcaatgctattcccattatactaccaatgacattgctcacagaattagaaataactatttataataaattcatgtggaaccgtataagagcttgtatcgccaggacaattctaagcaaagagaacaaagctggaggcatcacactacccgacttcaaactattctacaaggctacagtaaccaaaacagcacggtactgtctccctaaactggcacatcgagaccattggaacagaa

SEQ ID NO: 661014 - DNA, 426 bp, Homo sapiens
gagagagagagagagagagagagagagagagagagagagagagagagagagagagagagagagagagagagagagagagagagagagagagagagagagagagagagagagagagagagaggaaatgtgcccatatcacatgctcttctgactcttcttcactcgtattttagtgcgacgcgctccataaagagtctcactgttctgattaacactttagatatatctaagatgtgacacttatatatcgcgacaagtcactaggctctcgtacacatttatattagtgagcgctatacacacgcactttctctatagcgcattgaccatactgcgctcttgctattaagtgcgcacacacctatatagagaactgagtatatgcgctattctgcgcatgtgtgtgtaacactggtactcagttct

SEQ ID NO: 661015 - DNA, 170 bp, Homo sapiens
cactctatggaaagtagctgacactttggatcccatgaatatagttaatagaacttatggacaggaccatgtcaaaattaactaaatgtgaacagacaaagctttggatgtcacagcaacaattaaacttaggaaaagtgagcacgtacttaatcagaaacaaaaaaaaa

SEQ ID NO: 661016 - DNA, 223 bp, Homo sapiens
gcgaaatttcttcaaggtcctgttttgaattcttttagatatatacccagaaataggtatgtatttatgtatcagaaataggatcccatgataattctatttttaatattttgaggcccctccatgttgttttccatagggggtgcatcattttacatttcccccaacagtgcccaaaaagattaaaacagtgtctccaattttaataaatttttgcaatcca

SEQ ID NO: 661017 - DNA, 172 bp, Homo sapiens
gtgatctgcccgcctcggcctcccaaagtgctgggattacaggtgtgggccaccatgcctggcctgaacatccttttttgatcgtaggcagaaataagtgctgctgtgggtgcagctcacatccttgggctaacccctagcagcagctatccatatccactcaaccccacca

SEQ ID NO: 661018 - DNA, 152 bp, Homo sapiens
aggatttaagatggggacagactggtgaaaatgcggctgactggaaggaaatggggcatacgagtaatatgtacatatcaaacaatcaattgcctcctgaaatcaaaaaatcaaatggtgaaatggagcctccttgatagtttaggccaaca

SEQ ID NO: 661019 - DNA, 2845 bp, Homo sapiens
  misc_feature (56)..(56): n is a, c, g, or t
  misc_feature (97)..(97): n is a, c, g, or t
tgtgggctgattcctggactgtactggaaacatttcagtgattgctctttatgatnaaataggccctgtattttctgtgacatttagccatgctgtnggtctggattccttttggcttacacttgtctatctggttcccaccaaaatgaatgagagtatctgattagcctacattgtttgcattgtatgatagggagttgttctttttaacccctctaatctttgtttctacaggcctgtcatctttacttcagagtgttactgggaacccagttccagccagtgaagctgcctcacagagcacttcagcctcccctgccaacaccacagtctctaccataaagggaagaaatctgccctccagtgcccaaccttttattcccaaaagcttcaactattctcctaactcatcaacttctgaagtctcttcaacttcagccagcaaggcctcaattgggcaaagccagggctcccaagcactacttttaaactaccttccaactctttggggtttacagctacccacaatactagccctgctgccccacctactgaagttaccatctgccaatcttcagaggtctccaagccaaagctggagtcagagtccacctccccaagcctggaaatgaagattcacaacttcttaaaaggtaatcctggtttcagtggcttaaacttaaacatcccaatcctgagcagtttggggtccagcgccccatcagagagccatccctcagacttccagcgtggccctactagcacctcaatcgacaacattgatggaacccctgtacgggatgaacggagtgggacacccacccaggatgagatgatggacaagcccacatccagcagtgtagatactatgtccctgctttctaagatcattagccctggttcctcaacacccagcagtacaagatcaccaccccctgggagagatgaaagctacccccgagagctctccaattctgtatctacatatcgaccctttggtctgggcagtgaatctccctataagcagccttctgatggaatggagagaccatcttccctgatggactcttcacaggaaaagttctacccagatacttctttccaagaagatgaggattaccgagattttgagtattcagggcctccaccctctgccatgatgaacctagagaagaaaccagccaaatctatcctgaaatcaagcaagctgtctgataccaccgagtaccagccaattctgtccagttatagccacagagcccaagaatttggggtaaagtctgccttccctccatctgtaagggccctcctggactctagtgagaactgtgaccgtctctcatcttcccctgggctatttggtgccttcagcgtaagagggaatgaacctgggtctgaccggtcaccatcaccgagtaagaatgattcatttttcacccctgactccaaccacaatagcttgtctcaatctaccactgggcatctcagtttgccacagaagcagtacccagactctcctcacccagtcccacatcgttcccttttctctccgcagaacacccttgccgctcccacgggtcacccacccacgtcaggcgtggagaaagtcctggcctccaccatttccaccacgtcgacgattgaatttaagaatatgcttaaaaacgcctcacgtaagccctcagatgataagcattttggccaggctcccagcaagggcactccaagtgatggtgtcagtctctcaaacctcacccaacccagcttgaccgccactgatcagcagcaacaagaagagcactaccgcatagaaacccgcgtctcctcctcctgcttagacttgcctgatagcacagaagaaaagggggcccctatagaaaccttgggttatcacagtgcatccaataggaggatgtcaggggagccgatccagaccgtagagtccatccgagttcctgggaagggaaatagaggacatgggcgtgaggcttcaagggtgggttggtttgatctgagcacatcaggtagctcttttgacaatggcccttcaagtgcctctgagttggcatcccttgggggtgggggcagcggaggcctcactggctttaaaacagcaccatacaaggaacgggcacctcaatttcaggagagtgtcggcagctttcgttccaacagtttcaactcaacatttgagcatcatcttcccccatcccccttggaacatgggacacccttccagagagagccagtggggccatcatctgccccacctgtccctcctaaggatcatggtggtatcttctctcgagatgcacccactcatctaccctctgtggatctttcgaaccccttcacaaaggaggcagccctggcccatgctgccccacccgctcctcctggagagcacagtggaattcctttccctaccccactcctcctaactgcttcatggggaacataagccagcagatggtcggtgacgatggagacaccataagaagtactacaagcaaagttatatcaagaagaatgattgcgaatactaagaggtagaagaccgttaaagagcaaacattggagagatagggagaggggaaggagagagcaaggggaggatagatccccaagagagcagtagtagccgacctaggattgaagaagggaagacatgggggagagaagattatgggaaggagcgcgcgcaaggaacgacacgggaaaatcaaggggaggaagagagcgaaggggaacacgctaccaagacccagagagaataagggaaggatatgaaaaagaggcgtggaagcaatacagcacaagaacaggaggcgacactgacgcaaca

SEQ ID NO: 661020 - DNA, 271 bp, Homo sapiens
  misc_feature (23)..(23): n is a, c, g, or t
  misc_feature (33)..(33): n is a, c, g, or t
  misc_feature (62)..(62): n is a, c, g, or t
  misc_feature (111)..(111): n is a, c, g, or t
cccggccgaaatttgtaattttntaactaagantttttagttaagaacattatcagtaaagncaacgtaatcccaccctggagagtttattgggagcccaggaatattcanttttaatacacacacacacacacacacacacacacacacacacacacacacactgatcagagtaacgggagtttctctcaggagtcatactccatgagcctggacccagtggttctttatgtggaaacaaatttcacctataggtaacctggtaactgct

SEQ ID NO: 661021 - DNA, 509 bp, Homo sapiens
gcccagttctacctgtttgagaatgtggacaatgcccagcagttcaagcagctctacggccaagatgacgcctggacctgaacatgaagagccaaagagaggatcgtggaggaggccaacaaggcttttgagtataacatgcagatattcaatgaactggaccaggccggctccacactggccagagagacctttgaggatggggttccctgtacacgatgggaaaagagacatgcgtaaattccctttctacgctgctgaacaagaaaaaaggtaggtgtgtgtgtcctccagctcccctcctcgggcaggtatagcaggagactcccctcatgccatttctcctatttgtgctgccacacaagggccctcgagggagcagctgtcccttccgacagatattgctgttctggggaggccagcctccatttaatcctcgccgctggtgtggccccgctgctggactcttggctcgtactacatttgaggggccccaatgcaaacaggtc

SEQ ID NO: 661022 - DNA, 2705 bp, Homo sapiens
  misc_feature (56)..(56): n is a, c, g, or t
  misc_feature (97)..(97): n is a, c, g, or t
tgtgggctgattcctggactgtactggaaacatttcagtgattgctctttatgatnaaataggccctgtattttctgtgacatttagccatgctgtnggtctggattccttttggcttacacttgtctatctggttcccaccaaaatgaatgagagtatctgattagcctacattgtttgcattgtatgatagggagttgttctttttaacccctctaatctttgtttctacaggcctgtcatctttacttcagagtgttactgggaacccagttccagccagtgaagctgcctcacagagcacttcagcctcccctgccaacaccacagtctctaccataaagggaagaaatctgccctccagtgcccaaccttttattcccaaaagcttcaactattctcctaactcatcaacttctgaagtctcttcaacttcagccagcaaggcctcaattgggcaaagccagggctcccaagcactacttttaaactaccttccaactctttggggtttacagctacccacaatactagccctgctgccccacctactgaagttaccatctgccaatcttcagaggtctccaagccaaagctggagtcagagtccacctccccaagcctggaaatgaagattcacaacttcttaaaaggtaatcctggtttcagtggcttaaacttaaacatcccaatcctgagcagtttggggtccagcgccccatcagagagccatccctcagacttccagcgtggccctactagcacctcaatcgacaacattgatggaacccctgtacgggatgaacggagtgggacacccacccaggatgagatgatggacaagcccacatccagcagtgtagatactatgtccctgctttctaagatcattagccctggttcctcaacacccagcagtacaagatcaccaccccctgggagagatgaaagctacccccgagagctctccaattctgtatctacatatcgaccctttggtctgggcagtgaatctccctataagcagccttctgatggaatggagagaccatcttccctgatggactcttcacaggaaaagttctacccagatacttctttccaagaagatgaggattaccgagattttgagtattcagggcctccaccctctgccatgatgaacctagagaagaaaccagccaaatctatcctgaaatcaagcaagctgtctgataccaccgagtaccagccaattctgtccagttatagccacagagcccaagaatttggggtaaagtctgccttccctccatctgtaagggccctcctggactctagtgagaactgtgaccgtctctcatcttcccctgggctatttggtgccttcagcgtaagagggaatgaacctgggtctgaccggtcaccatcaccgaaacacccttgccgctcccacgggtcacccacccacgtcaggcgtggagaaagtcctggcctccaccatttccaccacgtcgacgattgaatttaagaatatgcttaaaaacgcctcacgtaagccctcagatgataagcattttggccaggctcccagcaagggcactccaagtgatggtgtcagtctctcaaacctcacccaacccagcttgaccgccactgatcagcagcaacaagaagagcactaccgcatagaaacccgcgtctcctcctcctgcttagacttgcctgatagcacagaagaaaagggggcccctatagaaaccttgggttatcacagtgcatccaataggaggatgtcaggggagccgatccagaccgtagagtccatccgagttcctgggaagggaaatagaggacatgggcgtgaggcttcaagggtgggttggtttgatctgagcacatcaggtagctcttttgacaatggcccttcaagtgcctctgagttggcatcccttgggggtgggggcagcggaggcctcactggctttaaaacagcaccatacaaggaacgggcacctcaatttcaggagagtgtcggcagctttcgttccaacagtttcaactcaacatttgagcatcatcttcccccatcccccttggaacatgggacacccttccagagagagccagtggggccatcatctgccccacctgtccctcctaaggatcatggtggtatcttctctcgagatgcacccactcatctaccctctgtggatctttcgaaccccttcacaaaggaggcagccctggcccatgctgccccacccgctcctcctggagagcacagtggaattcctttccctaccccactcctcctaactgcttcatggggaacataagccagcagatggtcggtgacgatggagacaccataagaagtactacaagcaaagttatatcaagaagaatgattgcgaatactaagaggtagaagaccgttaaagagcaaacattggagagatagggagaggggaaggagagagcaaggggaggatagatccccaagagagcagtagtagccgacctaggattgaagaagggaagacatgggggagagaagattatgggaaggagcgcgcgcaaggaacgacacgggaaaatcaaggggaggaagagagcgaaggggaacacgctaccaagacccagagagaataagggaaggatatgaaaaagaggcgtggaagcaatacagcacaagaacaggaggcgacactgacgcaaca

SEQ ID NO: 661023 - DNA, 1605 bp, Homo sapiens
  misc_feature (56)..(56): n is a, c, g, or t
  misc_feature (97)..(97): n is a, c, g, or t
tgtgggctgattcctggactgtactggaaacatttcagtgattgctctttatgatnaaataggccctgtattttctgtgacatttagccatgctgtnggtctggattccttttggcttacacttgtctatctggttcccaccaaaatgaatgagagtatctgattagcctacattgtttgcattgtatgatagggagttgttctttttaacccctctaatctttgtttctacaggcctgtcatctttacttcagagtgttactgggaacccagttccagccagtgaagctgcctcacagagcacttcagcctcccctgccaacaccacagtctctaccataaagggaagaaatctgccctccagtgcccaaccttttattcccaaaagcttcaactattctcctaactcatcaacttctgaagtctcttcaacttcagccagcaaggcctcaattgggcaaagccagggctcccaagcactacttttaaactaccttccaactctttggggtttacagctacccacaatactagccctgctgccccacctactgaagttaccatctgccaatcttcagaggtctccaagccaaagctggagtcagagtccacctccccaagcctggaaatgaagattcacaacttcttaaaaggtaatcctggtttcagtggcttaaacttaaacatcccaatcctgagcagtttggggtccagcgccccatcagagagccatccctcagacttccagcgtggccctactagcacctcaatcgacaacattgatggaacccctgtacgggatgaacggagtgggacacccacccaggatgagatgatggacaagcccacatccagcagtgtagatactatgtccctgctttctaagatcattagccctggttcctcaacacccagcagtacaagatcaccaccccctgggagagatgaaagctacccccgagagctctccaattctgtatctacatatcgaccctttggtctgggcagtgaatctccctataagcagccttctgatggaatggagagaccatcttccctgatggactcttcacaggaaaagttctacccagatacttctttccaagaagatgaggattaccgagattttgagtattcagggcctccaccctctgccatgatgaacctagagaagaaaccagccaaatctatcctgaaatcaagcaagctgtctgataccaccgagtaccagccaattctgtccagttatagccacagagcccaagaatttggggtaaagtctgccttccctccatctgtaagggccctcctggactctagtgagaactgtgaccgtctctcatcttcccctgggctatttggtgccttcagcgtaagagggaatgaacctgggtctgaccggtcaccatcaccgagtaagaatgattcatttttcacccctgactccaaccacaatagcttgtctcaatctaccactgggcaataaactatccatttccattctcctcccttggatggggcatggtcaaacttagccatcccctcctcagcaaggcattacggccccccacagagagagctcgggatcctctagatctagttcag

SEQ ID NO: 661024 - DNA, 110 bp, Homo sapiens
acggcgacagaatctaagctaagattgtgtgtgaggaaggtaggtttccccaaggccacattgctacttttcaccagtatgcctgacatgcagcgttaggatctatctga

SEQ ID NO: 661025 - DNA, 308 bp, Homo sapiens
aagctggggtatgggtcgaggatctgatgagacggtcactactactctttctggcttcattagggtggttggtgacacccagaagagctgaagggggcatcttggtggggaaggagtagaagggtagccctcagaaagggggttccgggagatagtcagaatgtgtttaccagtgcagagaggcagaattaaggggctggcaacatagctgggaagtggacggcatgggtggtcatatctaaaagagatttcaaagatggaaacaggagcatgggcgaagttgagatctcagccccctcattttacgg

SEQ ID NO: 661026 - DNA, 510 bp, Homo sapiens
  misc_feature (270)..(270): n is a, c, g, or t
ccccccctgttcatggatttaccttcttgtttgagcgcagagaaggaaggaagggtccattaacctcaatcccattataaagtgccccctgctgaagccttgggccttactcttttcttagagcaagaccctgcaggccttttcccttaaggcttggggggggaaaaaagaaaaccttaaggttgcgcaggaggagtatttcaaacaagccctggccaacacccttccctgtcaaggaaagtacactccgaacggtcagggtgggggtgntgccaaggagtccctttttgtttttaaccacccccatataaagggaggttgttcccagggtggcccccaaaatttaaggccctgccccctcccattttttaaaaggaggccccctccttgggggtccagggtgggttgcccgggtttttttttcccttgtgacagtggtgtgtgggtttgtttgtaaaagctaagtccatcccccttttcggccccctgccaaaaaaacagttttttaag

SEQ ID NO: 661027 - DNA, 489 bp, Homo sapiens
  misc_feature (303)..(303): n is a, c, g, or t
  misc_feature (360)..(360): n is a, c, g, or t
tctgatgttaccataggggtaatgaagttcatcgcagattgttttctaaccttcggtgcatgtattgaaatagatttttgttttaaaaatatgagattacatttttctggatctggtgtgcattggggtagagaggatgactgtcttaaaaatagatcgtgtattctgcctagagcaaagactcttaagtcttttggctgaaaatgaactgagtatggacaaaaatattgaagtattctacttgtaaacttaccgtataatcagtgtcttgataaaatagtagtttttgttggttgaatctangaatgtgttggacttgggtaaatttcagacatgaccaacaacaaaaaacaaaagccnaattccttaacctttcctgactgaaacttctcaggaagaaaccagttttgaattgtatgacataaataagattgtcttttattataagtttttaaactatgtaataaaacatttggggataacatcaaa

SEQ ID NO: 661028 - DNA, 352 bp, Homo sapiens
acacgccgagtggccacacacacgttggtctgcatgttctgcaaatgtatccagtttgttttgtctggtttttagaataaagaaaaaaaaatttataaagggcaatgtatcaggttgggtgtgatagcacatgcccgtaatcctgacactggggaggccaagacgggaggatcgcttgaggtgaggagttcaagaccagcctggtcaacatagcaagactccgtctcataatgtacaatcagtgggagccctgagcttgttttccagtaaggaaatctggaggtccatccccgacattgtgtgaccttgaattaagcacttcatctttatgtctgggtattcggcgtgtgca

SEQ ID NO: 661029 - DNA, 172 bp, Homo sapiens
cctgacctttttccggggagccggggggttgtatgctctctcctcacaccaactgatgtcactatcccaggtagtccccacttaggatcatggaaagagaaggagagtccctcagtcctgctaacatggaccttactgagaatggtgccctgtgaacaggttgccattgctg

SEQ ID NO: 661030 - DNA, 122 bp, Homo sapiens
taaagaaatccccccttacttcccttttttgcaaaaaaaagcggataaggttgcttctttttggtgattcatccaaaagaaaaaataccaaatcctccgacggctccgccgcatcctccgtg

SEQ ID NO: 661031 - DNA, 308 bp, Homo sapiens
cgaggtgttgctggggtgactctccaggattaatgttatcgcccaacactttcggaggctatgcaggcggatcacaaggtcaggagatggagaccatcctggctaacacagtaaaactccatctcttactgaaaataccaaaaaaatagcagtggcatgtgtggttgggctgcccgtagccccagctattcgggaggctgaggcaggagaatggcgtgaacccgggaggcggagcgtgcagtgagccaaagatcgtgccacgtgcactcccagccttgggttgcatgagcaagactcctattccaaaa

SEQ ID NO: 661032 - DNA, 315 bp, Homo sapiens
atgagtggaccttgatgggcatgccgatcgtggcagcgccttcgagttctcgttcacccccggggccatgggcgccatcgtcggcgaacgtttcgtgcgcgcggccaactacgccctggagcatcgctgcccgatggtctgcttctccgcttcgggcggtgcgcgcatgcaggaggcgttgatctcgctgatgcagatggccaagacctcggccgtgctggcacgcctgcgcgaagaaggcatcccgtacatctcggggctgaccgacccggtgttcggcggtgtctctgccagccttgcaatgctcggcgattt

SEQ ID NO: 661033 - DNA, 146 bp, Homo sapiens
tgttgtactttcaactctgcctccttgcatagtattgagcccatgatgaaaaattagtatttcttgaatggaatgatgaatgtggcagaccctgacttgctccctcacattgtgatcaaccttccaaacaacaatccccctctacc

SEQ ID NO: 661034 - DNA, 906 bp, Homo sapiens
tcaattgtccagtttccttaaatgaccccaatctccctgaaagggcaggtgcggccgctaggtaatggcaaaaaatgtccatttgaaaatttggccctgattgaaggtttggcccaattgctgaaaggccccctcccaaggaaaagttacttctcgataaccaggcgtccggggttcctccctcgcgttgccaggactccagtttcccgccaatgtgtgtgttattgacctcgttagttccacccgtgccaactcgtggacatcaggcggaagggcaagcctcctgtggccctccggaaaaaacccagatctccagaaagtggcgcgtgcttattgggtggtgtcccaaaaggggtgtgtaccttgtggggcgaagaggccatattcttctccctcaagtgtgtgtccccgagttggtcgtgggaaaactattcccgagcgtgatatgaagatattggccgagtctctattgaaagaggggttcttgaaggtgacagttcccttacgagggggcaaagcccgatacatcttccttgagagtttcaccccaccggggggcccccaggcccgcccctataattccaaagagtttggcttccccaagaagaattttatggggcagtggttcgccccccagaatcaattgttgtgtgtccgctcctactcgggggcacgtacatctatggcgcgcttaaatatttctatcgcccaaacccaccaaactgcgttctctcctggggcgccagtgtcagaagccagcaagggggtcccccttggagctctggggggtctacaaggaaggccaagcccgccctggtctcactatttgccatcaccgattcttcgctcctctcagggaagcaccgggtgcaagccccgccttttttcacctccctacccggcaca

SEQ ID NO: 661035 - DNA, 305 bp, Homo sapiens
gtggaaatggagaagaagttggagaaaggccagtccattgacgacatgatccccgcccagaagtaggcgctgcccacctgccaccgactgttggacccagccagtgggagggcctggccaccagagtcctgtccttcactctcgcccgcccctgtccagagtccacctggggcttttcacctatcagagtccagttcaccagagtccaccaatggctccatctctgatttggccataaatatctccatggcaggtccttttttttccagactcacccaaccaggagtttagttaatggagactcc

SEQ ID NO: 661036 - DNA, 864 bp, Homo sapiens
  misc_feature (157)..(157): n is a, c, g, or t
gcattgtcgcaaggggttgtgccgccaagaacacgaggtgtctgtgaaagatacgccctaaaagccaaaatggcgaaaggcaaaagactcattatcaacattgtcgtcatgtggacacgttagattcgggcaagtccacacactagtggccatctgnatctatcaaatgcggtggcatcgacaaaagaaccacttgaaaacatttgagaacggaggctgctgagagtgggaaagggctcccttcacagtatgcctgtggtctgtggataaaactgaaaagcttgagccgtgacacgttggtactcaccattgatactctccttggtgaaattttgagacccagcaagtctatgttgactatcatgtgagtgccccagggacaccagagactttatcaaaacacatgattcacagggacatctcaggctgactgtgctgtcctgatggtggctgctggggtgggtgaattggaagctggtatctccaagaatgggcagacccgagagcatgccctttctgctttacacactgggtgtgaaccaataattgtcggtgtacaaaaatggatcccattgaggccaaccttacaggccgaacgacgatattgaggacaatgtttcaaggaacgccagcctttacttaagcaaatggttaacaacccgacacaagagcctttgtcgcattctggttgacttggtgcaacatgttggagcagtgctactgcttgtcaagggtggaatcgccgttagggtgaaggcagtggaccacctgtgagttggtgtccacacatgtcattgaacctgcgtggttcggtgtcacatgggtgatgctggcggaatgtgcaccgggcatttcactcacgga

SEQ ID NO: 661037 - DNA, 619 bp, Homo sapiens
tctattttatttatttttcccagtgaaaagtgtattttgatagagaacttttcattctataaatacactatgagttactaaaatatcatggattttgtttattcctgaaacatagttacatagttaaactgtacatatgacatggcttatgttaaaaatacccagtgctcagttttgaaagataggcaaccaaaaaagttaggagaaactgaagaatgtacacttttttagagggcacattttgctgtaaatctggaaatttgatagacttgactgtgtttgtgaaaactgagcattaaaggttttgattgatccttaaaaaaaaaaaaaaaaaaaaaaaaaaaaaaaaaaaaaaaaaaaaaaaaaaaaaaaaaaaaaaaaaaaaaaaaaaaaaaaaaaaaaaaaaaaaaaaaaaaaaaaaaaaaaaaaaaaaaaaaaaaaaaaatttttggcccccttggcccaattaatttttaaatttaaaaaattttttttttggggccaaatttggggtcattttggcaaattcccctttatgggggggttttaaaaataaatgggccggtttttaaaaacgtgatatcgggaaaaacctggggtttcccattagcctttggtc

SEQ ID NO: 661038 - DNA, 831 bp, Homo sapiens
  misc_feature (831)..(831): n is a, c, g, or t
gacagagtccagcgcacttgtggctgacgaagggattcccagcgcgagggaagtgctggatctcgtggtgttttggctgcgcgtgacccctgcgtggtcgggaggtgttctgtgaaaagcctaaagattatactgttacaaatcgcaatagaatacaggccactgtttcgaagagctgtattacaggtacttcgtcagtttgtaagacatgagtccgaaaaaactaccagatttggttcttgaaaagatccctgaatcgtgtgcacttactttgggcggagtggctcaggaccctgtcttgactacacgtctgcgtcatggaacatactatccagtcacgatatgttctctagcagctaatgagatgtggcgatcagcgggatagtgaagtttaccaactgggtgatgtcagtcagaaagacaacatgggccagaatatcagtattccggccaggcctcagagacgttcgcatatcactattttgacaacacggggtctccgaattccatttgcggcaagggaaaatagactatgcgtcgcaatacagttggattgcaccactacttgtgacgcgctgaccaaagcatcaacaactcgtagctgagtcctattaatatccctgagttgaacagatcgaacagagaacggacttccacactggattgatgccattctttgcgccatcattaggtaacaagtctcaatttcccaagtctgtactaactctttatgggtccaagggacaggaattacacatacatctcttaccaaaacacacacgaacaaacaccacaaaaaaacatctttgcgccccccgcctccggagggtn

SEQ ID NO: 661039 - DNA, 226 bp, Homo sapiens
cacacacgcgaacacaggcatacacgaacacggagcactacacagctacaatacaaaaacacagcacatacatgcacacagcacatgcacactcagcactacacattaacacagcacacagcacacacatgcacacagaacacacgcatgcaaagcaaacatgaacacagcaacacacaaacacacagaacacacatgcacacacagaacacgcaacattaatgcg

SEQ ID NO: 661040 - DNA, 827 bp, Homo sapiens
gggtcaccgtggtgattgtccgtgatgacctgctggggttatgccctccgagagtgcccctcggtcctggaatacaaggtgcaggctggaaacagctccttgtacacacacgcctccatgatttcagcatctacgtagggctggtctggagggataaaacaaggaggtgccgggcaggagaagctagctccatcaatctcaacaatatgagatatgataatctcaaggatctacgttgtccagggagccccaaatagaagcaagatgaatatccattccgcatggcaatgccaaaggagatgatgctttagaaaaaagatttcttgataaagctctgaactcaatatgtgtccttgaaagggcataggtctgtgggaggcatccgggctctctgtataatgctgtcacaattgaagacgctcagaagctggccgcttcatgaaaaaattttggagatgcatcagctatgaacacatcctaaccaggatatactctgttcttgaacaacatacaaagtttaaagtaacttggggatggctacaaaaagttaacacagtatgtttctcaaatgaacatgttctatgtgcagattcttctttttgtgaacagaacaacagcaaaacatccacaactctggtaaaggctggtgggacccttatgtcaccttaattctgacttgaactggagcctttaacgaaatcttgtggctttctaacacatccgcggtatttgcttgctgcactgttctagttgattcaacttggctgggaatcacaatgcccgtggcatactttccgggcctgggacacacgcacgaggtggggggc

SEQ ID NO: 661041 - DNA, 162 bp, Homo sapiens
ccctagatcctgcaaaatgtttaaagatggccctggctgtgggggtcccagaagggtggtatccctcatagggaaagagtcccaaaagattcccaaagaaggtaaaactagacttgaatgttgggtaccaaacaagcatggtgacatgacacacatatcaca

SEQ ID NO: 661042 - DNA, 490 bp, Homo sapiens
gcacatgctatagtctaactacttggaggctgagtgggaggattcccttcagcccaggagtttgaggctgcagtgagccactgtgattgtgccactgcactctaacctgggcaaaagccgagaccccaggctagagtgcatgattttgggtcactgcaacctccacctcccaggttcaagtgattctcctgcctcagcctcttgagtagctgggactacaggcatgtgccaccacgtctgggtaatttttgtatttttagtagagacagggtttagtagagaccatggtgaaaccccatctctattaaacaaatctctactaaccccatctctacaaaaaacagctgggcgtggtagtgcacacctgtaattccagctacttgggaggccgaggcatgagaatcatttgcatcttggaggcagtttgcagtgagctgagatcgcaccactgcactccagccgggatgacagagcaagaccctgtctcaaa

SEQ ID NO: 661043 - DNA, 1196 bp, Homo sapiens
gggaaggaaggagggagccggggagtgggccaggggcagtagccgggctgaagtcggcttggggagccagagggatgcggagcggaaccttgcggggcagaggcggcggcacgcaagcgggcgcagtctgatagcaggaacaggattctaagtcttccagtaccaggggaccatggccaaaatccatgatctgccacgtgcccctacgttgggccccactgtccccagaagagcagactgctgtgatcatgggcaatatctttggaatagccttctcaagagtcctgattgggaagaaggagatgcgcatcctgatggtgggcctggatgccgtcggaaagatcagcatcctatacaagctgaaactgggggcagatcgtcaccaccatccctaccattgggttcaatgtggagacagtggagtataagtagcatcagtctttacagtgtgggatgttgtgtggccaggacaagattcgaaccctctggagacactatttccagaacagccaagggttgactagttgtggtcgactagctatgatcgggagcgagttcctgaggcccgggcaagagctgatgagaatgctggcggcaggacgatgctccgggcatgctgtagctccttgtctttgcagagccatgcaggatctgccgtatgctctgaacgctgcttgatgatcccaggactacggtggggcgtgtattgccttgcgtcatcgtaactgggtacgcattccagggccaacctggtgtcaccagcgtaggacgggggctgtacggaaggctggaattggtggccgaacaggtccagaatcgcatggaagcctgaagcctaaaaaatgaccccgcgctaaacccggtgagttcccactgttgtcctggacaccagactataaccttattctttaaccacgagtatttgccaaggggccgagggcgttagaagtttaccattcgctcagggaaagactttgcaccccagccgagactcaattattatggcagcgagttaacagaccaaatctgtggctggtgagtaaactcactctgtgtatagatgaaagaagaaagaagaaaggaacagaaaataagatcacaaagaagccaccaaactcttcagagaggtgagcacactatgccgtacaatgcatgaatacggagtactgtgaggcgatggttcttatctattctga

SEQ ID NO: 661044 - DNA, 460 bp, Homo sapiens
ccccccccccccccccccccccccgacaggaagaagaagaaaaaaagaaaaaaagggaagaaggaacaaaagaacaagaagaaaggaaagaaaggaaagaaaaagaaagaaaaaaagaaggagagagggaacagaactgaacatggggcaagaaatggagagtaaagaatacaactgtaaagaaagctcatactgaaagtgaacaagagctaactgtgcatgctatgctaaagatgttttgttttgaagtgtaaataggtagactcagaaaaccctgcttctaatggtccatctgcgccccctgagggagggatgctccagctggacaagagcttagacactgccttgagggcagcagtagtcagaatgcagctcccagaccgcacccctcatctcccaccagcggacccttgaacaagtcacttaactttctaaatgctgtttcctcattggtgaaaaa

SEQ ID NO: 661045 - DNA, 124 bp, Homo sapiens
  misc_feature (21)..(21): n is a, c, g, or t
  misc_feature (42)..(42): n is a, c, g, or t
  misc_feature (112)..(112): n is a, c, g, or t
atagtagcactgatgaggacnttccacacatacctgtgtatnccaggcagacagaatagcgtatacctgggtttagagctgtaatgttcaatatagtagcaactttgtgaantatgtagctatt

SEQ ID NO: 661046 - DNA, 177 bp, Homo sapiens
atgctcagatgagaattgttgatagtgttcagaagaatcatagttgctcaatccgtggagcatttctcatccttgggtatcccataggatgtaggaactgaagtgagcatgatatagagaaaagagtctgggttttgatgtgttgcatgtgttcagtatctatcttgggagcaagta

SEQ ID NO: 661047 - DNA, 140 bp, Homo sapiens
gaggggggtggaacaccacgatgatccgcaggcccagctccggaagccaaggagctccatgcagtccaccagctgaggccacgccgcagaggccagtgtcttgtggacaaagatgggctcatggcctactcggcctgcaa

SEQ ID NO: 661048 - DNA, 157 bp, Homo sapiens
tctgccaaggtggagggaaggataaaaccccttttgggttcagccccccccaggggaaggaaggagggccccttaactccctcccccagcctggtggcagaccctaactttgtatccgttcaataagcctttcataaataaaggggtagaaaaggga

SEQ ID NO: 661049 - DNA, 163 bp, Homo sapiens
tttccctgggggggcccccttttgccccctaacctttttcccccttttttgcccccgtgggggggagccccttgttcctgttccgtgccccacccatgccctttttggctcttttttgttaatttttaaaaataaaggaagtgggccccaagtttttcggcca

SEQ ID NO: 661050 - DNA, 130 bp, Homo sapiens
tacatactgacagacccctcgaagcggtgtccctgaagagcttgcaaaagtgtgagatcgccctggagaaactcaagaatgagatgggggtgccactcccccatcggccgcggtgccaccgaccaaagag

SEQ ID NO: 661051 - DNA, 373 bp, Homo sapiens
cctacctatatgtgcctttcccctcctttatattcccttgaggaaagctagttttgtcaccagaaagtaagctatataaaatagtatggctcccaatagtaagtcatatttatatggaattcttgtgttgaataggctactatatatgagaaaatggaaaaagaatccaattttttcttgatctttcctttagaggactacttccaaatggtcataagaataagctctggtatctgttaaggccccaaaggcacaaaccactggacacaaggcaaagcccatttacacctctcgtgtgcataaagatatgtacctcaaaaggtcgctatctgactctgccttccacaagtggcctcgtgccgtattcgtacag

SEQ ID NO: 661052 - DNA, 819 bp, Homo sapiens
gaggccgcacgccccccacggggccgccagccccaacacacggggcggtcccaccccccccgctcgtgagatgtatagacggacaacagccgcgggggtaaacatccacccacaacgcacgccgggcgccgcccttttgggggggagaccacacaggtctttaagtgtgggagcacccccaaggttgtggggaaaaaataaatggagggcccgcctacgctgttaaatacgccccgcgcggaagcactatataggtgcgctcttatatgtgggggaccacccacatgcaagagagttggagaataaatatggtgtataaagacacgcggcgccccccccccgataaattgttctgcgggagaaaaactattggagctgcacataaataccccacagtaaagtgacggacagacatgtttgtggaactcccctggttcccaacgagggtagactccgctcgcgacgttaccacagcgctcccacgggtggagaggtataaagggggaccacacggggtgatctcgccactgttgtctgtggtctctttgttgttgtatagcccctcctccccccgagcacctttcacacgtgggtgaaaatcttgggatgacggaggcaccccctacagatctgctccacgaacaagatgaggccaccagggcgcgaggctcgacccccgggacagcggccacccaacccttcgttggggaggcaccagagcgcgagggcgtgcgagatcccacgcaggcccaacgcaagtcgacgagccacccccggccgacaacaatacgggcgagccccccgcttccccacaaaaca

SEQ ID NO: 661053 - DNA, 412 bp, Homo sapiens
  misc_feature (23)..(23): n is a, c, g, or t
  misc_feature (34)..(34): n is a, c, g, or t
  misc_feature (192)..(192): n is a, c, g, or t
  misc_feature (318)..(318): n is a, c, g, or t
  misc_feature (374)..(374): n is a, c, g, or t
  misc_feature (407)..(407): n is a, c, g, or t
  misc_feature (412)..(412): n is a, c, g, or t
caatcaccggaaaactgttcctnacccccctgtnaagcgcgcttcaacgtgcacgcaatatcaccgtgaacacgcggtttcgcagcaaaatcaaaaccgaacgctgtactgaggtcctcactgtatgccgaaagccgtgctcccaccgggcggcagagaggtgcgtcccgcctcactgtcgtggcatcggcnccgaagcgaatgcaacgacgccgagggtcacgtcaagccattttcccgacgaaccgaagcttcgtcgagggcagcggaccacttcgcacgtttgaggccaattacctcgtgtcgcccgagggggancgctgcggggttcgatttcgtgaaggacccggagaggaaccgttgcgcaatgatanggcgagaacgagtatgaggaccccgtattcganttggn

SEQ ID NO: 661054 - DNA, 211 bp, Homo sapiens
tgggacatggtgtacgtcggtcttaatgatacgagcatcagtgactcgtgtcgtgcagagagtgccaggagcagcatggttgacagaaagaagagcttggagcttcgaacagtgaagaataatcctcgagtgttacagtattaccctgcgactctcttgttgcaacaaattgggtggctaatggaaagcgaagatataaaatagtggccgt

SEQ ID NO: 661055 - DNA, 208 bp, Homo sapiens
agtaggagctgagtttgcatcagtaggaggcttcattacacgtgaatttgcccttatgctcaggctacgccctaggagcgaacctaggccaaaatccatttcacgtatcatattcatcggagtaagtctaactttcttcccacagcactttctcggtcgtatccggagtgccccgacgttgctcgggctaccccgatgttgagtgagg

SEQ ID NO: 661056 - DNA, 364 bp, Homo sapiens
tggatacagagtcttgggagtcttgctctgtcacccaggatggagtgcagtggccgatcttggctcactgcaacctccgcttcccaggttcaagcaattctcctgcctcagcctccccagtagctgggattacaggcgcacgcagccatgcctggctaatttttgcatttttagtagagatggggtttcaccatgttggccaggctggtctggaactcctgaccacaatgatccacctaccttggcctcccaaagtactgggattacaggcgtgacgaccgcactcagctggttttctaaacttttagatttctcttcttcttcaaatgccacaggtgtttgagttttttttggtcgacgcggc

SEQ ID NO: 661057 - DNA, 279 bp, Homo sapiens
gtgcagtgactcacacactttgggaggcctaggcgggtggattgcttgagcccaggagttcaagaccagcctcagcaacatggctaaatcccatctctataaaaaatataaaaaattatccgggtgtgttgatgtgcacctgtagtcccaggtgcttgggaggctgagatgggaggatcacttgagcccaccatgagagatcgaggctgcagttagccatgattgtgccattgcaattcaggcttgaccaacacattgaggccctgtctcaaaaaaaaa

SEQ ID NO: 661058 - DNA, 645 bp, Homo sapiens
ccagtgtggtgggattttttggtccagctatagagggttcctagtatacaggtccctcgagtcagcacatttcgcggtagtctcaatcgctcagtagctgttttatcatggtatgctttctgtcttttaaaggctccagcttctgtgcatcatacttgctgtggttctcttccaggtatactatcaaaggtgcctcatctctatctcagctttgcagtaatgctatccagaggcagtcttattgatccgctttccatatggcatagtgtcctcgcgtcctacctggccagtcatttagccattagcatctgtcattggttattgagcttcatctttagaataaggttttggtaacacgaatgtactttcctgctaagacagtttatgcatgtctcttcaatgtaagcttattttcaaatacatgtagacggagtattcagcggtcagtttctgttacggatgatgaccttctctggttcgctgacgcttcctcttcttcctgtagctctctgtactttgctgcctgcgcccatggttccttctttgactatggtcgttgcattcttcttcctcatcgcagtctagtccctgatgggcgatctcagtagtgctgttctccccatgctgtttgatatcccgatccat

SEQ ID NO: 661059 - DNA, 331 bp, Homo sapiens
gatggcttaaatgttgcactgtctgctttaacaaattccctataagagttctaatgaatgtactgccttgagatgtgataaattaggaatgtcgttggtttgtgcatgatttgctacaatctcctttggtgtaatgcctggactgtccgtgctttggtttgctgctctgccacaatttatactagtgctagtgagaaaatttcttgctcacgtagcccaaacgtgtgggggggggaggtggttcccccatattgtgcatgaaaccctggatgaacggctgtataattccataaaaaaggacataaacgcgcaatatttcccttatgtctta

SEQ ID NO: 661060 - DNA, 128 bp, Homo sapiens
cgagtgtctgggtactctaaggatccccattggatatgcggtgaggggctctacactgttagctatctttgaagactgagattctgctgcaacattcttggcatgagaataagggtgctacgtctgat

SEQ ID NO: 661061 - DNA, 772 bp, Homo sapiens
gtcttgctctcgacctccaaaagtgctgggattacaggcatgagccactgtgcccggctggaaggggttttaaaaaaaccaatctttacctcccatccacacatcctttagggaaaatgcgccccctcttttcatggcctgtcctggtggtatgaggagacctgcctggcagctgtgtctgttgccggatcatcattttgctggccacagctgattaggaagggggagtaactggactatgctgggccagtggggccctgcctccctcctgggaatttgaattacgtgacactgaatgcccctcaggtagctgtcgggtacccaaatgcaaggagtcagagagtatcatggaaacccatgggcaacttgaagtaacgacagagcagaaactaagagacagacagggaactatgcagttcctacgactgagaaggatggagggtagctgcctggccattgccccgtttccctaaggcctggctgtattgcctgcattgtaatgatgtgagattgtctgacagcctcataataaaaattattttaaccatatactccccacccaagacctgggtgacaagtgatctaaaattgtcacacagattgggcacactgacagcatgtggcatctgaatcaggggagtaaatatttctactgtactctgtggtattcagatcgggaatatggttttgcatctgggaaagtgtcatattttaagaacattatcaaaatatgggatttaaaaatcagcttgtgtgagagcatagaggtagc

SEQ ID NO: 661062 - DNA, 409 bp, Homo sapiens
aagttcctgggggcgattacagctcccagcagggaggcaagtcttccccctggctttgcctggtgttcgcagcaggcagagttggctccctctgggaatttcacaatctgttaagctgtttgtgccagacgaggaatctagactcttcttcatccaaatgcgcgtgatgccccgcgaattcatccggatgtgcatggtaccccgtcttgaattagaagccacccaggagggtctagagatgttgacaggaggccggccaggcctgagtgtggctccccctcgggggtgaggtgacctctgtagcagtcggtgccgtggcagcagccctggctcccggtccaggctcctcaccacagagtcagcagagcgtttagtggcaggctcaacagtggccattctcctacttggg

SEQ ID NO: 661063 - DNA, 116 bp, Homo sapiens
tgtatctgaagatcctgagctgccgtacatgcgacctcctctttcaaaagaactgtgggtttcagatgacccaaatgtcacaaaggcaatgcggttcaaacagttggatgggaaag

SEQ ID NO: 661064 - DNA, 714 bp, Homo sapiens
  misc_feature (93)..(93): n is a, c, g, or t
  misc_feature (96)..(96): n is a, c, g, or t
  misc_feature (132)..(132): n is a, c, g, or t
  misc_feature (134)..(138): n is a, c, g, or t
  misc_feature (140)..(141): n is a, c, g, or t
  misc_feature (147)..(147): n is a, c, g, or t
  misc_feature (149)..(149): n is a, c, g, or t
  misc_feature (152)..(155): n is a, c, g, or t
  misc_feature (159)..(161): n is a, c, g, or t
  misc_feature (166)..(167): n is a, c, g, or t
  misc_feature (169)..(170): n is a, c, g, or t
  misc_feature (173)..(173): n is a, c, g, or t
  misc_feature (175)..(175): n is a, c, g, or t
  misc_feature (179)..(180): n is a, c, g, or t
  misc_feature (182)..(182): n is a, c, g, or t
  misc_feature (185)..(186): n is a, c, g, or t
  misc_feature (188)..(192): n is a, c, g, or t
  misc_feature (215)..(215): n is a, c, g, or t
  misc_feature (220)..(220): n is a, c, g, or t
  misc_feature (222)..(222): n is a, c, g, or t
  misc_feature (230)..(230): n is a, c, g, or t
  misc_feature (234)..(234): n is a, c, g, or t
  misc_feature (243)..(243): n is a, c, g, or t
  misc_feature (245)..(245): n is a, c, g, or t
  misc_feature (249)..(249): n is a, c, g, or t
  misc_feature (251)..(251): n is a, c, g, or t
  misc_feature (253)..(253): n is a, c, g, or t
  misc_feature (255)..(255): n is a, c, g, or t
  misc_feature (259)..(259): n is a, c, g, or t
  misc_feature (271)..(271): n is a, c, g, or t
  misc_feature (285)..(285): n is a, c, g, or t
  misc_feature (288)..(288): n is a, c, g, or t
  misc_feature (297)..(297): n is a, c, g, or t
  misc_feature (307)..(307): n is a, c, g, or t
  misc_feature (310)..(310): n is a, c, g, or t
  misc_feature (312)..(313): n is a, c, g, or t
  misc_feature (317)..(318): n is a, c, g, or t
  misc_feature (323)..(323): n is a, c, g, or t
  misc_feature (341)..(341): n is a, c, g, or t
  misc_feature (344)..(344): n is a, c, g, or t
  misc_feature (347)..(347): n is a, c, g, or t
  misc_feature (361)..(361): n is a, c, g, or t
  misc_feature (374)..(374): n is a, c, g, or t
  misc_feature (377)..(377): n is a, c, g, or t
  misc_feature (386)..(386): n is a, c, g, or t
  misc_feature (408)..(409): n is a, c, g, or t
  misc_feature (417)..(417): n is a, c, g, or t
  misc_feature (435)..(435): n is a, c, g, or t
  misc_feature (439)..(439): n is a, c, g, or t
  misc_feature (450)..(450): n is a, c, g, or t
  misc_feature (456)..(456): n is a, c, g, or t
  misc_feature (476)..(476): n is a, c, g, or t
  misc_feature (481)..(481): n is a, c, g, or t
  misc_feature (484)..(484): n is a, c, g, or t
  misc_feature (496)..(496): n is a, c, g, or t
  misc_feature (505)..(505): n is a, c, g, or t
  misc_feature (515)..(515): n is a, c, g, or t
  misc_feature (523)..(523): n is a, c, g, or t
  misc_feature (534)..(534): n is a, c, g, or t
  misc_feature (539)..(539): n is a, c, g, or t
  misc_feature (541)..(541): n is a, c, g, or t
  misc_feature (543)..(543): n is a, c, g, or t
  misc_feature (551)..(551): n is a, c, g, or t
  misc_feature (559)..(559): n is a, c, g, or t
  misc_feature (563)..(563): n is a, c, g, or t
  misc_feature (576)..(576): n is a, c, g, or t
  misc_feature (580)..(580): n is a, c, g, or t
  misc_feature (586)..(586): n is a, c, g, or t
  misc_feature (588)..(588): n is a, c, g, or t
  misc_feature (592)..(592): n is a, c, g, or t
  misc_feature (621)..(621): n is a, c, g, or t
  misc_feature (633)..(633): n is a, c, g, or t
  misc_feature (637)..(637): n is a, c, g, or t
  misc_feature (658)..(658): n is a, c, g, or t
tggaggccggtggttggggcttctccgcgtcggggatggggccagagtaacctagacccgtttaccagcgcctcagtcggttccccatgcccncanaggtggcccggggcaagcgcgccgccatcttcttcncnnnnntnnccatcntnctnnnnctannnctctnntnnaanancacnnanaannannnnncctcttttccttaatcccatatnatttncnttaattcncttnatctcctcntnattntncntnttantgttgtgtttangcgggagggagggnacngggaagagnaggagaagcngcncnnaganngttgngcagggaaaagaaaaagngcncgngaaaagaaaaaaangaaaaagcaaaangcncggggccanaaaggcctatgcggaagggctnngggaccanggagggagggagggcccngggnagcggggcagngggcanagaaggcagaaagccatgcngaaangangccgcaaggaanaaagcggangggctgcccngaactggnggaccgggganaagcngnancaactccngcaactgnctgnccccaaggacaangaangaagcnanaatngggggcccaaagaaggacaagcagtgggnggcgggggggangaanggcacccggggaaggcctggngaaacatgcatgtggggcgcgcccgcatgaatgccaaggtggggcccaaggccatg

SEQ ID NO: 661065 - DNA, 92 bp, Homo sapiens
aggggttcaggcctggagtcagggaagaaggggaaaggggcagatagctgggggacaaggaaaacctggcgccccccaccgcgaaaaacaca

SEQ ID NO: 661066 - DNA, 712 bp, Homo sapiens
gcagaagtggagaggtgggtattgggacacacaggaagctgctctcttctgttgtctgtggcttctgttggaggatgtgcggtggttgaatgcaaaggaggagatggaaggaaggtgtcaatatagctttagcaaaggaaaccaataatgactaacatcgaaatcagccttgcaataattgtcacagttgagaaaagttatgacattgaacgatatccaatctaacccaatccttcttgccttaacctccaaattgctcttagtcatgcctgagcaaaggccaagctaccttggggagaaattccgttctacagtttaaatgataatagcccttcccaaaactaacctgtctttgtcaaaaacatgatgaaaggccaccaggtctagggaggatgagacggggcctgaatgcgaggctctagcataaacaattacccgccatgtatcagaggtcacaagatttgtaacttccccaattagtcctgtaaaatgatatcacgtgcggccttttgagatgtcttgcacgctataatcgtgcgtggctttgagacaaggtcttgctctgtcaccaaagctggagtgcagtgatcatagctcactgcagtctctatctcctgggctcaagtgaaccttccacctcagccttccaagtagctggaactgcaggtgcaatgccaccatgcctggcagttagtgatttaggtactggggt

SEQ ID NO: 661067 - DNA, 285 bp, Homo sapiens
  misc_feature (27)..(27): n is a, c, g, or t
cctggaggcaactcacacctggggtgngatgatgcaaccgaggagctcatggaacagagtgaggagctgcttacgctgtgatggaaagcactggcagcccctggacacagtggcttcagagatccctgccatgatgtacccaggccaaaggacaagccaggctgcatgatgtgagggagatgagagactcctttttaaaaattgtgaaacctttgttggaaatatgacctcgtaagatctgaataatgactgaatttggagatcatgaatgtttctacaacaaaa

SEQ ID NO: 661068 - DNA, 927 bp, Homo sapiens
ctccctgagttgatcaggccagcatcttttaagaagggcaaccaatgatctgggaggaaagtctgtacaaaaacccctggggcttttccgaagaccccggggtggcccctccttgagcgagcctctcatccgagactgcccagggtgttccttcccaccattacatggacgtcagtttgcccgcgctaatgtcttcctcgctgtatatagtcgggagcgattgacccccgccaagtaaggacgttgtatttttatgacctcgcccctccaccataagtagcgagaccttgtgatgtatagtaagtgtcttagtagcagctcgtgaggtggggccgcaagacaggagatgaactcaagggagataaggggatcgcgctttggtgagttaacgcaaaacacacggcgttagtaatctccaacggaccgtttctggaagaaaaggttttggtcgacacatgtcttgcgtgaggtgtcttgggaacaacccaccgcctagttgagtccggctcatggtagagagtgccccatggccaaagtctccactcccactgccggctggtgagcatgaagcccctggggcgagatggacacgggaataatgtacccttgtgtgtggtgcataatgcgggtgcaacaaacagcctttcccatgaaggtgtcattccttgaacacttacttctgctgggtccccctaatgaaatcctcagacctcctaatatctctgtcgttgtatggatgcaaacaagagtggatgtattggcgacaatctgcttgcctaccccgacatgtgtttttttaggaacccaccaactcacgaggcatcgttggtagggaagaaagtcccccaacacacatcgaggtgaaggaaacagcgttacagacttcgaagggaatcccaaggaccaaccaaaagggcggacaaaaca

SEQ ID NO: 661069 - DNA, 1773 bp, Homo sapiens
cgctggtgaaccagtcgtaccagtacggcccctgcagcgctggtgcaatggtgcttgctgtgtggggtgcagcatgggctgactacatggcccagtgaggacgactgtgtgacctggtggatcctgctgctgtgaccctggcctggtgagaatgcagcatgctgcaagaccttcactggcatgtgtgcaattcccacctgctggaaggtgcatggcaacacatgatctgatgaacatttgattgagtgacttcctgagaacgtgggctcaatgctcattgcattgctaccatgtgatagggtcattagtcatgtggagatgcgtgtttacctaatgctctgggagctggtggtgaatagagatgacggagtgttgcaagcagagacatcgaagaggaattgttgaagcacaaatgctggcattgtgagcgttttactttgcccatgcaaaatgtggcgttccaggccttggatcgtccactctgtgcgtggccaagaaatgacggactttgttgggcactgagccaatctgcaagaacggattgagccacttgtggtgcacttttggattccttgtgacccaagtcagtccccttagggctttctggccgagtcccatgtggaacacttcggtcctggtcggacacattgatgaacccttctgacgccagatggcgacacggggcgcttccctgttcctactgtggttggcccgaggacagagacaacggaacgactgccccctggtgaattaaacggaagctggtacaaactttggttggcaagcacacctttcccgagcaatcaaggcctggcaacgtgggaattggtcgttccttttggccctttccaaacttggcccactgtggacttcccaaatcgtggacagagcaagggaacccacagaatgcctggacgtttttgcagcggttatttgcacccacaattgcctttttgaatggcgcacacgggggaagtctgcacaccacctttggttgcgagcctcagcacgctttgggagatcgacattggcgctattccggaaaacaggttgcgcttgcaggcacatcacgtttaaccctttccgagccgatatgcccccccaaagagtcatctgccttgtgtcgtttgccacggcgtagggcaatacactttgtcctgtcggtccacgtatcatggagagagacccagtgattgtaatgaaagggggcgccaatccatggagctgttaacggttggttcctgttgcgtacgtaccgaaccggactgttcctatcgcggggggcacaagagagacagggctggaagaatgtcgtgagcaaaccggggcattcttgtaagaagagtgcgtgcgatttgcagaaaccacgaaagaaaaggagacacccgagactagtgaggccaaacaaggaaagagcgttgccacgcggcacctccctcgaaggaatggagtcacgagcgccgagcaagccacatgaagtaggaggcacgagtgtgccccaagaaagcacctatcggagcatagacacaacagacgagaggagagcctgcagcacataggagggtgcacgacacgcgcacgcagagaagcagaacaggaagcgtagagcataagcagaacgccacagccgacccagcgcaagacgagacgcgacgcgagaggcggcgccagaccacgcgttgaaacacgagcacgaaggtacacgaagcacgaagacacagagaccaagctagaacagagacagcagagcagaggagcgaccagcacgacagc

SEQ ID NO: 661070 - DNA, 1006 bp, Homo sapiens
gattgtaactgtgcactgtgcccggactgctgaaagccagaccaccatgcaaccaacggggtggtgcaccatcatcgataaggtcatctccaccatcaccaacaacatccagacagatcattgagatcgaggacaccatatgagacccttcggagctgctgtggctgcatcagggatcaacacgatgacttgaaggataacaggcacagtacacgacttatatggcacaccgaccaactgaggccatatcgcagaagatccctattgagacattatgaaccgttatcctgggacgacccaagaagaccctgaaggagaacatgatgaaccaagccacatcattgaagatcaacctactgctgctgcatgaaagaccacaatcgatctgcagcagcggacatgatcatgctgagacgaaccccctgggaagcgcgcaacggcccacctcgcgacaaggctgagggacatgcaacagacggagcgacacaataactacaacatactacacaacgcgcgaaaagagccgacaaccactcctaccacaataaacaagaaccattcacataacacacaaccgaaacgaggggtgctgaattcgcaacataacccacttgcatagaacgccatcacctacaaattcacccaagcaacatccacaacaccaaagaacaccataactctatagaaactatagggacctcagaccaacaaggatgaccaatgaaactcaggtgcaatacccaaagcacaggacccaaacagtcccgatccagccatcaacaaacgaaggcaaacgcacaggtacccaagacgagaactacgagagcgacaaaagtcccaagatactaacgtcaattaggcacaacccggacacaacagagggaatacggcaaccgccacgtcaaccatgagaaacatcacaacgcacgtgacaaaatagtaactcgatactatcgcaaacaagaagatattgagaaaaaagaaccgacaacacaacaagacaaga

SEQ ID NO: 661071 - DNA, 310 bp, Homo sapiens
gccccggaagggagagaagacaaggggaggaaggggggaaggaaaaggaaggaggagaaaggaaaggaaggaagagagaggaaggaaggaagggggggggaagggggagggaaggaggagagagaaggagaggaggggggagaaaagagggggaaagagggaaggagggaggaagggaaaaagaggaaagaggaaagagagggggagaggaggaaggaaaagggagggaaagaggaaaggggaggaggagaggaagaggagggaagagatagggggaagggaggtagggagaagagaggaaggggagagg

SEQ ID NO: 661072 - DNA, 887 bp, Homo sapiens
agaagcattctgagtttcattgcggaagaaacaagctatctctctggttcttgagcacgaagcatttgtataagaagtcgttggtacactgggaccatttcgaaacaatatagagtgaacgaattcggggttgtatcgactcagtgcattctgtaagggattcagcttttcccttatttatcttgcagtatgctagtgactatcttgcagagtcgtgttccagctgtttcctgtgttctcgatcacacgaagactgtatcgctccttatccttgggttcatttgcttcaggaaaaccattccatctagatttcctaggtgtgaaacctcactgattacataatagtgtatatttatagtatctaggacacctttcttcaggcatcctgttacatttctacattataagattcttaaatatgcattgaattacaaataggtccccagggaaaaggcaaagaacgaactggcttgtttctgcgagaaactaggactaatatagatatcttgggagcactgaacatggaggatagagttaaacttgaaaagacatacagagatagaaaagcaggaaactgcccttatcatttgtatgcaagcacacgatatcatgtatgggtttttaatttttggcttgatgtattcatttccaaatcaaactataatgtgctctaattgggtctcttagtgcagcacgtggtacgtggattagaagtactttctccagttgaataatgacatgataattgaggaatgcaatgtgtgatagatttcactaaaaaagccaggatgagtatgtagatttcctttaaagataattatatataatactatatcaaataagaaagttcaagatgattaggtatatggtaattaacaataaggaaa

SEQ ID NO: 661073 - DNA, 452 bp, Homo sapiens
gatcgaggcggaccgactgcagctgtgctctcccctgtgattgtgtcactacgtaggcaggtgtacccttctttctcctctcataggtgtgtatgtcctagagcagtgttgtttgaaaactattcacttgtgctagaactgttcacttgtctgtgtccccacttgacgtatgaggtatgtgatgttaatttctacatcctttgttcaatgagtaaattaatcagaactagaaactatgtagctagatatgttgtttgtacaagtttatatttttatacagttaagcaatggattccagaggagactttatgtcaccagtatgagaacagaaaacataccagttaagccagccatgtcacttactgggctgtttgacctgaggaagatgactgcatctctctgaacctcagtttcctcatttatcagatagatataatgatacagtttgcagt

SEQ ID NO: 661074 - DNA, 375 bp, Homo sapiens
tagaggctgaagtgggagggggggtggacaggccgccttagacgccccctcctgttggcgtcaggcccagctgaccagcgttaacatcaaaacagcgatctcacgactgataaaacagacacagcagtaagattcccggttccaccctgactctgggatagcagcaggcgacagagagcaggccctgcaggaaataaaagtattttaccccagaatatattccttccacctattttgagtggctatagaaaactgcctcttgggggggaaatttgcattctggagagaatcccatgccctttccaggtctctttttcctgatccaggagagatttaactacaagtcaccttttaaagtcccataggagacattta

SEQ ID NO: 661075 - DNA, 372 bp, Homo sapiens
ccatgaggctcttcctgtcgctcccggtcctggtggtggttctgtcgatcgtcttggaagcccagccccagcccagggaccccagacgtctccagtgccttggataagctgaaggagtttggaaacacactggaggacaaggctcgggaactcatcagccgcatcaaacagagtgaactttctgccaagatgcgggagtggttttcagagacatttcagaaagtgaaggagaaactcaagattgactcatgaggacctgaagggtgacatcccaggaggggcctctgaaatttcccacaccccagcgcctgtgctgaggactccctcctattgccccaggtgccaccaataaaaatcctacagaaaacttca

SEQ ID NO: 661076 - DNA, 180 bp, Homo sapiens
tagtaggggctgccattccaatattgatacgccaccccgagttcctgccagtcagcctggcacacataaccatagggatcccctctggtcactgggtcaccatgccttttcttaaactgcgcttctagtgacatggacttaaacgatggggtccccagaatgtacagtgctcctcgatgg

SEQ ID NO: 661077 - DNA, 173 bp, Homo sapiens
tttgttcatggtgacttgtaagctaaggggaaggggtgctaagatgcctttgaatctttccatgtcacgcgatcttgggccagccggcctcccttcctctccttgtatgtaaaacctttttttcccctttcaagcaagaactttcaaaagaactatgcacattttaacataaa

SEQ ID NO: 661078 - DNA, 1320 bp, Homo sapiens
agaattggccaggcatgatggtgcatggcctgtggtcccggctagtcgggaggctgaggcaggggagtcacttgtggcccaggatgcggaggttgcggtgagtcgagatcgtgccatcgtcactccagcttgggcaaggaagagctgaagctccatgctcaaaagaaaagaacaagcagaggaaggtaatgggatttattgccatgggttctatgcagaataccaagtattttgaagaggggaacttctaatgaaggtcggagagctggtaagcacgtgcagttttagagcccatttgcttggcgcatgagcttgtggcgcgtacggttaatttaacctggaggcttcttaaaatcgctcaggaaaaggcgatggcttaggaaagggctgagtctacaggctggcagtcgaactatggttcgtcggaagaaatgggctgtatggagagaagcgaccagatataattgtatagaggtaaacataatcagttgaaggtcgggtggttctcagagagaagaactaaagtgggagaaaagtaaagttaagaggcaagatcctaaaagtgcacattagcatcgggaggggcatcgagagacagggggaactctgcgttggtgcttggggggtttaccagggtatattgattgaacattggagggttcatatgtgctgatagcgttaacttcactggtttccacggagattttttggtcggaaggcgtaaacacaggggttagactagaattgatagttgccattgtttacttcaatgaaaggcggagagtgaatggtaacggtgtgggttaaaggttatcacaagggtcttgggtgggtaaagagaacgggaagatcatttctgtgccgttaataggtattacacctttcgatataaggagtaaacagaacgaaggaaggccttatgggtttattaagaggttggacggaatgaattctgtgaagagcgtcttcggagttgaactcacgttagtaagtttgataatgcacggtgtagcgtgacatgtagtggaacaatccaggggcaacagacatgggggacacaacaaagaaggaaagcacagattacctcatccacccggagtattgggcactggctacccctatgggggacctcaacacaatggggccgaacgcaggccaaggggaacagaattcccaagtgtgccgggagagcagtgaatcgtggcagaagggtaacagggtagaaagccacaaagacaagcgaacaagggtacaaccagacggagcggaaaaaagagcgagtaaactagatgcaaaacgaaaaataggagaacaggaggg

SEQ ID NO: 661079 - DNA, 104 bp, Homo sapiens
gtgacaaatgacatgtacggatacatagggcgaaattagttttgtacttgtatgatacagacacgagtcaagaattccgtcgttttaatcagagttgttgtagt

SEQ ID NO: 661080 - DNA, 966 bp, Homo sapiens
cgatgctggtggatcacgaggtcaggagtttaagaccagcctggccaagatggtgaaaccccgtctctactaaaaatacaaaaattagccaggcctggtggtaggcgcctgtaatcccagctatttgggaggctgaggcagaagattgggtttggaaacccggggaggggaccaggttgcagtagaggccagaagatgtgcaccaccgtgcaactccagctcgtgggcaacagactgaaactatgtcttaaaaaaaaacaaaaaaacgggaaaagaaagaaaagaaaaaaaaaattttaaactggaaaatccaaaaaggctctttttaagaagtggccttccaacacgaacagagtgggggttccccgggggcaacaactcgaacgtgggtccccgtataattgtgcccaggaacgggggcactgtgccaaacacaaaactccaagagtagcggcacctagggccagaggaaaaaccccatgaggcgagaaaacaactaatctatattctcccgctgtgaataggcaggacaactaacaatattgctggcggggtcccattgagacattcccgtctttcaaccattttcttcgcactttctcaccaggtgtctttgtgagggcgacaacaggctcaccattacccagtggtgggcccacactctaagtttgtgaaagaaaaggggggagcataacctggcttatacattttcaaacaccaggagagaatactttcgtgaagcgagagaaaaaatttatccgggggattaagaggggcacgtcgattttagtgactataggggaccccaatatcgtgtcgtgaaagaaccatgcgaaatttttaagtggattgtttgtctggcagaggtggtataacacagtaagagtaaaactacggggtgatcggtaagttagaagaacaatattacgtggggagaattgaatacgtctacagaagtgtcaattt

SEQ ID NO: 661081 - DNA, 178 bp, Homo sapiens
tagcggatctgaatctgcaccacagcctgtctctggtcactttgaatgtgtctctccgttgtactctcctcccaactcccttcatgctgagccatgtacctggagcatgagagaacctcaggccttctctaccacacatacagaatctgactcctaccccacagtcttgtcaggagca

SEQ ID NO: 661082 - DNA, 101 bp, Homo sapiens
ggtcccgttctgcctctgccgttctgcttctgcctgcttctgctgcttctgcttctgctgcttcctgcttctgcccaacgtcctgcaggttcttggtgagg

SEQ ID NO: 661083 - DNA, 122 bp, Homo sapiens
gatcgcttgatttcagagggttgaggctgtagtgaactgtgattgtaccactgcactgcagcctgagtgacagagcaagactccgtttcatatttttaaaaataaataaaaatcatgagttt

SEQ ID NO: 661084 - DNA, 201 bp, Homo sapiens
  misc_feature (9)..(9): n is a, c, g, or t
  misc_feature (80)..(80): n is a, c, g, or t
  misc_feature (85)..(86): n is a, c, g, or t
  misc_feature (110)..(110): n is a, c, g, or t
  misc_feature (114)..(114): n is a, c, g, or t
  misc_feature (123)..(123): n is a, c, g, or t
  misc_feature (147)..(147): n is a, c, g, or t
  misc_feature (152)..(152): n is a, c, g, or t
  misc_feature (182)..(182): n is a, c, g, or t
gagatagtnatgcctttgctttctgatggttcagtgcacacatactttatttaatgcaagacacttattttagaaattgnctagnnatttccttccagccaatatatatnaggngtgcatganccataaatgaagttcatgtttagncttgnagtctcaaccctgagtcctctcaaatatgnaatatgctaatatgctgta

SEQ ID NO: 661085 - DNA, 153 bp, Homo sapiens
gccacttttaaagattccccaattcccgctttttgggaatttaaattatttgctggaagtggaaagaattattccattccttaagaaggcagtggccaattcttaagggccgggatcaccaaccaagctgggcaggaacccaaggcacccaag

SEQ ID NO: 661086 - DNA, 311 bp, Homo sapiens
cgctacgtgaggccaaatatcattcgtagaggggccacagtaataacaaactgtactgatcacgccagtccgcatacattgggacacgacctagttcaatgaatctgaggaggctactcagtatacaggcgccagcctcgacgacgatgcttgacctagcacttcatcttgcccttcattattgcagcgcctagcagcactcacaaccgtgcctattctagcacgacagacgggaatcaaaccaagcccccataggaagtcaccgtcccgattccgactagaaaatcgagacttcccacccattagctaca

SEQ ID NO: 661087 - DNA, 156 bp, Homo sapiens
ggggaatgagtagcaaagatggattaagtgagaagagtataggaggcagcagggccagaggtgtgaatagcccagaaccttctgagaagattcctttgtggacggaagaaaggggaggtttgtggaaatggtggaagataaggtcctacaggtatg

SEQ ID NO: 661088 - DNA, 258 bp, Homo sapiens
tcggcctcccggttcaagtgattctcccacttcagccgactgagtagctgggattacaggcatgctctaccacgcctggctaattttgcgtttttagtagagatgaggtttctccatgttggtcaggctggtctggaattcctgacctcaggtgatccacctgcctcaacctcccaaagtgctgggattacaggcctgagccactgcgcccggcctctcttctttcttattacctaggagtaggatacagtagggaga

SEQ ID NO: 661089 - DNA, 429 bp, Homo sapiens
cgagaatcataatagctatgtaaggacacttaaataactcaagctaacacagagaaggaatacagaattctatcagcataaatttaacaaagagattgaaataataaaaaagaacctagcagaaattctggagttgaaaatgcagttgaaagactgaagaatgtgtgttttttaatagctgaattgatcaagaagaagaaagaattggtgagcttcaagacaagctatttataagagacaaaataataaagaatgaaacatgcctaaaagactctggaaaaatgcctcaaaagggcaaatctaaaagttattgaccataaagaagtggtagagagaagtagaggtagaaagtatattcaaaaggaaagtaacagagaacttctgagacctagagagagatctcaatatctataactttctaagacagtt

SEQ ID NO: 661090 - DNA, 303 bp, Homo sapiens
agctgtctgcctctaggcctactatgggtgttatcttttatactctctctactccgtattccccttttgtcccaagagctgttcctctttggcctaactgctttaatttcgacgtgattatagtgttctgtgtgcgttttcatcatagaataagattctatcttggacaaccagctatcaccaggctcggtaggtgtgtcgcctctacctataaatcttcccactattttgctacatagacgggtgtgctcttttagctgttcttaggtagctcgtctggtttcggggggacacgaatgttca

SEQ ID NO: 661091 - DNA, 109 bp, Homo sapiens
gatcctgtgcgagcgttacattgcctgcatttgtagccttgcttgttgaggccccagacaaagtctttgcacacagaacagaaggtgggttgcccaaatgaaggtggcg

SEQ ID NO: 661092 - DNA, 276 bp, Homo sapiens
aaaccccttccagatttgatatggggctattaatttttatgctgttaattggtattcattcccaaagcagttgaagggggaaggctcccctgcattttttgggtaaggcctgaaagcttggtcatctgtaaaatctaaacccgagggtttgttttccctttaaaattttttaaggaaaaaaggatgggtttttaggggttttgaaagtattattcaatgtgcaacaaacaggtaggttttcagcataagctgaaatatatgcatgtaaaaacttta

SEQ ID NO: 661093 - DNA, 406 bp, Homo sapiens
agctttgtgcaaggcatccccttgcacagagccggtaccaccttgtccaaggccccagtgcccttaagatgtaaggcctacacccagggaatagtccttcgcagaccaggtatccaattacacagcggaaaccagacccggaaccaaaccactgccacctctctcgcatagtccagtgaagagatacacccttgaagccagaatgtgtggctcggtcacaagtgtatgtggtgcactccacaccattctggaatagctcgtgtcttgaagaaattctgagatatgaccaggtctgacctctgaagttcaacgccacagagcggcgccttatagggccgcgcacgcggcactcagcctacagagacgcgacatcgcgctcctgagggctcgaggtcatcccgcgtgc

SEQ ID NO: 661094 - DNA, 574 bp, Homo sapiens
gaacgacccgctgttctgctcgagttgaacccgtcccacaagtctaaagatcgtaggaatgtcttcagtctttcgatgagattacggcgtatgacgtggcgatggcgtgaagcgatgctcctgctcgtgaagaagagccgagacttggctattgctatgtggctctggctacatgcggtggctaaaaccgcctctgagatggtcctggcggcatgacaacttctccaccattgtggctgccgttgaggaggggcgggcaatctacaacaatcctgaaacagttcatccgctacctcatctcgtccgaacgtcggggaacgttgtctgtattttcctgacagcagcccttggatttcccggaggcttcgattcctgttgcagctgcatctgggtcaatctgggtgacgagatggcctagctgccaactgcactggggttcaaccctccgtgatctggactatctatgaataaaccgtccccggaagcccaaaggaacgatggatcatgcgggtggcgtctttatccgttagttggctatgtggctgttacgtcggggctgctaccgtgggtgctg

SEQ ID NO: 661095 - DNA, 577 bp, Homo sapiens
  misc_feature (71)..(71): n is a, c, g, or t
  misc_feature (73)..(73): n is a, c, g, or t
  misc_feature (117)..(117): n is a, c, g, or t
  misc_feature (119)..(119): n is a, c, g, or t
tgcgcggtcctttcctgcggcgccttccgtccgtcggcttctcgtcttgctctctctggtccctccggagncncagccgcgcgtctcccggggaagcatggcgatgaaagcggcaangntgaaccagttgtgttgtcaggacaaattacaggattaactgaaggccagcatgggttccacgtccatcagtatggggacaatacacaaggctgtaccagtgcaggacctcattttaatcctcactctaagaaacatggtggcccggcggatgaagagaggcatgttggagacctgggcaatgtgactgctggaaaggacggtgtggccaatgtgtccattgaagatcgtgtgatctcactctcaggagagcattccatcattggccgtacaatggtggtccatgagaaacaagatgacttgggcaaaggtggaaatgaagaaagtacaaagactggaaatgctgggagccgcttggcctgtggagtgattgggattgcgcagtaaacattccctgtgtggtctgagtctcagactcatctgctaccctcaaaccattaaactgtaatctgaagagtta

SEQ ID NO: 661096 - DNA, 2364 bp, Homo sapiens
ggcacgaggagtaatcgttctggtcactgggacacagctgcgctcgcccattctaaaaagtcagcgccctcaggcccgcgggtaaccacctcctcctgagcgcggtgaccagagcttagaagcaaagttaagagactcatcagattctgagctgctgcgggatattttgcagaagactgtgaagcatcctgtgtgtgtgaagcacccgccgtcagtcaagtatgcccggtgctttctctcagaactcatcaaaaagccctcgggaggctcggtcacactctccaagagcacagccatcatctcccacggtaccacaggcctggtcacatgggacgccgccctctaccttgcagaatgggccatcgagaacccggcagccttcactaacaggactgtcctagagcttggcagtggtgccggcctcacaggcctggccatctgcaagatgtgccgcccccgggcatacatcttcagcgactgtcacagccgggtcctcgagcagctccgagggaatgtccttctcaatggcctctcattagaggcagacatcactgccaacttagacagccccagggtgacagtggcccagctggactgggacgtcgcgacggtccatcagctctctgccttccagccagatgttgtcattgcagcagacgtgctgtattgcccagaagccatcgtgtcgctggtcggggtcctgcggaggctggctgcctgccgggagcaccagcgggctcctgaggtctacgtggcctttaccgtccgcaacccagagacgtgccagctgttcaccaccgagctaggccgggctgggatcagatgggaagtggaagctcgtcatgaccagaaactgtttccctacgaagagcacttggagatggcaatgctgaacctcacactgtaggactcacacacgactccaacgggattgtgagaatcaagtcactctcatgggaagaatttttatatgggaaagcggataaaactttcattggactggaatgtttggagaatgttaatttccaaatcaggaaccacaaactgccctctaataagacatcggctatctaagcgtgtgggtgccccctttctgccagcagttctggttcttaagaaaatcaccataaatcagacatgaaaattctggctccaaaaatagcattttctttgtgcaaataaaaacgtgtgtatcaagtatgatgttcccccaacgtggacacactcggttcctcagaaagccaagcccgctgcagctgccacatccctggacacactcggttcctcacaaagccaagcccgctgcagctgccacatccctggacacactcggttcctcacaaagccaagcccgctgcagctgccacatccctgggcttatggtgcagcaggtgcttttttcaagacaggaatcaaagtgttaggaacacggcagaaaggtgacacctggagaccaaatgcaggatgaggagtactgcagaggtcacagggaagtcacagaacagtaatacgctagcaggggcatggggcatgaagaacagaagacaggaagcgtttcagagactccaaagaagaaatcagggccaaccacagcttcccgggtcacagaacaattcattcaccaggtggcaccactgccgtcatttcagcttctggccactgggaggcgctgctcgaaagggtttgccctgagactccaagaagaagctgcgggaaggacagcaggggccctggggttttagcctctggcccaggagttatgtgtccataaccaaagggagcacagtctgcacccagctctcatcccatcagagctgctgcgactcccgcaggttcttccggaactggtttagcttgcctgcaggatcaggaaagtttgagaaaagcatctgcaaaatactaaagagcagagcttacctcattgcctgtccccaccccatcccaggtcaccacctggctgaccccaggtccccgacccaacaacaacccctcccaagtccctaactccctcacttggactcgagacccttcacaacccccctcacttggacttgagacccttcacaacccagcagcgctccgcctccaacttgacatcatgctttctggaaacttccccgcatgtcccactttcccacacttggtgccctggagcaccttccggcctctacatgctgtacgttcccctgtgagcaccctcctctcggcctctggccaacacagtcccacccatctgtgggtaacaagggggtgtcggtgttcttttcagccttgctaaactgtctgaatcaaggatcacaaactacagcctgcaggccaaatccagcccacagcctgtgtttgtaaataaagctttattggaac

SEQ ID NO: 661097 - DNA, 482 bp, Homo sapiens
  misc_feature (257)..(257): n is a, c, g, or t
  misc_feature (357)..(357): n is a, c, g, or t
  misc_feature (407)..(407): n is a, c, g, or t
  misc_feature (425)..(425): n is a, c, g, or t
  misc_feature (430)..(430): n is a, c, g, or t
  misc_feature (437)..(437): n is a, c, g, or t
ccaatgaagtgaatattttatatggcagctggccggtattacaccattccatcccaaatctcccctccaaacctggcgaaaatcatctggccattgaaaaagattagaacgaaagcaaacaagctctcactcagcctgcccccagcacgaggctgtccacacagagcctttggacgagctgtacgaggtgctggcggagactttgatggccaaggagtccacccagggccactggagctatttgctggtatgagaanggcaccctcctccccctcacagcccagatacccttcctgcacaaagtgaaaacgtgggtgtgggttcaaatcctgactcacccattctgcagtcttaganatgaggtccattaaccttctttagcctcagtttccctgtctgtaaatcangcacttcaacaacaacancatgnctcgtgnggttgttgggcatttgtccaataggtgacacacactacctgcttc

SEQ ID NO: 661098 - DNA, 733 bp, Homo sapiens
  misc_feature (8)..(8): n is a, c, g, or t
  misc_feature (16)..(16): n is a, c, g, or t
  misc_feature (720)..(720): n is a, c, g, or t
tttttttnccccccgngtgttttaacaccaaaaatttttttttgtttttataaaaaaaaaaaaaaaaaaaatttttttttttccctcaaaaaaaaagaaaaaagaaagaaaaaaaaaaaccctttttttttggggggggggggggtttttttccccccccccccccccccaccatttttttttattttttcgggggtggggggggggggggaaagtttctccccccccccccggggggggggcgcccccccccctaaaaagaagagagaaaagaaacacacttcttgtgttttttttaaaaaaagaggaggggggtttttaaattatgaccccccccccccccccccccccggaaaaaaaataatctctcttcttcttttaaaaaaaggaagaagaaaaaagggggggggggggtttttaatatctccaaaaaaaaaaacaccccccttccccacaaaaaaaaaaaaaaagagggggggcgccccccccccccggaggggggaggggggttttttttcccctcctttaaaaggcgcccccccccccccaaaaggccccttcaccctttggagaaaaaccccccccccctttttttcccccagggggtaaagaaaaaaacgcccaaaaatttcccctttaaaaaaattggaaaccctttaaaaagtgccaaaagcccttccaaaatttcctcccaaggccatatgtttgatcccagcaggntaggggtccccca

SEQ ID NO: 661099 - DNA, 440 bp, Homo sapiens
gcggccgactactactgctcgaattcaagcttctaacgatgtacggggacatgctgtacgttcccctgtgagcaccctcctctcggcctctggccaacacagtcccacccatctgtgggtaacaagggggtgtcggtgttcttttcagccttgctaaactgtctgaatcaaggatcacaaactacagcctgcaggccaaatccagcccacagcctgtgtttgtaaataaagctttattggaacaaagccacaccccttaatctacagatgatctgtggctactttcacaccacaacagagtaccatggttctgacagagactgggggaccctgtctaaatgacttctgacctggacctttactgaaaatcctcccaatcattctgttgacaagaatgatgtattactttttgcaataagaaacaagtaacctttgcaaaa

SEQ ID NO: 661100 - DNA, 358 bp, Homo sapiens
ctttgggccccccgggttttccctttttgtttccgggtcggtttttgtgggggattgggggggggaaaccattttcccccgggaacaagttttacctttttttgaattttattcgccccccctttggggatttggccccccgggcccaaaatttgggcccggggtgccctattttagctgggggggggttttttttcccaaaaacagggggggctttcgtttttccccccattgcttgggttcgttttttttcgccctttttgggcccggtttttttttaataacccgggtttttttttgggggccattttttttttcttttggggacccccccccataaaaccgttttttcccttta

SEQ ID NO: 661101 - DNA, 372 bp, Homo sapiens
actctcaatcaccttgactgaccttgatgtcctcataatttcctcaggtatacatttgcaaatgatctcatccatgacattctttatgaatagtattgataattgtttctgattataaaataacacactgtcaaagatggctgaataggatcagctacagtctacagctcccagcgtgagcaatgcagaagatgggtgatttgtgcatttccaactgaggttcatctcactgggacttgttgcacagtgggtgcagcccatgcgagcatgagctacagcagggcagggtatcgcctcactcaggaagctcaaggggtcgggaaactccctgtcctagacaaggtaagccccaacagtcttagcaagcggcac

SEQ ID NO: 661102 - DNA, 2456 bp, Homo sapiens
gccgggcttccgcccggtctgccggcaacgctgcggccccgcccacgtcatggcgcccgaggagaacgcggggaccgaactcttgctgcagagtttcgagcgccgcttcctggcggccgctcactgcgctccttcccctggcagagcttagaagcaaagttaagagactcatcagattctgagctgctgcgggatattttgcagaagactgtgaagcatcctgtgtgtgtgaagcacccgccgtcagtcaagtatgcccggtgctttctctcagaactcatcaaaaagccctcgggaggctcggtcacactctccaagagcacagccatcatctcccacggtaccacaggcctggtcacatgggacgccgccctctaccttgcagaatgggccatcgagaacccggcagccttcactaacaggactgtcctagagcttggcagtggtgccggcctcacaggcctggccatctgcaagatgtgccgcccccgggcatacatcttcagcgactgtcacagccgggtcctcgagcagctccgagggaatgtccttctcaatggcctctcattagaggcagacatcactgccaacttagacagccccagggtgacagtggcccagctggactgggacgtcgcgacggtccatcagctctctgccttccagccagatgttgtcattgcagcagacgtgctgtattgcccagaagccatcgtgtcgctggtcggggtcctgcggaggctggctgcctgccgggagcaccagcgggctcctgaggtctacgtggcctttaccgtccgcaacccagagacgtgccagctgttcaccaccgagctaggccgggctgggatcagatgggaagtggaagctcgtcatgaccagaaactgtttccctacgaagagcacttggagatggcaatgctgaacctcacactgtaggactcacacacgactccaacgggattgtgagaatcaagtcactctcatgggaagaatttttatatgggaaagcggataaaactttcattggactggaatgtttggagaatgttaatttccaaatcaggaaccacaaactgccctctaataagacatcggctatctaagcgtgtgggtgccccctttctgccagcagttctggttcttaagaaaatcaccataaatcagacatgaaaattctggctccaaaaatagcattttctttgtgcaaataaaaacgtgtgtatcaagtatgatgttcccccaacgtggacacactcgttcctcacaaagccaagcccgctgcagctgccacatccctgggcttatggtgcagcaggtgcttttttcaagacaggaatcaaagtgttaggaacacggcagaaaggtgacacctggagaccaaatgcaggatgaggagtactgcagaggtcacagggaagtcacagaacagtaatacgctagcaggggcatggggcatgaagaacagaagacaggaagcgtttcagagactccaaagaagaaatcagggccaaccacagcttcccgggtcacagaacaattcattcaccaggtggcaccactgccgtcatttcagcttctggccactgggaggcgctgctcgaaagggtttgccctgagactccaagaagaagctgcgggaaggacagcaggggccctggggttttagcctctggcccaggagttatgtgtccataaccaaagggagcacagtctgcacccagctctcatcccatcagagctgctgcgactcccgcaggttcttccggaactggtttagcttgcctgcaggatcaggaaagtttgagaaaagcatctgcaaaatactaaagagcagagcttacctcattgcctgtccccaccccatcccaggtcaccacctggctgaccccaggtccccgacccaacaacaacccctcccaagtccctaactccctcacttggactcgagacccttcacaccccagcagcactccgcctccaacttgacatcacagtttctggaaacttccccgcatgtcccactttcccacacttggtgccctggagcacctcccggcctctacgtgctgcccattcccctgtgagcaccctcctctcggcctctggccaacacagtcccacccatctgtgggtaacaagggggtgtcggtgttcttttcagccttgctaaactgtctgaatcaaggatcacaaactacagcctgcaggccaaatccagcccacagcctgtgtttgtaaataaagctttattggaacaaagccacaccccttaatctacagatgatctgtggctactttcacaccacaacagagtaccatggttctgacagagactgggggaccctgtctaaatgacttctgacctggacctttactgaaaatcctcccaatcattctgttgacaagaatgatgtattactttttgcaataagaaacaagtaacctttgcaaaa

SEQ ID NO: 661103 - DNA, 155 bp, Homo sapiens
gaaaatagaaaaaggaaaatattaaagtcctttcttacttcctacctgttaataaggagtggtcttggaaattgtttatgcaaggaggcagtgatgaaaatctctcttgctataagttttaaagagatgaaacgttcttgtttaagaattgatac

SEQ ID NO: 661104 - DNA, 2259 bp, Homo sapiens
gccgggcttccgcccggtctgccggcaacgctgcggccccgcccacgtcatggcgcccgaggagaacgcggggaccgaactcttgctgcagagtttcgagcgccgcttcctggcggccgctcactgcgctccttcccctggcagagcttagaagcaaagttaagagactcatcagattctgagctgctgcgggatattttgcagaagactgtgaagcatcctgtgtgtgtgaagcacccgccgtcagtcaagtatgcccggtgctttctctcagaactcatcaaaaagccctcgggaggctcggtcacactctccaagagcacagccatcatctcccacggtaccacaggcctggtcacatgggacgccgccctctaccttgcagaatgggccatcgagaacccggcagccttcactaacaggactgtcctagagcttggcagtggtgccggcctcacaggcctggccatctgcaagatgtgccgcccccgggcatacatcttcagcgactgtcacagccgggtcctcgagcagctccgagggaatgtccttctcaatggcctctcattagaggcagacatcactgccaacttagacagccccagggtgacagtggcccagctggactgggacgtcgcgacggtccatcagctctctgccttccagccagatgttgtcattgcagcagacgtgctgtattgcccagaagccatcgtgtcgctggtcggggtcctgcggaggctggctgcctgccgggagcaccagcgggctcctgaggtctacgtggcctttaccgtccgcaacccagagacgtgccagctgttcaccaccgagctaggccgggctgggatcagatgggaagtggaagctcgtcatgaccagaaactgtttccctacgaagagcacttggagatggcaatgctgaacctcacactgtaggactcacacacgactccaacgggattgtgagaatcaagtcactctcatgggaagaatttttatatgggaaagcggataaaactttcattggactggaatgtttggagaatgttaatttccaaatcaggaaccacaaactgccctctaataagacatcggctatctaagcgtgtgggtgccccctttctgccagcagttctggttcttaagaaaatcaccataaatcagacatgaaaattctggctccaaaaatagcattttctttgtgcaaataaaaacgtgtgtatcaagtatgatgttcccccaacgtggacacactcgttcctcacaaagccaagcccgctgcagctgccacatccctgggcttatggtgcagcaggtgcttttttcaagacaggaatcaaagtgttaggaacacggcagaaaggtgacacctggagaccaaatgcaggatgaggagtactgcagaggtcacagggaagtcacagaacagtaatacgctagcaggggcatggggcatgaagaacagaagacaggaagcgtttcagagactccaaagaagaaatcagggccaaccacagcttcccgggtcacagaacaattcattcaccaggtggcaccactgccgtcatttcagcttctggccactgggaggcgctgctcgaaagggtttgccctgagactccaagaagaagctgcgggaaggacagcaggggccctggggttttagcctctggcccaggagttatgtgtccataaccaaagggagcacagtctgcacccagctctcatcccatcagagctgctgcgactcccgcaggttcttccggaactggtttagcttgcctgcaggatcaggaaagtttgagaaaagcatctgcaaaatactaaagagcagagcttacctcattgcctgtccccaccccatcccaggtcaccacctggctgaccccaggtccccgacccaacaacaacccctcccaagtccctaactccctcacttggactcgagacccttcacaccccagcagcactccgcctccaacttgacatcacagtttctggaaacttccccgcatgtcccactttcccacacttggtgccctggagcacctcccggcctctacgtgctgcccattcccctgtgagcaccctcctctcggcctctggccaacacagtcccacccatctgtgggtaacaagggggtgtcggtgttcttttcagccttgctaaactgtctgaatcaaggatcacaaactacagcctgcaggccaaatccagcccacagcctgtgtttgtaaataaagctttattggaac

SEQ ID NO: 661105 - DNA, 131 bp, Homo sapiens
atagatctagaggatcccatccccggttctgggtagaagggaagggctgacttggttcagcaaggtcaagagccttgccaaaaagtcacacagctagcggaaactgctctttcgttcagttcactgacata

SEQ ID NO: 661106 - DNA, 275 bp, Homo sapiens
cggcacgaggtggagaacctttgtgtggatactctgtatctaatctgatggggacgtggagaacctttgtatccagctcagggattgtaaacgcaccaatcagcgccctgtcaaaacagaccactgggctgtaccaatcagccggacgtgggtggggccagataagagaatgaaaccaggctgccccagccagcagtggcaacccgcttgggtccccttccacactgtggaagctttgttcttttgctctttgcaataaatcttgctactgctca

SEQ ID NO: 661107 - DNA, 2488 bp, Homo sapiens
gccgggcttccgcccggtctgccggcaacgctgcggccccgcccacgtcatggcgcccgaggagaacgcggggaccgaactcttgctgcagagtttcgagcgccgcttcctggcggccgctcactgcgctccttcccctggcagagcttagaagcaaagttaagagactcatcagattctgagctgctgcgggatattttgcagaagactgtgaagcatcctgtgtgtgtgaagcacccgccgtcagtcaagtatgcccggtgctttctctcagaactcatcaaaaagccctcgggaggctcggtcacactctccaagagcacagccatcatctcccacggtaccacaggcctggtcacatgggacgccgccctctaccttgcagaatgggccatcgagaacccggcagccttcactaacaggactgtcctagagcttggcagtggtgccggcctcacaggcctggccatctgcaagatgtgccgcccccgggcatacatcttcagcgactgtcacagccgggtcctcgagcagctccgagggaatgtccttctcaatggcctctcattagaggcagacatcactgccaacttagacagccccagggtgacagtggcccagctggactgggacgtcgcgacggtccatcagctctctgccttccagccagatgttgtcattgcagcagacgtgctgtattgcccagaagccatcgtgtcgctggtcggggtcctgcggaggctggctgcctgccgggagcaccagcgggctcctgaggtctacgtggcctttaccgtccgcaacccagagacgtgccagctgttcaccaccgagctaggccgggctgggatcagatgggaagtggaagctcgtcatgaccagaaactgtttccctacgaagagcacttggagatggcaatgctgaacctcacactgtaggactcacacacgactccaacgggattgtgagaatcaagtcactctcatgggaagaatttttatatgggaaagcggataaaactttcattggactggaatgtttggagaatgttaatttccaaatcaggaaccacaaactgccctctaataagacatcggctatctaagcgtgtgggtgccccctttctgccagcagttctggttcttaagaaaatcaccataaatcagacatgaaaattctggctccaaaaatagcattttctttgtgcaaataaaaacgtgtgtatcaagtatgatgttcccccaacgtggacacactcgttcctcacaaagccaagcccgctgcagctgccacatccctgggcttatggtgcagcaggtgcttttttcaagacaggaatcaaagtgttaggaacacggcagaaaggtgacacctggagaccaaatgcaggatgaggagtactgcagaggtcacagggaagtcacagaacagtaatacgctagcaggggcatggggcatgaagaacagaagacaggaagcgtttcagagactccaaagaagaaatcagggccaaccacagcttcccgggtcacagaacaattcattcaccaggtggcaccactgccgtcatttcagcttctggccactgggaggcgctgctcgaaagggtttgccctgagactccaagaagaagctgcgggaaggacagcaggggccctggggttttagcctctggcccaggagttatgtgtccataaccaaagggagcacagtctgcacccagctctcatcccatcagagctgctgcgactcccgcaggttcttccggaactggtttagcttgcctgcaggatcaggaaagtttgagaaaagcatctgcaaaatactaaagagcagagcttacctcattgcctgtccccaccccatcccaggtcaccacctggctgaccccaggtccccgacccaacaacaacccctcccaagtccctaactccctcacttggactcgagacccttcacaacccccctcacttggacttgagacccttcacaacccagcagcgctccgcctccaacttgacatcatgctttctggaaacttccccgcatgtcccactttcccacacttggtgccctggagcaccttccggcctctacatgctgtacgttcccctgtgagcaccctcctctcggcctctggccaacacagtcccacccatctgtgggtaacaagggggtgtcggtgttcttttcagccttgctaaactgtctgaatcaaggatcacaaactacagcctgcaggccaaatccagcccacagcctgtgtttgtaaataaagctttattggaacaaagccacaccccttaatctacagatgatctgtggctactttcacaccacaacagagtaccatggttctgacagagactgggggaccctgtctaaatgacttctgacctggacctttactgaaaatcctcccaatcattctgttgacaagaatgatgtattactttttgcaataagaaacaagtaacctttgcaaaa

SEQ ID NO: 661108 - DNA, 2608 bp, Homo sapiens
gccgggcttccgcccggtctgccggcaacgctgcggccccgcccacgtcatggcgcccgaggagaacgcggggaccgaactcttgctgcagagtttcgagcgccgcttcctggcggccgctcactgcgctccttcccctggcagagcttagaagcaaagttaagagactcatcagattctgagctgctgcgggatattttgcagaagactgtgaagcatcctgtgtgtgtgaagcacccgccgtcagtcaagtatgcccggtgctttctctcagaactcatcaaaaaggaaaaagattagaacgaaagcaaacaagctctcactcagcctgcccccagcacgaggctgtccacacagagcctttggacgagctgtacgaggtgctggcggagactttgatggccaaggagtccacccagggccactggagctatttgctgccctcgggaggctcggtcacactctccaagagcacagccatcatctcccacggtaccacaggcctggtcacatgggacgccgccctctaccttgcagaatgggccatcgagaacccggcagccttcactaacaggactgtcctagagcttggcagtggtgccggcctcacaggcctggccatctgcaagatgtgccgcccccgggcatacatcttcagcgactgtcacagccgggtcctcgagcagctccgagggaatgtccttctcaatggcctctcattagaggcagacatcactgccaacttagacagccccagggtgacagtggcccagctggactgggacgtcgcgacggtccatcagctctctgccttccagccagatgttgtcattgcagcagacgtgctgtattgcccagaagccatcgtgtcgctggtcggggtcctgcggaggctggctgcctgccgggagcaccagcgggctcctgaggtctacgtggcctttaccgtccgcaacccagagacgtgccagctgttcaccaccgagctaggccgggctgggatcagatgggaagtggaagctcgtcatgaccagaaactgtttccctacgaagagcacttggagatggcaatgctgaacctcacactgtaggactcacacacgactccaacgggattgtgagaatcaagtcactctcatgggaagaatttttatatgggaaagcggataaaactttcattggactggaatgtttggagaatgttaatttccaaatcaggaaccacaaactgccctctaataagacatcggctatctaagcgtgtgggtgccccctttctgccagcagttctggttcttaagaaaatcaccataaatcagacatgaaaattctggctccaaaaatagcattttctttgtgcaaataaaaacgtgtgtatcaagtatgatgttcccccaacgtggacacactcgttcctcacaaagccaagcccgctgcagctgccacatccctgggcttatggtgcagcaggtgcttttttcaagacaggaatcaaagtgttaggaacacggcagaaaggtgacacctggagaccaaatgcaggatgaggagtactgcagaggtcacagggaagtcacagaacagtaatacgctagcaggggcatggggcatgaagaacagaagacaggaagcgtttcagagactccaaagaagaaatcagggccaaccacagcttcccgggtcacagaacaattcattcaccaggtggcaccactgccgtcatttcagcttctggccactgggaggcgctgctcgaaagggtttgccctgagactccaagaagaagctgcgggaaggacagcaggggccctggggttttagcctctggcccaggagttatgtgtccataaccaaagggagcacagtctgcacccagctctcatcccatcagagctgctgcgactcccgcaggttcttccggaactggtttagcttgcctgcaggatcaggaaagtttgagaaaagcatctgcaaaatactaaagagcagagcttacctcattgcctgtccccaccccatcccaggtcaccacctggctgaccccaggtccccgacccaacaacaacccctcccaagtccctaactccctcacttggactcgagacccttcacaccccagcagcactccgcctccaacttgacatcacagtttctggaaacttccccgcatgtcccactttcccacacttggtgccctggagcacctcccggcctctacgtgctgcccattcccctgtgagcaccctcctctcggcctctggccaacacagtcccacccatctgtgggtaacaagggggtgtcggtgttcttttcagccttgctaaactgtctgaatcaaggatcacaaactacagcctgcaggccaaatccagcccacagcctgtgtttgtaaataaagctttattggaacaaagccacaccccttaatctacagatgatctgtggctactttcacaccacaacagagtaccatggttctgacagagactgggggaccctgtctaaatgacttctgacctggacctttactgaaaatcctcccaatcattctgttgacaagaatgatgtattactttttgcaataagaaacaagtaacctttgcaaaa

SEQ ID NO: 661109 - DNA, 150 bp, Homo sapiens
  misc_feature (2)..(2): n is a, c, g, or t
gntcccggatccccgcaccatcatgtctttgcgtctgagggccctgacccggcgcttgaccagcgctgccaaaggagcccacggaggagcagtagctcgtactgcgtctgctgaccttcgtgctggcgctgcccagcggggccctctgca

SEQ ID NO: 661110 - DNA, 3022 bp, Homo sapiens
  misc_feature (695)..(695): n is a, c, g, or t
  misc_feature (707)..(708): n is a, c, g, or t
  misc_feature (710)..(710): n is a, c, g, or t
  misc_feature (712)..(712): n is a, c, g, or t
  misc_feature (750)..(750): n is a, c, g, or t
  misc_feature (831)..(831): n is a, c, g, or t
  misc_feature (871)..(871): n is a, c, g, or t
  misc_feature (888)..(888): n is a, c, g, or t
  misc_feature (908)..(908): n is a, c, g, or t
  misc_feature (911)..(911): n is a, c, g, or t
  misc_feature (916)..(917): n is a, c, g, or t
  misc_feature (969)..(969): n is a, c, g, or t
  misc_feature (1006)..(1006): n is a, c, g, or t
  misc_feature (1011)..(1011): n is a, c, g, or t
  misc_feature (1108)..(1108): n is a, c, g, or t
  misc_feature (1124)..(1124): n is a, c, g, or t
  misc_feature (1133)..(1133): n is a, c, g, or t
  misc_feature (1143)..(1143): n is a, c, g, or t
  misc_feature (1147)..(1147): n is a, c, g, or t
  misc_feature (1152)..(1152): n is a, c, g, or t
  misc_feature (1178)..(1178): n is a, c, g, or t
  misc_feature (1183)..(1183): n is a, c, g, or t
  misc_feature (1186)..(1186): n is a, c, g, or t
  misc_feature (1189)..(1189): n is a, c, g, or t
  misc_feature (1209)..(1209): n is a, c, g, or t
  misc_feature (1212)..(1212): n is a, c, g, or t
  misc_feature (1215)..(1216): n is a, c, g, or t
  misc_feature (1226)..(1226): n is a, c, g, or t
  misc_feature (1229)..(1229): n is a, c, g, or t
  misc_feature (1234)..(1234): n is a, c, g, or t
  misc_feature (1254)..(1254): n is a, c, g, or t
gccgggcttccgcccggtctgccggcaacgctgcggccccgcccacgtcatggcgcccgaggagaacgcggggaccgaactcttgctgcagagtttcgagcgccgcttcctggcggccgctcactgcgctccttcccctggcagagcttagaagcaaagttaagagactcatcagattctgagctgctgcgggatattttgcagaagccctcgggaggctcggtcacactctccaagagcacagccatcatctcccacggtaccacaggcctggtcacatgggacgccgccctctaccttgcagaatgggccatcgagaacccggcagccttcactcacaggtgacctcggggcgcagggcagggcaccgaggcaggcttaccctggtgcagtcacagacacggtcccctttcctcccacctaacaggactgtcctagagcttggcagtggtgccggcctcacaggcctggccatctgcaagatgtgccgcccccgggcatacatcttcagcgactgtcacagccgggtcctcgagcagctccgagggaatgtccttctcaatggcctctcattagaggcagacatcactgccaacttagacagccccagggtgacagtggcccagctggactgggacgtcgcgacggtccatcagctctctgccttccagccagatgttgtcattgcagcaggnaatgccagcccnngnantctgtgcaggcggtgtccttgcagctctacccagtctnggtctgggaaaagggaacaatggatgctgtcaggcatggacatgatggggcttccagaagagttactctgggcctccaggntgacatcaaaggacaggggtgcctcttaaggtgaccttcnagccacagccctcttgntggagacaggcatactcccnttncagtnntcaccacatggctctgtcccagagccatgccctgtgtccttcagagaccacnggaggaaaacaaccacttctgggatgaggacagggcncttgngagaaggtggtgtttggctgggccaccaaaacccctcacccctgccagcacactcagtcccctctctggtggaacagagctctgcctgtggtcctgngtcccagccctgaaanccacaggtncagcggtggncagngacanaggcccacccctcaagccagcagacnaatcngcnganacctgaaacacgaagttcanggnagnntcaggctttntgncattnaaagccctctagataggccnacgtgctgtattgcccagaagccatcgtgtcgctggtcggggtcctgcggaggctggctgcctgccgggagcaccagcgggctcctgaggtctacgtggcctttaccgtccgcaacccagagacgtgccagctgttcaccaccgagctaggccgggctgggatcagatgggaagtggaagctcgtcatgaccagaaactgtttccctacgaagagcacttggagatggcaatgctgaacctcacactgtaggactcacacacgactccaacgggattgtgagaatcaagtcactctcatgggaagaatttttatatgggaaagcggataaaactttcattggactggaatgtttggagaatgttaatttccaaatcaggaaccacaaactgccctctaataagacatcggctatctaagcgtgtgggtgccccctttctgccagcagttctggttcttaagaaaatcaccataaatcagacatgaaaattctggctccaaaaatagcattttctttgtgcaaataaaaacgtgtgtatcaagtatgatgttcccccaacgtggacacactcgttcctcacaaagccaagcccgctgcagctgccacatccctgggcttatggtgcagcaggtgcttttttcaagacaggaatcaaagtgttaggaacacggcagaaaggtgacacctggagaccaaatgcaggatgaggagtactgcagaggtcacagggaagtcacagaacagtaatacgctagcaggggcatggggcatgaagaacagaagacaggaagcgtttcagagactccaaagaagaaatcagggccaaccacagcttcccgggtcacagaacaattcattcaccaggtggcaccactgccgtcatttcagcttctggccactgggaggcgctgctcgaaagggtttgccctgagactccaagaagaagctgcgggaaggacagcaggggccctggggttttagcctctggcccaggagttatgtgtccataaccaaagggagcacagtctgcacccagctctcatcccatcagagctgctgcgactcccgcaggttcttccggaactggtttagcttgcctgcaggatcaggaaagtttgagaaaagcatctgcaaaatactaaagagcagagcttacctcattgcctgtccccaccccatcccaggtcaccacctggctgaccccaggtccccgacccaacaacaacccctcccaagtccctaactccctcacttggactcgagacccttcacaccccagcagcactccgcctccaacttgacatcacagtttctggaaacttccccgcatgtcccactttcccacacttggtgccctggagcacctcccggcctctacgtgctgcccattcccctgtgagcaccctcctctcggcctctggccaacacagtcccacccatctgtgggtaacaagggggtgtcggtgttcttttcagccttgctaaactgtctgaatcaaggatcacaaactacagcctgcaggccaaatccagcccacagcctgtgtttgtaaataaagctttattggaacaaagccacaccccttaatctacagatgatctgtggctactttcacaccacaacagagtaccatggttctgacagagactgggggaccctgtctaaatgacttctgacctggacctttactgaaaatcctcccaatcattctgttgacaagaatgatgtattactttttgcaataagaaacaagtaacctttgcaaaa

SEQ ID NO: 661111 - DNA, 3105 bp, Homo sapiens
  misc_feature (695)..(695): n is a, c, g, or t
  misc_feature (707)..(708): n is a, c, g, or t
  misc_feature (710)..(710): n is a, c, g, or t
  misc_feature (712)..(712): n is a, c, g, or t
  misc_feature (750)..(750): n is a, c, g, or t
  misc_feature (831)..(831): n is a, c, g, or t
  misc_feature (871)..(871): n is a, c, g, or t
  misc_feature (888)..(888): n is a, c, g, or t
  misc_feature (908)..(908): n is a, c, g, or t
  misc_feature (911)..(911): n is a, c, g, or t
  misc_feature (916)..(917): n is a, c, g, or t
  misc_feature (969)..(969): n is a, c, g, or t
  misc_feature (1006)..(1006): n is a, c, g, or t
  misc_feature (1011)..(1011): n is a, c, g, or t
  misc_feature (1108)..(1108): n is a, c, g, or t
  misc_feature (1124)..(1124): n is a, c, g, or t
  misc_feature (1133)..(1133): n is a, c, g, or t
  misc_feature (1143)..(1143): n is a, c, g, or t
  misc_feature (1147)..(1147): n is a, c, g, or t
  misc_feature (1152)..(1152): n is a, c, g, or t
  misc_feature (1178)..(1178): n is a, c, g, or t
  misc_feature (1183)..(1183): n is a, c, g, or t
  misc_feature (1186)..(1186): n is a, c, g, or t
  misc_feature (1189)..(1189): n is a, c, g, or t
  misc_feature (1209)..(1209): n is a, c, g, or t
  misc_feature (1212)..(1212): n is a, c, g, or t
  misc_feature (1215)..(1216): n is a, c, g, or t
  misc_feature (1226)..(1226): n is a, c, g, or t
  misc_feature (1229)..(1229): n is a, c, g, or t
  misc_feature (1234)..(1234): n is a, c, g, or t
  misc_feature (1254)..(1254): n is a, c, g, or t
  misc_feature (1462)..(1462): n is a, c, g, or t
gccgggcttccgcccggtctgccggcaacgctgcggccccgcccacgtcatggcgcccgaggagaacgcggggaccgaactcttgctgcagagtttcgagcgccgcttcctggcggccgctcactgcgctccttcccctggcagagcttagaagcaaagttaagagactcatcagattctgagctgctgcgggatattttgcagaagccctcgggaggctcggtcacactctccaagagcacagccatcatctcccacggtaccacaggcctggtcacatgggacgccgccctctaccttgcagaatgggccatcgagaacccggcagccttcactcacaggtgacctcggggcgcagggcagggcaccgaggcaggcttaccctggtgcagtcacagacacggtcccctttcctcccacctaacaggactgtcctagagcttggcagtggtgccggcctcacaggcctggccatctgcaagatgtgccgcccccgggcatacatcttcagcgactgtcacagccgggtcctcgagcagctccgagggaatgtccttctcaatggcctctcattagaggcagacatcactgccaacttagacagccccagggtgacagtggcccagctggactgggacgtcgcgacggtccatcagctctctgccttccagccagatgttgtcattgcagcaggnaatgccagcccnngnantctgtgcaggcggtgtccttgcagctctacccagtctnggtctgggaaaagggaacaatggatgctgtcaggcatggacatgatggggcttccagaagagttactctgggcctccaggntgacatcaaaggacaggggtgcctcttaaggtgaccttcnagccacagccctcttgntggagacaggcatactcccnttncagtnntcaccacatggctctgtcccagagccatgccctgtgtccttcagagaccacnggaggaaaacaaccacttctgggatgaggacagggcncttgngagaaggtggtgtttggctgggccaccaaaacccctcacccctgccagcacactcagtcccctctctggtggaacagagctctgcctgtggtcctgngtcccagccctgaaanccacaggtncagcggtggncagngacanaggcccacccctcaagccagcagacnaatcngcnganacctgaaacacgaagttcanggnagnntcaggctttntgncattnaaagccctctagataggccnacgtgctgtattgcccagaagccatcgtgtcgctggtcggggtcctgcggaggctggctgcctgccgggagcaccagcgggctcctgaggtctacgtggcctttaccgtccgcaacccagagacgtgccagctgttcaccaccgagctacgcctgtcctagcagccccacacaatacgctcatgtcctgtccccaaacaccgccatcntcaaacacatgtgctctgtttccaggccgggctgggatcagatgggaagtggaagctcgtcatgaccagaaactgtttccctacgaagagcacttggagatggcaatgctgaacctcacactgtaggactcacacacgactccaacgggattgtgagaatcaagtcactctcatgggaagaatttttatatgggaaagcggataaaactttcattggactggaatgtttggagaatgttaatttccaaatcaggaaccacaaactgccctctaataagacatcggctatctaagcgtgtgggtgccccctttctgccagcagttctggttcttaagaaaatcaccataaatcagacatgaaaattctggctccaaaaatagcattttctttgtgcaaataaaaacgtgtgtatcaagtatgatgttcccccaacgtggacacactcgttcctcacaaagccaagcccgctgcagctgccacatccctgggcttatggtgcagcaggtgcttttttcaagacaggaatcaaagtgttaggaacacggcagaaaggtgacacctggagaccaaatgcaggatgaggagtactgcagaggtcacagggaagtcacagaacagtaatacgctagcaggggcatggggcatgaagaacagaagacaggaagcgtttcagagactccaaagaagaaatcagggccaaccacagcttcccgggtcacagaacaattcattcaccaggtggcaccactgccgtcatttcagcttctggccactgggaggcgctgctcgaaagggtttgccctgagactccaagaagaagctgcgggaaggacagcaggggccctggggttttagcctctggcccaggagttatgtgtccataaccaaagggagcacagtctgcacccagctctcatcccatcagagctgctgcgactcccgcaggttcttccggaactggtttagcttgcctgcaggatcaggaaagtttgagaaaagcatctgcaaaatactaaagagcagagcttacctcattgcctgtccccaccccatcccaggtcaccacctggctgaccccaggtccccgacccaacaacaacccctcccaagtccctaactccctcacttggactcgagacccttcacaccccagcagcactccgcctccaacttgacatcacagtttctggaaacttccccgcatgtcccactttcccacacttggtgccctggagcacctcccggcctctacgtgctgcccattcccctgtgagcaccctcctctcggcctctggccaacacagtcccacccatctgtgggtaacaagggggtgtcggtgttcttttcagccttgctaaactgtctgaatcaaggatcacaaactacagcctgcaggccaaatccagcccacagcctgtgtttgtaaataaagctttattggaacaaagccacaccccttaatctacagatgatctgtggctactttcacaccacaacagagtaccatggttctgacagagactgggggaccctgtctaaatgacttctgacctggacctttactgaaaatcctcccaatcattctgttgacaagaatgatgtattactttttgcaataagaaacaagtaacctttgcaaaa

SEQ ID NO: 661112 - DNA, 117 bp, Homo sapiens
ctccagcttgtaaagaggaagttaaggtcgaagatgaaggccccatttgcttttcgggggggggtcctcggcggcttttatttaaggcttgctcagtttaacagcccaaagacagga

SEQ ID NO: 661113 - DNA, 1975 bp, Homo sapiens
gccgggcttccgcccggtctgccggcaacgctgcggccccgcccacgtcatggcgcccgaggagaacgcggggaccgaactcttgctgcagagtttcgagcgccgcttcctggcggccgctcactgcgctccttcccctggcagagcttagaagcaaagttaagagactcatcagattctgagctgctgcgggatattttgcagaagacgtgctgtattgcccagaagccatcgtgtcgctggtcggggtcctgcggaggctggctgcctgccgggagcaccagcgggctcctgaggtctacgtggcctttaccgtccgcaacccagagacgtgccagctgttcaccaccgagctaggccgggctgggatcagatgggaagtggaagctcgtcatgaccagaaactgtttccctacgaagagcacttggagatggcaatgctgaacctcacactgtaggactcacacacgactccaacgggattgtgagaatcaagtcactctcatgggaagaatttttatatgggaaagcggataaaactttcattggactggaatgtttggagaatgttaatttccaaatcaggaaccacaaactgccctctaataagacatcggctatctaagcgtgtgggtgccccctttctgccagcagttctggttcttaagaaaatcaccataaatcagacatgaaaattctggctccaaaaatagcattttctttgtgcaaataaaaacgtgtgtatcaagtatgatgttcccccaacgtggacacactcgttcctcacaaagccaagcccgctgcagctgccacatccctgggcttatggtgcagcaggtgcttttttcaagacaggaatcaaagtgttaggaacacggcagaaaggtgacacctggagaccaaatgcaggatgaggagtactgcagaggtcacagggaagtcacagaacagtaatacgctagcaggggcatggggcatgaagaacagaagacaggaagcgtttcagagactccaaagaagaaatcagggccaaccacagcttcccgggtcacagaacaattcattcaccaggtggcaccactgccgtcatttcagcttctggccactgggaggcgctgctcgaaagggtttgccctgagactccaagaagaagctgcgggaaggacagcaggggccctggggttttagcctctggcccaggagttatgtgtccataaccaaagggagcacagtctgcacccagctctcatcccatcagagctgctgcgactcccgcaggttcttccggaactggtttagcttgcctgcaggatcaggaaagtttgagaaaagcatctgcaaaatactaaagagcagagcttacctcattgcctgtccccaccccatcccaggtcaccacctggctgaccccaggtccccgacccaacaacaacccctcccaagtccctaactccctcacttggactcgagacccttcacaccccagcagcactccgcctccaacttgacatcacagtttctggaaacttccccgcatgtcccactttcccacacttggtgccctggagcacctcccggcctctacgtgctgcccattcccctgtgagcaccctcctctcggcctctggccaacacagtcccacccatctgtgggtaacaagggggtgtcggtgttcttttcagccttgctaaactgtctgaatcaaggatcacaaactacagcctgcaggccaaatccagcccacagcctgtgtttgtaaataaagctttattggaacaaagccacaccccttaatctacagatgatctgtggctactttcacaccacaacagagtaccatggttctgacagagactgggggaccctgtctaaatgacttctgacctggacctttactgaaaatcctcccaatcattctgttgacaagaatgatgtattactttttgcaataagaaacaagtaacctttgcaaaa

SEQ ID NO: 661114 - DNA, 326 bp, Homo sapiens
aggatcccctgctccggcccactctggcctgattttaggttccctggggatgaagaaggtataggcggtacccttgtaaggtgctacgaggctgttcggccaattacggtgcacagtatcctctgagctgtttggattgtcgtagttgatcacaactctggagatcttccacatctagcccacgggaggctacatctgtagcaataaggatgggtgcctttccagaacggaactcattaagtacccaatctctttctggttgactcttgtctccatggatacacatagctggccaaccatctctgcgcatccttcgagtcagatca

SEQ ID NO: 661115 - DNA, 348 bp, Homo sapiens
cgtcgacatgaatctcttccatgaagacactgcacggttctctagtaacgcagagactcgggtaagacctgaagcaggagcctctattgtcaactctgggggtactttaagtgcttatcagatcgtatgcctcgtattacttcaatttccagtgtactgattgcctcatacagtgagaaggcttagtgtttcctatttaacaattatttcccaaatgcgttaaccaacacaaacttgcaatagttatgcgtccccctcagcaggccaattgtctgtgcctcctatcatttactacggagcaggttactgctgctgttcctgcctgtgtgatgctgtgcttccgtcgac

SEQ ID NO: 661116 - DNA, 164 bp, Homo sapiens
agaattataactaagggtccttaggccaaaccccaaaattataacgagaacacaatcattaagtatttgtacattcacctcagtcctgaataatagcctacctgccactatacactctaaccaccgtgctatgtgctgagatttgggcttgccaaccatcgtct

SEQ ID NO: 661117 - DNA, 179 bp, Homo sapiens
ggctacgagaagacaatccatatgcagcaacacaaagcaaagtccagccaagatccaagaacgaacgatgatgcgaaataatgacaagagacgtgcaacgacaaatgcattgacggacgtagttaataacatgattcaagcaagaattcggaacgcaatagaaacgcgattcaagtcaa

SEQ ID NO: 661118 - DNA, 372 bp, Homo sapiens
gaccccattagcctcgctgtggccaggccaggagaagcccctcagtgtgaggacacaggagcactcagccccaggcagacccacaacctgttccagggccaggactgttccttcctgcccctagctccttccctgtctctctgtcccagtgcagttaatactggatgtttctgagtcaccagctggagggagtgtggcccttcagcctggtcaggggccccccagttggggtgggtggcttggctcatgacctcggtggaggggcccctgggcaccctgctggtggcaggaggaagccagagtggccccagaaacactccttgaagagccaataaatcacaagccccctctgcctacccccaaaaaaaaaaa

SEQ ID NO: 661119 - DNA, 148 bp, Homo sapiens
gatcagtacaggacgttggtcgatgtacctcgcacttcagttaggagacaggccatgcctttcaagtgcatctgtcactgatttcatcctctagtttccgcacagtgcccaccataagtatgtcctacaagcctggcagaaggcagac

SEQ ID NO: 661120 - DNA, 713 bp, Homo sapiens
  misc_feature (713)..(713): n is a, c, g, or t
aaataagtgattgaaaaaggggaagagaacaaaaaaaaaaaaaaaaaaaaaaaaaataaaaaaacaaaaaaaacaaaaaaaaatataaaatcaaacaagcaaatgcatgacggacctgtttttttgtggggcatccggcgtgccttgggacccccctgggttttccccaccttaatctctctttcagccgatcccctctttccctgtttggccattttccgctttggcccgggccgttccgccttttccaccggtggcgccttcttgattggcgttgggtattagcacgcgtttctcttttgtttaattgcgcggttaccttttgccttctcggctccttttttaaccattggggccttcctcgcgggtttcccttttttttcgagggatctcccctgtgtttggttcctttgttgtcccttttgttccattgttccccttcacagatcgtgtccaccaccgttttggccaaatactctctttttgggctttgcccctcttggtcatttttgcttcccattttcttggtgtcgtggcccctttatgccttatatccccctttaaaggtgccccctttttacgttgtcgggaattgcccctaagggcggtatatagtacgttttacctcattgttcatggttttgggggcgtgcttttccgttttctttgttttatcaccacccgcccccttatggtccgcacgggtccgccgn

SEQ ID NO: 661121 - DNA, 976 bp, Homo sapiens
cagtcgtgggcggctcggacagaggagccgcagggagcccgccggcgcgggtgctcacgcggggtgccaccaggatggggggtcacctgcgtacgaggggggttataaggggaggacgacggggtcgctgaagaacaccaacgggtgtgtaggggccagcgcgtgtgtcgaacgtggtggatgccagtgagcgaaggcgctggtgcgcaagggagaccacatcctgggccccgcggcggattaaaatactggggcgggggggacagccttaaccgcgcatcgtgggagcctgtggaccaactgggggcgttcttaaaaaaatgggctggacctatcggccgtattgccgtctcaaggagacccgccgtcgtccttgggggggtgtgctgcgaaaacccttccgtttgtagcaaagatgctgtgtcgccaataagaaagccggttccccgcaccggctgctaggaaccccgtggtctcgcccctctctcggattgggggcctgtaattcttgtggcacgtgccgtcgtggggtgcatgtgtctaccgccccctgcgtggttgggcacacccatttagtaacattgtttccgtggttaatggtccgccacattgatccacgacgtggacgccggggaaccggttggggtgtgcctcgcctggaatgctccacgacgccctcgtgagggcattagcagggccgctctcacaggaggccggaggggactcgagcgcgccctctctgtgtgaaaactacggcgagaaacccacctctggttttcgcatggaaagaccgcggagaataatacactccggcgcagaggggcacagggccgcttcgcccccgctcatgaccgagacggctagggagcccgagggaggaacttgaagacccaccacgggatccgggggcttcacgcgggcccgaagcgcccccctcccatcccccccgggggggaacatttttccccaacaagac

SEQ ID NO: 661122 - DNA, 102 bp, Homo sapiens
atcatatacttaaatatgagtgtaattgtctcataatgttacaaaatgcccacagcctcttacccagagccttttatatggctgcaaaaattagaaattaag

SEQ ID NO: 661123 - DNA, 261 bp, Homo sapiens
gatgaccggactgtgtgccgggagatccgccacaactccacgggctgcctgtggatgaatggaccagtgtgacaatgtgcctgggagatcttgtcttgtggactgttccaccaagcaacccctcccaggctagagcttgcggcgtggagctcgcacggaatccctccagggtctgctgagatggttgaccacggaaaatacaagctgagcttgctaaatgtcactaccatgtgggaatgattgctcaagcgacctcactcc

SEQ ID NO: 661124 - DNA, 338 bp, Homo sapiens
  misc_feature (2)..(2): n is a, c, g, or t
  misc_feature (175)..(175): n is a, c, g, or t
  misc_feature (255)..(255): n is a, c, g, or t
  misc_feature (271)..(271): n is a, c, g, or t
  misc_feature (332)..(332): n is a, c, g, or t
cngttcgacgacaccctcggctcgctcaccgcgcgcccgggcttcttacggctctatggcaacgactcgctcaattcgaccttcacccaatcgaccgtggcgcccgctggcagcacttcgcttccgggcagaaacgcggatggagttctcgccggtgcacttccagcagaggcgnggggctgacctgctactacaacagcaaaaactggagctactgctttgtggactacgagggggggcccggtacccaatttngccctattagtgagtngtattaacaattcactaggccgtccgtttttacaaacgttcgtggattgggggaaaaaccntggggg

SEQ ID NO: 661125 - DNA, 88 bp, Homo sapiens
ttgcgggtcctccttcacagccgctgagcccagaggtcccgctggcccctcctctgaagttttaggatgtcattaaaaagatgaatct

SEQ ID NO: 661126 - DNA, 1241 bp, Homo sapiens
ctggtggtgctgctgtcctggtggtgctgctgtcctggtggtgctgctgtcctggtggtgctgctgtcctggtggtgctgctcctcacacagccccgcctccatctgcagcttggtcacgatgcgttgaagacactccagcctctcaaactcgctgcggagctgcttctcccgctccaggatggccacgtgcagcttgccccactccttctccacatccagcgggtggtagccagggggcaccttgagctggcctgcttgcaccgctccctccagggattggtagatgcccttggacctgttcttgtcggcctccttggctggtagctccatctccttaaacttcaggaactgagaccacaggatctcaatctcctcgaagctggaggggaacctgcgttcctcaaaggcggccgtgtggtgtcgcatccactgaagcagcagcagcaccagctcccggtactcctgccagcgcagctgcagctcgttggccctcaccccatcctgcacgtccggcacgcggggcatggcgtcatacagcgacgagacgtaggtgatgatggacttctcgtcgggctgagggacatccacgtcctcagggtccaggagccgcgtcactcccaggtcccgctccgccacagagaaggcctggtccaggttctccaggttggtctgccggtacaccttgttcatgtcgatgagcaggggcttgtgccggtggatgatggcattgaagaggcggccgtctctccagctggaggtgaagttgtcgcatcgcaggccctggtacccctccaccattcgctgcgaccacagcagcagcttctccttggccgtcatgtcctccgactgcccactcacctggatatctgagatctggaagtgcagaatgatggtccagatgaggccaagggtcagcttggggttgccgtcagcgatgtcatcattcctgatgttcaccagcttcacctggcggtgccggaggtagtccagggcaatctggacattctgcagcttgtggaaacgcatcctccccttctcccggggcaggctgtcccccgagaggacctccagcagggagatgaggttgtggccatcgcggaggtcttcatacaggtcactgatgtgcctctgggccttgatgaggtgcttgttgacccacttggtgaaggttttcttctgcacacgatcccgctcatctgcgatgcgaatgaccgcccgctcagctgggtccaggacact

SEQ ID NO: 661127 - DNA, 1307 bp, Homo sapiens
agcggattctggcctgtcaggtcaaagacactacagcgagggaccagactccgcgacaccaccttgtctcactatctattctgccagggccccactcatgtccgcgggcctcctcgcaagagtaccgagcctcatgtacatagaaagccttgcccgtgtacccatggaggcacatgcaggagtcgaggtttgtgctttgatgccatgatggagaatagatccgtgttggatcttatccgtagggacagctaagcctcgtatggataccagtgatcccctcctggtacccctctagtgcttacccaagcttgtgggcctactagacaaagtgcctatgtgggcacccctcataatggacacgctgcgcgttggaggagagtaacctgctcttgactctccgaacatgggcaacacatgtaactacagatggcgcaccgacccacacgtaccccatcgagctcaaacctgcactgtaacacttggaagtgagccctcactagtttacccccctgcggcgactggtcaacatccgtcgaaggcggcaaccctcgcttcccaactcagtgcgtccgtcgaactaaactttttcgagtccgtgtcatcacgcgtacgggctgcagccgcatccgtttcaactcattaccccggtggtgaaaccccaccctcggaagctagctaccgatctccccaaggaggccgtagacgccggttagagtgtaagtcagcacaaaagtgggaaatagagcgcgtggacgtttaacacatacccaccggggtaaccttgcaaatggaaaccactaaaaccctaacataggccccaacagagagacacacaggcggacagcaagagacgccgaaaaagagtaggaaaccctactttcgggcacgagaaagcccacgtcggcaacaactcctggggaccctacaattctagacaatggcactgcgcccgtacttagcgacccaatcggttgcactggaacctcctggccacagaaacatcgcaagccctctactaaacatgccacgtcccagcgcgctcgcttaccaagctcatagaatgttcctcaggatcacaataggccaagcaacactacattggtcatatacacgccgactgacatgccccacaacgatcacccaaccagaagttctcgaaacgcattagcgcgtcgcgaaatggcaaagtgcagagtgccctattgccaaccaagtttcttgggggcccctcgaccgacccccggatcagtactcgcagtggaattcgcttgagttaccccttagacgagcgcaaggaaagcgctcgg

SEQ ID NO: 661128 - DNA, 332 bp, Homo sapiens
ttgtggaagacgggtagacgggccaccagcccccagaaagccgggctccacggtcttggggagctcccgtgccgctgcagccggcaggcacagccactcaccaggcgtgagctcctgcttacgtcccgctccctcggcaggctgtcccccgagaggacctccagcagggagatgaggttgtggccatcgcggaggtcttcatacaggtcactgatgtgcctctgggccttgatgaggtgcttgttgacccacttggtgaaggttttcttctgcacacgatcccgctcatctgcgatgcgaatgaccgcccgctcagctgggtccaggacact

SEQ ID NO: 661129 - DNA, 468 bp, Homo sapiens
ggaggagtcctcccgttgacaaacgcccgcgcgtccgtggcctgatgtcggcaccccccagcctgctggtctggccagtgggtgcgaaactggcagctgtgccgcgccctttaacacctacccgagtggctgacacggaccacccagtccctgggtgtgcccagtgtgtgagcctcatgactgatgcccctaactgggccattcagctgtgggtgtgcctggccatgccccagtcctcctcctcctcctccctggcctcccaccccgacgcccgcatcgtgcccacagcatccatgtagcctggctgcgcaacccccacggcctacaccagtcaccaaccaccaccatctccaaacacccgccacccaacccccctcaaaagtgcacaccacctacactatcgcagtatacgtgccacaagcacacgacacgacccgacacaccgcacacaccccccaccacccacct

SEQ ID NO: 661130 - DNA, 409 bp, Homo sapiens
atatcacttctgtctctatggattgcaactctggacattgtataaatgatgctttcagtttgctcacatattttaaatgtgggttggatgtctgctcacttgagcaggtgcggctaatgcttatacgttctactcattaatcctaataaccaccccatgaggtagatagtgtgttatccctatttcacagatgaggaaaccgtagcaccgagcagttaggcaaatgggacagagtcatagcagcactgggcaggtacgctataaagcctacactccatgtgtaagctgggacctctctttaagggagcaggcacttggtggcttgcaaacatgctcatcaagtttattcttttattctttgggttagggtgtgggtgtgtgtgtgtagatatagaagagtgcacttttg

SEQ ID NO: 661131 - DNA, 140 bp, Homo sapiens
ttcgctaggtagaggccgggttaatcggccgaggagagacagagagctgggcacaagtaattccctcctggtcccagacagtctaagaggcacagatcaacgcagaaatggacctggaattttccaatgacatcaagaaa

SEQ ID NO: 661132 - DNA, 1648 bp, Homo sapiens
  misc_feature (965)..(965): n is a, c, g, or t
tcaagcttttgttccccccatggctgcgcgggtggtcgcctacccccgcttggtgtctcccccgctcgtagtgctaccgcgggcggggcgtccactcctccgtcgtgttttttgcctgtatggccgcgcgggggcggctgtgttgactactattttctgccaagcaggaggggtgagcatggttggtggcgcacactgtgggcccttcttttttggtgtgccaccccctcgttggtggcccgcggactggtgtgtggctcgcgcgaatagcaccgcgcgtgtgttgtctcacccgctgtgtccgcggtgaatgttttctccgccggggggttgttttagttgtggtccacacccagagtagttgtcgctcgctggttctcgtcagaaaggttgttgtttgttgtgtggtgcgactgcgcgtcgccgcacggcacactctctccttcctggtggggcgcgacgcatgattgttgtgttgtaggatgggttcttcttggcgtcggcgcagcgcgtggatcgtttttggtgggcccccccttcgcgggtggtggtgcgttatcatctgtcttttgctttggtgtgtggccgacccccgctgttaggtgtggcgtcggccccctctgcagtccggtggggcagctcttgtcgtgtgtgtgtttgcccgcgcccgtagtattgtgtcatcctcgtcgtcggagaggcgacttcccttcgtgggttgtgttaacagcgctggtgcggcagcacagtcgtctggttgttgtgcatcacgatgcgtggtgtttgttgggtggcacacgcccaccgtcgtggtccccccgcgctctagtggtggtgtcccctctcgtctctctcttgttaggaggggaggccccgcgtgttttatgttgcggccccccgcaccatcatatagtaggaggagagcggtcttcttcttctcttctcctcccctcggtgttgttttnttcccccgctctcttttttctttcgtcagagggggtgcaacacacccttcgttgggcgacgccgataagcactgctttcgccccccgctgctatgattcgcatcttctctcctcctttctctgattgtgtttctctctcgcgcgcgggagtatagtatctgatacacctctgtgttgtctctcgcacgcggcacacaacactgttgttactcgcgcgcgctctttctctcgcgggagtgtctcgccccgcgcgcgtttttctctctcgcgcgtgtgtctccccgcagaggcgcgctgacacacccccactgtgtacacctctctcttctctctctcctctggtaggcgcgctctctctctctcttcttctctcttaccaccccgctctatatatattatatatataattttctctctgtagtattttgtagagacacactctctctctcttctctcgtcgaagcgccgaaaattctctctctatatatagttagagagaaggacccctccctcatacccgcgggggagacaatatagttggagaggcccccccacccctccaccacaccactctagagaacccccagatatacacatataaatattatagagcaacaaaaagagagaagagagagtcgaagccccccccaagacgggttttcacccccccccccggccccaca

SEQ ID NO: 661133 - DNA, 88 bp, Homo sapiens
atcagcgcgcgacattcgggtacccgcgcccccccctccgtcggaattcctcgagccgggatccataggatgtggagttagttttgtt

SEQ ID NO: 661134 - DNA, 232 bp, Homo sapiens
gttcccccacctctgatccttccagtacatggatcgggctcccctgctggaggtcccaaatcatgatggtcccatcttcatagcctaccacagctctcttccctgcagagaggcacacgactaagacgagggcagagggcacgctcacatacactcagcaacgggaatggggagagggacgacggaaagaacgagtggcacgggcccgggcactgcgccgccgggaaagaca

SEQ ID NO: 661135 - DNA, 1470 bp, Homo sapiens
  misc_feature (138)..(138): n is a, c, g, or t
agtctcggagagagcgccccccgtgtggggtgcttttaataaacttatgtggggtcccgcggcggccgattctaccaacaaacagcacgaccaggcgcgggtgtgttttgtcctgcggtggctgccccccctgcggtngtatgtgatagtgccatctacccgcggggcctcgctccgacgtggagtaggactcttttttgtgggggcagccgcccccccccccccggggggaggtaatgatggccgccctcctttttggggggggacaatacatatcccccccgttgggagagcgccctcgtggccgaacaagtacaggccgcggagtagaaagagctcgtgctgggaaggagaagacccgcacgagagaaggggcccccacgcgcgtggggagaggaagtgtcgtggggacacaccagccgcggtgtcacacatggggtgaagcgccccaccatgcgagagagccttcgtggcagccgcagcctcctcgtggggtggtgccccccgcaacaagggcgcctacagcggcagcggtagaagagtggagtaggcgcgccccggtgttcatcaccccgcgcggctggttgcaacacgcgcccggcggcgcgccccgcggagaattgaccccacgccgctcttggtgggcccttctcccggcgtgctccccgcgtatacctgcgccgcctcgtcttctcgcttctccggcgcgcacacaccatggagatatatgttcgccgcacgcagaccgcagcacaccgagaaaataattggagagagacacaccacacacgccactcgccgcagcagggagagtccacccacatcggcgcgtgagaaaatggtggcccacagcaagagatattatacgcgcacatggtgaggaaccaccgtcggcgaggagattgatccccgcttccccacacaaccacacgcgagaaagcaacacacatgagaaaaggggcgccacccaaggggggcacaaccgcccgcgcgtctctatagagaatggctccacagagacaccacagccgcgggtgtgcacctctatagggggcgctcgcgggagaggccacagcttggggacgcgctctatattgaagtgtaacaagagaacacgcgctcgcttgtgccgctatacacacacccggcagagttctgccccctctctctcgcgaaccacgcgggagacctcaccctcttccgccgcacacgctggtttctcgagagggttctcgcacttcttatagaggggtgaagggctctgggcgcacacatccgccaccactcgtgcgcctctttcctctctggcccctcgctgcaccccaccacaccccaactcccgcaagggccccaccctctggggaaaacccggaagaaccctctcgctcccctttcccccccttagtgctcttctcttgccctggatccccgcgccagaagactatgtaaagggaataaagagaaaagaag

SEQ ID NO: 661136 - DNA, 394 bp, Homo sapiens
gcaacaccagtaagcagcagcagcagaaacatcagtatcagcagcgtcgccaacaggagaatatgcaagcgacagagtcggaggcgagccccccactccctgaggaggacctctctaaactcttcaagccccaccaggcccctgccaggatggattcactgctcattgcaggccagattaacacttactgccagaacatcaaggagttcactgcccaaaacttaggcaaactcttcatggcccaggctcttcaagaatacaataattaagaaaaggagcctcctgagaaggcgttgagtagacagactgttgagaggccacagagtgcacttggaaaaactcatttctgtgctgcaaagcaatggtggggaggcgcagtgccgcgactgctgta

SEQ ID NO: 661137 - DNA, 588 bp, Homo sapiens
gcttgcagttggatctcagattgctgtgctagcaatcagcgagactccggtgggcgtaggaccctccgagccaggtgcaggatataatctcgtggctgcgccatttattaagccggtccgaaaggcgcaatattcgggtgggagtgacccgatttgtccaggggtgggatttcatcccttactgggtctcaaccaaaatattcctgttggaactcagtgatgataatcatagcagcactttgcacagcatcagcaggtcatctcactagttatgtccaaaaacagtacatggactatatcgcacaacaggtgccagtctgagaaggcccaacaggagttggcaacaggtgtgatgtccaacaaaactgtccagaccgcagctggcaaaatgcgcgcgttcaactgcagcatctagtgcagcctcagaactgcttacaagggtaacgcagattcagagaatccttcaacacaattacacctgtcacctttgggaacctgtaccatgtggttacttaccaagtttaccatgataactttcttaccccacagagctcattttctccacaactcgcgtttcccaaacagacc

SEQ ID NO: 661138 - DNA, 1289 bp, Homo sapiens
ctggtcttcagtattcccaggggagcaggggaacaaggtggggctgggatgtatacctagttccggcttctatgtgggatggagttggggtatagaaagttaagcagagaagatgtttccaccaagcctggtgtgagtcaatgagggagtgttgcggggtcccaggtagacgttgtgactggggggagtttgggtaacgactaggatcaggaacagtgccatatctacgggtgtaccgtgtgcacggactaagcgtcaacgatcatcgaggtcgctaggggaccatgcgctcgcattgtctccctgaacccctagcgtgtctaagttctccgaactctgtgaatacactcgactagggtgatgttgactaaaacagcggctatctcacggggtatcgaagtcggcacggtcagagcgaccctagacgtctgtgctacttccgaggaggcagcaagcgagctagagacgggctcccgaagggtgccttttgtgaggacaaaacgcgtgtggtggactagtccacattgggtgtagcagctaacgacatgcaggcagagccgcagcagcgtcccatggccttccatccttgccgagcgttctatcgtccatgctagcgatctgctgggtgtctagaggaggaattaactgtccgtggtctgtgggcctatgtctgagatagaatatccagatgctgcgtcctcactgcacgccagtgtctcagcctcctctcatgatcttaccgtctttctgcatcacgcctgagtaccaagagccactcttgtccctaggtattacaggttggaagaagcacttgatgtggactcacgtatggacaactgagcatttcgggggaacgcccaggacgattgtacagtgaacgctggtcccgtccccaaataggggtgttcccccgaggcatgttaacaccaggtagttgtggaggttgcatggtggtggtcctgagtactagcccttatcgtttggacatcttgggtcacattatgtgcagggccaatccttggggtacacagatctgctcatcaaggaaaccgaggttggcaaacctggagactctgggacagggtacgggggcctaaggtatcgggcaccccgcacaggtagtcaacaaggacacacgaagggaaattcgggccacgaaaaagaacaagtagtgagaagaccgacagtgtgagggacacgaatctagaaacacagtcaagagacatgcgggggaaacaaagaccacagtaccggtgccgagggggaactgagtaataggagaacgagag

SEQ ID NO: 661139 - DNA, 369 bp, Homo sapiens
  misc_feature (76)..(76): n is a, c, g, or t
gattttaacatttactatatatgcctcagatctatcttgatcttgttttaagaaataaaaaataggccgggcgcangatgtcacgcctgtaatcccagcactttgggaggccgaggcgggtggatcaccaggtcaggagagtttgagaccagcctggacagcacagtgaaaccccatctctactaaaaaaataacaaaaaagtagccgggaatggtggcgaatgcctgtaatcccagctacttgggaggctgaagcaggagaattgcttgaacctgggaggcggaggttgcagtagagccaagatcatgcctctgcaatccagcctgggtgacagagcaagactccatctcattacataaacaaacaaa

SEQ ID NO: 661140 - DNA, 228 bp, Homo sapiens
ttctcccgggtgcttgcgtgtgcacgtgtgtgctgcgtgtttgtgtgctgtgcagctgtgttcatgtatgtgctgcgcctgagtgtgtgtgctgtgtgtgcctgtgtgtgctgtgtgtttgtgtgtgtgctgtgttcatgtgtgctgtgcatgcgtgtgtgctgtgtgtgcatgtgtgtgctgtgtgcacgagtacatgtattgtgctgtgtgtgcgtagtagctgtg

SEQ ID NO: 661141 - DNA, 153 bp, Homo sapiens
gcagggatcaagaccgtatcccacggagctaagtcgggtcttagctgttgagccacaatgagaactctgtcatggtttatttttgatgcactctatttattaaagaaaggtgcacaaggagtgcccgtcatggttgacgcggttgacaaaccg

SEQ ID NO: 661142 - DNA, 572 bp, Homo sapiens
gactcggtatggcccaatggcgcgcgggtcacggcttctgacagtttgggtcttgcgccgagtatgtagctaggaaagctagaggttagcgaaagtggtgcagatctcgtgataggagtacaagaggccgtgaagaatcgtggcgcttgtgtccagtaagtgcatgacctgttgaggatcagagatcaatgccggcgtatagtcgaaagtgttgcccgcatgagtagtcagtgctcgggagatcgacagcagcatattgtgcttctactaacgacgggtgaacaggtgcccttctgggctcgagtataaacatgcgtgcactccatgggccctggacctgccgtaatcagttctatggtcgcgtctggtcatatcctgtagctcagcatatgtacagttcccgaggaggacgaaatccaatgacaatccatatgctagtagtacctgtgttggggctgggggcgagctagaggatggactgttgtgtatgagatgcggggattgattatcatgtataatgaatgaagcaatttgtgctttgcaagttggtggaggtggagagactctgttga

SEQ ID NO: 661143 - DNA, 546 bp, Homo sapiens
  misc_feature (144)..(144): n is a, c, g, or t
  misc_feature (165)..(165): n is a, c, g, or t
  misc_feature (206)..(206): n is a, c, g, or t
  misc_feature (270)..(270): n is a, c, g, or t
  misc_feature (310)..(310): n is a, c, g, or t
  misc_feature (423)..(423): n is a, c, g, or t
  misc_feature (495)..(495): n is a, c, g, or t
  misc_feature (545)..(545): n is a, c, g, or t
atgaccccaatacgcaaaattaaccccctaataaaactaattaaccactcattcatcgacctccccaccccatccaacatctccgcatgatgaaacttcggctcactccttggcgcctgcctgatcctccaaatcaccacaggnactattcctagccatgcactnactcaccagacgacctacaaccggccttttcatacaatcgncccacatcactgcgagacgtaaattatgggctggaatcatccggctaccttcacggccaatggngcctcaatattctttatctggcctcttcctacacatcggnacgaggcctatattacggatcatttctctactcagaaacctgaaacatcgggcattatcctacctggcttggcaacttataggcaacagcctttcataggctatgtcctaccngtggaggccaaatatcattctggaggggccacagtaattaccttactatccggccatcccatacttgggganagacctagttcaatgaatctgaggagggctactcagtggacgtccccccnc

SEQ ID NO: 661144 - DNA, 640 bp, Homo sapiens
  misc_feature (36)..(36): n is a, c, g, or t
  misc_feature (64)..(64): n is a, c, g, or t
  misc_feature (68)..(68): n is a, c, g, or t
  misc_feature (81)..(81): n is a, c, g, or t
  misc_feature (85)..(85): n is a, c, g, or t
  misc_feature (141)..(141): n is a, c, g, or t
  misc_feature (168)..(168): n is a, c, g, or t
  misc_feature (190)..(190): n is a, c, g, or t
  misc_feature (208)..(208): n is a, c, g, or t
  misc_feature (215)..(215): n is a, c, g, or t
  misc_feature (225)..(225): n is a, c, g, or t
  misc_feature (308)..(308): n is a, c, g, or t
  misc_feature (393)..(393): n is a, c, g, or t
  misc_feature (406)..(406): n is a, c, g, or t
  misc_feature (430)..(430): n is a, c, g, or t
  misc_feature (547)..(547): n is a, c, g, or t
gggggaagaggccagagaaaggaggcagtcagaccncagacctgtcgccacagggacagcgganagangtagcactaaganagancacccgagcagtccccagtccagcccccactttttggcagaggtagggtaagggtnatgtgcaccccccccccacccccaatncattggtgtcacagagggaganagtgaaaagcgcagcgtnggtttcnggcccaagtnagggagcgtagaaaggctagccttggtccagccttggcagaatgaggcccacagatgggacaataaggcacaaccctggctcnggaggccagggagtcaaaggcaaacagccggggccaaatgctcagaataaggaatgtgaatcgtaacccctacccacagagagcngagggagggcctnaaaagcagttgaaaggatgacttngcgggtagggaggaaaatacgaccgtccccctctaacagaatataaccaacgtccccctacctggggataggctggttagaatttggtttaaaggcaactgggtgacaagcaaggtngggaggatgcagagaactctcctctcactttctcctttttccccagagcttaaagtgaccctatagcgcagggagcagggtagttccttggct

SEQ ID NO: 661145 - DNA, 241 bp, Homo sapiens
gtcttgaatatatcatttctctccctctctctctctctcggtgtgtgtgtgtgtgtgtgtgtgtgtgtgtgtgtgtgtgtgtgtggcgtggggggggtcgagctccgaaacacactctcacagggcgggccccgacccccggggtgtgtgtgggtgtgtgtgtgtgtctgtgtgtgtgtgtgtgtgtgtgtgcgcgacgcgcgcgctctactgtgtggcgcgcgctcacggggagcgggct

SEQ ID NO: 661146 - DNA, 102 bp, Homo sapiens
  misc_feature (5)..(5): n is a, c, g, or t
  misc_feature (44)..(44): n is a, c, g, or t
tgctntcgggtgaagttaaataaataaggaccagccctctcganccctcccagagttattgcatttctcctcttcacatcccattgggactccgatgctcct

SEQ ID NO: 661147 - DNA, 337 bp, Homo sapiens
tgacggcatgaatgtatgaagtttaaaattagtccttatagttcgtcctagaaaacatctgtacacatcaaaagggccgtccaagggtaaacgtttcatcaaagggagggacaagaaaacaatgcacttatatcaaatcaaaacaagaagttaggtcacttaagctatgtgcatcgtttcatggcaacaggagcactctcgtcacagcttacctaccaaccttcccctccccggagtgtggctgctcattatgtcacattctaaaataagtcgataaaagcttacattgcaaatcttggcccacatggagaacactaacatgcacagtcacacatag

SEQ ID NO: 661148 - DNA, 246 bp, Homo sapiens
aatggcttttatagggaagtagcacggaatcactaacttttagcctctttcttccttgaaacccaatctgccattcaaggcatctgaaaatagaagcgcaatatgtggctcccagagagaagggggtggttgatgtcagggagtaactgaaatgtacctggtatttaaaagagcagttcagtagagagcggaagagccccagttataacaagtcgttatgctctagcactgttgcttgttccgctg

SEQ ID NO: 661149 - DNA, 493 bp, Homo sapiens
aaatacgaagcctaatccgaaggttcccaaatcagcccgcacatcctgataaactacggggtagggagcgccgagtaaatgatacgtgcgggtctcgctatgttgggaagctacgcaattttctggcttatgcccttcttatctctctaacggtcttacccttggtgtccctaagattcctcgtcgatatcgttttctattgtgcgcgattccgcggattttatctctgattagcttcgggtatatggctttgttaatcttaccctgttgtggttatcgtagctttcgagttatgtctaggctcgcgagctactatcttgctggtgaatctaaggaatcgctctaggtagaggatgggttgttttgtatggtgcgtttttagatatatttttcgattatgtttccctaattgtttcgtcgctgtttccggtaatagacttacctactcgtactccctaagcgaggtgctccttccttttacgtacctatttct

SEQ ID NO: 661150 - DNA, 177 bp, Homo sapiens
gtatttttagtagagatggggtttcaccatgttagccaggatggtctcgatctcctgacctcgtgatccacctgcctcggcctcccaaagtgctgggattacagtcatgagccaccgcgtccggccgtttctctcttacttctttacagtctctctgctcccttctgtcgtcttctc

SEQ ID NO: 661151 - DNA, 350 bp, Homo sapiens
  misc_feature (270)..(270): n is a, c, g, or t
ataatagctacgatccaaatgtttcacttggagagagaagtaaactagaatttcactctgacaaaaccttttttctgcttgctctcatttcatttctccaagttaaaactaatcctgcttttaaaactaaagttctagctgaggctctggaaaacagctacagagccaaccggacaggcgactttaatttatgtgactggaatttccacttaccactcctccaaaatattttcctatgtagaagtcatcaaggctatgcagttccagatnagttgctcctagttctttagcaagctggatcccttcggttgtactgacacagctccctctgtctgaggtacacagtgggc

SEQ ID NO: 661152 - DNA, 488 bp, Homo sapiens
  misc_feature (50)..(50): n is a, c, g, or t
  misc_feature (88)..(88): n is a, c, g, or t
  misc_feature (91)..(91): n is a, c, g, or t
  misc_feature (106)..(106): n is a, c, g, or t
  misc_feature (109)..(109): n is a, c, g, or t
  misc_feature (127)..(129): n is a, c, g, or t
  misc_feature (150)..(150): n is a, c, g, or t
  misc_feature (175)..(175): n is a, c, g, or t
  misc_feature (177)..(177): n is a, c, g, or t
  misc_feature (221)..(221): n is a, c, g, or t
  misc_feature (249)..(249): n is a, c, g, or t
  misc_feature (271)..(271): n is a, c, g, or t
  misc_feature (290)..(290): n is a, c, g, or t
  misc_feature (322)..(322): n is a, c, g, or t
  misc_feature (330)..(330): n is a, c, g, or t
  misc_feature (339)..(339): n is a, c, g, or t
  misc_feature (342)..(342): n is a, c, g, or t
  misc_feature (350)..(350): n is a, c, g, or t
  misc_feature (367)..(368): n is a, c, g, or t
  misc_feature (382)..(382): n is a, c, g, or t
  misc_feature (486)..(486): n is a, c, g, or t
ttttaaacatttttagacccagaatggtcatctcacccccagaaggagangggttccaaggggggggggggggagggagggggggggnggnccacggggggggggnganggcaaaggggaagggggnnnggggggaagaagggggagggnaggggggcgccgggaaccaaagagncngggaagggtcattgtcaccaaagtggctggtgtgggcaggagcnccaagtgcagacaaacccaccggggccnggcggggcagccctgtcatggnttctgtctttgttcctgtnagtgaacagaagacccccgacccccgccaccnagcagcanggaacaccngcngcccaganacagacaaggctctgcnntgtctccttgtgcnggtttttggcagagacgttaaagggctgaaggcctgtgggacagaaatggggagaaggagtgggatacccaagatgccctcatacgcagcgtgggttaacagtnct

SEQ ID NO: 661153 - DNA, 170 bp, Homo sapiens
tcgtgtcttgacgctggtcacctggtgtacagctcccgctcccattgccttacgaagccacctcaagtccatctcgatggccaacggacctgaatgccaggatgatgcacggcggttcctactccctcaccaccagcaccacccacaaaaggagcagcctccgcaaagtg

SEQ ID NO: 661154 - DNA, 421 bp, Homo sapiens
  misc_feature (1)..(1): n is a, c, g, or t
  misc_feature (366)..(366): n is a, c, g, or t
  misc_feature (399)..(399): n is a, c, g, or t
  misc_feature (404)..(404): n is a, c, g, or t
nagccaccatattccaaatcactgaaaaaaataaatgaattatttttatttatttatttatttttttgagatggagtctcggtctgttgcccaggctgaagtgcagtggccccatctcaactcactgcaggctccgctcctgggttcgcgccattctcctgcctcagactcccaagtagctgggactacaggcacctaccaccatgcccagctaattttttgtatttttggtggagacggggtttcaccatgttggccaggatggtcttgatctcctgacctcgtgatccgcccgcctcggcctcccagggtgctgggattgcaggcatgagccactgcgcccggccatgaaatgaattatttttnaagaggcattgattaaaagattcacagcaaatncactnagtttaagcagattttt

SEQ ID NO: 661155 - DNA, 1077 bp, Homo sapiens
gttagatcccaggggctgggcgactgagagtgtgtagctggcagcagcggcgcaggtgatgaccccatctggaccgtgcaggtgagtcccttccctccccaggctcgcttccccagccttctgaaaaaggaggtttaggggatcgaggtgctggcggggagaagcagacaccctcccagcagaggggcagtgatgggggcacgcgagacgtagcaaaggtgacatctactacggggcggagccgagactgacgcaaggctggggggctatgggcccgtttccaggcagaccagagcaagagggcagggagcggagcacaggggtaggccagcgtaggggtccagcacaggatgggggtggtacccccagggaccatgggtcagaaccgggaccaagggcccgagggacacagcgacacgatgaggtcacacaagaatggccaccgtacaaccacacgacaaagtccattgaagcaagccagggcaaccagaggcgcaaggcgaccgggccacacgggcgatttcgatcagcgcccgtaaatgcaccggaagacccgtccgaaagggggctgggcagaagcctgggacaggaacagaggcacgaatgctcgggcgaggctcgcaaggcaggtagatgccacccaggcagggccgaaagccgggccacacggtgactcgggaggacccgcggcaagagatagtcgcaggaccaagggaacgggcattgaacaagcgggagctcggagaacatcgacggagcagcaggaggaagcaccagagaagaagggcagagttggcagggggcacaaagagggatcacaggggagagcgggacagaaacgggcgacccaacgaggggcgggaacacagggaccgaaacgagaagtgataatgacacgcgagacgaacggggggcaagaccgcccagggggaggcctggcgcaatacgggggcagaccagagaagggacgacacgacgagaggggaggacacaacggggacgaatggtggggacgcagaacgcagaggatcggggcgaaagaccgaggggcggggcacggcgcgcgagagaggagga

SEQ ID NO: 661156 - DNA, 366 bp, Homo sapiens
  misc_feature (243)..(243): n is a, c, g, or t
accttaaccctgaggctgggagtttgagaccagcctggccaaaatggcgaaaccctatctctactaaaaagacaaaaattagctgggcatgatggcgggtgctgtggtcccggctactcgggaggctgaggcgggagaatcgcttgagcctgggaaggtggaggttgcggtgagccgggatcgcgccactgcactccagcctcagcctgggcaagaaggcaagaagagcagaactccatcttnaaaaaaaaaaaaaaaagggaaaaggaaaaggaaaaggaaccaaggaaatggcttggaggcttggaagggaggagaacttggcaaccagttcttggggaccggggtggggaaaaggtggtctct

SEQ ID NO: 661157 - DNA, 103 bp, Homo sapiens
atgcttgtggacaggacataaatacgggacgattaccagtagaaatgatgtggaaatgcagagccccaggaaagtagtgtaagccctgaagccctgtgcgacg

SEQ ID NO: 661158 - DNA, 845 bp, Homo sapiens
ataaatattatactagcattgaccatctcaacttctaggaatactagtatatcgctcacacctcgatatcctccctactatgcctagaaggaataatactatcgcatgttcatgatagctactctcagtaacccgtcgaacacccactccctcttagccgatatgtgcctatgccatactagtctttgccggctgcgaagcagagggggtctagccctactagtctcaatctccaacagatatggcgtaattacgaacatagaccgtaaacctactccatatgctaaaactgaatcgtacccaagacaataatattcactacgcatctgagatgactttccataaaaacgcatgaatttgagatcaaacacaatgcagcccgaacagaccgtaatatattaggcaatcatcccccctacatattttttgtagagccaacatacaagcgaacaacctcattttaggctgttccccgaatgctttttcctccgacgcccactaaagaatccccctctctctaatacgtaacgtacctgactcctaccgcctcacgaattcatggcaaagaccagctgcctatcttatccaagtgaaccacttgatcacagaagaagaaactctacctcgtctatagctaaatctcccgaacgaaatcgtccgttgaacttataacattacacaagcgcacagaacgtaatcatagttgtatatcttcgtttcgaagatccacaactgatccccacccttggcttatcatcaaccggatgaggcaacccagtcaggaacgcgtgaacgcaggcagcattactttccttattctacagcctagtaggctccctttcccg

SEQ ID NO: 661159 - DNA, 226 bp, Homo sapiens
gtcttgactacctgagtgacaggaagatctgtgatgtgcagcatttaaaattttggcataggtacaaacttgaatctcacaagctgattcacagatgggtccttaagtttaatctcctttaaagcttattttaaaaacactagtctggcagacagtaagatttaaaataagggagtttttaaaacccaagtagtgaattgacttaatagtctaccttgtgaatgaa

SEQ ID NO: 661160 - DNA, 675 bp, Homo sapiens
ttttttttaagaaactggatgttaatttcccatcaaccatttttccatgctgcttaagagcctatgcaaaaacagcttaagaccagtcaggggtgggtcctacccattcaggggcctgagcagggggagctgcagaccaggtcttccggggcgaggcgtgagcgccccagatcttcagtagggaatggcgtgaataggcacagagggcacctgtacaccttcaggaccagtctgcaaccctcaggcgtgagatagcaggtgaactcaggagcgggagcagcaccattcacccgtgaaaattcccacctggggtcacgtggcattctcagcagcagccgtggatcattcgttttacaagtcatctttacaggagtactctggtagaagtacagatcagggattgaccctcccagtggggtgtgttcacgggaaagtggggccaacgacatgtcgcagaaattcccgagaccagaatccaccagcatcaaacccactggaggtgagctccctgtggaggatgcatgggagggcacatgtccacatagcgcaagaggagaatctgtgttacacagcgcaagggtaggtacggtaacataaaaagcctccgagaaaggcggtgggcagcctgggtcagtacccaagagccggggacccggaagctgcggactggaacga

SEQ ID NO: 661161 - DNA, 168 bp, Homo sapiens
catggcccaagtcaccccccccctggtccacattcctaagggagtaaaaaaaaacaggacacaaaatggcaagcctgaaagaattgcccaggtgacctggaatggggccttaaccccaatttttttttcctaataaacaacctcctagaggccacattttttttttta

SEQ ID NO: 661162 - DNA, 154 bp, Homo sapiens
caagtataatgaacttggcgagaagctcagcaaagacccaatatcgtcatagccagatggatgccacagccgttgatgtgcctcctaccatataaagtctgaggttatcctaccatctacttctctccagccaacaagtctagtcaatcaggga

SEQ ID NO: 661163 - DNA, 209 bp, Homo sapiens
  misc_feature (41)..(41): n is a, c, g, or t
  misc_feature (69)..(69): n is a, c, g, or t
  misc_feature (80)..(80): n is a, c, g, or t
tgtctacctaacttctcggggactacactggtagttttccncctttaaagaaactggtaaattgaaacnttgttgagttnccagaatgccattaacagtgttttctttccctattccatgctttctgcctctgtgtatatatataatatatatgtatatgattgtgctgtgtatttacgaagctattaagcataatttatttgtaaaat

SEQ ID NO: 661164 - DNA, 544 bp, Homo sapiens
  misc_feature (535)..(535): n is a, c, g, or t
cttggctcccaaaggcgggattacaggcgtgagccaccgcacccacccagatctgatatctttatgtggggcctgcagggagcagggctggcaagaagtgtcagtagtgtaggacttggatgagacattttcttaaagagctttcttcagcaaaaatgtgggattttcctgtctattttcgtttatttttatggcaaaaatgtttcggccaccagaacaatcttagcacaaccaaaggttcttggctgtttttcatttagcaaaattctttctggtgttatgatatgtgttttctgtcagctaaaacttacaggaatagtgaaccacaaagatttcctgaggagctcccacatgctgtgtctgaggtttctcatatttcttttggcatcagtaacattctctaatacttcgaaattatagttggaatccagtgttaatgatttctcttcaaaaaaaacaacttaaataaaagatttgcggttttattttgcttgaaccaaggaaaagtcataatagagacaactacctactctgnccaagatgg

SEQ ID NO: 661165 - DNA, 321 bp, Homo sapiens
ctatttggcaatagtgctcgaatatctgctgcacaaaccaacctttgaagatagcttgggtaaaacttctgtgacgaaggcgaaggcatatgggtccctcttggaaagtctcgttcagtgaagatgccaggtagttcggattcagctgttacatctaagccaggaggctgtggaatcaggggcatgtttcgtgtgtataacaaaaggtgttcacttaatttccctcattttatcacattaatttttaaatagtagtaattcatgaatataaccactttcctttgaaaagaatcattaatgttttcaaacgtgtcggtaaca

SEQ ID NO: 661166 - DNA, 605 bp, Homo sapiens
  misc_feature (54)..(54): n is a, c, g, or t
  misc_feature (605)..(605): n is a, c, g, or t
ccatctccctctctcttcccttcctccccctccgctctcccctccccctccccnttcccctctccccccccccccccccctcgcttagcagtttcgctcctcccccgatggcggctctgctctcgtcactcgtcggatccccccgggcctgcagtgccttcggctcgcgctgcttctccccttttctcttccgcctgcctccttgtcttggccagcccctgtctcctcgtgcgtgccattctcaacctcttggtttgctccctttaagccttcgggctttctcacactcccctccttttccttctcttctgtttggtccctcctgcgtccctccctcctcctttctcctttgccactgccaacattccactcttgtgctgtttgctctcacttccgttgcctcccccattctgcttgccctctcccctttctgttcctcccagctcgcgcttcgtcggttgcctttctcagcacttgtctcttgctcccttttccctcctccttgccatcctttccaggccagtccccagtacatattctctgctgtttaccatcgctttcgcttcctactctgcactactagccttcgtggcctggtttcctcn

SEQ ID NO: 661167 - DNA, 377 bp, Homo sapiens
tagcttctcttcatcatccacgctagaatttgtactcctggttcacgtcccatgctaagctgtcagtcatgaagtacagagtgtagttgtgggcagccagtggctggggccgcaaggtccaacttcaccttgggcttctgttgcaaggtcagcctcttgatggagatgaggctattggacttggcatgtccaatcaccacccacacagcccctcttcacgtttctggcgggaagagaggcgcattgacagtgggcctgtgaacttcctcctctcgactccaggctggtccattcaccaaagatctggcccgtccactgcgtgatgcttgtccgttatctatgcaccgtcataatattacttcagatattactggtag

SEQ ID NO: 661168 - DNA, 748 bp, Homo sapiens
  misc_feature (572)..(572): n is a, c, g, or t
gcctttatgtcctttcttctgaaataaaaggaaaagcatttctggaaaaaaaaaaaaaaaaaaaaaaaaaaaaaaaaaaaaaaaaaaaaaaaaaaaaaacaaaaaaaaaaaaaaaaaaaaaaaaaaaaaaaaaaaaaaaaaaaaaaaaaaaaaaaaaaaagaaagaagaaacgaaaataaataaagaagagaatatataaagatagaaccagaaaccgacatgagattaatgacatgcgatcatgatcgctcgtgcgatcgacattctcctccttcaacgtttggcgactccactgatgcgaggctgagagccagcctcctctgtactgcgcgatgtatcgatcacttctgccagctctcagtctccgcgatcggcgaggatctggagtgcgatcctgatctggtgacaaagcctataagcctctgcctgtgtgacgcatcaggttacataagcatgacgtacgtgtcagctaccaagacacgacgatcacgcactatataggacaagagaggtcagtaaggcgagctaagtgtcacgacacgtcgcaacgacgcatatttgttctatggcntgcgtcgtgccactaccatatctcgcctaccacacgccagctcttgcagctaaacctagagctacgcgtctcaatgcacagcccctttacttttcctcttctatgcgtcacgtgcatcgtcacaataggctagctagatgagacgtcagacacgatatggcgcttaatgaccagtg

SEQ ID NO: 661169 - DNA, 292 bp, Homo sapiens
acaggaccagataacaaaggaatttacaaaggagacagagaatccagtcgggaaaatacacatttgcctgcctcacatggatgggaccatacaaaattttgttttggtaacccgggtgtccaccatgactccaaaaatggtgaatgttcaccattgtatattgggggggctccaaaaggacaagatatggaaacagaagcctcaccagaaccaagctagagggaatgatcaatgagctagcagtggcgatgacagctgtaaagcagggcaggaatacatggaggtccgggga

SEQ ID NO: 661170 - DNA, 183 bp, Homo sapiens
gagatctcgccattgcgccccaccctgggcaacataacaaggctccatctcaaaaaaaaaaaagaaaagaaaagacaaaaaaagggagggagggagggaaggggttcaacttattatattcaattgtatttacccaagggtataccggtgggtatacgggtaaaaacgaaatgtgggaaaggc

SEQ ID NO: 661171 - DNA, 642 bp, Homo sapiens
cgtcgcgctgtgccatattgcaatgttggccgatggtaccacgaggaagcacattccagggcccccacgaccaccacctgtccacaaaggccttcgatacgggataatcctatgttattacgctccgaagtttttttcttcgcaggatttttctgagcctttacccctcccgccttgcccctacccccccatttggagggcactggccccccacaggcatcaccccgcgttatatccccttggagtcccactcctgaacacctccgtattactcgcatccggagtatccatcacctgagctcaccatagtctatagaaccccgaacccaattattccagccctgcttattaccattttactgggtctctattttaccctcctaccagcctcagagtacttcgagtctcccttcaccctttgccgacggcatttacgggctcaaccttttttgtagcccccggcttccccggagcttcacgtcattattggctcaactttcctcactatttgcttcatccgcccactaatatttcactttacatcccaacatcactttggcttcgaacccccgcctgatactggcattttgtagatgtggtttgactatttctgtatgtctccatctattgatgagggtctta

SEQ ID NO: 661172 - DNA, 798 bp, Homo sapiens
tgagttcgctttcccggattgatctcgttagatgcctggagctcgccatgtgacttcgcgttagcccgtggttagcttatgttgtactgttttactgatatttgcggcttgcttagtagtgtgtctgggtgccttttgttttgcgggtcctcgttcatcttggcctctggagccagtgtgttataagtgcccgtggtagcatggtcgggttttcttggtttgtgtgttttttggtttccatgcgtgatcagtttggagacatgggatgcgtggtgaaagtgtggtttgtggaggttctggtatagttaccttgtaatcagtagcgagataggaaggtcgattcgttatttcttagccggcaagttgtactcgttcgctagtccgagtatagagtatagcgtttctgtttcgtggtccatacctttatatgatcctcgtaaatgataattatctccagtaatattgttttcacccaaatcttgagtagatatttgacaacagcctaacaaagttaagggcttaacagccattcagatagacagtaacaccattctgtactgatgtgcaataaaagcatccaagatctttatttgaaagttttatcttagtaatatacatttttgtatgagacaggtgattggtaacagggtgcctattttagtgcataggatcaaaattctgtgataacttgcagggctttctttctgtgttcttcaaatttatcaagggttcattttggaaactacattttaaacctattggaatcaaatgttatcttactgggggaggataatgtat

SEQ ID NO: 661173 - DNA, 2070 bp, Homo sapiens
  misc_feature (1235)..(1235): n is a, c, g, or t
  misc_feature (1276)..(1276): n is a, c, g, or t
  misc_feature (1301)..(1301): n is a, c, g, or t
  misc_feature (1303)..(1303): n is a, c, g, or t
  misc_feature (1345)..(1345): n is a, c, g, or t
  misc_feature (1451)..(1451): n is a, c, g, or t
  misc_feature (1526)..(1526): n is a, c, g, or t
  misc_feature (1567)..(1567): n is a, c, g, or t
  misc_feature (1585)..(1585): n is a, c, g, or t
  misc_feature (1617)..(1617): n is a, c, g, or t
  misc_feature (1676)..(1676): n is a, c, g, or t
  misc_feature (1682)..(1682): n is a, c, g, or t
  misc_feature (1698)..(1698): n is a, c, g, or t
agatgggttgggggagggagggggggatgtgttatgttgatgtgtggtgtaaggaggatgggtagggagtagtttgttggtgaaggttgcttggtggtggtgtgtggggagggtgaaggtaagtgttatggggttgggtgtgtggtttgtggtgggtgtggggtgggtagagagatagataatgataatgtagtgggtaaaggctagagtaaagtgaaagagagtgtgtgtggccgagagccagtgcgtatgggttagtgtgtagggatagtcgaaattgtatagtgtgttttgtatggtggatttatagaaaattgagtgcggtgtatgggaaggaaaggaagagtgtgtggagtgtagtggggatcgggtggtttgaaatgtcaggggcggggaggtaagggaaatcaatcggaaggggtgggtttgttcctatgcctatggtgtggtcgcggaccgacctagccgtgtgttgtgtggggcggatgatatggatgtcagggaagtgacaggtcccagaccgtgcctgtcgtatcggatggtaagtgtgaatgtgaggtggccggccctgtgcgtgtgtggtacgatacctgaacggtcaccataccctctctggttggttggcttttacctacgctgccgggttgagtgtgcggggggaggcaagggagtggatgtaatggaggaaggaaaggaatgagagtaaagcaaggagggtaggacgcgatctcaatcgatgtatggtgttgtagggggtggtgagggtgggttagtgcattggtcgtcgggtgggaacgatcctccgccttgtgattgatcggtcgagccagcagggatgagcaacgctaccgccggtcggtgaatgaaggagtgtgtggttggtcggtagggaagggccgccaagcatgcgggtgggtgaaggacgtgcggatcgattaatgaggggtgaagaaggagcgatgtttggtaggtggtcgtcaataaatgaggaggatggaattgtgcggaaggaaggattaagtaagtaggagtggtgtaagtgaaggaaggaccgggtcaagatagttagttgattctttgttggtcttggagtgggcgtgcagccaggccagcgaggcatggcagggggggtgaatgagtcgagtcgtgtgaagaatggtgttcgtgccgggatgcaaggaagcaggtaggagtgaacgagtggagtcggttgcgttgggtgagtggagcgcganccggcgagtcagtgagacggctctgtgcagtgaaggtgagnaaaggaagtggatgggtcggttcgntnccgttcaagtcagggcgtggcaaggcaagtaaggaaggaatngttggaaggaggcgtcccatggcgagcgagccgtgcctgtgcgtgcgggcgagtcgtgtcggtcggccagtccgaggccggcggtccgctactggtaaggtaatgnaatgcatgtagcacgcgatgcgatgctcagtgtatagatgcaccagacggtcggtcgagtcagtcgatgcggtgngttgtgttgagtgaatgtaggaacgcgtagtccggtccgtngttgtagtaaaggatganatgcgatgcgtcagccatgcgtgccagcgtgnctggccgcgactgcgggcggggcatgcatgcaggcatgcagtaggtagtaggatgcagncgtacnacgacgacggaggggngcgtgcgtgttgtcggtcgtgagtcagcggagcgcgtcagcagctgtggcgctgcagatgagaggagaggagagagagagtgatatctggagacacgcggagataatcgcgagagttgtgtttctcttgatagactctctctcgagagagtgtacacctctatagtttcttgccacctcttggcccctgtagatgtgtttattataacagagtctccagagagagaagatgtgtgtgtccacagagtgttataagaagaagagagagaagagagaagaaagctttcggagggcatttatcaagctttctggggtgcccggcagaaagagctaatcattgctgcccccatgaggcattgggccggcggcggga

SEQ ID NO: 661174 - DNA, 170 bp, Homo sapiens
caggacactgtgatctcctgcgccaacgagacactggtcatgctggtactggagggcttgattggctcccgcactcatccctctcctgagtccctctgctatttgtcttcctttcttaccttctttcatttcaccgcctatccctgttgactacctattagaactggcat

SEQ ID NO: 661175 - DNA, 731 bp, Homo sapiens
ggttcatctgtcttgtggcccccatctaggaacagacttggcataagaggagagcttcaactccctgtggtttcatccctgacccaaccaatcagcatttccctctctttctgggtctcttgtctctctctctctgggtctctgtccgaggaagagagagagaaaagaacagaagacaacaaagaaacagcaaagcagagaaaacaaaagcaaaaaaaaaagaaaaaaaaaaaaaaaaaaaacagagacgggaacgagagaggagacgacgcacgagagagagggacgcagccaaacacgacgcgggccaaagagacaacagcgcgcagacgaggagcgagacgacagcggagaggagggagagaagaagcagaggagaagggagcggcgaagacagagggacgaggacagcaggcggaggaagagaggcgcaggcacaacggagaggaaaaaaaaggcgagaagaacgcaaacgcaagaagaagcgaaggagcagaaccgcaacagaagaccacgaaaagaagaccagaaaaggcaaaaagcaacaggcgcgaggcggagcggaggagagaaagcaagggcgggaagaggatagaggagagagacggagcagagaggacaggagggagggagagaaaaaggagacagaacagagaggcagggagagagacgagagccgacagcggaggaggagaagggagagaagagcggacacacagacggggacaggg

SEQ ID NO: 661176 - DNA, 276 bp, Homo sapiens
  misc_feature (4)..(4): n is a, c, g, or t
  misc_feature (19)..(19): n is a, c, g, or t
  misc_feature (78)..(78): n is a, c, g, or t
  misc_feature (163)..(163): n is a, c, g, or t
  misc_feature (189)..(189): n is a, c, g, or t
  misc_feature (219)..(219): n is a, c, g, or t
  misc_feature (242)..(242): n is a, c, g, or t
aagntctctgccagcaganagggggtctggaatgggagtatccactgtggggctggggtccagggtttttatggactnggaaggggaaggaatgtgcttagtctgtgggctgtcttggcgaatgtgtgactcagcttggcctgggaacaatcgggctgaggtnatgattcatagaggccagacttacantccaaataaaggaaagtagagtgcccactngaacccacccggagcccactgtncccatgcccacaaaagggagaagaaactttttct

SEQ ID NO: 661177 - DNA, 205 bp, Homo sapiens
cgaattcaacatcacaaacttcttcagggccatcaggttaaacttgtaggactcattgataccccgctcctgaactcaggtgatccaaccaactcaacctcccaaagtgctgggattacaggtgtgagccagtgcgcctggccaagggacattacttttaaacattaatcgatgtgaaatcctgtttctaaattacgcactgaca

SEQ ID NO: 661178 - DNA, 245 bp, Homo sapiens
  misc_feature (115)..(115): n is a, c, g, or t
  misc_feature (153)..(153): n is a, c, g, or t
  misc_feature (162)..(162): n is a, c, g, or t
catagccttcgtgtgaaggccagtgaacagcagctgagctaattcatgaggtatttgcccttctgaagttggaatctgtaatgatttaaaacatgagactggtccagtgggcttnttgctccagacctcatgccttctggacccagacatctntgcaatctnggaactggaatacaccacttcttgtcaaggtactagcaagttgccgtggatacagaaatctctgcaggcaagttgctccagag

SEQ ID NO: 661179 - DNA, 561 bp, Homo sapiens
  misc_feature (537)..(537): n is a, c, g, or t
ccactatgtgatggcacagacgatgtagaatatgattgggccgtgatttaaagaatgctctggacatcgttgtagatatattgagagtaatcaaagataaacatagaagttggagttgtatatcaagtgatttggagattcatgctggcatgatctacttgaccagaggcagcttttcctctctaagcctatttgatatctgtcaggtggatttgagatcactcagttttaccccttgtcccattccgtagccttttgtcactgtttgtccctttgtggccatgtcagagaccacactgctgtaggctgagaagggccacagtggttcaggtgctttgaggacttggtcttggctcaataggagcctcactggtgtttgctcagattggtcagcctatgcccaaagctacttggcttaacaggctggtgacatcacacccaaaaggtggcgaagaataggaataggaaggatcagcacctattttggagtgaggaagccaatggaggtacaactcctcaattctaatcttggtagtntatttttttttttggaaacgggtt

SEQ ID NO: 661180 - DNA, 152 bp, Homo sapiens
tgaactgggaggaggagaggggggcgtcctcgcccctacagcaggcggcggtaggtggcgatctcctgctcgagcggcgtcttcacgtccagcaggatcttgtactcctgggttctgctgctccatctcgcagtggagctgggccagctgct

SEQ ID NO: 661181 - DNA, 363 bp, Homo sapiens
  misc_feature (322)..(322): n is a, c, g, or t
tcagagctggtttcaaagttcagctgcagcacatactttgggccagttatttgggttcataggacctcaggtttgtcatctagaaatgggaataatgatacctacctcctgagagataaagggcagaacaacaatttcagcaaggctctatcatttcggttatccttccctgctacagtgcaaatctctcttaaagactgtaggtctggcttccgtgaatcaaatagaaacagttacagcataagcctgggccactgtgttgccttgggatatgcatatcacctgttttaatcccaggatttgactttcctcctagtgctgnggctgattatttaatttttagataatcatgtagcacatatc

SEQ ID NO: 661182 - DNA, 888 bp, Homo sapiens
  misc_feature (14)..(14): n is a, c, g, or t
  misc_feature (133)..(133): n is a, c, g, or t
  misc_feature (205)..(205): n is a, c, g, or t
  misc_feature (221)..(221): n is a, c, g, or t
  misc_feature (233)..(233): n is a, c, g, or t
  misc_feature (278)..(278): n is a, c, g, or t
  misc_feature (283)..(283): n is a, c, g, or t
  misc_feature (287)..(287): n is a, c, g, or t
  misc_feature (306)..(306): n is a, c, g, or t
  misc_feature (309)..(310): n is a, c, g, or t
  misc_feature (356)..(356): n is a, c, g, or t
  misc_feature (375)..(375): n is a, c, g, or t
  misc_feature (407)..(407): n is a, c, g, or t
  misc_feature (423)..(423): n is a, c, g, or t
  misc_feature (442)..(443): n is a, c, g, or t
  misc_feature (465)..(465): n is a, c, g, or t
  misc_feature (504)..(504): n is a, c, g, or t
  misc_feature (525)..(527): n is a, c, g, or t
  misc_feature (529)..(529): n is a, c, g, or t
  misc_feature (550)..(550): n is a, c, g, or t
  misc_feature (563)..(564): n is a, c, g, or t
  misc_feature (566)..(566): n is a, c, g, or t
  misc_feature (585)..(585): n is a, c, g, or t
  misc_feature (625)..(625): n is a, c, g, or t
  misc_feature (650)..(650): n is a, c, g, or t
  misc_feature (652)..(652): n is a, c, g, or t
  misc_feature (689)..(689): n is a, c, g, or t
  misc_feature (696)..(696): n is a, c, g, or t
  misc_feature (765)..(765): n is a, c, g, or t
  misc_feature (798)..(798): n is a, c, g, or t
  misc_feature (877)..(877): n is a, c, g, or t
acaggcattttaanagcatttctgtggttctaagtttgcatcaagacagcctaagtttgcatctgcacaatctggatacccaaatccctctataatttccaaagacaaagacaatttttgctagttgtgtggngtcagggggaagcagtgttgccctgcaaacagtctaatgggcccaggggaccctgtttctttctcaacctgnggttgcttccttgttntccaggaaaagngattagtgcttgcttaaccaggttcctagtaaatggtcagggatnttctntgcnataatgttgcaaaagttantgnnggggaaaaaaagcacaacgggggcttcttgcccatttacacttgcnatgttagattttgaaaacngggcccttcatagtcagcacccaagtcctgtnttccaggtgttttgcnggctggttaacggcccttnntaactactttgcaattccaaangcctccctggctgcttttctgggcggggggtgggttttngtgtgcgggtgctcttaggtnnncngaggcaataacaagcccagtntaaccaattcccnncngggttgactgctgagttangcagattccagttcattaagccctgagtatagagtatgangccaacatcttttctttagtaaaancnatgccattcgtctgcctttcccttttcctcctttatntgggggnctgtttttggaaactggggtaactccctgcaggcaggcagcaggagatatctccaagtcaggctggcanggtggggtgctatcctctgtacaaccatgaggnagatgaggcaaataagatcaagagagcattttgtgaacaggcgatgacccagtttgtacctgtgctttgtggctagtgnaactgtacatc

SEQ ID NO: 661183 - DNA, 1152 bp, Homo sapiens
tgattctctctctctctctctctctctctctctctctctctctctctcacacacacacacacacgacgaacacgagccctgtctcgcgcgtgatgttctcgccgcgcaggtcgggtggcgcggtgtcaggtggtgtgtggggtccagagacagggtcggtctccggcgctgcagcgcccaggcccagctcgtacagattgtgtggcggagcagcggcagctgtacagtagtagtcgcaccacgtcgtggtcatcagaggatgccatgcggtgatgaggacctctccggttggagacgtctctctgttgaccaaaaaacaagcatggttgtaattagtgtgtgcgagcagggcaggtgtggtctctttgctgtgctcccctatccaacaagaggaatgcctattagatcgtcctcgttgaggacgaacaacggcatactttcaccacgaacaaggataggacgcgcggggacacatctcatgaaggctctcgtgcgtagtagcaagacagcgtaggccttgtgtaggaagaggagagcaggagcatgcagaagcatgcgagttgcgtcttcgtagtgcgttcttcattgtaacgcacgcagcaagcgtggcgctcgttgcgtagcgcagctatataattagtcgttgctcgttaggaagaccacgaatgaattagtctcttctcgtagagctcacctctcgtaagaagtagccccaccgcaagcattcattccagaagggggagcggacaggcaagcctatattgcccggaggcccacgaatgctacttcccgctacaatttctttacgcaatgcctgcctgcctacatacccgctacgttgtaacgtacatacgtaggtagggcaagccctgcccggttgtaacttcgcttgatagaaaagcccggcctggctgtccttagggtcggaatggaataggtaatccctaacggttggaccgctgtgttggggggggaacccccctctgttggtccaccaagtgtggcgtttgcttagccaggctaagtttgatagggacacacaggggaatttcccagggagggaaagccgcgggcagtaattttgcccccaaaaaaatggctggtatggaagcaaccagaagacgagcgttgccttccttccttccccacgga

SEQ ID NO: 661184 - DNA, 907 bp, Homo sapiens
  misc_feature (2)..(2): n is a, c, g, or t
  misc_feature (482)..(482): n is a, c, g, or t
  misc_feature (494)..(494): n is a, c, g, or t
  misc_feature (509)..(509): n is a, c, g, or t
  misc_feature (531)..(531): n is a, c, g, or t
  misc_feature (554)..(554): n is a, c, g, or t
  misc_feature (560)..(560): n is a, c, g, or t
  misc_feature (579)..(579): n is a, c, g, or t
  misc_feature (595)..(595): n is a, c, g, or t
  misc_feature (608)..(608): n is a, c, g, or t
  misc_feature (629)..(629): n is a, c, g, or t
  misc_feature (638)..(639): n is a, c, g, or t
  misc_feature (728)..(728): n is a, c, g, or t
  misc_feature (793)..(794): n is a, c, g, or t
  misc_feature (803)..(803): n is a, c, g, or t
  misc_feature (809)..(809): n is a, c, g, or t
  misc_feature (846)..(846): n is a, c, g, or t
  misc_feature (894)..(894): n is a, c, g, or t
angataaacattggttattggtgaacaatacaccctgacagctttgaagtgttcagatgctaattttaaaataaatgctgacaaataccaatcagatgttcataacacttttcaggatccacatcaacttgattatggacatagttcaatacacaagggtaagagaaagagtgtgtaatcaccaataattaaaccagaggcataattttttcaaataatttttagttacagaataaattctaactttttaaagtctaaagctacataaaactcaaagcaatctatttttctacctgaggtcaaaatgactttcctttttcctaactaaacataattcttagcattgaggtaaatctgaattcatgtggtatgctttgtcaaacttttccaaaaaattttaagccctgctttagagagaaattctcatgttacacatatatatttacatattttttcttcaaagactaatgacaatgtatgangttaataggccnggaatgggaccatgntactacgaataatatgaaatanaaagccactcatttatataaagngttccnggatggggcgatagggaangggagcacagatttangtacatatatgantgcgcgaggagttcgggagtngggcgcacnntggagaactcagccaggcgcggtggcgcacgcctgtaatcccagtactttgggaggccaaggcgggtggatcacgacgtcaggagtccnagaccagcttgacatggtgaaccctgtctctactaaaaatacaaaaattagccgagcgtggtgannacgcctgtnatcccngctactcaggaggcaaggcaggagtatttgcttgtancagggaggcggaggttgcagtgagcccagatcgcgctattgcactccngcctggacaagag

SEQ ID NO: 661185 - DNA, 273 bp, Homo sapiens
  misc_feature (137)..(137): n is a, c, g, or t
  misc_feature (176)..(176): n is a, c, g, or t
  misc_feature (207)..(207): n is a, c, g, or t
gatgggtacgtatcggctccagcaccagagcctaatgaaggtgcatcatctaactgggactcgtcatctccggcttccagactctcagttctctcggatttattggtttcttcaaagtcccgtgcacatgttcccangatcttatatcacattctcgtcttaatccaagggctagnagagtctcggagaagggctttctagaatccnctttcatggttcacctttccatgtttggcttcacagcggtttcacgagactctatttggagaactc

SEQ ID NO: 661186 - DNA, 809 bp, Homo sapiens
  misc_feature (164)..(164): n is a, c, g, or t
cacgtatccaaatggcagctactgacttcatcctggattgccgtcggtagccattttcatagtccgaccatagttcattcaacaggtagaaaccctacgagcattatagtagtgagaacctatgtttgccagtatttgtagctattgcttttactatctttagngtatgttccggtcccacatgcaaggaagtgaacgatctaaatataaagaactcgcattgttatcaaatctatgtgaaggaattcaaggaagacacaagactcttaccaaacatgagtgtgcagattacatcatatgtgcgacgcataatgccatgaggactagaggccatgacttgtttcagaaagatggcagagcagttctttggaaacccgtagatacatgagaagtggtcgattccagacccagacatagaatgtcttgaagcaatagactcccatttgagactttccggacatacgcagcagcatacaatatttgcatcgagcaatgggaaagcagtatacgctcatgcaataggaagacctatgactctttccaagatgaacttgaggattacatcaaagtgcagaaagccagtaggacctagatccaaagacttgtttcaggaatgatgagagagaactctgtggatactcatgggtaccgagcaaatggttgattctggaccctgatcgagaatgtgtgagcaaggatcttcacgatgaggcttcccgagactaccaaggaccataccatatttcaccagttggaaagccagttacctcaggtgggctaccgaaccattcaaagaggacatatgattg

SEQ ID NO: 661187 - DNA, 451 bp, Homo sapiens
acggtcagcttccttcttagtgtcataagttctcatcatttagctcccacttacaagtgagaaaatgtggtagtgggtattctgtacctgcattagttcgctaggaataatggcctccagctccatccatgttcccacaaaatacatgatctttttcttttttatggctacaaaacattctagtttttgaactgaagtattattatggctgggtgcggtggctcatgcctataatcccagcactttcagaggccaaggcaggcggatcagttgaggtcaggagttttgagactagcctggcagccatggtgaaacctagtctccactaaaatacaaaattagagagaaaccccatctgtactaaaaatacacaagatcccagctcttagggaggctcacacctgtgatcccaccacttggggtggcagctgcctgtacttccagctactca

SEQ ID NO: 661188 - DNA, 294 bp, Homo sapiens
tcaaagagatgcccatgaatacagggtctccatctctggtggattcacgatagccacaaacttcttcccatcaacaggtagaatctatttcccttccctgtgtcagggctggccttgtgacttccttttaacacagcaaaagcttcaggcttctgctttctgtgccttggaagccatcacagagaagactagctactatgagaccaccatgctgtaaggaagcccaaactagccacagaacagggagagacgctgcacaaaggaacactggcggcccagaagtgcgcctgggtg

SEQ ID NO: 661189 - DNA, 290 bp, Homo sapiens
acttggggtggctggggtggtagggtcgtttaaacccaggggttcaaggtttgggtaaacccttgtttaagtcccccccctgcagcctgggtgacaaagcaagatccttcctttccgggtggaatcccccaggcctgcccaccagtaaatggccccgctgctaacccccaagatttatagtgaatacccaggggggatggtgagttatatccttttgaaaggggcccaactgggccccaaaactgatgtttatgatttttttggaataaacgtcgaaattaactctccta

SEQ ID NO: 661190 - DNA, 542 bp, Homo sapiens
ttgaacctgtgagacagaggttatggtgagctgagatgtgccactgcactctagcctgggcaatggagcgaggctcatctcaaaaaaaaaaaaatggtcctttatgaaataaaaccaattagtatgacactttaaaaacctataatagcataatcgtacaaggccagaagaaggacaaatccctccttggtggtctaaaaaaatattggaaaccaggtgtggcccagtaagagtatatgcgtaggtgaatattctggagttaaagttggcagtggctgggcggtggcggatcgttaaaatagtattataaaatggattaaaagcctcataaaggctcatcccaaagggttacatcattatgctattttggggctcaatgggtttgactttggaataccttttacgcattatatggggggctgggtcccaagttggattaattgtagctaaatggattggtcagagtagaaaatcagagatttggaaaatgggacataaattggtggggttagaggcattttctggtaacacccatggtcatt

SEQ ID NO: 661191 - DNA, 312 bp, Homo sapiens
ccccccccccgtttttttaaaagggggacagggtccccccggtttttcacccctaggggggggggccaatggggggtgcatgggctttctgggtttccccttcccgtttggcccaaaggggatggatttggggtttggcccccccggcccccctttttggggttagggggggtgggggccccccccccttcccccgggggtggcttttttgtttcccgttttggcccaaaagttttcccccctcggggaatggggtttaaaatttaacccccgaatatgctttttttttttaaaaggttttgggggttttta

SEQ ID NO: 661192 - DNA, 788 bp, Homo sapiens
tattaatatagacttatgtgtacacgttttatagaacatcatatgatccttcaattcttatatctgagtttaagctcttaattttttttgttttttggtaaattcccgggtactctagggagtgcagttaagagaatggagccaaaattacatgcatagtcgttaacgggggtacataatccatcagccactggaattggtacacagtgacacgtgagggtgattggtaccatagaagtccatatttggacatggctattatataacggcttcttaatctcctatctttgctcagtaatactatcactacacacacaaattttcacttttggtaattctagtatcccccttccaaaaagaagctggactagagcggcagggatcagcgacgacaacagaggaatacactggtcaagaaaaaatacctccggtctgggcttttaaaccaggagcagactcaaccactcccaaacaccatccatcaacggaccgggacagcaccaagctagcccccagaagaaccctactaccatggccaccactccggacatgtccatggccacggacacgcccccagggggacctctcgcagcaacaacacacgtgcgcccaacacggtgtccaccaaaaagggggggccaaaactcaagccctccacaagccaactcggccaaaacacccaccaactggtgggcaacaaaccacagggtcaccaagtcggcaggacaaccaacaacagcaacacgaacccacaaacacaacgacacaacacacaacagcacagagca

SEQ ID NO: 661193 - DNA, 235 bp, Homo sapiens
  misc_feature (3)..(3): n is a, c, g, or t
ttnaaggctgttttggtgtctctgttgtcaccaagaaacatccagaatagatttgctgcagtaagtatcaaatctaccggacaggaaggataagccaccccgcagctcagtgagttccttggaaagccaatctggtagacgaagtgctggcctctgagaaggtgtcttctgtccgctgtccttcatgggccccagtgttgctctcagggcagttcttcctggcacattattcttc

SEQ ID NO: 661194 - DNA, 333 bp, Homo sapiens
taacaacccaggttcagattttccccttcctcatggccccggtgtgtgatgttccccttcctgtgtccaataaacgaagcagtttagtgtaatcaacctgcaaccaggtagctgactggtcacctcagggaatgttgccatatcagggactcaagttggtctacgttgctggcagattaaggactctgcagtggctgtatccaggtcagctttgctctgtcagctgcagagaaggatgcacacactgtggcaggagcacttcaaactggtggtcctcttcagccagatgaggctggccaacttccagacagactttcaggagagtattcagaa

SEQ ID NO: 661195 - DNA, 405 bp, Homo sapiens
agtcacagaaagagaaagccagacctgtgtatagactcaatggttggtataatgagcatcactacagcttcctgcataaacacacatccaggtgacaaagaagacggctcaggcttaaaacagctggtaattcacagatggctaaagagcattcacaccccattacagacatgtatataacaagaaaatttaccttgtaatttcacaatttttgtttgcctcttcttctatttttacaaataacagctctgcattcattaggatggcgactatattaaaaacaccccccccccaataatcagaacatgtccagttggtgatgatggagagaagctgcactattttcacactattggctagagtgtaaatcctctggtccctttaaaaattgaaggtgccgttcac

SEQ ID NO: 661196 - DNA, 911 bp, Homo sapiens
  misc_feature (432)..(432): n is a, c, g, or t
cctggtacggctccggattatcgggagtcgccgcccggatgcccggagcctgctgcgggccccagcgacccgcccgtcattggggacgaggacgacgatgagagctgctccggtggagtctgcggatcacagaagccaacctgaccgggcacgaggagaaggtgagcgtggagaacttcgacgctgctcaaggtgctggtgcactggtgagcctacaggcaaggtgttcgctggtgcggaacggcgggcggtgcacgacgctggggaagctgtactgccatgaaggtgctgcgcaatggcggctgctggtgcatgctgctgccagagacgcaatgagcacactgctgcaccgatgcggctcggatgctggacggctcgtgcgccagtgagcccttccgtggtcactgctgcagctacgtctttccagacggnatgccaatgctgcagcctcatcctggactattgtgagcggcggggagatgttcacccacctcgtagcagctgccatgtacttcaaggatggctgaggtgcgcgtgtagtgggggtgagatcgtgctggccctggaactacctgcacgaagctcggcatcatttaccgagacctgaaactggagaatgtgctgctggactccgagggccacattgtcctcacggacttcgggctgagcaaggagtttcctgacggagggagcaaagagccggaccttctccttcttgtggcaccatcgaggtaccatggccccgaaatcatccgtagcaagacgggggcattggcaaggctgtggacttggttggatgccctggccatcttgcctcttcgagcctgctgacggcgggcctcgccctttaccctggagggcgagaggaacacgcaggctgaggtgtactcggaggatcctgaagtggcacc

SEQ ID NO: 661197 - DNA, 338 bp, Homo sapiens
atgcactgcttcggatcggtggctcactgcccataatcccagcgctttgggaggcaaggcgggcggatcacgaggtcaggagatagagactgtcctggctaacacggtgaaaccccatctctactaaaaatacaaacaattagccggatgtggttgcaggcacctgtagtcccagctactagggaggctgaggcaggagaatggcgtgaacccaggaggcggagtttgcagtgagctgagatcgcgccacttgcctccagcctgggcgacagagcgagactccgtctcaaaaaaaaaggtgaaaggaaaaaaaaaggaattctttccccttagttaaa

SEQ ID NO: 661198 - DNA, 986 bp, Homo sapiens
ttgattccagctgtctgagatctcacatatgctccttatctgatctcgagaatttgcccccaccataataaaggtgaaaataaagaacagaaggacaagagctcataactcgtaataaaagccacccaatctccttaggttatgattaaatcacatgtgctagatggatctacttgtggatgatagcggttaaagagtccttgattggttatagaccagcagacagattccaaagaattcacatgacatcagctaagttgcaccaactttgaagtctgatattcctggacagtttctctgcgtttagatttcatgggagagaaacgattatgatcgtcagcaaattgtatcttacggttggtatcaaccaaatggagtgacttagtgtacatgaaagcgtaaagaggatgtgtggcatctttcactttgggcttgtagaagtacagacttttagtgtgatttgttaaaatcaagaaaaaccttggtgaagtcgtgtgtgaaccttaaggtctcagataggttaccgagttaagaggacccgtatcacagtaatccgggtcctaggtgcagcagtgtgatgccccagggacctttgttggccacttgcactatttaagctatgctctgccttgggatagcatatgtatcgtaagtgatgctacagaatgtatgtgaagtttcagaagaagatggggcagggttctgaaaatgggacttaatatctagttcagattaatagaaattgtggaactatgtaatagaaagcgtgttgtttgctggaacgattacagtcgagatttaaatacggatgtgaatcgaagaacatagaagagaaaaaagggggtgataaaaacgacaggcagaaagtaccattgtaaaggcccagggaggttaaagaggagggggtaagagtaggaaagagaaatggagccactggggaagaaacaaaagagaaaaagagtactggaggggataaaagaaagaac

SEQ ID NO: 661199 - DNA, 274 bp, Homo sapiens
gtggttgggtactcatgaatgggtggttgactccgtgagaggggaagaggtggactgctgaggtctgaggggttgaggactcaggcggaggttggatgtggtcaactcagcaatcggtgctgtgtttgtgttgggtggggggccctgtgcttccatgtggtgggtgttggggttgggtgtcaccgtagtggtggtgctgatgggtatcatggttggggtctgtgtgctgttgggtgtgggggttgcggtcaccgtagcgggggttgttgcgggt

SEQ ID NO: 661200 - DNA, 259 bp, Homo sapiens
  misc_feature (108)..(108): n is a, c, g, or t
gttgtggagccttaacctggtgatgtgcggatcttctaatgaatagagcatacagttggaggagcctgtggggagagaggaaactgggtgagctagcatgtctttctnttgacgttatggattgaataaacttgttaagtttggcatggaggagatagtttacggctttcaagtggcaaggacatgcagctgcctgtcaagtgttcatgagtgcagacatggcccatcttgagaaacttgtggcttcaatgcagcttta

SEQ ID NO: 661201 - DNA, 104 bp, Homo sapiens
tgacgcttgaatgtttgtgaagagaagacaagaaattaaattccgaaataaaaatcttctagacataacctcagacctagataaattttatacatttactgttt

SEQ ID NO: 661202 - DNA, 491 bp, Homo sapiens
  misc_feature (13)..(13): n is a, c, g, or t
gttaaggttctcngagaagacagcagagctgctttccgcctctttgagaccaagatcaccaaagtcctgcacttcaccaaggatgtcaaggccgctgctaatcagatgcgcaacttcctggttcgagcctcctgccgccttcgcttggaacctgggaaagaatatttgatcatgggtctggatggggccacctatgacctcaagggacacccccagtacctgctggactcgaatagttggatcgaggagatgccctttgaacgcctgtgccggagcacccgccagcgggcagcctgtgcccagctcaacgacttcctccaggagtatggcactcaggggtgccaggtgtgagggctgccctcccccctcccttgggaggaccttgaacttgggacccataaagttgaaagccttctggggccccttttattaacccaacctggggcccgggcatattaaaggcttttggcagcaaagtgtcagtgttggca

SEQ ID NO: 661203 - DNA, 143 bp, Homo sapiens
agacatgatagaatcgagctggtaccgactgatctaacagaaagtgaaacaatttgatgtgggggcttctagattataggtagatataacgatttgctgatgggcaattggttgaaagagtacttatcgatagaagaggaatg

SEQ ID NO: 661204 - DNA, 233 bp, Homo sapiens
ggacttacgcgctgtcacagtatctgaagtatgtacaaaacacactcatcaacggatgtcctcttctccttttgtaattgctggctgaaaactgatcctcatgcacgttaacacccatagcgctcaattcttatggatatgcagacagtgttttggggaccaccgtggagaatctgtttcaaactaaggcgtgagcttctaagaactaagtcactaagacatcagaactcaca

SEQ ID NO: 661205 - DNA, 406 bp, Homo sapiens
acatagtctgtatatgacgaatttttctttacagtctttctagggtgtgaaatcaggtaataaaacaaatggacgaaagctacagttttctttagaaggtgctaattaatttgacgataccagttttcacgggaagaaatgtaccgatgatctgtgcagcatcttgactgggctttctgaggagttaggagttctttttcagcagtacgcacaggtacattccttctgttgatacacaatgcttgtacgaactcacagctataactttgtaatatcacaggagtcccttacccccagtagtatgtctaccatatattgtgtttacgtccgtttgtgactagggagaagggcctaaggtttaacttgatactcagaagtctcctctccgaaagattaagaaccacca

SEQ ID NO: 661206 - DNA, 86 bp, Homo sapiens
gacaaaccagtccgagagccttaagtgacattcccaagtctccaaaacaagccatccagcccaaggagggtgacattcccaagtcc

SEQ ID NO: 661207 - DNA, 1716 bp, Homo sapiens
gcccagctgtggtcgccaggaccccccagagccaagaccttctccagaaggtgacccttccctgccccaacgacacaatgtcaagcctggtgccctgaaatcacccctggaaacacatccatgaccatgaaagaatgaccctagctctacacgcaagctcccagagtgcacacatgagatgaccacgtcagagagacacaggtacggtgaccatagagacacagccacacaccgacaggacacgacgatcccatcattccatcatgacagcacacgagacagcacggaaccccagacaccaaacagccacatgggacacgcaaccgggactagccacgaaccattacccatcggacaaaggaagacaacagaccaaaaaacaaatactcacaaaacaaggaaccagtgaccacgacacacatacagaaaacagaacccagtacccaaaagaaaacccaacgacgagctgacacacacacgagcaagagaacgaagaaaacacacaacccaaaagcacagacacaaaaaaatgaacacacgaagcgaccaaacagaaacacgggagaccgccacacagtacacactaacaacagcaacacaccacacaacacacagaacaagaaagcaccacgcatgggacacaccacaggaaacagcacaacaaaacgagtccaacaccaggacaaaccatgacaaacagaaacaacaaaccgacacaacgacagaccaacacagaaccaccacaaagagacaaacaccagacacagacgacacgacacaacacaacgcaatcaaacaccaggacacgaacaacaaacacaacacacacaaacaaacaaccaaaacacagagacaaaacagcagacaacaagcgagaagccacaacacgcacaccacacagaacacaacaaacacacaacacgaaccacacaggacaacaaacacacgaagccacaacagctacacaccacacacaacgacacgaacaaagaaaagacaacgaaacaaaacacgaacagaacacaccaaccaccaatccagaagaccaacacaaaacacaaaaacagacacccatcgacaacaaagacacagacacacaaacaacaccacaacacacacaccaccacaaacaaacacaaaaaacacacaaaagcacaaaagcacagcacaacaaacacaaaaacaaagaaaaacaccgacagcacaaaccgaaaagaaaacagaaaagaaaaagccacacacacacaacaaaacaaaagaaataaagaagacaacaacaaagcgatcacacaaagcacaaagcaacaaaacaacaaagagaccacagaaaacaaaaacaaagcacaatacaagaagagaaatacagcagaacaacacacacacaacagcgagaaaaagcaaaccaacacaaagagaaaacgacccgaagcagacacgagtacaaaaaacagtacacgaagacaaagacaagcagaacaaacagaaacacgaacacaacaacccagcacaagaacaaacacacaaaacagaacaacagcacagacagacaccaacaacaaagcaaacaagcgaaaaaacaagcacaaagagacaccaacaaacaagaacaagacagaacaaacacaaggaaacaacgaaccagacacaaaacaacaaaacaaaaataaagacccgacagacgtaaaacagaaacatgagaaaaagacaaaagaaaag

SEQ ID NO: 661208 - DNA, 152 bp, Homo sapiens
tatcatttgaaaaagtaaaatgaatgaatactgttcatggtccacatgtattaaacaaaaaacatgtcaattacttggtggaaacacacagaacctggtacctgtttttttttttttttcaccacgattgtctacacctttttaagctgcag

SEQ ID NO: 661209 - DNA, 250 bp, Homo sapiens
ttcgccaggtactacaacaggcttgtgatgtcagacattaaatagtgtattaaaactcgcagtggaacacgagttgagctatgtatgcgctcgatctatttcgctgggcgtcgctccagtcggtttctgcaactcgtcgtacgtgaggtttataatctctgaaaggtaccgaattcatgtgagtggtgaaggaccacgacctagtgatgggcatcctagtatataataacttatcgcatcggtagaatgc

SEQ ID NO: 661210 - DNA, 343 bp, Homo sapiens
catattttgggggtacatgtgttaacatatttagacattgttatggataactcttttaaggaataaatttatttgggcaagtaaattctaagagtgattttggaatttcaggtttttttaaaaaatgatttatatatggaatcccacttgcctctcttactttgttctttctaccctcccctttcctattgcttcctcctcacaattcatacccttcttggctcctcctcctttctcctttggttaaagtgtattttaatttgttatatttattaaatagaactttgtggacctggttgtcaatttagagactgaaaataaacttgtttcggaaataaaaaaa

SEQ ID NO: 661211 - DNA, 1804 bp, Homo sapiens
  misc_feature (1457)..(1457): n is a, c, g, or t
gaggacggggcacaaaccctgaccatgaccccccacaggctgctgccaccgctgctgctgctgctagctctgctgctcgctgccatgcccatgtgaggctgccttgtgctgctggtgcccatgtgctgctgggcaatggtgtgttgcatgtgctggtgttgtccatgtgggtgcttgctgtgggagggagtgagtgatgtgggggtctgccatgcctgatggtgcttggctgcgtggaattgcttttgatgtgtgcttggtctcaggtgatgtgtgatgtggtgcatgtgatgttgcgtggtgtctacaagcccccttaactttgcggcccccagtgactttgcagtgttgcccaattccgtggcccatatgtgatctgcactgatggtgcctggccttttttgccgtgggccgggcttgcattggcttcggggccctgaaggtggcgcggtctttgcccttttcccggtggaccctggctgccggccgcttttgctttgttctcgccactggatgcggcacggaacttcccttacgctcgggacgcaggtaaagacccgcccaatatgctatggtgctagctttggccccaggccccaaacgatgtggatttggttagaaaacgccttgcaatgtgagtgaaccctaataccatggactggtggaagattcgcgatgggggcgatccctttcctttatcccgaagtggccaccttttctcctaatggccccccgaataatttcttttggcgtgggagttttccttccccaaagagggcacacaaagcttatgagcgcaatttttgtgggccccccataatttagcccgcggggttaaacgagaaacgacatttcctttggggcaacctgtccacagggtgtaggccagcttatgacgcaatggacaaaaatgccttcccacaacgtaagacagttagggagggtggattccataagccgcgggaagggggggtgcgcgcttcaaaagaagagccgaagcatattcatattaagcagtgttgttggccacgcacaagaattttttgtgttgttggaaacccccaaatatgttccgcgagagcggcggcccatttctatcacatattacacgccgcgggtgctgacaatacaagtgtcgcgtggtgcgccacaggtgttttgtcgctgcgttgcttatttctagctctatcccacaccaaaggtgggggctgggccatagtgtgccggcacaccgcgaagttgcgtactgttcacaccattttatgtccgtattgggggagattggtattggattagcgggcgactttccggggaatcttgcgggcagcaacaagtggattaccgcctttctgcgccctagtggtggcgtcttcattcccaaagagcagttttggcgcagaaagtttggggagcacaaggcgatatcccgtatatcccgtttggtccgcacacagagntttgagggcagaagatgtgataaaagacgggggggaccttaagacaagcgcgttgtggtgcgcggggcgaacctatgcgaagggggggggtgcactttagtgacatgggtggtgacccaataccgctgtggagccacagctgggccaacccacatttttgctcaaggcgctttgatacaaatttccagcttcccaaaccacaataaaatagcgaactcgcggaaggggtggcgcccttccaaagaattccacaaccccttttctaaggtgggcacgccgtggcgccacctatatgttggtggccccaccattacaaccgcgtccttgtttttttgtgcatccaactc

SEQ ID NO: 661212 - DNA, 122 bp, Homo sapiens
ctggagcttctggcatacctggagcttctggcatacttgaccttctggcatacctgtgaccttctggcatacctggaccttctggtatgccagaaggtccatggtatgccagtgtggatcct

SEQ ID NO: 661213 - DNA, 490 bp, Homo sapiens
catggtggcgcatgcctgtaatcccagctacttaggaggttgaggcgggagaatcgcttaaacccaggagggggaggttgcaatgagccgagattgggccattgcactccagtctgggcaacaagagcaaaaccctgtctcaaaaaaaaagaaaatcaactaatgtaatacatcacattagcaaaatgaagataaaccacatgaacttctcaattgatttagcaaaaaaaaaaaaaaaagggtttttccaaatttcaacccccttttcgttgattaaaattccctcaattaaccaaaggagaagggaatttcccttcaacttggaaagagggccattttttataaacctctcacaggcataattattcggatatcccaagggcggtggaaagagactgtgaaaaggcttttcctctctttagaggattaacaaaaccagaggaccaaaaggattgcctggtgttttcacccactttcttatttcaatttc

SEQ ID NO: 661214 - DNA, 690 bp, Homo sapiens
  misc_feature (459)..(459): n is a, c, g, or t
ttcgcgccgtgagatagggtcaacgccgacgccgggttcatcgagcagcaacactttcggttcgcccaccagggtacaggccagaccgagtttttgtttcatcccaccggagagcttgcccgccagcgtccggtaaacggcccaagagacgtaaactccagcaggcgagcaaaagtttgcttacgtgcctcgccggtgacgctgcgcaaatccgcgtacagattgaggttctccatcaccgtgagatcttcatacagaccaaatttctgcggcatataaccgagcacggcgtgaagcgcgccgctcgtttttgatcggatcaaagccaatcaccgtggcactgccgctgtcgggtttcagtaatcccgccaacatccgcatcagcgtggttttacctgcaccgtccggccccaccaaccccgtcacataaccggcgtgaatggtacaatcgagcggccnacggcgggcttgtccatgcccggaaaccgttttcccaggccgttcaccgtgataacggcatcattcatgtcctgcctcgtcaccgaattgtaccgtcactgcattccctgcgtaacgcatcatcggcgtcggtcaccacaatacgcaggcgatagacgaggtcggtacgcagatccggcgtttcgacggttttcggggtaaattcagcagtcggcgaaacgaaaccaatct

SEQ ID NO: 661215 - DNA, 240 bp, Homo sapiens
tctacgaggactccccagtccaccacctgcgtacgttgcagtcattctgaaaggagctttccctgtcattcactttccaaccatgcttccaatcttcatccaactgctcacatttgtcatttttccaacaccaagtctacacattctgcaatcaacagcagcagtagtttttttttttttttttttttttttttttttttttttttttttgtaattagaggggggggggggggggggggg

SEQ ID NO: 661216 - DNA, 211 bp, Homo sapiens
ccccccccccccggggggggggttttagggccctttttaaaaatggggggggtttccaaaaaccttttttttcccccccctgttgggggggccccccccccccccccccccccttcttggggtgggggggggggggtttcccccccccccctgggcctttttttttttttgggtttttccgggggccccttaaacggtccccgttttttta

SEQ ID NO: 661217 - DNA, 419 bp, Homo sapiens
cgcagcatggtacaaatcatcaacatcctcatacacgtaccgtcatactcctcaacctcctcactgtcatcatcctcctcttcatcactgtctaccatctaggcattcttgccattctttgcccccttggctgggatggcagcacacttcttaccaggagtagctaccaatgctttgcctggtgtggctcccttctggccaggtgtggtaactgctttggctggtgtagctgtcttcttggcaggtgttgctgctgccttttagcctggagtgacagctgctttcttggctggtgtggcaactgcaacctttttcgttggggaaacgaccaccttctttgctgaggtagcagcagccttcttgcctttcttctgaggtatgacgacctcttctccactgctatcatcttcttcatcttc

SEQ ID NO: 661218 - DNA, 327 bp, Homo sapiens
tccccgtacgcccaaaaacaataatgaagtgttctgtgtgctaacaacatagcttttaaaaaaaaaaaaaaggtaaaacaaatttctgcatttttataaaacttgataaaaaatagtttttcaaactgtccagtccccagaggtccacagttttcaaaaatgcacacacttcatttggcatctccagcaccttcagttttctgggcctggtctgtttgggcatctccattttctgcggggtttttcccctccttgccagcataagcttttccttttttcccttggggaaccttctctccctcctttgggcgtccggggggggacccg

SEQ ID NO: 661219 - DNA, 127 bp, Homo sapiens
  misc_feature (56)..(56): n is a, c, g, or t
  misc_feature (75)..(75): n is a, c, g, or t
  misc_feature (80)..(80): n is a, c, g, or t
tcggcgacttagaggatccccccggaagatggactcttcatcctattaagattaantgtaaccttaagtcagatnacgtnctctctctcctcaaaaccattcatctgtctgtccacctgtccaggcg

SEQ ID NO: 661220 - DNA, 112 bp, Homo sapiens
ccggaaaaaagagcaccaaagaagaaagaagaagacaagacaaaagaagagaaaaaaagacacaaaaaagacaagagcgacaaagggaaacaaacaaccggcaaacagaaag

SEQ ID NO: 661221 - DNA, 437 bp, Homo sapiens
ttatctttcttaaagtacagctttaacatcataaaaaaggattttaagggagtgatcaatcattctcacctaacctgacaatatcattagcatacgtatcctgacaataccctagaaaggtccttcttgagttgcacagtgaaaaattaaagggattcttgcaggagtatttagagaatcagaatccgcaacgcagggtcagatgtttcagttaaatgaaggactttgttcaaggcacaaacaagagtagggatattttgatggtatgaacaccaacccttggcctccgttccggcctgtttgcagttaaaggtcttggcagcctgtcagggagtggagccatgttattgattcctaaagaagggacagcatccaagggaaataattggtcttatttcccctcggagaggaattaaaaagaaagtatcaaaaaaaaa

SEQ ID NO: 661222 - DNA, 301 bp, Homo sapiens
cccagtctgaccccatcagagtatatcaatatgaaggacatgtgacagataaagaagatgccatctgctcccatcagagatgaatgaataaagaaaaggtggtatatatatacaatggaatatcaggcagcctttaaaagaaggaaatcttgtcatatgctacaacatggatgaacctcaaggacgttttactaagcaaaataaaccagtgacaaaagtacaaagactgtatgattccactcatgtgaaccatgtagagtagtcgaaatcacagaaactaattagaagggattgccagagg

SEQ ID NO: 661223 - DNA, 167 bp, Homo sapiens
atcagctcgtacccacagtgctggaggaggatgaaaagaagcggtgcctgggagtccataacagctcagagactgtggctccccactctggtccagacctatgtgctccagtgtggacccaagagcagtcacctaccctatcacctgtaagtctgggggtttggctt

SEQ ID NO: 661224 - DNA, 113 bp, Homo sapiens
catgagtctcgctgttgacggcccaggcagatatagtaggcctgactctcccggagagtgataaccgatggagtgagagacggactgtgacagtcaagagtgccatgcaggcg

SEQ ID NO: 661225 - DNA, 585 bp, Homo sapiens
atcacatgactgcactgtctcgtctcgacactagaggcccctgttgctgcagtcgcctggggtcattggctgatcccggtagtcttcccctgtgtagaccgtcgtcatccagacacacatgccattcacgcagcggccgtgctggtgacagtcattagggcagctcatgtcactgcagtcatagcccttgaagccttgctcacatacacatttgccctcgaaacagcggccccgactgtgacagtcattggggcaccgtagctggctgcagtcctccccagtatagccctcatcacacacacaactgcccattgacacagcggccatggccactgcagccattgggacacttgagctccccacagtcagctccagtgaaaccatcatcacactcacaccgcccgtctatacagcggccacgattgtgacagtcagcaggacacctcttctcgctgcagtccacaccggcaaacgcctcatcacatacacactgcccctcctcacaccgggcctgggtgtggcaggcatgtgggcaggtgggttcccgcagtcttcacctgtaaggcttcttcgcagaccaggtgc

SEQ ID NO: 661226 - DNA, 594 bp, Homo sapiens
agcgggcgggggcagggcggtgggcgccgggcggggccgcgcgctcgcccatcacgcggccgcccgagcccggagcgcggctccgcgcctcgttccggccgctcggggaggggtcaggtcatgttcccttccagagtccggcgactctgaggcaggttccgcgggcgccgctgggaggagccggagctgccggaggaggcggcccgcgtgctcctccggcagctctggctcctccgagcgtggctgcctcgcggggaagccggtccgtacaagaagctcgagcacgagaaccccgaggaacacggaaaaaaatggaacgacagaaccgacatcacgagagaggccgggcaggaaaaagagcagcgcggggaccggcaaccccgcctccgcgcagaggcacgatgtcgcacagcagaaaggtggtagaaaaggaggagcacacgggcgaaacggcgcggcgcaccccccgagacgaccagcggccagcgaagcccgccggccccgaagcgaaaaacacaagaagacaaaaaacaaaccgcggagcaaccagaaataagaaaaaagaaaatacaagggggtaaagacaataggaca

SEQ ID NO: 661227 - DNA, 139 bp, Homo sapiens
gactagctttgtgaggataccggacttgtgaggagacccagaacatgagttgttaaaatgccttccgcctctgtacaatcccagagttgcctcatcacactggctcccgtctgctgagggctgaggctgagcctgggac

SEQ ID NO: 661228 - DNA, 366 bp, Homo sapiens
aacaaatattacaaagggtatgatgaaaagatgcctagaggtaagagatgaaaatagacgtggagcttttatatccatcccaggcatgccaccctccaggaactttcatgagttcaactattcagaaacttcccacaccctgtcatttgcagtttttatagaagctttgttaggtaggcataattgattaaaccattgaccgctggtgatcaacttaaccttgagcccctttttcctctctaaaggatggggctagggccaaaagtcccaaccgtctaatcatttctggtgaccagcccccatcctgaagctacctaggagctgccagccatctggcaactcattagcacacaaaaagacatcact

SEQ ID NO: 661229 - DNA, 645 bp, Homo sapiens
  misc_feature (174)..(174): n is a, c, g, or t
  misc_feature (352)..(352): n is a, c, g, or t
gccggcccctgtatatatctggcgcttctccttagcctccttcattctctaggccaaaagtatagcatattctgcagcctcttctatatttttctatggtacgctgcttcttcagagcaatacgccgccgtattgtagctgcagagacacagtaggagtaacaaagacgctganatctatgggtgctttaggtcctagagtttctatacccttctattatattaagaggctttctatacaaacatactaggcgagacatacatctatctttagcagagattagaaaagtattgcagattctagctagctcttataggggcccaggcggcgcaggcactggtagtatcagtcnacgtcaggaatatcctatctctcctattttttacaattaaccaagtatgagaacgctcagatttgcatccacaatgcaaccacgaactgattttctctttctttctccagttctccttggtctgtaacaggaattgccccttactcagtagcaggcggacacggccatgggtcaagacaccctgcttcatggggaaacttgtttgtcgttcccaccactgattcggaccacataacccttccattcttcaccccgagcgtcagcagcaacttctgtggccatcccgaaatatc

SEQ ID NO: 661230 - DNA, 109 bp, Homo sapiens
ggcccatcagctcttcttatactgctcacctggtctcatgctgggcccgctaattcctgcagcgcatcgccagccggctctcatactcacgctgcttcccattgtcaat

SEQ ID NO: 661231 - DNA, 177 bp, Homo sapiens
aacatgtcatctcttctctctcccaacacacacatatatccccaagccatctgaaaatgagctgcagagcagatatgaatctttgccaggtacatcctcagactcaaaacattctctggcacaatcactcacactcaataaatctaactgctaactattatttagttagcataccca

SEQ ID NO: 661232 - DNA, 727 bp, Homo sapiens
gggcacaacactgataagtcactgtcatgctaacattttttgtaatgagctactttgacaatacttccataattttctcaaatgatacagattttgcctcatctctctcgctgtcacacacaaaacttttggccataatggggaaccttatgattctcccttataattgcaaaacactagaaactctcatttatttcacctcttctcttgcagacaagggaacaccccagacatggtatcagagatccacatgacaggcccaatgtgcctcattgagaacactaatgggcgactgatggcgaatccagaagctctgaagatcctttctgccattacgcagcctgtggtggtggtggcgactgtgggccgctagcgcacaggaaaatcctacctgattaacaagctggctcagaagaaaaagggtgagtggcatgagcaaagctctgccaagtcccttctgtccatctacacagtcagcctccatcacgaggatgtgaagagagaaagagatgaggatgaatatggaaagctaactttccattcacagtcgggctccttatcttcatgctgctctaagggataattttaaattcattaattattcccatgatacattagtttccctttcaaaagcacaaactgtgcctttcctaaaaggagtaagactgtaataaaaataattaatgtacataataataactataataaactacaatttttatgccgt

SEQ ID NO: 661233 - DNA, 893 bp, Homo sapiens
ggctgctgcaaatgcttggttcagatcgcagcggaaaacaacctgggagagggcgtcattgtcagagatcaacgttcaatatcatcgccctctccctatgactacaagcgccaacctggcaacctacagtagaagccagagatgtaggcgggaagtgcctggactcgctagtcaactgacgctgatggatagtcctgttttgcaaatcgccgcaacattgtgtggtcggagtagaatattcgtggaagagagtgagaacgctgcaacaacgctgaccgagccgatctgcgctgtccgtgggctggatcctaactctggtggaacgaatggatgaacgaatatagcaacaataactgcagaaatactggatcgctttacttcccagaggatgctacgtaggacgcatctctggagaggacttgaggcccaggtagtgtggccatcatcggagcgtagtgcagcgcgtacctgtggatgcgagaaagggacacatagcgagcgagggtcgtgccgcgatcgtaccctgctgcacaatccctgacatcagctaactacaacgtccgattccaaggcccagtcaggcgaacaggtgaccccgactgcagggcatccttaatagttctgagacgaagaccgaggcatgaagaaatgagggtgcgaggtactcgagactggagttgatgggagcagactgtgcaggtgacagttcttacagcaccccagggatcctggtaggaagcacgcggatccggaacattgtagccaagtacctcttgtcaacagtgttatccacgcgatgctgctgggagttcggagacgggtaacccagggcccgtgaacgtcattggtgggtcaggacagatccggaatacgccccggaaggacctaatcaa

SEQ ID NO: 661234 - DNA, 132 bp, Homo sapiens
cccaaatatactaaagtaggatcttaggcaatgagttatccaaggcacctgttacagactggaaaagattcattttctgagtttgcccgtactcccgggctccggatctggctggaaagtaaaatgagccac

SEQ ID NO: 661235 - DNA, 290 bp, Homo sapiens
gagaaggaatgcagggcagcctctggttgcagagagcagcacccagtttgacagctagcaatgcaattgtgactcagacctcacaagtacaggaaatgggttttgcccaacaaccaaaaggagcaaaaaaggttttgaacttggaaatttccaaaaaagaccccacccagtaaaattggtttttcagcctgtgagattttcagcagagaacccagtcaagtgtgtccagacgtccaacctacagaactgtgagataataaatagatacttattttaaaaaacaaaaaaaa

SEQ ID NO: 661236 - DNA, 216 bp, Homo sapiens
tacgatcgagctcggtaccgcatgtgctgtagccagcggagtgggaagagttttacccgtcgctcccgcctgcgcgggaacgacgcgtgaaaggatttaagacatgccgccatctaaagacacagtcaaggaatttgacttcaacgccagggatttcgagcgcgttcgcggcttgatctacaagcgcgccggcatttcgctggcctacagcacatg

SEQ ID NO: 661237 - DNA, 1037 bp, Homo sapiens
  misc_feature (280)..(280): n is a, c, g, or t
  misc_feature (387)..(387): n is a, c, g, or t
  misc_feature (395)..(395): n is a, c, g, or t
  misc_feature (399)..(399): n is a, c, g, or t
  misc_feature (402)..(404): n is a, c, g, or t
  misc_feature (410)..(410): n is a, c, g, or t
  misc_feature (442)..(442): n is a, c, g, or t
  misc_feature (469)..(470): n is a, c, g, or t
  misc_feature (483)..(483): n is a, c, g, or t
  misc_feature (487)..(487): n is a, c, g, or t
  misc_feature (528)..(528): n is a, c, g, or t
  misc_feature (530)..(530): n is a, c, g, or t
  misc_feature (545)..(545): n is a, c, g, or t
  misc_feature (549)..(549): n is a, c, g, or t
  misc_feature (556)..(557): n is a, c, g, or t
  misc_feature (564)..(564): n is a, c, g, or t
  misc_feature (569)..(569): n is a, c, g, or t
gactttcatgctagagggtcatgatgatggaataccgagtgtgacagggtgcaacagaaggaaacatggcgtgccatatagtgtttgagtccattggcaagtttggcctggccattagctgatagcaagaagcgtgatgaactctgccttatataatgtcggatagctagggcacagagctgatcatcatatgaccgatatccgatggagtagcaggacatagtaggtaggggaagggactcattttctcatcccgtgggtacagaaaccaattatcttngactgccgtactcgaccacgtaatgtgccagtcatcactggtagcaaagatttacagaatgtcaacatcacactgcgcatcctcttccggcctgtcgccagccagcnttcctcgncatnatnnnaccagncatcggagaggactatgatgagcgtgtgctgncgtccatcacaactgagatcctcaagnncagtggtggctcncttngatgctggagaactaatcacccagagagagctggtctccangncaggtgagcgacgancttnacagagnngagccgncaacnattggggctcatcctggatgacgtgtccttgacacaatcgtgacgctctcggggaaggagttcactagtaagcggtggaagccaaactaggtggctctagctaggaagcagacgagggccagattcgtggtggacaaagggctgagcaacggaaaaaggcggccatcatctctgctgagcggcgactcctcaggcagactgagctgattgccaactcatctggtccactgcaaggggatggcctgatcgagtctgcgcaagctggaagcatgcgtaggacgtcgtgtaccaggctctctacgctctcggaacatcgacctatcctgctcagtcggggctagtccgtgcgtcctccagctgccccagttgatgggcccaccctgtactgcacctccgtgggctgactggggccacaggcccctgactgattcttaacacagcttccttctgctcccacccagaaatcac

SEQ ID NO: 661238 - DNA, 671 bp, Homo sapiens
ggcggcggcgccagcgccaccgtccggtccacccgccagcccgcacagccgcgccgccgccgagcgtttcgtgagcggcgctccgaggatcaggaatggggcttcgggcgctgggcgcgctccgaacccggcgcacgtaagagcctgggagcgcccgatgcctgccctgtgctgccctggatgccccatcgcctatggacctgggagatgcttggaaattgcaacctgcctgttccccgtaggagcctgctgcccccgggaccccctgtgcactgtgctgcaccctgtgtcagcatggcccccggatgagagactggctgcctcccgaactgcgcctgatccctgcgttggcctgtgtgcatgctgccacgctgatgccccctaggctgaccgcatgggccacatgcatgctcagcctgccgtgtgccccctctggaaaccatgacccccggctgctgggcccatggatgccatggcctatagggtcctggtgcctgcgcgtgggccacctcagccgcggagggcgcgcaggctgctcttcgccttcacgctctcgctctcctgcacttacctgtgttacagcttcctgtgctgctgcgacgacctgggtcggagccgcctcctcggcgcgcctcgctgcctccgcggccccagcgcgggcgtgcagaaac

SEQ ID NO: 661239 - DNA, 457 bp, Homo sapiens
  misc_feature (83)..(83): n is a, c, g, or t
cagaaatcatattttatacataatttagcattatcatacatcttggctaaataataccatacaatcgtagtggtcagaagagngggggggggggggggggaaggaggggggggggggggggggagggggagggggggggcggggggggggaggggggaggggggggggggaaggcgaggggaaacggtgcacgagtgagaaacagatggtccaggtgcgtacaacctgaagagaaaagaactgggtttaatggtttaagaaaaagcacagctttttcaccttcatcttgtataatttcatagattggctgacttagggtctttcaatagtttgggaattgaaagattcttgttatatatagctagtttgggtttgtttttgttttaactatgttgaaggttaggtgagatgggcaaataggcttaactattttgaaggttggatgaaaagagatggg

SEQ ID NO: 661240 - DNA, 184 bp, Homo sapiens
tacgcattgaaggccaaaattactgcatactgagggtcatgttccaacatcactgaagccatcataacatcttttttatgcactgggccaatgttaattccgtgcatcagggcacttcgtgatgttttcatgcaattccagctcgagcttccaaatgaacccagttgtagaaacttgacacggt

SEQ ID NO: 661241 - DNA, 505 bp, Homo sapiens
  misc_feature (51)..(51): n is a, c, g, or t
  misc_feature (102)..(102): n is a, c, g, or t
  misc_feature (105)..(105): n is a, c, g, or t
  misc_feature (465)..(465): n is a, c, g, or t
  misc_feature (476)..(476): n is a, c, g, or t
  misc_feature (491)..(492): n is a, c, g, or t
tcccccatcggaacccaatgagcccccatgattcaattatctttcactttnccccttccacaacacataggaatggtgggggaacaattcaagatgagattnagncccgacacagagtcaaaccatatcaccctgcttggcatcttgccaccaacaccctgaatctgttagaaatgcaaattaaccaagtgccagaacctttcatggtttcctcttgcctaggaatggagtcccagatccctaatgcatctcggtgccctgagtgccatggctgctgctgcacttcagtatgtctgagaccagtgcagccactgggacttctctcccttcctttccctgcaagctgccttcacgcctggctcttctgcaccacctttcctctgtgggacttgtttatttgcactcttttgtttaccagctcctaagatctttgaggcttagtccagcccatcgatctggagtagnctatgcttttncttcctagagcttgnngtatttgcaatga

SEQ ID NO: 661242 - DNA, 246 bp, Homo sapiens
gatctgatagctgatgaacagctcttcttaaattacaaacagaaacacaaagaaggaatgaggaaaaaccccagtgacttccaaggtgtgaagctgtcccctcctccctgccaccctcccagtgctcattagctgtccttgtgaaggtggcagagtgactcagagtgggatcagtctccagtggtgccctgtggctgaagctgggtgaggcagatgagtccttgaggccacagacgctgggcaacc

SEQ ID NO: 661243 - DNA, 389 bp, Homo sapiens
tccttactctctcacggacggggttttgctgtgtttgccaggctggtcatgaactcctgagctcaggtgatccgcccaccttggcctcccaaagtgctggggttccaggtgtgagccacggcgcctggcccagaaccttaagttcttgatgtacagagaacggcagcgtcagtgaagtgtgatttctgtttttttgtttccactaattgtgagcaaacattagggtggggactgcgctgcttgtgtgggtcccacaggcttcttggagcacagtgtcagcagagaaggggaatgggggtcctcattgcggggagcagttttgcctgggatgctgtgagtttctcagagggaagctaagtggacagactgttctggcaagagggaaggat

SEQ ID NO: 661244 - DNA, 347 bp, Homo sapiens
gtgagttgactgaacgaagcctacccgaagttcatgaaagtcgaggatatacggaccgctacgccttctgagccctcctttccctagtggggcgttgctagagactgtgtgtatagtttacacacccaacaccatcagtgccagctgagtactgacatgtggatagagggtgactgaataattaagactggattatgaaagtcaacagctctttcccctcagctcgttctcctgaaatgactggcttcccctcaaattggcacgtgagattagctacacttctccccagcgggtacatgatacatgatcccaggttccagtgtagaagctgagtcccccattctcga

SEQ ID NO: 661245 - DNA, 760 bp, Homo sapiens
  misc_feature (121)..(121): n is a, c, g, or t
  misc_feature (194)..(194): n is a, c, g, or t
  misc_feature (270)..(270): n is a, c, g, or t
  misc_feature (279)..(279): n is a, c, g, or t
  misc_feature (281)..(281): n is a, c, g, or t
  misc_feature (307)..(307): n is a, c, g, or t
  misc_feature (385)..(385): n is a, c, g, or t
  misc_feature (452)..(452): n is a, c, g, or t
  misc_feature (729)..(729): n is a, c, g, or t
ccagaacacaggggtcgtgaaaactaccccaaaaagccaaaatgggaaaggaaaagactcaaaacaacaaagtcgtcattggacacgtagattcgggcaagtccaccactactggccaacngaacaaaaaaagcgggggcatcgacaaaagaaccattgaaaaaattgagaaggaggcagcagagatgggaaanggctccttcaagtatgcctgggtcttggaaaaactgaaagcagagcgtgaacgtggtaacaccaatgaaatctccntgtggaaanangagaccagcaagtactaagtgactancaatgaagccccaggacacagagactttaacaaaaacaagaatacagggacatctcaggctgactgtgctgtcctgantgtagcagcaggggtaggtgaatttgaagctggtaactccaagaaagggcagacccgagagcatgcncttctggcttacacactgggtgtgaaacaactaaatgtcggtgttaacaaaatggattccactgagccaccctacagccagaagagatatgaggaaattgttaaggaagtcagcacttacattaagaaaattggctacaaccccgacacagtagcatttgtgccaatttctggttggaatggtgacaacatgctggagccaagtgctaacatgccttggttcaagggatggaaagtcacccgtaagatggcaatgcagtggaacacgctgcttgagntctggactcatctacacaactcgtcaactga

SEQ ID NO: 661246 - DNA, 694 bp, Homo sapiens
  misc_feature (480)..(480): n is a, c, g, or t
caaaatgcccagccccaagctttagcgaatctttaacccccaaaattttacgcaatacttctgcctcctgagaagttcctcctctggaagccacaaactaaagggtttcttaaacccccccgcgcgcctttcaaaataaactttttccccgtgcgaacaaaaaagtcttttctaaaaacgcattgttggaagtcaacaggtgcaccccgcgcatcccccgcagtcaatagcccctcataaagggccacactaacttcttgtgaagtcataaaagtcaaggtctctctaccccgctttaagatacattttaaacattcattggtgaatgctaacaatatcttcatcccgtcatttttttaaaaaaggagtttatccccacgtgtcgcatcataaagaccccctttaaacctcctccccacgggagatcttgtcctcccttagcatcccccttttaccccctttacttaaccccgaccgcantatggaagaaatcactattggagcgagtattaggagtgaacccacttgtgggagaataatattaatacatttctagagaggggaaaatgtgaatgaccaccagaattcccggcgaagcgccgacatagacaaagaattcaaggcaggaaatatagcggggacattatgaaaactatacgaaacaccatccttctatacaaatcaatagtacaag

SEQ ID NO: 661247 - DNA, 253 bp, Homo sapiens
  misc_feature (141)..(141): n is a, c, g, or t
  misc_feature (148)..(148): n is a, c, g, or t
  misc_feature (155)..(155): n is a, c, g, or t
  misc_feature (169)..(169): n is a, c, g, or t
ctcccaagtagctggaattataggcgcatgccgccacacccggctgattttttgtatttttagtagagtcagggtttcaccgtgttgcccaggctggagtagatatcctgacttcgggtgatctgcccacctgggcctccngaagtgntgggatngcaggtgtgagccnccgcacccggctctatttagctttttaaaaattatttcctttcaagggcccctccccacaataaagatgctctccgacaaaaat

SEQ ID NO: 661248 - DNA, 403 bp, Homo sapiens
  misc_feature (3)..(3): n is a, c, g, or t
  misc_feature (20)..(20): n is a, c, g, or t
  misc_feature (30)..(30): n is a, c, g, or t
  misc_feature (69)..(69): n is a, c, g, or t
  misc_feature (121)..(121): n is a, c, g, or t
  misc_feature (127)..(127): n is a, c, g, or t
  misc_feature (309)..(309): n is a, c, g, or t
  misc_feature (315)..(315): n is a, c, g, or t
tancccctgagatggatcanttgagttatnactttggtaacctttacacagcccaataaccaaattaancatcattatctgagtttaaaataggctgtaaatctcgaagccctggtaatangcaganacttacaaccagggagtcataaaatgacattaaatgacacttggaaacacaacccagaaagtactctgaatgaatgggaaggaaggagaacgtcactgaaaggagagtaggtgggctcatccctctgtgtgtgatgcaaggattcttcaagtcacagcattttgctctaacatggccacttnaaatgnactttcttcatctctcttcacgttgcctgtgtctccttcaagactagacaattccttctttgagtattgcttgaaatactgcaaggaa

SEQ ID NO: 661249 - DNA, 639 bp, Homo sapiens
caaataatacgcgtcgtccccaatgtcacaaaaaaggaaagaaatacccagggaacgcggccgcccatatatatataaatcctatactctcatattagaataaataggctcgctcataaataaagggcccattaatttatgggtggggtttgccagcgccttggcctactgctttgtgaagggtaatttgagcaccaggtttccccctcagaagaggttccagtcaccagaagacactgaaccctcagctctataaaacctggagggacagtgaagccctattattcacagcacataagattctaggacacatatttggactttttcccacaagaacctcggaagacactccttccccccctctcatgaatactgagcttgcacacttgggcacctgccacagcgtgaggtcagggaagtgggttaatgctttctgaaaaagggtattccttgatccgtgtcccccaagtccccacagccttggggtccatgcagagcccacagtgcaagagacgtggctccccgttgagatccatctgatctgccggcacagtcactttgtcactcagaaacagatatgcgattgaatatggggagtcgccgggggtctcccacggtctggggtggcgcaaaaactcc

SEQ ID NO: 661250 - DNA, 99 bp, Homo sapiens
  misc_feature (98)..(98): n is a, c, g, or t
gtttggaacggcaaaaaaaaatttttttttctctttttggggggggttaaaagggaacccaaaacatttaaataaaactttccaaatatttccggggna

SEQ ID NO: 661251 - DNA, 1290 bp, Homo sapiens
  misc_feature (906)..(906): n is a, c, g, or t
tgggttttaaaaacttagggactaaaattatatttaaaatatgggctataatgtgggtattgaatctaactattttgggcaaaatgttaaactatcccccacttttatgttgtcaaatatttatcactatctatgcagtcctggttttttatggtttggtttaattttggtttggttttgagagtctgggctctggtccacccaggctgggagtcgcagtgcgctgtagatctggcaaaactcttctggccccccggtgtgttccaagcgcagatatctcctctggcctacaggctctcccccagaatgtacgtctgagaagtattaacaggtgtgcgccgccgcacacacacatcttgggggctaaaatatttggggtattaaattaagtaagaagaccgggggtttcacagcgcatgttgtgtggcgccatagagcgcccgggtctctctctcctgtgacccctcaggggggtgatcctcagcgccccaacctctgctgcgcccttctacacaaagggtcggcgtggagattctcccaggcgcggtgtgagcgcccccccctgtttgtcccacaggccccaaactatctctatatcacacgggtctgtgtgacacatgtgagacaacctttgtttgccccacaaaaaccacaacgcccttttggtgtctgtgtgtacgcacaccacccaccattattttttcttcacctgtgaaaaccgccgtgttttgtagaaaatctacaaagcgctttattattatccaccttttttctccaccggtagaattctcggactcttttttgagagaggtatcacctccaacagggggtcttgaagaaacagcagcatctgtgtcgtcggggtcacccccacctgttgaaacaacaacattcttatcaaagagngggggcgccccaaaataatttttcttccccccttttaggaaaaaagaaacctctttttcttcccccctccttttttttttaatgttgtggggccccccccctattattttttttttaacatgtcgttcggggacctttatacaactctcttttggcagaacaaaactttttcgcgcctctacgaacaacgcgggaaaccatggaaaattgtgggactctccgcgaaaatttgaaacaactatcgttggtccccttttataaagaaacgcctattagtattataaaccttgtggttccccccccatttgtgggcccaacacattattttttttctctccccccccttgttgggccacactttccccgtgggggccttggacaagc

SEQ ID NO: 661252 - DNA, 266 bp, Homo sapiens
ctctcagctccaggcaggtactgtatatctgtagcacggcagagatctctttccttgacccatctttcacctagtaaataacattttgcttattcacttttgccaggcttatgggggtggcgataggaattctccccatctagctttacttttaggtgagttctctgtgtctagatcttaaagggacagtctttttcagtgttcatgcacctctacctctttgtctgtccaacactctgcacttgtgtctctggcatcagcttgga

SEQ ID NO: 661253 - DNA, 1365 bp, Homo sapiens
aaggactcctttgtggccttcatggcttgattacttattcccaagggaaaaaaaaacacacaaaaaaaaaaaacacaaaaacaaaaaacaaaaaaaaaaagagagggtggcgcgcacataaacagaaatctctcctcccagacgggcgtcacacactccacacaacgccacccgcactttctcgcccgaaccaggcgcggcccacccaaaattagtgggtgaccccatttataatataagccagaagcacaatgcccgtcatatatactaaccaaaagctacacatcatatcttgcacaaccaaactgcttaaatacatgatgaaaaatctcctgttgcaacagagacacacactatattacaatacatgtaagacgtgcgtgaaccacatcacgctcgcgggggccaacagcacacacaccccacacacaagaggcaaagcacaaagcagacatcctacgagagggcgcaacccctctcacacaccaagtattttaaaaagggcgttatacccagcggcgggaccaaaaagacaagacaggcggcaaaaaaaacaggagtagcaggcgtgtagcacaaagacaacttcctggccgaaccaaaacggtagaacacaatagatttctaggatgccacaaacacttcatacaaccacacgagagaggccagccaacacgaccgaataaaaaaccccgacgacaaacacgaaaccagcgaaacaaccaccacccaacacgacacgaccaaacgcgccaagaggcgagcaacgaacaagccaaacgccagatcagcagacaaacaccaacgagagagcctcagacagcgcatttgttcaacacacaacgacagaagcgcaacggagcgcactgcggagactacgggtgtcaccgaggccagagagctcacgaacacagacagtaccacacactgaggaagcaccacaatacataccgtgactcggagagcatccacaggacggcaacagaacgacactggcagagcggcagcgccagcagcagcatacggagacgacgaggagacaactaaacccatcacaattacacacccaaatccacacatatataaatacactaaaactatacaatttccatcaaacaaatcaataatctcataccataaactacatacaaaataaaaaaaatcaatcatcaacacaaacatataacacacacctcatcatacactaacaatacaaataccaaacacaaattaccattacaatatactcactacaacataaaacacagaccaaaaattaacatgatacattaacaagactaaaaataaaatcctagaaaatacaaccacaaactactcacgaatataaacaaaaacaacaacata

SEQ ID NO: 661254 - DNA, 1094 bp, Homo sapiens
gcgcgggctggggcgcagcacccgccgctcctcgagtacccctacgcccctttacccttcgtgccccccggcaagcctaccagcgtcggtccccaggcagcatggtagaggtctagctacccggaccctacgccaccatgtacgtagagctacctacctggacaaggacgtagagcatgtaccctagctccgtgcgccactactaggacggcactcaacctggcgccgcagaactatcgtacagcacccccgacagtacccggactacggacggtataccacgtggcggcacgccagctgcagcggcagcgaacttggacagacgcgcagtaccccggggccatcctgagccaggaagcgtatggcgccccactccgggaggactggaatggctacgcgcccggaggcgccgaggacgcacgccaacgccgtggactcacggacctcaagcggtaggactaccaccggacgacagaccatgggctaacagcagcacccgcaagactacccatcacaggaccacacacgccgagatcaacccacacagaacaacaccggaccgacgcggcccttccatgcgcattctggagctgacagcaaaacgcatcaaggccccggcactaccatggggaccacgacgccaccagactagacggacgacgcagcagaggtataccacggagggacagcggacggaaccatgctgcagaagtggacatgcggaagacacgagccgcaaacaagcatccccaaccgggacgacccacggttgcaaacaccgaaggacccgaacaagaccacacagtatacggacgttggctgctcacaccaggaagccccacccgagcaagcaactgggaagcccagtggtacgaacagggacgctatcgcacgataccaagagtagccatcaccatacgagcaagcttccgggaagcgaacacagcccgcgagaacaaatgccacgacccagagcactgccgggcacctcatcgaagaaacgcaagggcccaacacacatcagtggagacacgcggcaccacggcccaccaagacagacgccacaacggcaaacaccgccacgcacacaacca

SEQ ID NO: 661255 - DNA, 471 bp, Homo sapiens
cgtacatgaccctgaaaaaccggtggatgccaagccggtcggcagcgcatgggcaggcaacgaatgcacggcaaccaacccggcgctctgcacctttgaatagcaagcacgccagacagtttatgggacatgctgttccttgcatcttgcgcaacagtcctttgtcatcaatcgcattgatagctccctaacgaaacctgcatgctagagggctcgctttacgcttatatcattccgaatgatagttacctttgtttcattcgattcgtgagatagcacctgtaccaggtgcgttatccattggcccgtgctgaccgccagcgcctggaaaaactgcgtcccgtactgcaaaagcatgcccgagaacaaggcatggactggctgaacctggccgcgttggcgttcaaggaatcggccctcgatcccggcgcccggagcagcggcggtcccactgtttgtggaggtagcact

SEQ ID NO: 661256 - DNA, 420 bp, Homo sapiens
cccaagcagtgatacagactcaaaatatcaactcagaacaaaaaatctcacaattggggccagttttgttatcctttaaatagcactgaagtatatgcttatcgcactagtatagagtgttctatacaatcacatatttttgcagatatagcggcagcacacacacagttgtggattataaatttacaaaaagaatataattaatagcttggactcacagaatgcagaatgtcattaatagcctggacatgcacagtattgtcgcagtgctaagcaacagctatggtcttcagactggcgcaaagtggcaaaaccgcatctctacaaaaaattataaaatttagtcgggcgtggtgacacacaactgttgtcccaagctaccacaggcaagctgagtctgtattcaactgcttggggtca

SEQ ID NO: 661257 - DNA, 174 bp, Homo sapiens
gctgtctcgccccgtggctgggtgaatccgagggtgcgtggtgcgcggcgtgtgggtgatcgaacgcggtgcgggcggggcgcccgcgcagtgcccatggcctcctgcgctgagcatcgacatcgaggacgccacgcagcacctgcgggacatcctcagagctggaccggcccg

SEQ ID NO: 661258 - DNA, 289 bp, Homo sapiens
gaaaaagatatcccagaagaaactgaagaaacaaaaacttatggcaacctctcttctggtttaggaacaatcttttctttaccattgagaatgtcaaggcaaagatccaagacaaggaaggcatccttctgaccagcagaggttgatctttgccggaaaacagcttgaagatggtcgtaccctttcttactacaacatacagaaaagtccaccttgacctggtcctccgtctatgaggtggattgaagatcttcgtaagagccctatcttgaagccataactctcgagg

SEQ ID NO: 661259 - DNA, 1263 bp, Homo sapiens
agcgggatggggtggatccccctggtatcgtgggggacgggtggggggtatattctaacacctctatggtaccgtagcgctctcctacatctcccttttccccgcgatccaagtgggtgcatggaagtagaagcccgttgttgcctgtacgatgtgcgttgcacgctctggcgagcctttaaggcctcaccgtggtgcactctcgagatgttcaaaatgggaatcaaacgaacaaacaaggaaaccctcaaataatagaagccgcgtgggacccctgtacttgttacttttatcagtgacaaacccgtggcgcgagttccgaggcgtatctcactgtgacaaacagcggtgaccgtgtgcgagtgtgcgcagagagaccctcgaaagtgcaacccactgtgcgtgtcaccacagcgcgctcagtcaaccaaactggcgtcccttaacgctgcgacaagtgatgctccacccccttggcggcaagaatttcccttgtcgtagtaaacccctgtagttgcgtcgtatcaaactctccaataaatgcacccgatggttgtcgtaccgcgagacgcgtgtggtaccgcgccgaggcaaatgggcgacgggtcttacgaaagcgactttaccccacgctttaccacgcataagtggcaaaccggattggaagatccaagctaggtgttgggcgctatcaatgtaccctcaccgccacaaagccccctccgcgaaaaaaggccgggatcgccacggcgtggcacacgccgcggggcgctcccccttgtgcacatatgagccgagtcgcgagagcgagacagtaggcaccttggcgacccccgctcgacagttggaccgagaaacaaagtcgcgctagaccctgcgccgcacagagccttaaagagtaactgtcacacggcggcccgggcgtcgctccacacttaacagaccgccaccgggagctgcgcccccatcgcgcgccacagcggcgtttcctcacccctgtcaacagacctcccctttctactctgaacaaccacttctccaagacggacaactctgcggcaatatacccgtgtgtataacaaatgcttaattaaaaactctatgtggattagccccaggctctccatgttgcggagacactattccactacccctctggggacacctccctagctgggtcccacaagcccgccgtgcaccacctggatccccgacacaccctccctcggccaccttctcttatctggcggacgacacacaaag

SEQ ID NO: 661260 - DNA, 310 bp, Homo sapiens
tgatgtgggagaattgcttgggcccaggaattcaaggctagagtgagccgtgatcaccagtgcactctagcctgggcaacagagaaagaccctgtctcaaaaaaaaaaaaaaaaggaaagggttttttaaaaaccacccttaaaaaaatttaaatttacctttggcaaagggaggaaaaggtaaaacccgccctaacttttggcccggaaaaaacaagccccttggttttaatccaaaaggattcctcaacccagcggggggggaaatattggcaggaaaaaattggcctaattaattgccaaaaacctc

SEQ ID NO: 661261 - DNA, 822 bp, Homo sapiens
gggcggcgtatacgtctttcttgccaatgccggatctgggctcccttggggtgccctccgcgaggttctcatctttgtgtgccgaggaggtaaactcggcgcccgcgcgaaaaaactttctgggtgtggtgtgcgaggaacacactgttttaacccgggaggtttctcgcacagtctggccccgggtatcatccgcgagcaaaaaaattcgccgcgcgcgagattttctcggccccccctattattcgcgcgccgtgcgtgtactcacaaatggttgtcgttgacacgaaggcccttaaggtggcgcccacaactaacgaccaccagtgtgttgcggacaccacactcggttgtccgtcttaaaccacgcagtgtctccggctgaaaaaatcttatgtcggacgtttttatctaggcgcttgaggccgccacatacttttttgtagttctacactctttgtggggacacacggtggtgaccaccgccggcgagtgtcttatactccccattcgctcccccatctatgaagtgggcgaaaaaacacacatctcttggggcggttgcactcaataacctgcggtgatacacacgaaaggcagggcgctgttggagggacactctgggcccacacgggcgccacaatttgttctgcgcaccacaagggccctacaggcgccggtcaacacccccctgaggagtgagaccatgaacattgggggagagacaccaaggtggtgcgccaccaaccttgggtcccaagcgccccggggggcttcccacaacaaaccgcgctaattcctcgcggggcatagcagacaaac

SEQ ID NO: 661262 - DNA, 312 bp, Homo sapiens
tacccgtccatctctagtccagaactcctggactcaagcgatcctccagcctcagcctcccgagtagctgggactacgggcacccaccaccacgcccggctagttttttgtattttagtagagacggtttcaccatgttggccaggatggtctcgatctcctgactttgtgatctgcctgcctcagactccctaagtgctgggattacaggcatgagccaccccacccggtccatatagtacaatcttaacccaaaaagtgtgtgtgtttgtgtgtgtgtgtgtgtgtgtgttttgtttttgactagagtgg

SEQ ID NO: 661263 - DNA, 357 bp, Homo sapiens
ttctgggtccaggtagtataagccagacttttaagacaaggggaagtaatggggactgtggtagaccaaagaaggcatatttacctttaagatatttcaaaataggccaacgccgtcgtcacgcctgtaattccagcattttggggggccgaggtgggcggatcacctgaggtgaagagttcaagatcagcctggccaacatggtaaaaccccctcgctactgaaaatacaaaattggccgggtgtggtggtgcatgcctgtggtcccagctactcgggaggctgaggcggatgttgcagtgggctgagatcgcattactgcgctccggcctgggtgacagagcgaggctctgtatc

SEQ ID NO: 661264 - DNA, 445 bp, Homo sapiens
  misc_feature (233)..(233): n is a, c, g, or t
tcctggcccatataatgaattatgtataaaggcatcgtcccgctcgttccgtagcatctcacagatcgtgtgctcttaacaacacggccaagtagcatttagtagaagcacgagactgtactatcatgtacatgaactttgttgaagtcatctcccaatgcacagtatacacatatcctctgcaaattaacttcatacacctttcatggtgatctcctcatgagagtctgtgnagcagtggttaatttctccaaaatagtgtgcgaaaggagagtaggtttcttctgtaagatgaacagatcctcgcgtcgcttcatgttctccgcaagaagcgttttatcccggggcacggtctccggcaatggccggtcgtgttgtgtagcttcaggctgggcgctggcgaaagtcagctcctaaggggcctcatcgtcaaactagtagtccc

SEQ ID NO: 661265 - DNA, 888 bp, Homo sapiens
cgctgcggttatatgctgtctgacgccgttcgatccatgtggtacccggcccctcgggtttaccccccgggatcctgttaacccataaaggggttccgcccacctgatgcgcggtccaatccttgtcgatgactgcgcccgatgtctggtgtcgcacccgtttcgaggtccccctcgtccggtccgcacaattcccggtgttttgcccttcccgcgcgggttttataatctggccccactcggttgctgttgcgcaagtcaataagcggtcccacattcgtggggctttctccagaaaccacccctgtggggtaccataggtatctactgggcgttgttccggtcttgtccccagaagaagtgggggtgtggcgccgagttaagagtccgccctccgccgggggtgcttaaacatgaaaggggcgggcttcacaggctaccacgccagtctgctaggcgccacacaagtgctagcggtctaggagcagctttcctccaaatggggccgttagcgcacaaaatcaagttcctgcccctctaaagtgctgcccctcggttatttaggtcaacgacaacaagtgtgggggttggttatctatggagctaacaccaaagcgggtcgctaggctaataattgccctcaagtgcgagcaccacacaccgttgggaaaacccggcaacacgcccgctcttgtgataaaacaacccaaagtatacacgggggttagtaggggaaccacgacccgtcatgcccacgactactccgggaagggcgagagggcagcgagagtactcgcgtgaagacccacagcgaggccgaggacgtgccccggaggctagagccaccccccatgtggcgccaccaccacccccggagatccgtctccc

SEQ ID NO: 661266 - DNA, 327 bp, Homo sapiens
cccttttttccgggggggggcctgggggggggggccccccaaaaaaaccaaattttcccccccttttgaaaagaagggtttttgggttccttttcccccggggaaaaagggcccttttttgcccccaaaaaaaattttttttccccatttttttggttacccccaatttttttggggggaaaaaacccctttttttttgggggccaacccttgttttttctttccccggggggtttggttttttccccaaatttttttttttgggcccccccccccctttttggtttttttttgggttttttttttttttttccttttaaaatttta

SEQ ID NO: 661267 - DNA, 238 bp, Homo sapiens
aggtaaatacgtggccctatttcaaacgatttctaagcgggaattaattctacgacgatgggcacttaaactgttgtttgcgtccacagatttcacagcattgaccgtattatacccccgggtcgtgaatcggaaaacccctgtcgggtttagacgtccgggaattgcatctgtttttaagcctaatgtggggacagctcatgagtgcaagacgtcttgtgatgttaggtctacctgg

SEQ ID NO: 661268 - DNA, 332 bp, Homo sapiens
gtgaagtttaaaagtagaaggcagagaattgaacatactgacatattaattctttgaaaagaaatttagaactcatatctaacaccatcttgcttttggtgggttttggctggcttctttaccgcatgctgttttatcagcaaggtctttgtgacttgtattgtgccgacctccttaacttcctgggaatgcagcctagtaggtctcagccttagtttacccagccgctattcaagatggagtcaccctgtttcaaacacctctgatagtcttgctctgtcacccaggctggagtgttgttggttcactgtaacacgagtatttatgtttta

SEQ ID NO: 661269 - DNA, 1236 bp, Homo sapiens
ctcatttatttgacttgtttcttctctttctgttgtcttgtattttgtgctgcctccctcctttgtgtttggtctgggtgcgctgtctctgtgtggatcatttctcattgtgtgtgccgcgcctttttgttttcgcgtatctttgctggtggtgctccccctttccccttcttttgggttcgaccagtcttttcattgcccctaaggccacgcactctgtacggggggggtcccacctttccctggtattttcaacagcttttgggctcccggaccttaatttttgaaatttggggtgacatcttgcctggcaccagtggaatcccagtgtgtgagctttatccgagagggattgctcaaaatgtcacaagctctctttcttactggaatgaattcttgaaattgtcccatgttaagaaattatttcttgggggcgtgtccttgagttatcagagtcccttcagatgggaaaataccgtggaagttcccctttaaaggagatttgggaacattaccatccgagacatcctaggagggatccccttctacgcggtacctatgttggggaacaagctaagctcacaagatgttgaccccggatgaatcttacctgttcaatccgatgtccacacccacgacacggtgaatccccatgtcttccacgcttgaagggcgtgtctagaccctggagcccgctttctaccctcccccaaggcacccagtagtcttctaacacactggggcattcccacaagtgggggttcctcacacccactgccccgttattctcgcacgcttctgtgatgtaacttctgtcactttccctcgttgttctccaactcccttgaggggctccctgccacgtgaatcttctcgtaactttctgctattctgcacaacacccataattgcccaaggcaccttcacctgtgggaggaagccacaaggaagcacaaccacgttctgaggaaaatgatgccacaagataaatcacacatgggaattctggggagcccacaacacacacactcctgagagattattaaaaggaaaaagatgctgattggtaacataaatcttttaaactggccttggttctaagaggagggcacggcttttagagatcactgttttgttaatccgcttcactaaaattggaccttcacatatttaaaaagcttctgaagtgtttgtatatttgaaatacctcaataaagagagagctcattgactgta

SEQ ID NO: 661270 - DNA, 199 bp, Homo sapiens
gttatcatcaaactgtcgcccgacccgcaggtatgttgcgagagttctgggtccgctcgctgactgatggcgggcataccatatcccgccgcaggccatccgaatcgtcatccagagtcgatatcgatgccaactggaaggcgatctgcgatgccttcattgagacctatcacatccccgtgatccacgccgagacgat

SEQ ID NO: 661271 - DNA, 134 bp, Homo sapiens
agcatatcgacatcatacgggcccggacgatattatggagtagatgtggtacaccaacagctgctgcagtaatagcgtgcccctagttgctgcggcacgaccatggggaacacgatgtcaaatccgtaggattc

SEQ ID NO: 661272 - DNA, 1006 bp, Homo sapiens
agcgggctagcagcattcctggatgattggaattcagagtgatgaggtttttggtaaaatagtagtatcaaactaatctgttttccttatcagctagtcctttctcactacaactgctgtattaatttcaagatgagaactgtgccttaattatcttccagaccacctttccttctgcagtcatatgtcagtccatgagcttgaaccacctttccttccacccttgcaataatggcccagtgccggtggaccttttactctaatgttcaccctgttctctttccatccccagactttttcttttttttctttggagcacggggtctggctctgtccgcccaggctggggctgcagtggtacgactctcagctcactgcaaggctctgcctcccgggtctcatgccgttcctcctgcctcggcctcccgagttacctgggacatgcgggcgcccaccaccaggcccggctaacttctcccggcggctccgggctacaacatgggcgttccaccgtgtttgcgccgcagatggctcctcgatctccgtaacctcgtgaatctgcctgcctcggcctccccagggctgctgcggcattcgcacgccttgacccaccacccttgggccttaccaatccccccagaaattcctctacacacgcgcctgaccaggatcacgcaagaactgacacaaagggcggcacacaccgcgagcgccaacaagcggcaccaactgccaccaccctcgagcgaaaaacactcggcacaggaggccacaacacactgaccacaccacgctggagtcgtacacgcgctcccccgatcacccaatgcgcacggcccaacagcggcacaactacacctatacggacatacgtgccgcacaacttgacatcccatcgcgcccacaccgagatgccccaccagctcgctctccacccacacgcagcgctgcaacaacgggacctctcccgcacgcgcccaccaccgctcggccggggccctagtga

SEQ ID NO: 661273 - DNA, 303 bp, Homo sapiens
  misc_feature (2)..(2): n is a, c, g, or t
angtgacgacgctggaccccagaccagctggagacaattttgtggtgcaggcctgctctcttcagtgcttcacaggctggacccagctagaagagacccagctagtattcctagctctcaaggtggctttgacaaaggcatgtggccaggcatggtggctcatgcctgtaatctcagcactttgagaggctgaactggggagattgcttgaggccaggagttcgagaccagcctgggcaacatagggagagcctatctctaccaaaaaatttttaaaaattagctaggactggtggcatgcac

SEQ ID NO: 661274 - DNA, 224 bp, Homo sapiens
gacgacacggcgatcccatcgtctgtgtctgggcatatctgcatcattgtggcgcagtgggatcggtttgacactccttagcaccggcatacatgagcaggcgtgttcctgggacttggcttgagtggcaagttcgtatggtggaggccaccacaacgctatggaataaagtattgtctagttgcacgtgggcaggagagagctccatggaggtgatgactagt

SEQ ID NO: 661275 - DNA, 215 bp, Homo sapiens
ttttccccccgccccgggggggtttttttggagggcccccccccccgggggcggttaaaaaaacttttttttggggtattaaggccccttttggggggcccccgggcccccctttcccccttccccaaaggcccctttttttgggggccccccggggccccggtttttttttttttttttttggggggggggtttttaggggtttttttttttga

SEQ ID NO: 661276 - DNA, 376 bp, Homo sapiens
  misc_feature (9)..(9): n is a, c, g, or t
  misc_feature (78)..(78): n is a, c, g, or t
  misc_feature (130)..(130): n is a, c, g, or t
  misc_feature (166)..(166): n is a, c, g, or t
  misc_feature (191)..(191): n is a, c, g, or t
  misc_feature (197)..(197): n is a, c, g, or t
  misc_feature (235)..(235): n is a, c, g, or t
  misc_feature (240)..(240): n is a, c, g, or t
  misc_feature (258)..(258): n is a, c, g, or t
  misc_feature (275)..(275): n is a, c, g, or t
aggaagagnaaaggagactttagaaagtctctgcaaaacaaacagtcgtgaatttgaaatatgttcatagtttttttntgaacagtttagacaaaacggctggaaattaaaccaatttcgtgcattaagntgagacaaggaaagagacagccctaaacagtttcanagcttttcctcccccatttatgtgnattggngacagtgggaataaaacagcccgaaagtgtatgcatgnaccanaacaaaaaaacttaatanattgtggagtattcaanaaccattatgtagaaggtagataagaattaaaagggtttaatttcctagaaagaaaatggaaaaatggtcatttttaaaaaataaagtttattagatcagg

SEQ ID NO: 661277 - DNA, 1219 bp, Homo sapiens
ctagttctagatcgcgagcgggccctttttgtttttgtggaaattattcacaaaaagcagcgggaaatcagaaaggcagcggccgctccgaggggtctcaaatccagttaaaaccacgcacgagaacaagttaaaacaatcagagagagaaagaggaaaggaggaaacaagcggtccaacattgggcattggggttttatccacgaggttttcccagagctcctctgggaacgtgtgaaagccaaaagtactatggggcaaaacagcgggcttctcaagtacaccaggaaggggacgcctcaggtggccatccgggccaacgagagggcggcctcggggccagtcagacgtggtgggggtgcacaggcagatcgtctcaggcgtggggatatacgtggccatctttccatccaagtcacccctttccaggaaatttcagacagccttaccagaacacggggcctctgggccgggctggccctttcccccaggcagagcgggcctgtgggcataataccaggcgaacctggcaagccccagagcagaaacccggctggggatcccttccattcatcaacctgtggttgttggaggatgcgtcaatagcggcttcaaccttccaccatcccgcagccccataggtaacagtatctccacccttcccgggacagaccatacttcccaggtcaccaaccaacagcagcaaaagtcaggagagggaagaagtatacatgcacggtccatcccccgggggtaaacatcgtagcactccaaaaagagaacacacaccggtgagagaccacttcggtaacagtcgagtcagccaccagtcagacaaatatcagtagacacaagaaccagaagaaccagaagagggaaagggcgccacaagaacagaaaagagcacggtatcaccgcaagggagacccaaaaaaggggcttggtgtgaacccatgtgacaaacaagacgcgtggggaacacaaccccaaatgaaaaacaacacaatccggcacattacccaacccgatagatattcaacaacacaaagagagataaaaaaaagagacgaagggatgtagccaccaggaacacaaagcgagaacgacagacgaggaccacgacaaccgccacgatagaacgcggcgtacaaccaacagagagagaagacaccacaaagaacgagaggagacaaacaccggaacacagaagaaccaacaa

SEQ ID NO: 661278 - DNA, 149 bp, Homo sapiens
gaaggtataacatcgactaagtgctggttgctcactatctggtaccagcaggaaagatacgataacttggctgctcagtctctgtaagcaccgatcgctactcaaagacgctccacaatgcatgctcccgtccattgtgagagagctgc

SEQ ID NO: 661279 - DNA, 988 bp, Homo sapiens
  misc_feature (988)..(988): n is a, c, g, or t
gggcggactcaggtgatgcccggcgggctccccgtgcccgaggggaacgtcggagtgcacaccatcgccagcggcgtggactgcggcctgctgaagcagatgaaggagctggagcaggagaaggaggtgctgctgcagggtttggagatgatggcgcggggccgcgactggtaccagcagcagctgcaactgatgtgcatgtgatgctgccagctgcccgcctggtgccagagcagagccatgcgcctgactttgtggtgctgcagggagcccccgcccactgggtgctggctacttgcccaaggtacaatgagtgtggccctggtgcctgggtgggagctgctggctgcatgcctgtgccaagcctggtgcctggccccgtcctcactcctggtgccaccctggccctgccctgacgtccactcacaccccggtctggcagcaggagagcatcctcatgctgaaggagcagaaccgactcctcagccaggaggtgagccgagaagagtgaggtgcatcactgcagctggagcaggagaagtcgggctcattaagccgctgtttgagggccgtgcgctgagccaggaggacgggggagctctggattccaccttcatctaatccttgtgggacgagtgcgccaccaggggccagacttgggaatcagcccttcagggggtgggcgcccccatgaggccaaccattctattggtggagaccacgcggaaggcaattgaaagccccgggagtggcgctactagctgggcagtgccaaatgggatcacaagggccttgccactgagtagacccgaccaagactagaatccacgaacagagatcttggagtcaagtggctgcgggaacaagactcagaacacgagcatactcgactcgtggagtggcggccacgcgatcattaccacgcagagttgtctcagtccagtcacggagccgcgtggtcaagagacaggcagagacaacaaagacn

SEQ ID NO: 661280 - DNA, 135 bp, Homo sapiens
gggagatgggaaggctgggtcggtgagtttagtcctcagttgttggcccccagcgagaggcagcatttagcccaggcagcaggactggagccgggacttctgcatcgaggccggtgagaggagctatcagtttgg

SEQ ID NO: 661281 - DNA, 706 bp, Homo sapiens
cgcgtttaaaaattggatccccgcctccggattcggccccgcaacctgtaggaatacaaactcttggggttggaaaaataaggtggggggtcgttaaacagcatatccccatggggccagggcccactgtcgggttattggggcttcaaactccagatatccccttaaaaacttttccatgtaccgagcacgccctcgttcccgataacccgttggaaatagaaaagaaaaaactcctggtcacaagaagggaaattagcctttagccacacaaattcaattctggttgggaagggtgtaacatagcgttaaagcccaaagccccaaaaggaagtttacagccggggtaagaagttgagctattccacgcttgagccacaacaccactgggagttgttgttataacatttctcataaaaaaaataattaaagcgtggatgtatgaagtaggtttcatgttttaagaagcaactgagggctaacgcagggtccgccaaacagcaaattttcaagaaaggccagtgtttaaaattttggaactcccatggcttggggtaaagaagggacaccgaaaatttaaagttcaagcgcgctgccataattaatgcggcctattaaaagtcagggttaagcaccagcaatgacccagtggtccttgggatctttttttaaatgggcccccggcctttcatgaaactgtaaaaaa

SEQ ID NO: 661282 - DNA, 183 bp, Homo sapiens
ccgcactggatatcgccaccagcttcaaacgcgtcgaactgaccaccctgacgccatactcgggcaagtttgccgggttccgcatccgcaagggtcggctcaaccttgacctgcattacgtcatcaccaagggccagttgaaggccgaaaacaaggtggtggtcgagcaactgcaactgggtg

SEQ ID NO: 661283 - DNA, 430 bp, Homo sapiens
  misc_feature (276)..(276): n is a, c, g, or t
  misc_feature (282)..(282): n is a, c, g, or t
  misc_feature (294)..(295): n is a, c, g, or t
  misc_feature (307)..(307): n is a, c, g, or t
  misc_feature (318)..(318): n is a, c, g, or t
  misc_feature (325)..(325): n is a, c, g, or t
  misc_feature (329)..(329): n is a, c, g, or t
  misc_feature (334)..(334): n is a, c, g, or t
  misc_feature (383)..(383): n is a, c, g, or t
  misc_feature (396)..(396): n is a, c, g, or t
  misc_feature (400)..(400): n is a, c, g, or t
  misc_feature (403)..(403): n is a, c, g, or t
gtcagccagtcttagagccccacaagcagagggaaggcctctgtgctcactctggcggacctttatttacctttccccagaatatgacacctgcccttggaaagagctcgctgagttcaaggtggcaaagctgagtcctggggaggctggggaaatggcatggtcctcctgctgggccctctcccaactccgtgcccactggtctcccacccccaccagcctcccctgcttcgggccatacctgcttcgtcccagaccaaccagcggctgggcttntggcangagcggcaggtnncactagctgctncacgggaacancccgcgnattntgttntgcatggtgtaacgtgcctttttcagatttcgagtatttaaaagcagtnttttgaggtgggntggntcntcagatgtttattcatggcaaaaaaaa

SEQ ID NO: 661284 - DNA, 748 bp, Homo sapiens
tggaaaaaccacagcagtcactttattcttaagttggccctttacaaacccacaggggaaaagtccttgagggggaaacaggggtaggggataagggagtgggggatgtgtaaacgaggggaagaggaagacccagaaacagaagtcccctccaaccccatctcggggaccacgcagagactaggcctcaggctagcccagaagggcttcctgtgtccgggttcgtacagagctaggccaaaaagacctcaggggaagggccaggccctctaaagattgccgccatttgagggacagccacaggccaagtgtttccgtggtgcccaaagaaggaagttgggcctccctttccccatcccattaggccagataatcagcctgaggcaggggttgagggcatacccattccagacagcttcgaggatgctactacaggctccttcagaagtcttccaggcctggtccctattaactatcctgaggggggaagtccgattcattctgccgggcacccaatgaatcttgcaaaaggcgtccatgaacctcgattgtacagccatgcgcacccgtaggcctcagctcctgcgggttccacctcctccttaggccagccctcagaaggtcagaagctcactagggacgcggatagggggcacaaagtgcctccagctcagcctagacgttaggaagaagccagaaaggacctcatccctcggaacaccatactgggggggagcctcaaatacca

SEQ ID NO: 661285 - DNA, 357 bp, Homo sapiens
tccaggtttccttaagggccacccttcctaagtcaaaagagagaagaggccccacttaaaagatcgcagtttgcctggtgcagtggctcacacctgtaatcccaacattttgggaacccaaggtgggtagatcacgagatcaagagatcaagaccatagtgaccaacatagtgaaaccccatctctactgaaagtacaaaaattagctgggtgtgttggcacatgcctgtagtcccagctacttgagaggctgaggcaagagaattgtttgaacccgggaggcagaggttgcagtgtggtgagatcatgccactacactccagcctggcgacagagcgagacttggtttcaaaaaaa

SEQ ID NO: 661286 - DNA, 445 bp, Homo sapiens
  misc_feature (86)..(86): n is a, c, g, or t
ttggaaattaaaggacagggcatttatggaaggtaagggccaggaaaaaaggccttttttttgtgtcccctcacggccttgccctngaattttgcaggccctgggctcccctgacccctgttatatttatggaccaaacactggggcagcatcaggcccagtttgtttgggggcaactttttcagctgtttggccgccccttaaaaaatatttattccccaaaagcccccggcattttaaaagggggcactcaggtcccccttaaaagcccccaggggcttgcaattttggaaaaaattttgactagcggcttgggtggatggacaaaaaaaaaggcattattttattgctgtaaaattgtatgaaactttaactggccaaaaatgttgtcccttactgtaaatggacaatggttttattaacaaaaaaccctccttaccaatga

SEQ ID NO: 661287 - DNA, 253 bp, Homo sapiens
attatgctggggagcccagcttattccagtgagactcaatcagttctcaaattgtgacccatacctcctccccctaggacttcaatgacagaagagtacagtggtcccagactggcatggtgggcctgatcattggcatgagtgagtgtgaacacaattaacaacaatccaaccaggattcagtgcttgcaaacgtacagattttccctaaaacacctaaaactcgcgggataccgacgctcgacattcgtaa

SEQ ID NO: 661288 - DNA, 412 bp, Homo sapiens
  misc_feature (408)..(408): n is a, c, g, or t
  misc_feature (412)..(412): n is a, c, g, or t
gaacatcgctgttatcctgtgttttttttcaaggtgcagatttcatattgtttaaacaatttgtgcagttaacacaatcatcacagggtcctgaggtgacattcgtcctcagcttaggaagatgatggtattaagagattaaagtaaagacaggcataggaaatcacaagagtattgattggggaagtggtaagtgtccatgaaattttcacaatttatgttcagagattgcagtaaagacaggtgtaagaaattatgaatgaatttggggaactaataaatgtctgtgaaatcttcacaatttatcttcttctgccatggcttcagctggtccctccgttcggggtccctgacttcctgaaacatatagatgtgaatttgggagctctttaactatgtttttctcanattn

SEQ ID NO: 661289 - DNA, 245 bp, Homo sapiens
  misc_feature (33)..(33): n is a, c, g, or t
  misc_feature (42)..(42): n is a, c, g, or t
tttttttccccccccggcccgggggggggggtnttttttttnaaaaaaaagaggggaaagggggcccccccccttttttccccccccggggggtgtttctaggggggaacccccccaaattaacccggggttttttttggggggggggggaccctttttttttttttttccccgggggttttggggttttccccctttttccccccccccctttttggggggggggggaaacccccgggttttta

SEQ ID NO: 661290 - DNA, 392 bp, Homo sapiens
  misc_feature (167)..(167): n is a, c, g, or t
  misc_feature (346)..(346): n is a, c, g, or t
tatgcagtcacacgtttgcagctcccgcagagactccatccttggtctgaggagagaagaatgggagagtgaagaagactttgttttgcaatttggatacagctcagccacagtaaaataaagcaccatgctgagtcctaaagcccccattccaggccctggctccntggatgatattttttacttaattttttttttatttcaatagatttttagagagcgggtggtgttaggttacatgaataagttatttagtggtggtttctgagattttggcgcgtaccgccctgaaccgtgccccgacctcatcccggatgacatttttagacacatcctggaccagaanggtacccactgccctgaaggaaacaaccccagtctaagcaggattc

SEQ ID NO: 661291 - DNA, 362 bp, Homo sapiens
  misc_feature (358)..(358): n is a, c, g, or t
  misc_feature (362)..(362): n is a, c, g, or t
gaacatcgctgttatcctgtgttttttttcaaggtgcagatttcatattgtttaaacaatttgtgcagttaacacaatcatcacagggtcctgaggtgacattcgtcctcagcttaggaagatgatggtattaagagattaaagtaaagacaggcataggaaatcacaagagtattgattggggaagtggtaagtgtccatgaaattttcacaatttatgttcagagattgcagtaaagacaggtgtaagaaattatttcttctgccatggcttcagctggtccctccgttcggggtccctgacttcctgaaacatatagatgtgaatttgggagctctttaactatgtttttctcanattn

SEQ ID NO: 661292 - DNA, 610 bp, Homo sapiens
tcatggcaagccaacgccattatcaagttaaccactatcacgaatcaaaatctccctccctctatactaagtctccctacaaatctccttaattatcacattcacagccaagaactattcatatacatcatctctgagaaacccatttctcaacaatggaaacccgaagagcaaaacagaaagcaggagacacgtaggataaatactttcatataccaaacacgggagaaggtagcgatcacaataccactatatcgcggtagtaattaaactgcacaagcacagaggcatcacagcggtctcatataacagtttgacatgcttacctcactcgtgagggccgcagaaattattaataagtgaggcgtcaagaaactaaatgacgtcttaaatgtaagcagaacatgcatcaacaagaagtagaggatttactagtaggagcagcccatctcgtaatgcaccaggatgataagcgaatgtacagaggaacccgccataatggtacggtacgaaatagatagtgggccgccaagagataagtcgctacaagaggtgtcgagataacccgatggagaacgtcagaagatgatcggtggaagatacatatggg

SEQ ID NO: 661293 - DNA, 363 bp, Homo sapiens
ggtcgaccagatgcggaacttagaaaacaaagactgtaaagcagctattagaaatatgtttaaagaactaacaaaagccatgtttaaagaagtaaaagaatgataatgctaatttatcaaatgggaagctgaggcaggcagatcacctgaggtcaggagtttgagaccagcctagccaacatggtgagaacctgtctctactaaaaatacaaaaaaattaggtgtggtggcaggcacctgtaatcccagctactcgggaggctgaggcaggagaatcactcaaacccaggaggcagaagttgcagtgagctcagatcacgccactgcgctctagcctgggtgacagagtgagactctgtctgt

SEQ ID NO: 661294 - DNA, 208 bp, Homo sapiens
gggcggagagggcagcgggtatgggatcctatgttccccccaggcggcttggcagttcccacggaaggttcccacttgagggtccttgagatgggatacctctacccttaatatggccctgaaggtgcgagggcagaatggtattgccccatatggacaagtacgcgaaagacttaaggctctggaggggagcgctgcccaaaccccc

SEQ ID NO: 661295 - DNA, 440 bp, Homo sapiens
cggtacccggcgtgagctatgatgcccagctatttatttatttatttattttgagacaaggcttgttctatcacccagagtagagtgcagtagcatgaacatggcttactgcagcctcaacccaggtggactcaaggcatcctcctacctcagccttccatgtagctgggaccacaggtgtgtgccatcatgcccaggtaattttttgattttggtataaatgaggtcttactttgttgcctaggctggtctggaactcctgacctcaggtgatcctcccggcttggtctcccaaggtgtagggattatagacatgagccactgtgcctggctggagctgtgttttaataaaactttatttacaacaacaggcagaaggccagatttggcctgtaagtcatggcttatggacccattttctagggcagcttccactaacg

SEQ ID NO: 661296 - DNA, 230 bp, Homo sapiens
ccccgcaaatcagcgcggccatatttactggaggtctctattaaatccccatcctacaagcctcacagatactgtcgacgtctcccgtatcaccatttccagacggcatctacggttctgcatttatagtcgccacaggcttccacggacttcacgtcattattggcatcaactttcctcactatctgcttcatccgccaatctaatatttcacctttacatccaaacat

SEQ ID NO: 661297 - DNA, 115 bp, Homo sapiens
agcctgaaacccccacaacagaagaagaaacggtctcagctccagtacattcagcttggtaaaagatgtacctgatacattggcattctcttccttagacaaatcagtcactggt

SEQ ID NO: 661298 - DNA, 113 bp, Homo sapiens
ggggggggggggggggggaattttcaagaccccttggcggccaggctttttgggggtgttttaaaaaagggaaaattttaataaattaccctttttggggcccctgggcctta

SEQ ID NO: 661299 - DNA, 866 bp, Homo sapiens
  misc_feature (116)..(116): n is a, c, g, or t
cgttctcctccccaagagagaagtcttccccccccaccacttgtgataaaccaggagcgtttgggaaggtggcccccgtcccccctttatgagcccccctccaccccccccccccnaaaatataggccaccggttcccggggttgtagagccccggggaagatattgcctccccctcccccctgtttccctcttttttttgtaacacaccgtatgttttttaccacacaccaatgccccccttgtttatgggggggcccgcgggggaaaaaataattccccccacaaacccccccccccgtgggggagagcaacatatatctctcccccccccgtgttgtgagggggtctctccttgtccctctccccccacccctttggggggggagggtgtttgggaacccccccccccctccccccatatttttcccacaggcagggggtgggggggaaaccctaaaaaagggacaactcccccccccccccctaaaaaatttgggggggtcccaaaatttttcccccgggtgggggggggggggggcccccaggcccctttgcccctttttaacccccaaaaaagcaaaacccggggccgggccggcccccaaatttttttggggcccccaggggggcccccccccccccccccccgggggttttttggggggggggccctttttttctgggttccccctggcccccccccgccccccgggaaaaggaaaccccccccctttttatccccccccggggttccccccccccccccccccaaagggaaaattgggggcctttttttttaattggggcccccggggggtttttttacccgggggggtttttttggggaaaaaaaattctttttta

SEQ ID NO: 661300 - DNA, 578 bp, Homo sapiens
ggtcggacgacagaccgtgtgtttccaaaatggcggcagcgatggatgtggataccccgagcggaccaacagcggcgcgggcaagaagcgcttgtgaagtgaaaaagtggaatgcagtagccctcgtgggcctgggatatggtggttgataactgtgccatctgcaggaaccacattatggatcttgtgcatagaatgtcaagctaaccaggcgtccgctacttcagaagagtgtacgtgtcgcatggggagtctggtaaccatgcttttcacttccacgtgcatctctcgcgtggctcaaaacacgacaggtgtgtccatgtgacaacagagagtgggaattccaaaagtatggggcactaggaaaagacttcttccatcaagcttaatgtgttggtatatccatttaaatgactttcccgtgcgtgttacctaaattacaaatgtggatggaacgtggggtgtttttcgtgcttgggttttttcagttgtgcgtgtttcgtgtagccatatgtgtattcgtgtgtcacataaagtccagtgtggatctctggaaaaacacaacaaaaccaaacaaa

SEQ ID NO: 661301 - DNA, 87 bp, Homo sapiens
ggcacgaggcgtggtcgttcggtcctatgtcgcgccgggccctccggaggctgaggggggtacagcgcggccagaaccccctcgggc

SEQ ID NO: 661302 - DNA, 726 bp, Homo sapiens
ggccgcactgagccacagccccgaggggcctgcctcccgtgtggccccttgagtgcactgaggcaccgagactggttctccccgagatgactcggaaggtggggaacagagtgggactgtgtttgggagatgtgtggcttttatcgtctgctgttgagctgaacactacagcgccctgatggttccgggcttcgcacagctgtcccagggatggatcgcctgtgctgccttcgcccgccgcacaccgtgtgaccctgcacggctgcttctggcctcgacagatgacaaaagaaacagtcccaaaatacgaccatctccaagccatgcagttcccgcctgcctagccctgccactgtcaggaccttgccactggcctcctcgtccgcagggcttgtcttgctggcttctgggggcacgaagagcgtgggagcccccgtggaagggtcagcgggagagccaggtcagggggcagctaacagttattcgtcggttgagtcaagtaccccactgggagacgaccgtggcgcttgtacggggagttacgctaggccacactcggctatgcccacagcagcccagcttcttgtactcaagcccgggaacgcgtccctctcgacttaggaggcccaggatgctacacctacaacggcgtggcgggccagaaggcgcccacattgccgacgtgctggcggccccggggggtgcccctggtgtggaagcagatcg

SEQ ID NO: 661303 - DNA, 204 bp, Homo sapiens
  misc_feature (20)..(20): n is a, c, g, or t
  misc_feature (38)..(38): n is a, c, g, or t
  misc_feature (41)..(41): n is a, c, g, or t
  misc_feature (60)..(60): n is a, c, g, or t
gaacaatggatttcagattncttctatttaacctaganaangatattatattctctaganttttatcctttatcaaagactagaatatatataacatgcccaccaaaactgagatatcatagaacctagtatttttaatatttgtttaatctctccataaagcttaaacagctaaggggatctcttatgcagtgctaaaataag

SEQ ID NO: 661304 - DNA, 825 bp, Homo sapiens
gcggtcctccggccggaatggccctccccgccgcctcccgggcggtggccgaggcgtaggctggaccccgaccctgcgaaatggcgctgcgatgtggtgcagagagcgtgtgcgggccctgctctgaacctgcgcggggtccccgttacccggccggagccgtgcccgctgaggccctggacaaggtctggggtgtgggcaccgtccaggtacggctgccgcagtgacccgctctgctctcggtgcgtaaattccacagagaaaacaccgatgtgggtacacccaccgaaaatgggcattgggcaaccagcgggggacacctcacgccaactctttgtgcacccggcaacgccgttggggcaacgacttgttgggccaccggggtaagttcttcccctgcactgtgtggcacccacacctgtttgggaccaaaacccaagcatggacgtcggggcggccttggggccaacggtgtcgaacacgctgctaaggtggaaccttctaatttctcccttcctcactcagagacgcacggtaaccgtgacccttcacttgaacggcttctgggcagaactatctccaggcgcacgtgtgttacaccaaacttcttgttaactgacagctgctgcgcttgactccacgatgacacgtgaagtaacccccttgcaggaacgtagatgacactttaggaggtgacgcaagccttatggagaaaattacattaaccactctattgaggcggtgccattggcactccctaaactacaactagtcctggacacttcgccgaccaccaaccaggcacacaggcacgagaaacaaaaa

SEQ ID NO: 661305 - DNA, 889 bp, Homo sapiens
caagtcggcggaaaatattccccccaaggagttcctctttaaacacccgaagcgcacggcaccctcagcatgaggaacacgagcgtcatgaagaaagggggcatattctctgcagaatttctgaaagttttccttccatctctgctgctctctcatttgctggccatcggatggggatctatatggaaggcgtctgacaacctccaccagcacctttgatgaagaactggagtctgactggttcgtagtggattacttctgagcttgcaacatagctcaccgaagagctgttagatcctggggtggccacgtcacttgtgttcattgttctgtaaattgctgcgttcctaatttagtaaaataaaagaatagacactaaaatcatgtggatctataattacacctatgggatcaataagcatgtcagactgattaatgtctactgtgaaaatttggtagtaaattttcattgtgatattacgatataaatatctgaatataaataattttaatatactagtcatgatgtgtgtgtattttaaaaattatctggcaaccttaattcagctgaaggtactttatatttcaacacagaatgacttaaccctgctataaaatcggtacttaagggggtggtccaaaataaatatgggggttattatatcacactattgtgcaaggtctctttcacctcactggggccgcgggcttctaacgacagtatcttaccttgccctgcgcttatcacgacaaccgaaggcgcaacccttgcggcggcacacaccctgctcggctacgacaatcccgcaggagccgagggagcgcggggcgcacaatttctaccacgcgggagcaccccccgggcggcagctcaacacctgtcacagag

SEQ ID NO: 661306 - DNA, 479 bp, Homo sapiens
  misc_feature (36)..(36): n is a, c, g, or t
  misc_feature (67)..(67): n is a, c, g, or t
  misc_feature (70)..(70): n is a, c, g, or t
  misc_feature (91)..(91): n is a, c, g, or t
  misc_feature (132)..(136): n is a, c, g, or t
  misc_feature (142)..(142): n is a, c, g, or t
  misc_feature (176)..(176): n is a, c, g, or t
  misc_feature (181)..(181): n is a, c, g, or t
  misc_feature (184)..(184): n is a, c, g, or t
  misc_feature (189)..(190): n is a, c, g, or t
  misc_feature (193)..(193): n is a, c, g, or t
  misc_feature (196)..(196): n is a, c, g, or t
  misc_feature (202)..(204): n is a, c, g, or t
  misc_feature (206)..(206): n is a, c, g, or t
  misc_feature (210)..(210): n is a, c, g, or t
  misc_feature (241)..(241): n is a, c, g, or t
  misc_feature (243)..(243): n is a, c, g, or t
  misc_feature (263)..(263): n is a, c, g, or t
  misc_feature (266)..(266): n is a, c, g, or t
  misc_feature (270)..(270): n is a, c, g, or t
  misc_feature (272)..(272): n is a, c, g, or t
  misc_feature (276)..(283): n is a, c, g, or t
  misc_feature (333)..(333): n is a, c, g, or t
  misc_feature (335)..(335): n is a, c, g, or t
  misc_feature (350)..(350): n is a, c, g, or t
  misc_feature (352)..(352): n is a, c, g, or t
  misc_feature (354)..(354): n is a, c, g, or t
  misc_feature (356)..(357): n is a, c, g, or t
  misc_feature (360)..(360): n is a, c, g, or t
  misc_feature (368)..(368): n is a, c, g, or t
  misc_feature (384)..(384): n is a, c, g, or t
  misc_feature (422)..(422): n is a, c, g, or t
  misc_feature (432)..(432): n is a, c, g, or t
  misc_feature (435)..(435): n is a, c, g, or t
  misc_feature (459)..(459): n is a, c, g, or t
  misc_feature (461)..(461): n is a, c, g, or t
  misc_feature (466)..(466): n is a, c, g, or t
tatttcgctttacagaaagggaaatggaggcaggtnaacttacaagacatctggaaccagaatatcngtngataccacaaccaatgctttncccacgagactatacatagatatactaaagacaatactttnnnnntttttngacattacagcacacttccgaaagcatcggagancctgnggnacggnntcngangggggnnncngggngcttccggtctgcttaggcaacagaacagangnaccatcttcccttaattccnaanaaanangagnnnnnnnngtactaagattcaacagcagaatcctaattaatctctaacacaacaagcnangaattatagaatacnanancnnccnactgcccnccctgatcttattccngccacagaattctaattgaatgggaaacggctacttancccagtcctnggncatcggggcatgtttatctttctncncaccngcgcatcaaaata

SEQ ID NO: 661307 - DNA, 81 bp, Homo sapiens
caatgccctgtgttaaattgtttaaaagtttccctttttttttttgccaaaaaagttgtaaataaagcccctcatccctta

SEQ ID NO: 661308 - DNA, 485 bp, Homo sapiens
  misc_feature (5)..(5): n is a, c, g, or t
  misc_feature (10)..(10): n is a, c, g, or t
  misc_feature (32)..(32): n is a, c, g, or t
  misc_feature (52)..(52): n is a, c, g, or t
  misc_feature (64)..(64): n is a, c, g, or t
  misc_feature (97)..(97): n is a, c, g, or t
  misc_feature (107)..(107): n is a, c, g, or t
atganaaggntaagaaaaaagccgcctaatgnccaatccagggaacaaaccntctgtgaaacanctgttttcacttcccctgggtacaccctagaantggtaatgcnggactgtatcaaaagttaatatttaactttccaggaaacttacaaactgttttcccagagtggctgtaccattttgcattcccagaccgaagtgtgaaagctccagatgccccacgccctcaccagcccacggtgttgtcagccttaatagtgctgaccattctggtgggtttgcagtgtatctcattgtgttttaatttgcattaccttgacaactaatggcgttgagactttcatatatctttagtaaagagtccttccaaatcctctgccgattttttaaaaattgggttgtcttcttgtaattgagttgtaagaattctttatacgttctgaacatgttatttattggataaatgtttcgcaagtaaaaaaaaa

SEQ ID NO: 661309 - DNA, 163 bp, Homo sapiens
cctgtagcagccgaagcacataccgctgcagttaccagccacatggagggcgtcacaccgtgcacgtcacgtatgccggctgtgcccatccctcgcagccctacactgtcactgttgagcaagcctgtaaccccgagtgcctagccgggcgagttggccgggg

SEQ ID NO: 661310 - DNA, 88 bp, Homo sapiens
ccgcctactactactactgctcgaattcaagcttctaacgatgtacggggacatgcttctgcaaattcgaataaattctatggcttcc

SEQ ID NO: 661311 - DNA, 197 bp, Homo sapiens
  misc_feature (1)..(1): n is a, c, g, or t
  misc_feature (3)..(3): n is a, c, g, or t
nangggatcaaaggggtttccaacaacccggggccggggcccccctaggggggccttggacctcccatgaagcccagcccccccctccacccctccgggggtccgcacccccctcccccggccccgcccctgcccccgctccggccaaaggggccctggctgtaataaaaaagccgttttttccttttaaaaaaaaa

SEQ ID NO: 661312 - DNA, 241 bp, Homo sapiens
gacttacttatcgcttactatgatgtggactatgacaagaacgctagaaggtccaacatactggagagacaggataatgatggtggcaaagaaattcctggatgctgtgcaccaactctattatgctgtagctagccgcataacctttagccacgaactttctgattgtggcttggagagcactgctggagagattcctgttgtagctatcagaactgctaaaggagttgttcctgttttg

SEQ ID NO: 661313 - DNA, 421 bp, Homo sapiens
ggtcgacggatgggagtagttgtcaagtcatatcaaggtaaaagattatgcattttttatttctccttaaagatgcacaaataaggccaggcgcagtggctcacgcctgtaatcccaacactttgggaggccgaggtgggcggatcacctgaggttgggagtttgagaccagcctgaccaacatggagaaaccccgtgtctaccaaaaatacagaattagccaggcatggtggcgcatgcctgtaatcccagctactcaggaggctgaggcaggagaactgcttgaactcaggaggtggaggttgcagtgagcagagatcgcaccattgccctccagcctgggtaacaagagcgaaactctgtctcaacagaaaaaaataagatgcacaaataagatgaaacactcctgcctgtgaatgtg

SEQ ID NO: 661314 - DNA, 306 bp, Homo sapiens
cctcatggagagttccccagagcgagcttgatgattttctcttagccagacaccatcctgcaccttgttgtcatgaactttgtggctgactcattctcatttacttaattgaggagtaggagactaaaagaatgttcactctttgaatttcctggcatcagcagttctggagatggcagcttattggcaccccatggcattttcttccgcatttgcacttcatgctagctctgcttattatgcaggagaaaagcccagagttcactgtgtgtccagaacaactttctaacaaacatttattaatcc

SEQ ID NO: 661315 - DNA, 338 bp, Homo sapiens
  misc_feature (250)..(250): n is a, c, g, or t
cggactggttttctcttgatgtgggagtaaattgataagaatgggaaggggaagaaaagaaggggacagacgatcatcgaaggaaagaacgaaggggaagaacagaaggggaagaagatcatatacccaccatgccccaggctctgcagggagctgctggatcagagagggcctgaagtcttgcaggactcactggatagatcttattcaactccttcaggttgtcttgacctggacttgatcatgccanacctacagaagtgccttttatgtattggagcaacagcgtgttggcttggctgttgacatggatgaaattgaacagtaccaagaagtgg

SEQ ID NO: 661316 - DNA, 405 bp, Homo sapiens
aggaagagcacgcgacatttcgagagcacacccttattgtgacgatttaccgctgtgccgaacacgctttagagaatgcatcgtggcgcattataactatgtgccacaggcttagacccccgtcttgagccacaccacatacatgagggccaactcttgtgccttctagcgtgatgggttacactcgatctatgcgacctagggcagacggagctcaaaccccttaagccacccgaggtgtctatgaccggctgctagggtgcactccaatatgtatcttggactctgtgaagaccaatcagatttggctgcttaactaccgcggctgccggttgttagttgtgcgagatctgaacgttatttctgttgcatttgcccgcaataccttgagtcctcatgtctggt

SEQ ID NO: 661317 - DNA, 672 bp, Homo sapiens
  misc_feature (367)..(367): n is a, c, g, or t
agtaaaaaaccaggctaggttttgccaatttggcccggggcccaaaattcgggggggcctcccaccccctctgcggggggttaaaaagtcctcccgttgctattacataaaaagtgctttttgtgttaaaaaaaaggccgcgaaagcggcgaggattccctcagcgcaaccccaagggtttggggggccttttgtaaaaagacggaggggtggccccaaatggaggacacatgattgcaagccctttaggacaggcaacaggcctggggcgacaatttgtgcggggcatgaggaaatgacatgctgcagccccatccacttggattcttataggaacaggtgtttagcgtgcgcaccaacatgaagnagccgtcagagtgattcaatctacaggcggaggccttttggggtttcttctaagcatgtttacagcccctcttgtgatacataatgcgccactggccaaggctgttgaataatatccaggcttaggtggtcactagcaaaactccttgtttcagtgacccttgtttaactccgaagaatctagccatgttaaagtgttgccaccccgtgcctaatgctaccagctcagcttgcagtagaagtctctgtagtagcctcagctttcttcttgagtagaccttgttttaataaagattctccaggttg

SEQ ID NO: 661318 - DNA, 387 bp, Homo sapiens
ttggccagtaatcattctttggtccttgggagctggtggacgaaactttgtccatgaagcatcagatatacgcgactagtgtcagaaatcttccagaattaaagacagctgtgtgaagtggccatccgtgatttgatcttgcactcatgcacaagaaactggcagattatctgaaagtgcttatagacaataaacatctcttaagcgagttctatgagcctgaggctttaatgatggaggaagaagggatggtgattgttggtctgctggtgggactcaatgttctcgatgccaatctctgcttgaaaggagaagacttggattcccaggttggagtaatagatttttccctctaccttaaggatgtgcagaatcttgatggtggca

SEQ ID NO: 661319 - DNA, 271 bp, Homo sapiens
ccccccccccccccggggggaaattttaaacccggggggggtttttccctttttttgtttttttcccccccttccccccctttcccaaaaaccattttttttttttaaaaggggccccctttttttaaaaaaatcccttttaaaaaagggggttttttttaaaaaaccccaaaaagttcccttccccggggtttttttaaaaccccccaggggttttttaaaaaaaattggggcccctttaaaaatttttggggttggttttggcccccca

SEQ ID NO: 661320 - DNA, 371 bp, Homo sapiens
gcgtttttcttcttgtgcttttgtgtttccctggggctcagaccgcccactcgcggcgccgcgcctcggtccgcgggccccgccccccgggggaccgcagcacgccgcagcgccccaccgaccgggaggcaccaccgccggccaccacccgcaccaccgccagccaccgccccagcgcgcacacgcgagcgccgagcacaccccgccctcggacccacgccagcccgaagccgccccgagcacccgccgaccacagagcaggccacgcccgaccgggaacacgagccccctggcacgacgacaacggcccgccccggcaccccccgcgcgcacccacgcccccggccggccccggggccacggccacagaa

SEQ ID NO: 661321 - DNA, 234 bp, Homo sapiens
aactgtgacatcagtcactactggaactgcacaaaactggccactgacaaaaatgacccccatttgtgagacttcattgagacacataacctccatgagcaggtgaaagccatcaaagaattgggtgaacacgtgatcaacttgcgcaagatggagagcgcccgaatctgacttggcggaatatctctttgagaagcacaccctggaagaacaccatctcttcagggtaccgag

SEQ ID NO: 661322 - DNA, 672 bp, Homo sapiens
  misc_feature (170)..(170): n is a, c, g, or t
  misc_feature (245)..(245): n is a, c, g, or t
tgggttcccccaacaggtttaatttaaaaaatagagataagggtcaactctgtgagaaaaaaccaaaggcgggggccatcgtgggaaggtgctacattcaccttcctctccttcttatacttctccttgggaacagcaaatatttcgtggattttctttcgtgcaagccnccgaggcaggtgcgaggagtggcgtttctttacagcgagccgagttcctttctcagaggaaacgtgggcgccaangaatgtttctctgggggaacacatattattatctctgtgggtatctcttttgcacgaaaatatatatgtgtgtctctatatatgtccgatctcctctaactatgtgtgggggcatctatttctctcccagagggcaccacaaatcttggaaatatggggagagcttaaaaatatctctggtgtctccggtgttataagaacacaggggcctctatatttctcttcacagatccacagtgagacccaggtggagactttattctcttctctctctgtggtctctccagagaacacaccacggtgcgtcatatttctcacaatatcacggtgcactctctctccttatgtcgggcctctttcccaaagagtggggcgagaacaacaaaggagaaaaggcctccccccaaagaggagggggagcaccaag

SEQ ID NO: 661323 - DNA, 158 bp, Homo sapiens
gatgatcttgatcattgcaacctctgcgcccaggttcaagtgattcccctggctcagactcccgagtagactggattacaggcgcctgccagtgcagccggctaatttttttttaattttttttttttttatttatttttaattttttttatatttta

SEQ ID NO: 661324 - DNA, 706 bp, Homo sapiens
gggatgtgaggggcgcctctgcccggccgcccctactgggaagtgaggagcccctctgcccggccaccaccccgtctgggaggtgtacccaacagctcattgagaacgggccatgatgacaatggcggctttgtggaatagaaagcggggaaaggtggggaaaagattgagaaatcggatggttgccgtgtctgtgtggaaagaagtagacatgggagacttttcattttgttctgtactaagaaaaattcttatcctgttgatctgtgaccttacccccaaccccgtgctctctgaaacatgtgctgtgtccactcagggttaaatggattaagggcggtacaagatgtgctttgttaaacagatgcttgaaggcagcatgctccttaagagtcatcaccactccctaatcttaagtacccagggacacaaacgctgcggaaggccgcagggtcctttgcctaggaaaaccagagtaccttgttcacttgtttatctgctgaccttcccttcactattgtcctatgaccctggcaaattcccctctgcgagaaacacccaagaatgatcaattaaacataatcaataaataaataaaataaaacaaaattcacttctcatattaacaaaaaaatacttaattggccgccgtttacaacgtcgggactgggaatacccggcgttccccaattaattgccttgcccg

SEQ ID NO: 661325 - DNA, 244 bp, Homo sapiens
  misc_feature (9)..(9): n is a, c, g, or t
  misc_feature (14)..(14): n is a, c, g, or t
  misc_feature (30)..(30): n is a, c, g, or t
  misc_feature (47)..(47): n is a, c, g, or t
  misc_feature (81)..(81): n is a, c, g, or t
  misc_feature (143)..(143): n is a, c, g, or t
  misc_feature (146)..(146): n is a, c, g, or t
  misc_feature (181)..(181): n is a, c, g, or t
acctcttgnacttntgaaaggatctcaggnatccccagagatcagcngattatacttgcttcattttcctgaggttcttanaggcccttctatggacgtcatgagctgagctaagatttaatcttgcagatcgtattgcacangcnttcagcgtggactaggtctaggacattcgacaganatatggtcacagggagcgattagctctgtggctactgctaagcaggagtacactgcaccacta

SEQ ID NO: 661326 - DNA, 473 bp, Homo sapiens
accaaatgcccgacatacacacagcctgctctcactgaaggacatgagatgtggaaaggttcacttaaaaaaaaaaaaaagcacattagggtttttcttaatggcacagtacaatgaaaaaaacagaaaacagaccagagccctatggtccagataacacctacggaccttggaaaagaatagaaaaaataaaagcacatggttaaaaaactccacacagggcaaaaataatacaagattactgggggagggtcaccaagcactccgggtcccttcccatgaaaaataagtgcttattactttcggggatccctttctcaaaaacttcttattgatggacccagctttcaccagaatacatgctcttttaaatttaggccctgaagaatcagagtccattataggctctacaccttttcccactatatttatctcagaccagggttctaccctttcaaagaacagctgtggta

SEQ ID NO: 661327 - DNA, 280 bp, Homo sapiens
actttgctacatagagattgtatcgtagtcatggccttgcttaacttgatgctactatggacgagttcgtccatcattctcttggtcatttgtttgcggctgcactcatgacgcctacgaagagtcaatttgggcatcccagagttattttctaggattaactgtgcatcataccttgtgatccgcctcttcttattactttaggcagttctaaagctgactatgggttttgaagctatctgatgtcacaattgaacaaccgacgggtgaaggagcacag

SEQ ID NO: 661328 - DNA, 300 bp, Homo sapiens
cctcatttgtatgaggattattacttattggtgacgcaaatctatatgtagaacttaaaggatcagtagcaattaggagcggaaagcccccaatatgtagaaaaggttatgtgtacaccacctccaaaaataaaaaatggaaaacacacctttagtagaagtagaagtattagagtatcttgatgcagtaacttatagttgtagatcctgcacctggaccagatccattttcacttattggagagagcacgatttattgtaggtgacaattcagtgtggagtcgtgctgctccagagtgt

SEQ ID NO: 661329 - DNA, 210 bp, Homo sapiens
tctagaggatccggtgttatcgatgcccagggtctagcctcgtggccagaagcattttagccaactccgggtctgctccactctcttccttcttccgccgcttgttcctcagctcccttagggtgaactggcttcaggatttcacggttgctccttccacccacccgcacaatgctggtgggtggcatcgataaacaccgggtaccgagc

SEQ ID NO: 661330 - DNA, 194 bp, Homo sapiens
cgctgccagtgtgggttgaccacgtgagggtaatactgactgatggttgattgtagactattgggctgttacattgtcagttccgtgttttaaatctgacgcaggcttatgcggaggagaatgttttcctgttacttatactacaccattagttcttatactagggtgatagacattggaccaaattgggatgt

SEQ ID NO: 661331 - DNA, 294 bp, Homo sapiens
actctaaggatcctgcagaggcgttaggtatgatatcacagatttaggaaataggtatatctctacgagctaaggataaggagcagctgcaggactgctgatgcacattaaggaaaccccagcaaaggatctaaggcaaaaatgaacttgatgtttccagtgaacaacacccagtcagttggggtggctgcacaatgagagggaaagtccagatgaagtcacagagataaggcaacggggtcccactccacatagggtttcatgtggcacgataagaaagtctggcggggttat

SEQ ID NO: 661332 - DNA, 377 bp, Homo sapiens
agagtgaattccaggacagcccgggcgacacagagaaaccctgtctcaaaaaaaaccaaaacaaaaaccaaaaccaaaaaaaaagtatttataatgttaagggccaggtttcttgctctgacacagtgatagaaaaatattggcacccagatacacttaaaaaaagttttaatgcttaatgtaggtgacaattgtatattactggatttagctgggcactaatttacagattcacactctgagtccagctgtagcagaagatagaaggatgggagatgaataaggcagccactgctgtggaccactgttgcaggtccccatatcctcccagccatccaggccagcaggtggcgcttgaagcttttctctcacagggc

SEQ ID NO: 661333 - DNA, 313 bp, Homo sapiens
actggcccggctctgggggctcccgtatcccctgctctaggcaggtggcgcgtctgctttgctctgtcctccagccaccgttcttgcgctgtccccatgatcgagagcctcctgtctgcgtggccatcctgaggatctggcagagtgcccagggtagccccaggtcttctaaagccccatctagaccaccctccatgtcaggtactgagcgaggcccctgatccttctctctggaggaagagggaagcccaggagtcctgtttgtcaaacatcggtggctaccgctcctcttccagagctggctctgcttttc

SEQ ID NO: 661334 - DNA, 163 bp, Homo sapiens
gacaagcaaggctacggttttgataaattccaatcttgctgatccttcttgtgcattcttcacttcttgagctcactcccaaatatcctatttgtactatgttcactacctaataggattatttacagcgtcatgctatcaaaccagtgccaagctgcacttg

SEQ ID NO: 661335 - DNA, 404 bp, Homo sapiens
aaatcggttatctggcacgtcatcaaacccaagcacatttgcccacacaccccaaattaccaacgattgcatttaatcattctgaatatgcacgactcggtggtgaggacttctattcagttgatgtgttaccacgtagtttgggcagtgaagctgtccgattattgtttaatgatcagcgttctgtgctggagcaaacaaaggcaacaagcgtgattgtgccgtatcgtttacctgaatttgggggcgaatcgttgaatcgaatgataccaaatgattgatttgattagtgcataagggataacaaaagggcaacacactggcaattagcttggctattccggcagagatagccagtattgccggtataatcgaacgggcatcaaaaaaagcgatcgtcagat

SEQ ID NO: 661336 - DNA, 420 bp, Homo sapiens
gtacaacagtaggcagaggacattacagatccatatgcggtctagtcatatcttctatcagcacagataccactagttatttctgtcatcagagatagaatcatgatagaatatattcatcctccaccccagggatataaggtgctggtcatgggcatcatgcctacattcagttgaagggaattcttgtagttttccaaagaggttgtgctcatgcattttcatcagttccagctgctgcacatcctcatcaccacttagaatggtcatgacaggccaggtgcgcgggctcatgcctgtaatcccagcattttgggaggccagggcaggtggatcgcttgagatcaggacgtcaagactagcctggccaacatggcaaaaccccgtctctactaaaatacaaaaattagccaggcgtgg

SEQ ID NO: 661337 - DNA, 355 bp, Homo sapiens
  misc_feature (145)..(145): n is a, c, g, or t
  misc_feature (163)..(163): n is a, c, g, or t
  misc_feature (185)..(185): n is a, c, g, or t
  misc_feature (201)..(201): n is a, c, g, or t
  misc_feature (223)..(223): n is a, c, g, or t
  misc_feature (227)..(228): n is a, c, g, or t
  misc_feature (238)..(238): n is a, c, g, or t
  misc_feature (252)..(252): n is a, c, g, or t
  misc_feature (259)..(259): n is a, c, g, or t
  misc_feature (270)..(270): n is a, c, g, or t
  misc_feature (285)..(285): n is a, c, g, or t
  misc_feature (290)..(290): n is a, c, g, or t
  misc_feature (298)..(298): n is a, c, g, or t
  misc_feature (305)..(305): n is a, c, g, or t
  misc_feature (308)..(308): n is a, c, g, or t
  misc_feature (323)..(323): n is a, c, g, or t
  misc_feature (325)..(325): n is a, c, g, or t
  misc_feature (332)..(332): n is a, c, g, or t
  misc_feature (334)..(334): n is a, c, g, or t
  misc_feature (349)..(349): n is a, c, g, or t
gtcctgaaaaaaatttttgggaaggggtccaaacaaagacagaacagcatccggaccaatgccatccctttgggcagtgcccaggctggacaggagcctggccctggggaaaaaagggcctgttgcatcagcctttgaccttggncagccccccctgcccccnctgggtttttggggccccttgnccccccttcagccccngggcctttccttgccctttggntccnnaaatcagacngttccctgttcccngcccccncagggttttanggttttcatgccctntcccnaaaacctnttttttntgncccccccccccagantngggcccncnaataaagctgttttntttcca

SEQ ID NO: 661338 - DNA, 343 bp, Homo sapiens
atgcagcccaaaacgatttgtaaactttattaaacattatgataattttgtttctctcatcagctattgttagtgttagtgtattttatgtgtggcccaagacaattcttcttccagtgtggcccacgggaagccaaaagattgaccacccctggtatagaggaatttcttgagatatatacattccatacatacaggaaatacccgcttattattgattgataatttggctgtttgtagactttaggttaaaagatactttcctcaaatttcaaaggtattcttcccctgttttctactttccatcactgtcgctaaaaccatgcttccattctagttcttc

SEQ ID NO: 661339 - DNA, 468 bp, Homo sapiens
  misc_feature (189)..(189): n is a, c, g, or t
cataaagattccccatgtttgttgacttagaggcattttcaggcttttttttaatattcccccaaatatgcagagaagaaatgtttttgttaaccttggataccacaaagcccccaaaataggaaggttttttctagaaaatcccaaatgaaaggttaaagaggctattttaaacccctggggcccttntttaggaaaggggctcccccccaaaaattggggtgcttttccgggggcccaacccaaaaaggtttgggaaaatccgggtcagggggaatttttccctttttcaaaccccggggggggccccccctggaaaaagctttcctttaaaaaaaggggggttcaaaacattttgcccccccaataggttttttttttttttttaaccttttgggggggaaaggattttttaaaagtttgtcttccaagggttttataaaaaggaaaaaaaggtttttcccttta

SEQ ID NO: 661340 - DNA, 475 bp, Homo sapiens
caatatgtcactttattattgggattttttttcccattaggcacatccctgtcaatgacctcacttttagggaaatcaaccagtcttggaagcaactgaccaaatcagttgataattctggaccctcttaacacacatcaattatcactgggtagggattatctttaatgctgtcttacaactattgataacatgggagtcaagagtgtcacatctttaaatacatatagaattgccagaggtacataattatatatctatgcacacatacagaaaaatacaagactgtttttccacaatatttaatttatacactactgtaactatatgcaacttttgaagacaggttaaggggtacaagtaactgtttagagcaagtaagtagtttggaccaatattatcttaatgaaatggtttttcgctccctcccttttatgtgacgacatactatgacattacaaaacatgcccaatcc

SEQ ID NO: 661341 - DNA, 3248 bp, Homo sapiens
  misc_feature (3171)..(3171): n is a, c, g, or t
  misc_feature (3189)..(3189): n is a, c, g, or t
  misc_feature (3199)..(3199): n is a, c, g, or t
  misc_feature (3206)..(3206): n is a, c, g, or t
tttttttaaaaacgagagtgttatttctttatttgtgggaaattacggtatctattttcttccaaacgtaataataattcttagaaaatagggactcctttttgcggaataatccatagggggcgaggccaactctcgggagtcgaggtatcttctccccaaccactgctcttattttaattattgcagacggaagttgaaaactattgacatagtaaatagctctgggtggcttgaaacgaaagtttaactttgcggacaaacaggacttattgtagggggtggtcaaaatagtcccggcggggcggggccatgacccctgacgtcgccggtccggcgcgcagttcagtttggcggttccggtaccgctctcacattggggcgggatgtgggagcggctgaactgcgcagcagaggacttttattctcgtctccttcagaaatttaatgaagaaaagaaaggaatccgtaaagacccatttctctatgaggctgatgtccaagtgcagttgatcagcaaaggccaaccaaaccctttgaaaaatattctaaatgaaaatgacatagtattcatagtggaaaaagtgcctttagaaaaggaagaaacaagtcatattgaagaacttcaatctgaagaaactgccatatctgatttctctactggcgaaaatgttggaccacttgctttaccagttgggaaggcaaggcagttaattggactttacaccatggctcacaatcctaatatgacccatttgaagattaatctgccagttactgcccttcctcccctttgggtaagatgtgacagttcagatcctgaaggtacttgttggctaggagctgagcttatcacaacaaacaacagcattacaggaattgtcttatatgtggtcagttgtaaagctgataaaaattattctgtaaatcttgaaaacctaaaaaatttacacaagaaaagacatcacttgtctactgtaacatccaaaggctttgcccagtatgagctctttaagtcctctgccttggatgatacaatcacagcatcacaaactgcgatcgctttggatatttcctggagtcctgtggatgagattcttcaaatccctccactctcttcaactgcaactctgaatattaaagtggaatcaggagagcccagaggtcctttgaatcatctctacagagaactgaaatttcttcttgttttggctgatggtttgaggactggtgtcactgaatggctcgagcccctggaagcaaaatctgctgttgaacttgttcaggaatttctgaatgacttaaataagctggatggatttggtgattctacaaaaaaagacactgaggttgagaccttgaagcatgacactgctgcagtcgatcgttccgtcaagcgtcttttcaaagttcggagtgatcttgattttgctgagcaactgtggtgcaaaatgagcagtagtgtgatttcataccaagacttggtgaagtgtttcacattgatcatccagagtctacaacgtggtgatatacagccatggctccatagtggaagtaacagtttactaagtaagctcattcatcagtcttatcatggaaccatggacacagtttctctcagtgggactattccagttcaaatgcttttggaaattggtttggacaaactaaagaaagattatatcagttttttcataggtcaggaacttgcatctttgaatcatttggaatacttcattgctccatcagtagatatacaagaacaggtttatcgtgtccaaaaactccaccatattctagaaatattagtcagttgcatgcctttcattaaatctcaacatgaactcctcttttctttaacacagatctgcataaagtattacaaacaaaatcctcttgatgagcaacacatttttcagctgccagtcagaccaactgctgtaaagaacttatatcaaagtgagaagccacagaaatggagagtggaaatatatagtggtcaaaagaagattaagacagtttggcaactgagtgacagctcacccatagaccatctgaattttcacaaacctgatttttcggaattaacactaaacggtagcctggaagaaaggatattctttactaacatggttacctgcagccaggtgcatttcaagtgaagtgtgctgatgaagtcctctataagcacaagccaaaaagagaaagagaaaaaaaggtaattattgtagaacctgaaaacagcaatgtatggaaaccctcaaagcagaaaagggaggaagatcctgaagattctcttatgaagctccaaaattgataatcctgtctcagctctgcctcctcaggaggagcattagtagaacagcagtgatgaggacacagagggagcagacagtgggtaccacgatctccgtaaccatttgcatgtgacttagcaagggctctgaaatgacaaagagaacgagcaccacaaatgagaacaggatcattttagtaaatacagctttatcccaaaagctttaactgtattgggaaaacttaaaaaatagcatcctcaaattttctgattcttatttgccatgaaatagaacttagtaaattaaatgttatttgaaaatgttataagagctttgtaaatatttcagaaaatatgggataaatgcctgaatttggttcttctacaggtgctataataaagtccatctctcaatacttatactttctaaattcatctcagaatattagcagccatattccacagttcctataatttttactgggggggattgtgataggaaagtccttgggaaacatttccaatctttcaaaatattattgtgtatcttaagaagtataggaacttgtatgttgaaatgttgtatggtagttcttgtatagttaaataataatctttttaagagttaatgataagcatatgttatgtgcattattaataaaatagtggccacttaggtaatacccacttttatcttgtgtgctggggtactctggttactgagataaataaggcactggacatcctcacgtggagttcacaggctcatcagtgaattctgtaccacatttcaacctggttatttaagttaatggaatatacattcttagtatgcctgatattaaattgtgagggggatgcatgtgttatgggcnaaaatagagttggagatnggttgcttcntttgtcncataagtgggtgttaaaggaggatttgttgcttggaaaaggg

SEQ ID NO: 661342 - DNA, 180 bp, Homo sapiens
aacactaccacatagatgtttcttgtgcatatatctctttgtttttgcagtatatctgtaggatcaactttcttgagtggaattgtcaggtcaccgggttttgtgcacttcactatgtatatatatgccacgtggtgtcacatatatatgtcacattccctccacattgtttacgtgtgc

SEQ ID NO: 661343 - DNA, 1379 bp, Homo sapiens
tttttttaaaaacgagagtgttatttctttatttgtgggaaattacggtatctattttcttccaaacgtaataataattcttagaaaatagggactcctttttgcggaataatccatagggggcgaggccaactctcgggagtcgaggtatcttctccccaaccactgctcttattttaattattgcagacggaagttgaaaactattgacatagtaaatagctctgggtggcttgaaacgaaagtttaactttgcggacaaacaggacttattgtagggggtggtcaaaatagtcccggcggggcggggccatgacccctgacgtcgccggtccggcgcgcagttcagtttggcggttccggtaccgctctcacattggggcgggatgtgggagcggctgaactgcgcagcagaggacttttattctcgtctccttcagaaatttaatgaagaaaagaaaggaatccgtaaagacccatttctctatgaggctgatgtccaagtgcagttgatcagcaaaggccaaccaaaccctttgaaaaatattctaaatgaaaatgacatagtattcatagtggaaaaagtgcctttagaaaaggaagaaacaagtcatattgaagaacttcaatctgaagaaactgccatatctgatttctctactggcgaaaatgttggaccacttgctttaccagttgggaaggcaaggcagttaattggactttacaccatggctcacaatcctaatatgacccatttgaagattaatctgccagttactgcccttcctcccctttgggtaagatgtgacagttcagatcctgaaggtacttgttggctaggagctgagcttatcacaacaaacaacagcattacaggaattgtcttatatgtggtcagttgtaaagctgataaaaattattctgtaaatcttgaaaacctaaaaaatttacacaagaaaagacatcacttgtctactgtaacatccaaaggctttgcccagtatgagctctttaagtcctctgccttggatgatacaatcacagcatcacaaactgcgatcgctttggatatttcctggagtcctgtggatgagattcttcaaatccctccactctcttcaaactggcaaatccggaatatttaaaggtgggaatcaagggagaagcccaaagggtccttggaactcaccttcttaacgaggaaaccggacatatctttcctgggtatggcgagcagggattcacgcacgtgggcgtcccttcagagtgtgtctagactccgtgtgatgccaactgtcgcttgtaacagtgtacgaaaacggaaaggacgaaaaaccggacggatgcgaggcctccaacacaacacggtgaacataaca

SEQ ID NO: 661344 - DNA, 100 bp, Homo sapiens
gaaaagtctcgatagagagacagcatagactctgagtccgatggtcgttaagtgaacgtcgatggatatattcctctacttggtatgcggtgctacagta

SEQ ID NO: 661345 - DNA, 3343 bp, Homo sapiens
  misc_feature (3266)..(3266): n is a, c, g, or t
  misc_feature (3284)..(3284): n is a, c, g, or t
  misc_feature (3294)..(3294): n is a, c, g, or t
  misc_feature (3301)..(3301): n is a, c, g, or t
tttttttaaaaacgagagtgttatttctttatttgtgggaaattacggtatctattttcttccaaacgtaataataattcttagaaaatagggactcctttttgcggaataatccatagggggcgaggccaactctcgggagtcgaggtatcttctccccaaccactgctcttattttaattattgcagacggaagttgaaaactattgacatagtaaatagctctgggtggcttgaaacgaaagtttaactttgcggacaaacaggacttattgtagggggtggtcaaaatagtcccggcggggcggggccatgacccctgacgtcgccggtccggcgcgcagttcagtttggcggttccggtaccgctctcacattggggcgggatgtgggagcggctgaactgcgcagcagaggacttttattctcgtctccttcagtgtcctgcagagataaagtgatgactgactcctgagtgtgaataacgggagagataatgtagttctgtttttcacatgtggttctgcgtttcaggaaatttaatgaagaaaagaaaggaatccgtaaagacccatttctctatgaggctgatgtccaagtgcagttgatcagcaaaggccaaccaaaccctttgaaaaatattctaaatgaaaatgacatagtattcatagtggaaaaagtgcctttagaaaaggaagaaacaagtcatattgaagaacttcaatctgaagaaactgccatatctgatttctctactggcgaaaatgttggaccacttgctttaccagttgggaaggcaaggcagttaattggactttacaccatggctcacaatcctaatatgacccatttgaagattaatctgccagttactgcccttcctcccctttgggtaagatgtgacagttcagatcctgaaggtacttgttggctaggagctgagcttatcacaacaaacaacagcattacaggaattgtcttatatgtggtcagttgtaaagctgataaaaattattctgtaaatcttgaaaacctaaaaaatttacacaagaaaagacatcacttgtctactgtaacatccaaaggctttgcccagtatgagctctttaagtcctctgccttggatgatacaatcacagcatcacaaactgcgatcgctttggatatttcctggagtcctgtggatgagattcttcaaatccctccactctcttcaactgcaactctgaatattaaagtggaatcaggagagcccagaggtcctttgaatcatctctacagagaactgaaatttcttcttgttttggctgatggtttgaggactggtgtcactgaatggctcgagcccctggaagcaaaatctgctgttgaacttgttcaggaatttctgaatgacttaaataagctggatggatttggtgattctacaaaaaaagacactgaggttgagaccttgaagcatgacactgctgcagtcgatcgttccgtcaagcgtcttttcaaagttcggagtgatcttgattttgctgagcaactgtggtgcaaaatgagcagtagtgtgatttcataccaagacttggtgaagtgtttcacattgatcatccagagtctacaacgtggtgatatacagccatggctccatagtggaagtaacagtttactaagtaagctcattcatcagtcttatcatggaaccatggacacagtttctctcagtgggactattccagttcaaatgcttttggaaattggtttggacaaactaaagaaagattatatcagttttttcataggtcaggaacttgcatctttgaatcatttggaatacttcattgctccatcagtagatatacaagaacaggtttatcgtgtccaaaaactccaccatattctagaaatattagtcagttgcatgcctttcattaaatctcaacatgaactcctcttttctttaacacagatctgcataaagtattacaaacaaaatcctcttgatgagcaacacatttttcagctgccagtcagaccaactgctgtaaagaacttatatcaaagtgagaagccacagaaatggagagtggaaatatatagtggtcaaaagaagattaagacagtttggcaactgagtgacagctcacccatagaccatctgaattttcacaaacctgatttttcggaattaacactaaacggtagcctggaagaaaggatattctttactaacatggttacctgcagccaggtgcatttcaagtgaagtgtgctgatgaagtcctctataagcacaagccaaaaagagaaagagaaaaaaaggtaattattgtagaacctgaaaacagcaatgtatggaaaccctcaaagcagaaaagggaggaagatcctgaagattctcttatgaagctccaaaattgataatcctgtctcagctctgcctcctcaggaggagcattagtagaacagcagtgatgaggacacagagggagcagacagtgggtaccacgatctccgtaaccatttgcatgtgacttagcaagggctctgaaatgacaaagagaacgagcaccacaaatgagaacaggatcattttagtaaatacagctttatcccaaaagctttaactgtattgggaaaacttaaaaaatagcatcctcaaattttctgattcttatttgccatgaaatagaacttagtaaattaaatgttatttgaaaatgttataagagctttgtaaatatttcagaaaatatgggataaatgcctgaatttggttcttctacaggtgctataataaagtccatctctcaatacttatactttctaaattcatctcagaatattagcagccatattccacagttcctataatttttactgggggggattgtgataggaaagtccttgggaaacatttccaatctttcaaaatattattgtgtatcttaagaagtataggaacttgtatgttgaaatgttgtatggtagttcttgtatagttaaataataatctttttaagagttaatgataagcatatgttatgtgcattattaataaaatagtggccacttaggtaatacccacttttatcttgtgtgctggggtactctggttactgagataaataaggcactggacatcctcacgtggagttcacaggctcatcagtgaattctgtaccacatttcaacctggttatttaagttaatggaatatacattcttagtatgcctgatattaaattgtgagggggatgcatgtgttatgggcnaaaatagagttggagatnggttgcttcntttgtcncataagtgggtgttaaaggaggatttgttgcttggaaaaggg

SEQ ID NO: 661346 - DNA, 547 bp, Homo sapiens
  misc_feature (92)..(95): n is a, c, g, or t
  misc_feature (98)..(99): n is a, c, g, or t
  misc_feature (113)..(113): n is a, c, g, or t
  misc_feature (188)..(188): n is a, c, g, or t
  misc_feature (191)..(191): n is a, c, g, or t
tgcaggtcagccagctggccatgtgtgggccctgtctgggccagccaccttgtgtcctggagtggaggcagcacagacagtgagtgacgaannnnagnnaggacgaggaggantgaggaagacgaggaggcattggctgtgcagcccgtggaggggccacccctctgtcctaccccagccctggcctnagnctccaggccccgagctggacatgccgaccgttatgagcccatgttgccatatcatgaattgccgcctagacctatggcccccctgtaggtcgtcctgtgtggatggatatgatgcttgcacatcttggtgcctccatgctccctacatggggcccctcagttgtgccccatgtggcctccccactcagagcctggccagccctcctgcccgtgacgccctgcagctcaggtctcaggagacccacaccacccctcagcacctcaggaatgccacagaaggcagcaaagtcacggagccctcagccccttgccaaggcctttggttagcaatcggggaccttcaggccaccttccac

SEQ ID NO: 661347 - DNA, 122 bp, Homo sapiens
ttcttggatcgtaaacataagctcatccattgcaccttccctggcctcccggagtgcggcgtgtgatacagcagggacctggccgccgcgccgagcccgagtttggggacgtggagagctgg

SEQ ID NO: 661348 - DNA, 3100 bp, Homo sapiens
  misc_feature (3023)..(3023): n is a, c, g, or t
  misc_feature (3041)..(3041): n is a, c, g, or t
  misc_feature (3051)..(3051): n is a, c, g, or t
  misc_feature (3058)..(3058): n is a, c, g, or t
tttttttaaaaacgagagtgttatttctttatttgtgggaaattacggtatctattttcttccaaacgtaataataattcttagaaaatagggactcctttttgcggaataatccatagggggcgaggccaactctcgggagtcgaggtatcttctccccaaccactgctcttattttaattattgcagacggaagttgaaaactattgacatagtaaatagctctgggtggcttgaaacgaaagtttaactttgcggacaaacaggacttattgtagggggtggtcaaaatagtcccggcggggcggggccatgacccctgacgtcgccggtccggcgcgcagttcagtttggcggttccggtaccgctctcacattggggcgggatgtgggagcggctgaactgcgcagcagaggacttttattctcgtctccttcacctttagaaaaggaagaaacaagtcatattgaagaacttcaatctgaagaaactgccatatctgatttctctactggcgaaaatgttggaccacttgctttaccagttgggaaggcaaggcagttaattggactttacaccatggctcacaatcctaatatgacccatttgaagattaatctgccagttactgcccttcctcccctttgggtaagatgtgacagttcagatcctgaaggtacttgttggctaggagctgagcttatcacaacaaacaacagcattacaggaattgtcttatatgtggtcagttgtaaagctgataaaaattattctgtaaatcttgaaaacctaaaaaatttacacaagaaaagacatcacttgtctactgtaacatccaaaggctttgcccagtatgagctctttaagtcctctgccttggatgatacaatcacagcatcacaaactgcgatcgctttggatatttcctggagtcctgtggatgagattcttcaaatccctccactctcttcaactgcaactctgaatattaaagtggaatcaggagagcccagaggtcctttgaatcatctctacagagaactgaaatttcttcttgttttggctgatggtttgaggactggtgtcactgaatggctcgagcccctggaagcaaaatctgctgttgaacttgttcaggaatttctgaatgacttaaataagctggatggatttggtgattctacaaaaaaagacactgaggttgagaccttgaagcatgacactgctgcagtcgatcgttccgtcaagcgtcttttcaaagttcggagtgatcttgattttgctgagcaactgtggtgcaaaatgagcagtagtgtgatttcataccaagacttggtgaagtgtttcacattgatcatccagagtctacaacgtggtgatatacagccatggctccatagtggaagtaacagtttactaagtaagctcattcatcagtcttatcatggaaccatggacacagtttctctcagtgggactattccagttcaaatgcttttggaaattggtttggacaaactaaagaaagattatatcagttttttcataggtcaggaacttgcatctttgaatcatttggaatacttcattgctccatcagtagatatacaagaacaggtttatcgtgtccaaaaactccaccatattctagaaatattagtcagttgcatgcctttcattaaatctcaacatgaactcctcttttctttaacacagatctgcataaagtattacaaacaaaatcctcttgatgagcaacacatttttcagctgccagtcagaccaactgctgtaaagaacttatatcaaagtgagaagccacagaaatggagagtggaaatatatagtggtcaaaagaagattaagacagtttggcaactgagtgacagctcacccatagaccatctgaattttcacaaacctgatttttcggaattaacactaaacggtagcctggaagaaaggatattctttactaacatggttacctgcagccaggtgcatttcaagtgaagtgtgctgatgaagtcctctataagcacaagccaaaaagagaaagagaaaaaaaggtaattattgtagaacctgaaaacagcaatgtatggaaaccctcaaagcagaaaagggaggaagatcctgaagattctcttatgaagctccaaaattgataatcctgtctcagctctgcctcctcaggaggagcattagtagaacagcagtgatgaggacacagagggagcagacagtgggtaccacgatctccgtaaccatttgcatgtgacttagcaagggctctgaaatgacaaagagaacgagcaccacaaatgagaacaggatcattttagtaaatacagctttatcccaaaagctttaactgtattgggaaaacttaaaaaatagcatcctcaaattttctgattcttatttgccatgaaatagaacttagtaaattaaatgttatttgaaaatgttataagagctttgtaaatatttcagaaaatatgggataaatgcctgaatttggttcttctacaggtgctataataaagtccatctctcaatacttatactttctaaattcatctcagaatattagcagccatattccacagttcctataatttttactgggggggattgtgataggaaagtccttgggaaacatttccaatctttcaaaatattattgtgtatcttaagaagtataggaacttgtatgttgaaatgttgtatggtagttcttgtatagttaaataataatctttttaagagttaatgataagcatatgttatgtgcattattaataaaatagtggccacttaggtaatacccacttttatcttgtgtgctggggtactctggttactgagataaataaggcactggacatcctcacgtggagttcacaggctcatcagtgaattctgtaccacatttcaacctggttatttaagttaatggaatatacattcttagtatgcctgatattaaattgtgagggggatgcatgtgttatgggcnaaaatagagttggagatnggttgcttcntttgtcncataagtgggtgttaaaggaggatttgttgcttggaaaaggg

SEQ ID NO: 661349 - DNA, 546 bp, Homo sapiens
  misc_feature (283)..(283): n is a, c, g, or t
ctacaggatcttggaatcctcctgctgctgttctcatggttctcctgagctccctgtgtttgctgctccccgacgaggacgcattgcccttcctgactctcgcctcgagggacccagccaagatgggaaaactgagtgcgtccaagaggggcctggatcgatacgtggtgactgttctaatatatagctgcccttctatctaccctactgtgctgcctagtgccacgtgctggccacacatgctgcacacactgctcggcagcacgcttgtacctgggcccanccttggttgtccacggtcttggcagacgggcagcagtgtccccagtgtgcccaatgatctacaagttactactccctcgctggcctcccctgcctctcctcgctgggccctcggattcctatagcctttggtaccctagtgcagctggtgagaagcttcagccgtaggacaggagcaggctccaaggggctgcagagcagctactctgaggaatatctgaggaacctcctttgcaggaagaagctgggaagcagcaggaggaa

SEQ ID NO: 661350 - DNA, 3137 bp, Homo sapiens
  misc_feature (3060)..(3060): n is a, c, g, or t
  misc_feature (3078)..(3078): n is a, c, g, or t
  misc_feature (3088)..(3088): n is a, c, g, or t
  misc_feature (3095)..(3095): n is a, c, g, or t
tttttttaaaaacgagagtgttatttctttatttgtgggaaattacggtatctattttcttccaaacgtaataataattcttagaaaatagggactcctttttgcggaataatccatagggggcgaggccaactctcgggagtcgaggtatcttctccccaaccactgctcttattttaattattgcagacggaagttgaaaactattgacatagtaaatagctctgggtggcttgaaacgaaagtttaactttgcggacaaacaggacttattgtagggggtggtcaaaatagtcccggcggggcggggccatgacccctgacgtcgccggtccggcgcgcagttcagtttggcggttccggtaccgctctcacattggggcgggatgtgggagcggctgaactgcgcagcagaggacttttattctcgtctccttcagaaatttaatgaagaaaagaaaggaatccgtaaagacccatttctctatgaggctgatgtccaagtgcagttgatcagcaaaggccaaccaaaccctttgaaaaatattctaaatgaaaatgacatagtattcatagtggaaaaagtgcctttagaaaaggaagaaacaagtcatattgaagaacttcaatctgaagaaactgccatatctgatttctctactggcgaaaatgttggaccacttgctttaccagttgggaaggcaaggcagttaattggactttacaccatggctcacaatcctaatatgacccatttgaagattaatctgccagttactgcccttcctccccttgctgataaaaattattctgtaaatcttgaaaacctaaaaaatttacacaagaaaagacatcacttgtctactgtaacatccaaaggctttgcccagtatgagctctttaagtcctctgccttggatgatacaatcacagcatcacaaactgcgatcgctttggatatttcctggagtcctgtggatgagattcttcaaatccctccactctcttcaactgcaactctgaatattaaagtggaatcaggagagcccagaggtcctttgaatcatctctacagagaactgaaatttcttcttgttttggctgatggtttgaggactggtgtcactgaatggctcgagcccctggaagcaaaatctgctgttgaacttgttcaggaatttctgaatgacttaaataagctggatggatttggtgattctacaaaaaaagacactgaggttgagaccttgaagcatgacactgctgcagtcgatcgttccgtcaagcgtcttttcaaagttcggagtgatcttgattttgctgagcaactgtggtgcaaaatgagcagtagtgtgatttcataccaagacttggtgaagtgtttcacattgatcatccagagtctacaacgtggtgatatacagccatggctccatagtggaagtaacagtttactaagtaagctcattcatcagtcttatcatggaaccatggacacagtttctctcagtgggactattccagttcaaatgcttttggaaattggtttggacaaactaaagaaagattatatcagttttttcataggtcaggaacttgcatctttgaatcatttggaatacttcattgctccatcagtagatatacaagaacaggtttatcgtgtccaaaaactccaccatattctagaaatattagtcagttgcatgcctttcattaaatctcaacatgaactcctcttttctttaacacagatctgcataaagtattacaaacaaaatcctcttgatgagcaacacatttttcagctgccagtcagaccaactgctgtaaagaacttatatcaaagtgagaagccacagaaatggagagtggaaatatatagtggtcaaaagaagattaagacagtttggcaactgagtgacagctcacccatagaccatctgaattttcacaaacctgatttttcggaattaacactaaacggtagcctggaagaaaggatattctttactaacatggttacctgcagccaggtgcatttcaagtgaagtgtgctgatgaagtcctctataagcacaagccaaaaagagaaagagaaaaaaaggtaattattgtagaacctgaaaacagcaatgtatggaaaccctcaaagcagaaaagggaggaagatcctgaagattctcttatgaagctccaaaattgataatcctgtctcagctctgcctcctcaggaggagcattagtagaacagcagtgatgaggacacagagggagcagacagtgggtaccacgatctccgtaaccatttgcatgtgacttagcaagggctctgaaatgacaaagagaacgagcaccacaaatgagaacaggatcattttagtaaatacagctttatcccaaaagctttaactgtattgggaaaacttaaaaaatagcatcctcaaattttctgattcttatttgccatgaaatagaacttagtaaattaaatgttatttgaaaatgttataagagctttgtaaatatttcagaaaatatgggataaatgcctgaatttggttcttctacaggtgctataataaagtccatctctcaatacttatactttctaaattcatctcagaatattagcagccatattccacagttcctataatttttactgggggggattgtgataggaaagtccttgggaaacatttccaatctttcaaaatattattgtgtatcttaagaagtataggaacttgtatgttgaaatgttgtatggtagttcttgtatagttaaataataatctttttaagagttaatgataagcatatgttatgtgcattattaataaaatagtggccacttaggtaatacccacttttatcttgtgtgctggggtactctggttactgagataaataaggcactggacatcctcacgtggagttcacaggctcatcagtgaattctgtaccacatttcaacctggttatttaagttaatggaatatacattcttagtatgcctgatattaaattgtgagggggatgcatgtgttatgggcnaaaatagagttggagatnggttgcttcntttgtcncataagtgggtgttaaaggaggatttgttgcttggaaaaggg

SEQ ID NO: 661351 - DNA, 169 bp, Homo sapiens
gaggggccttcagacacttaacgttattaactctcctttaaatatctcacacacacacacacactaacaccatacgtgtattctatacaattttgacactttcattctgccaaagtgattctttcattactatgattcaagttgtttttatccatcctgtcttacaaat

SEQ ID NO: 661352 - DNA, 391 bp, Homo sapiens
  misc_feature (57)..(57): n is a, c, g, or t
  misc_feature (99)..(99): n is a, c, g, or t
  misc_feature (102)..(102): n is a, c, g, or t
  misc_feature (292)..(292): n is a, c, g, or t
gtacttaatctttaaaaatcttcaaagggcacccatttttctttagttaacaatgtncgaaagattgcattgatgtgattaaattcccaggaccctcanttntttagggatggactaaatggccgctatcatagcttataacagtatcttgaatgtgatggtgcttatgttgagaagtaaagtttacatctttaaacttttatcttttaatctcatttttccatgaacattttgaattctcctcatcgttatatgtttgtatgcaagtgagtgtgtggttgtatgagctttnatcagcctagacagggtgaaacagacaaacctcacctttagtctttctaaatgtgaaggcttaatcttgttctcaccccattgtagttctcttgaaagg

SEQ ID NO: 661353 - DNA, 2424 bp, Homo sapiens
  misc_feature (2347)..(2347): n is a, c, g, or t
  misc_feature (2365)..(2365): n is a, c, g, or t
  misc_feature (2375)..(2375): n is a, c, g, or t
  misc_feature (2382)..(2382): n is a, c, g, or t
aatgtgagggattacagttttgtagctctgacaatgtaattttgagttgtgcctttacatttctttctttcatttcctatagctgataaaaattattctgtaaatcttgaaaacctaaaaaatttacacaagaaaagacatcacttgtctactgtaacatccaaaggctttgcccagtatgagctctttaagtcctctgccttggatgatacaatcacagcatcacaaactgcgatcgctttggatatttcctggagtcctgtggatgagattcttcaaatccctccactctcttcaactgcaactctgaatattaaagtggaatcaggagagcccagaggtcctttgaatcatctctacagagaactgaaatttcttcttgttttggctgatggtttgaggactggtgtcactgaatggctcgagcccctggaagcaaaatctgctgttgaacttgttcaggaatttctgaatgacttaaataagctggatggatttggtgattctacaaaaaaagacactgaggttgagaccttgaagcatgacactgctgcagtcgatcgttccgtcaagcgtcttttcaaagttcggagtgatcttgattttgctgagcaactgtggtgcaaaatgagcagtagtgtgatttcataccaagacttggtgaagtgtttcacattgatcatccagagtctacaacgtggtgatatacagccatggctccatagtggaagtaacagtttactaagtaagctcattcatcagtcttatcatggaaccatggacacagtttctctcagtgggactattccagttcaaatgcttttggaaattggtttggacaaactaaagaaagattatatcagttttttcataggtcaggaacttgcatctttgaatcatttggaatacttcattgctccatcagtagatatacaagaacaggtttatcgtgtccaaaaactccaccatattctagaaatattagtcagttgcatgcctttcattaaatctcaacatgaactcctcttttctttaacacagatctgcataaagtattacaaacaaaatcctcttgatgagcaacacatttttcagctgccagtcagaccaactgctgtaaagaacttatatcaaagtgagaagccacagaaatggagagtggaaatatatagtggtcaaaagaagattaagacagtttggcaactgagtgacagctcacccatagaccatctgaattttcacaaacctgatttttcggaattaacactaaacggtagcctggaagaaaggatattctttactaacatggttacctgcagccaggtgcatttcaagtgaagtgtgctgatgaagtcctctataagcacaagccaaaaagagaaagagaaaaaaaggtaattattgtagaacctgaaaacagcaatgtatggaaaccctcaaagcagaaaagggaggaagatcctgaagattctcttatgaagctccaaaattgataatcctgtctcagctctgcctcctcaggaggagcattagtagaacagcagtgatgaggacacagagggagcagacagtgggtaccacgatctccgtaaccatttgcatgtgacttagcaagggctctgaaatgacaaagagaacgagcaccacaaatgagaacaggatcattttagtaaatacagctttatcccaaaagctttaactgtattgggaaaacttaaaaaatagcatcctcaaattttctgattcttatttgccatgaaatagaacttagtaaattaaatgttatttgaaaatgttataagagctttgtaaatatttcagaaaatatgggataaatgcctgaatttggttcttctacaggtgctataataaagtccatctctcaatacttatactttctaaattcatctcagaatattagcagccatattccacagttcctataatttttactgggggggattgtgataggaaagtccttgggaaacatttccaatctttcaaaatattattgtgtatcttaagaagtataggaacttgtatgttgaaatgttgtatggtagttcttgtatagttaaataataatctttttaagagttaatgataagcatatgttatgtgcattattaataaaatagtggccacttaggtaatacccacttttatcttgtgtgctggggtactctggttactgagataaataaggcactggacatcctcacgtggagttcacaggctcatcagtgaattctgtaccacatttcaacctggttatttaagttaatggaatatacattcttagtatgcctgatattaaattgtgagggggatgcatgtgttatgggcnaaaatagagttggagatnggttgcttcntttgtcncataagtgggtgttaaaggaggatttgttgcttggaaaaggg

SEQ ID NO: 661354 - DNA, 1109 bp, Homo sapiens
  misc_feature (600)..(600): n is a, c, g, or t
  misc_feature (690)..(690): n is a, c, g, or t
ccacaaaaccgggtttacgacaggacatattttcaacccccccttagaccccttgtgatgtcccaaatgcctcccattattcttattgaattttgtgatccctcgtagattcctgtgatcaagcccttgtggtgactttataaccccggcttggtccaattggggaagaaggttgtgaacacagtcccacgcccacctttaaaagggggactttattgggtgttcccacaagccttgggttttgagggagcggtggcctgaccaccccccttgtgacgggcccaaagaggttgaaataatttcgagagggaacacagtttgggcgtttcaagaaaccttagcgtaatttgctgtgcccccatttggaaaagaaaattggtgggtggttgtttatacttacacgcccttgcgtatgaaatgcccacgagaagttctggaacacatgtgttaatgccaaaccctcgtgtcccacgttgcggtgtgcttcgcgtggacaacaaccccacgttgcccacaaaaggagaatggctctcccaccccacgagaggagaactcggttaaccacatagatgtacacacctgagatgccccacagagacnccgctggggggatacctcgggcggagtccctcgcccacaaatttgccctgagaggcaccgagactttgagaaactcggcccacggaaagntatatggttaataatgttgtatacctgagatatatcaccctataaagagtgagaacttctttcacaaaagtggctctctcgtaactatggaaaggaatcccaaggcacgaattttctttggtcttgctccacggaatgggtggtgaaataatggccgaataagagaaaatccttaaacctaccacgaatggaaaatctccctatagtatttatacctcactgaattcccgtccaaaggaagcacgagttgttaaagaggtactggaaataaggggctgaaggagtctataattcccctattgcacattttccttaatgtataaattttccacagaatggtgaatgttacttttcagtgtactcatatgtctcattttcatctaaaattaaatggcaggaaacacaggactgcatagaga

SEQ ID NO: 661355 - DNA, 2425 bp, Homo sapiens
  misc_feature (2402)..(2402): n is a, c, g, or t
tttttttaaaaacgagagtgttatttctttatttgtgggaaattacggtatctattttcttccaaacgtaataataattcttagaaaatagggactcctttttgcggaataatccatagggggcgaggccaactctcgggagtcgaggtatcttctccccaaccactgctcttattttaattattgcagacggaagttgaaaactattgacatagtaaatagctctgggtggcttgaaacgaaagtttaactttgcggacaaacaggacttattgtagggggtggtcaaaatagtcccggcggggcggggccatgacccctgacgtcgccggtccggcgcgcagttcagtttggcggttccggtaccgctctcacattggggcgggatgtgggagcggctgaactgcgcagcagaggacttttattctcgtctccttcagtgtcctgcagagataaagtgatgactgactcctgagtgtgaataacgggagagataatgtagttctgtttttcacatgtggttctgcgtttcaggaaatttaatgaagaaaagaaaggaatccgtaaagacccatttctctatgaggctgatgtccaagtgcagttgatcagcaaaggccaaccaaaccctttgaaaaatattctaaatgaaaatgacatagtattcatagtggaaaaagtgcctttagaaaaggaagaaacaagtcatattgaagaacttcaatctgaagaaactgccatatctgatttctctactggcgaaaatgttggaccacttgctttaccagttgggaaggcaaggcagttaattggactttacaccatggctcacaatcctaatatgacccatttgaagattaatctgccagttactgcccttcctcccctttgggtaagatgtgacagttcagatcctgaaggtacttgttggctaggagctgagcttatcacaacaaacaacagcattacaggaattgtcttatatgtggtcagttgtaaagctgataaaaattattctgtaaatcttgaaaacctaaaaaatttacacaagaaaagacatcacttgtctactgtaacatccaaaggctttgcccagtatgagctctttaagtcctctgccttggatgatacaatcacagcatcacaaactgcgatcgctttggatatttcctggagtcctgtggatgagattcttcaaatccctccactctcttcaactgcaactctgaatattaaagtggaatcaggagagcccagaggtcctttgaatcatctctacagagaactgaaatttcttcttgttttggctgatggtttgaggactggtgtcactgaatggctcgagcccctggaagcaaaatctgctgttgaacttgttcaggaatttctgaatgacttaaataagctggatggatttggtgattctacaaaaaaagacactgaggttgagaccttgaagcatgacactgctgcagtcgatcgttccgtcaagcgtcttttcaaagttcggagtgatcttgattttgctgagcaactgtggtgcaaaatgagcagtagtgtgatttcataccaagacttggtgaagtgtttcacattgatcatccagagtctacaacgtggtgatatacagccatggctccatagtggaagtaacagtttactaagtaagctcattcatcagtcttatcatggaaccatggacacagtttctctcagtgggactattccagttcaaatgcttttggaaattggtttggacaaactaaagaaagattatatcagttttttcataggtcaggaacttgcatctttgaatcatttggaatacttcattgctccatcagtagatatacaagaacaggtttatcgtgtccaaaaactccaccatattctagaaatattagtcagttgcatgcctttcattaaatctcaacatgaactcctcttttctttaacacagatctgcataaagtattacaaacaaaatcctcttgatgagcaacacatttttcagctgccagtcagaccaactgctgtaaagaacttatatcaaagtgagaagccacagaaatggagagtggaaatatatagtggtcaaaagaagattaagacagtttggcaactgagtgacagctcacccatagaccatctgaattttcacaaacctgatttttcggaattaacactaaacggtagcctggaagaaaggatattctttactaacatggttacctgcagccaggtgcatttcaagtgaagtgtgctgatgaagtcctctataaggctggagtgcagtggtgtgatctcagctcactgcaaccttcacctcccaggagaatggcgtgaacccgggaggtggagcttgcagtgagccaagatcgcgctactgcactctagcctgngcgacagagcaaaactccgtctc

SEQ ID NO: 661356 - DNA, 1117 bp, Homo sapiens
ggtggcgctggcgaggtgcgaggcccacgactctgaccctgctccctgccttcagccaagggccccgtgcagcgtcggtcctacatactggcaactgtccgttgggtcttgaactcattatagtgccgatctatccatgcgtgacatgcataagttgtccgcggaagtgacaagaccaccgatgcaagccacgggctgagatgctctattgcaagagggaaggcataatgtgcaccagacatctgtcagttgctgggcccgctccgaggaaacacggcaaagagcgacgaagtcgattcgtgtgctatgtgccacgggccactgcatgtggcctctagtatgtcgaaagaatgccgatgttcggaacatcaatgctatcaaaaatgacagggggcagttgacgttgatgaggaactgcaattcaccaatgtttatggcgtcaaccgagagatacacgtcactacttgcgccaaatggccagaacataagatccatctagttctggattgacgaccaggactaggcatgagtcgaaggtagacccagtgaaagccattgtaggatgaacgcatggaatttcttactcgtaaagagcaatgcgcgttcgagccttgtctgtgtacatgggcttcgggataagaatcattctagaggcccatttgagtcccgctgtgccattctctcccgtggtgcacaaaagcttgaaccgaaaggccccgagaattccctctagccagggcttgattggcagtgttcattcggcacaagggcagcccgggtacccctgaacaggtggattgaacggcctctggaagggcccatccattttttcacggggaccaatgggcagtatcttgaagcgccggcgcgctggaaacaaccttgtaagtcccaccgcatcacaagggaagtcggactccatttagaccggtggggacacgtgcttcacacggccttgtccaaaaccccaacccacattggggtcaacgcgcacagggccgcccggtgtatgtcgacacttaacaaccacagaacctggcaaccggtgtgcggctgggggcaactccaccaagaactactggcccccccgtccgggtctaacatcccagtggtaggc

SEQ ID NO: 661357 - DNA, 2394 bp, Homo sapiens
tttttttaaaaacgagagtgttatttctttatttgtgggaaattacggtatctattttcttccaaacgtaataataattcttagaaaatagggactcctttttgcggaataatccatagggggcgaggccaactctcgggagtcgaggtatcttctccccaaccactgctcttattttaattattgcagacggaagttgaaaactattgacatagtaaatagctctgggtggcttgaaacgaaagtttaactttgcggacaaacaggacttattgtagggggtggtcaaaatagtcccggcggggcggggccatgacccctgacgtcgccggtccggcgcgcagttcagtttggcggttccggtaccgctctcacattggggcgggatgtgggagcggctgaactgcgcagcagaggacttttattctcgtctccttcagtgtcctgcagagataaagtgatgactgactcctgagtgtgaataacgggagagataatgtagttctgtttttcacatgtggttctgcgtttcaggaaatttaatgaagaaaagaaaggaatccgtaaagacccatttctctatgaggctgatgtccaagtgcagttgatcagcaaaggccaaccaaaccctttgaaaaatattctaaatgaaaatgacatagtattcatagtggaaaaagtgcctttagaaaaggaagaaacaagtcatattgaagaacttcaatctgaagaaactgccatatctgatttctctactggcgaaaatgttggaccacttgctttaccagttgggaaggcaaggcagttaattggactttacaccatggctcacaatcctaatatgacccatttgaagattaatctgccagttactgcccttcctcccctttgggtaagatgtgacagttcagatcctgaaggtacttgttggctaggagctgagcttatcacaacaaacaacagcattacaggaattgtcttatatgtggtcagttgtaaagctgataaaaattattctgtaaatcttgaaaacctaaaaaatttacacaagaaaagacatcacttgtctactgtaacatccaaaggctttgcccagtatgagctctttaagtcctctgccttggatgatacaatcacagcatcacaaactgcgatcgctttggatatttcctggagtcctgtggatgagattcttcaaatccctccactctcttcaactgcaactctgaatattaaagtggaatcaggagagcccagaggtcctttgaatcatctctacagagaactgaaatttcttcttgttttggctgatggtttgaggactggtgtcactgaatggctcgagcccctggaagcaaaatctgctgttgaacttgttcaggaatttctgaatgacttaaataagctggatggatttggtgattctacaaaaaaagacactgaggttgagaccttgaagcatgacactgctgcagtcgatcgttccgtcaagcgtcttttcaaagttcggagtgatcttgattttgctgagcaactgtggtgcaaaatgagcagtagtgtgatttcataccaagacttggtgaagtgtttcacattgatcatccagagtctacaacgtggtgatatacagccatggctccatagtggaagtaacagtttactaagtaagctcattcatcagtcttatcatggaaccatggacacagtttctctcagtgggactattccagttcaaatgcttttggaaattggtttggacaaactaaagaaagattatatcagttttttcataggtcaggaacttgcatctttgaatcatttggaatacttcattgctccatcagtagatatacaagaacaggtttatcgtgtccaaaaactccaccatattctagaaatattagtcagttgcatgcctttcattaaatctcaacatgaactcctcttttctttaacacagatctgcataaagtattacaaacaaaatcctcttgatgagcaacacatttttcagctgccagtcagaccaactgctgtaaagaacttatatcaaagtgagaagccacagaaatggagagtggaaatatatagtggtcaaaagaagattaagacagtttggcaactgagtgacagctcacccatagaccatctgaattttcacaaacctgatttttcggaattaacactaaacggtagcctggaagaaaggatattctttactaacatggttacctgcagccaggtgcatttcaagtgaagtgtgctgatgaagtcctctataaggctggagtgcagtggtgtgatctcagctcactgcaaccttcacctcccaggttcaagcgattctcctgcctcagcctcccaagtaaatgggattacagcacaagccaaaaa

SEQ ID NO: 661358 - DNA, 468 bp, Homo sapiens
  misc_feature (14)..(14): n is a, c, g, or t
  misc_feature (40)..(40): n is a, c, g, or t
  misc_feature (49)..(49): n is a, c, g, or t
  misc_feature (67)..(67): n is a, c, g, or t
  misc_feature (106)..(106): n is a, c, g, or t
  misc_feature (169)..(169): n is a, c, g, or t
  misc_feature (171)..(171): n is a, c, g, or t
  misc_feature (193)..(193): n is a, c, g, or t
  misc_feature (272)..(272): n is a, c, g, or t
  misc_feature (312)..(312): n is a, c, g, or t
aatgaatctccccnggtaaatggctgctgtggctgccccnatccccaantgttgcaaccaacccaanagctccctaagtggcctcaatgggtgccctcacttgccnaaactggggcctgcccataaataactggccccaggtaccaatgccccaggttggaccccctgntnctggctgtgcacccccctggancctgccctcccttgggacccagggggagactcctggcctcagccagtgcctccccggcccatctgggtggggtgcccanaaaccctgtgcccccagtttctgctttctggctctgcttnccagggatctaacctggggggtctcagcaattctgtggcagcacatagacagcgatgaacctacccgcccacagcccattttgaggaagaggtgatggcggcaggcaatgcaagagctcagtttattaaatgtgtgcgagtcggacaaaaaaaaaa

SEQ ID NO: 661359 - DNA, 1474 bp, Homo sapiens
tttttttaaaaacgagagtgttatttctttatttgtgggaaattacggtatctattttcttccaaacgtaataataattcttagaaaatagggactcctttttgcggaataatccatagggggcgaggccaactctcgggagtcgaggtatcttctccccaaccactgctcttattttaattattgcagacggaagttgaaaactattgacatagtaaatagctctgggtggcttgaaacgaaagtttaactttgcggacaaacaggacttattgtagggggtggtcaaaatagtcccggcggggcggggccatgacccctgacgtcgccggtccggcgcgcagttcagtttggcggttccggtaccgctctcacattggggcgggatgtgggagcggctgaactgcgcagcagaggacttttattctcgtctccttcagtgtcctgcagagataaagtgatgactgactcctgagtgtgaataacgggagagataatgtagttctgtttttcacatgtggttctgcgtttcaggaaatttaatgaagaaaagaaaggaatccgtaaagacccatttctctatgaggctgatgtccaagtgcagttgatcagcaaaggccaaccaaaccctttgaaaaatattctaaatgaaaatgacatagtattcatagtggaaaaagtgcctttagaaaaggaagaaacaagtcatattgaagaacttcaatctgaagaaactgccatatctgatttctctactggcgaaaatgttggaccacttgctttaccagttgggaaggcaaggcagttaattggactttacaccatggctcacaatcctaatatgacccatttgaagattaatctgccagttactgcccttcctcccctttgggtaagatgtgacagttcagatcctgaaggtacttgttggctaggagctgagcttatcacaacaaacaacagcattacaggaattgtcttatatgtggtcagttgtaaagctgataaaaattattctgtaaatcttgaaaacctaaaaaatttacacaagaaaagacatcacttgtctactgtaacatccaaaggctttgcccagtatgagctctttaagtcctctgccttggatgatacaatcacagcatcacaaactgcgatcgctttggatatttcctggagtcctgtggatgagattcttcaaatccctccactctcttcaaactggcaaatccggaatatttaaaggtgggaatcaagggagaagcccaaagggtccttggaactcaccttcttaacgaggaaaccggacatatctttcctgggtatggcgagcagggattcacgcacgtgggcgtcccttcagagtgtgtctagactccgtgtgatgccaactgtcgcttgtaacagtgtacgaaaacggaaaggacgaaaaaccggacggatgcgaggcctccaacacaacacggtgaacataaca

SEQ ID NO: 661360 - DNA, 171 bp, Homo sapiens
cggcgatccgtccttcgatgagagcctcgcgaggcatggctgcaatctcccaggtctgtcagatcgggtttccatagccgtggtcgtcatccaaccataaatggctgtagtggtctacttgtatacgggtttagggtttgatgaccgggtttgatgacgggtaccgagctc

SEQ ID NO: 661361 - DNA, 149 bp, Homo sapiens
  misc_feature (9)..(9): n is a, c, g, or t
  misc_feature (115)..(115): n is a, c, g, or t
tatagtggncccgcggtatgtttacgaatagatcattgcccctacggcgatctcagcagtccgcaggtgcgcaactgagcgaggtgtcgggacacttttggttggtgatcgtcgngcgcccagatcaattcgcagacacatagctcgcc

SEQ ID NO: 661362 - DNA, 166 bp, Homo sapiens
cctgggctcaaaatctcaggtgtaggcagagccctgtaacttcaggaggctctaggggagaatccatttccttgcctatttcagcttctagagtccatctgccctcctcagcttgtgaaccttccttcatcaaagccagcactcctgccaaaacgggtaccgagct

SEQ ID NO: 661363 - DNA, 126 bp, Homo sapiens
ggaagcccgcgcacacgggctggtagttaaagatcgaccctgacctactcggttatgttatctatagattacagacattacgtatagaaaagcactgtgaaaatccctgtcctcttttgagttctc

SEQ ID NO: 661364 - DNA, 295 bp, Homo sapiens
ctttgtatgagcctggattaaaaatggcgtcctcctctcagtcccagtttcttcccttctcagcatctcaaagccttccccaagttagctccagggcttgggagaaagtgtttcccttcaacaggccctggtgtgtgatgttccctaccctgtgtttgggggcgaggggagggaacttagaggatgcgtcaataggtgcagcaaaccaccatggcacatgtatacctatgtaataagcctgcacgttctacacatgtatcctagaacttaaagtaaaatttaaaaaattaaaaat

SEQ ID NO: 661365 - DNA, 139 bp, Homo sapiens
acccactcgatacagcgaccaaaatccagcaaacagaacaacatcattttcctcaataaagttcacgcaaccgtcattgggtacaaaggctgtgatttacttgccattcttggtatgaacaacagtggggtaccgagct

SEQ ID NO: 661366 - DNA, 138 bp, Homo sapiens
aaaaattttgggggggggggggggaaatttaaccccaaacccccccgggggttcccccccccccctttttcccccccccgggtttggttgggggggttttccccccccccccccccttttaaattttttgggtcccca

SEQ ID NO: 661367 - DNA, 173 bp, Homo sapiens
tctcgtaccgcacgctagggcatcagccaggagcagatcaggagtccgggcgtcttcaaccacttcgacaaggatcatggggggcgctggggccgagagttcaaggctgcctcattagctgggctagaagtggaagaagaaccggcagggtgagggcgagttcaaccgcatca

SEQ ID NO: 661368 - DNA, 127 bp, Homo sapiens
  misc_feature (98)..(98): n is a, c, g, or t
gaagatccccaaccatcaaggtgataaatgagtttctgggggagggaggcatcggccgggcccctactttgcaggaccacacacctctgtcgcccttncaccttcttcgcagaacaatgtgtcacag

SEQ ID NO: 661369 - DNA, 889 bp, Homo sapiens
ggggaaaatggcggacgggaaggcggcaggacggatgaagcctgaaaagtcgcagcgagctggatgccgtcggagtatctgatgaagaagcagaaaaatctgtgaaataatatagacggtttatcttccagtgaaatggaggggtaatagttccagtcgcagcgcatgagaagcgatcagcgtgaagaagaagctggctgagactcctcgaacatgagcctacataggatctccaagtcggatttggcattaggtagtcagactgacgagagaaagcgatcagccatatccatcaacacttgtactccaagtcatgcctaaagaaactgttccaactgttgctccaaatactctttcatgtagcagtagcttgcaagtgaaggatgaagatggataccagcagcatcagttgggaccaaatttccttcaggtaatcggagacgcatgggttttctgaataaagcagtaaggtgtgggagcgaagtgtaaaagtctgcatctggagctgtgcgatgatcaagacaattaattgatgtttgaaataggggtgtgcgtgtgggtgtacagtgacagggatcagcttgcttttataacaggaatgctatcagacctatcttggagccgcttgtggtaactactggcagtatggaggacgattgagtggtacactaataaagtgagaggtggattagaggtactcatgttttatatacagatacaggcattgctattggtgttcagtgatagttcaaggtccggatgtagaaacccatggactttggaatggttttgaacatgtttggctaagggactattgtttaagggagaatttaactatctagtgtgtgcgagctaaagagtttgaagaacggagaactactcggggtga

SEQ ID NO: 661370 - DNA, 364 bp, Homo sapiens
tctgagagtacctgtcttcagagctgacttattctgattagggctcatcttatcaacacattaaattaccctaaaatcttgggactgatcttttattaatactcttaggtcgggggaaacatttccttggagggattctcttccaaggctgcccctcctttgcttcctccacagagacctggtacctgacacgaaagagatggacagagtaccagggagcagcagttcccagctcctgtcagactctctctgtccctaaagttgtcacagctattttcacattgtccacctggacagccaaccaagcattccctaccctcctggcttcagtctggaagatccccagacacaatggcacgtggat

SEQ ID NO: 661371 - DNA, 258 bp, Homo sapiens
  misc_feature (33)..(33): n is a, c, g, or t
atttttaagggggccaaaacccctttaaaaaantttttttaaagggcccttttgcccttttttgggccaatgggccccaaaatttttttttgtttgcccaaaaaaaaataaggttttaaaggaaagagcccccttgcctttgtgggtgttttttttcccccggtttaaccagggccgggggccaaaaaggatttttttgaaaccctttttccctttcttttggcccaaaaaattctttgggtttccttttcccgggga

SEQ ID NO: 661372 - DNA, 389 bp, Homo sapiens
  misc_feature (11)..(11): n is a, c, g, or t
  misc_feature (69)..(69): n is a, c, g, or t
  misc_feature (243)..(243): n is a, c, g, or t
  misc_feature (251)..(251): n is a, c, g, or t
  misc_feature (268)..(268): n is a, c, g, or t
cccccttgtanattggcaaagtgctgtgtgttgtttggtgttactaattttcttcttattgctattatngtaaaaaaaaaaaaaaaaaaaaaaaaggaagtccttgtgtctgtcctcagaatacctcacagtctaatcaggagaccaacaaaattacaaaagcacactcagagcagtgatgggtatgaagagctcaggacagaagcaggacttccctgggctgtagagcccacgaggccgtanttctcttntgcctgtggctctacanccccaggccagcaagagaagctacggggagggctcacatagagggagagacaggggtgtccttccccacttcccagggttgagacaagcataagcaaatatttaaatactgtattttttta

SEQ ID NO: 661373 - DNA, 580 bp, Homo sapiens
  misc_feature (35)..(36): n is a, c, g, or t
  misc_feature (41)..(41): n is a, c, g, or t
  misc_feature (49)..(49): n is a, c, g, or t
  misc_feature (52)..(52): n is a, c, g, or t
  misc_feature (55)..(55): n is a, c, g, or t
  misc_feature (158)..(158): n is a, c, g, or t
  misc_feature (202)..(202): n is a, c, g, or t
  misc_feature (362)..(362): n is a, c, g, or t
  misc_feature (376)..(376): n is a, c, g, or t
  misc_feature (405)..(405): n is a, c, g, or t
  misc_feature (419)..(419): n is a, c, g, or t
  misc_feature (438)..(438): n is a, c, g, or t
  misc_feature (457)..(457): n is a, c, g, or t
  misc_feature (466)..(466): n is a, c, g, or t
  misc_feature (471)..(471): n is a, c, g, or t
  misc_feature (482)..(482): n is a, c, g, or t
  misc_feature (488)..(488): n is a, c, g, or t
  misc_feature (527)..(527): n is a, c, g, or t
  misc_feature (529)..(529): n is a, c, g, or t
  misc_feature (532)..(532): n is a, c, g, or t
  misc_feature (534)..(534): n is a, c, g, or t
  misc_feature (536)..(536): n is a, c, g, or t
  misc_feature (540)..(540): n is a, c, g, or t
  misc_feature (552)..(552): n is a, c, g, or t
aggataaagagataggcaaccaggccccctgcacnngggcnccgcagtnccnctnccggacacaccggttcatacagttccctgcccatgaccttcgctcagggatcccctttgaagggttagggtcccagttcccagtggaaaaaacaggccagganaagtgcgtgccaagcttaggcagatgtttccccagtgaccccanagccctggggtatagtttttgccccctccaaggaaagacccccttttggggacatggggtggagggcaggacctaaaggccccaaaggaaggcccccttccggggctgtttccccaggaggaaaggaaggggctttgtgtgccccccaggaggaaaaggnccttagttctgggntcaaacccccctttccgtgtatccccccncaaatgcaagctcnccaaggtcccctttcagtnccctttcctacaccctggncgggccctnccgcncacccccccanagcacncccccccccatgggagtgtgctcaggagttgcgggcagngnggncntntgtncccaagggggcngaatttcccataaagggcttagccctta

SEQ ID NO: 661374 - DNA, 249 bp, Homo sapiens
tggggatcaaatgacagcgttaggcctccccgagtggtcccatccagagcggctgcttggttcgggttcctcgtgtctcgctcactggcttcaataatctggagaatcttgttttggcaagaattcctagcaaagatcttccctgagatttctcctgtgcctcctgttggctctctttgcatctggcctcatccaccgagtctgtgtcaccaactgcttcatcttctccatagttggtctgtaatacat

SEQ ID NO: 661375 - DNA, 1538 bp, Homo sapiens
gaaagaccttgaaaatttagggctcacccacctcattggatctcctttcctccggcgcatatatgcatggcgtttttcactggatataagactctatcacaaggtgaaactgatggctaaatccactttgctctatgaagcaactaggaaacgcactacaaactacgcacagcacacacatagcaagcacaaccacgctgcaccacgcacgagctccacgttacaccacgcacaactctgcccaaacagctctaaccacacacgagacctgcgccacctctaccactccaactctgcagcgacagcacagcaagcgcagcaacgccacgcacaactcctaccactgcagacaaacacacgcaacacgctctacacgcaagctcctttcccctaacctactctcctcaacccgcacctgcactccgcactctctacacaccgcttcacctgctctctcgaacgcaaacccccctgcacccctctccccacacgcttaaccacctgcaacacgcacgcacgcctcgcacacgcaaattttctcacgcgccctctcccttgcacaactcccccacccctctgcctttattccacacaaaccacattctacccctgcacccacacaacacgcgcaacacgcacacgcaacacaccccttacacggaacccttcctactacagacacggccacacgccacaacggcaaacccctttccgcgctgccacacacacacgcaaacgcaagcggcaccgcgcacaaggaacgccccgcgccacagcgggcaacaccagtacccccaaacgcctggaaagttgccacggacacacaacgcctctccggcggaacgccaaggcctacacccaacagaacctcggaaccgcgcacaccacacaacggcccccttgggagacgcctctcagacaactcggcacaggcggctcccaaaccagcaatcacagcccagagaccccggccagacgcaacctataccgcacttccaccaaaggcccacacgcaggaggacacggcgccacaccaaccaacaccggccttggaactcacggccccggagcgcctacggcacgagacaaaccccgcggcaaaccccttccccaacaccggcgtcaacggacagcaaaccacctcaagcgcacgccaggcgccaaatcccagcgcgcgttccgcccatctaacaaagacgcggccgccgcaccgcaacgacccgccccttctactatgctgagcacacacggcaacgtcgcagcacaccacaccgacccgaacgacggcacacgcgacaacacggcgaaccagactctcttccgcagcgccagacaaccgcccattctaccacaagcacacacggacacccttctaccgttggcgcctccctacgccagcgacactcacggtacacacgcgcaaccacacaccctacgaacacttggcaagagtcccctagctgcagacgcccccccatttgtgcaacacgcgcaatctccgggcccttccggacaaccacccacctttggacaacgcc

SEQ ID NO: 661376 - DNA, 120 bp, Homo sapiens
  misc_feature (91)..(91): n is a, c, g, or t
taaaacgccttcaggaggctctggagcggcagaaggagttcgatgccaagcaataacaagatgcaacgtctgtcggctcccaagacagaangaatgcaaaattgacatcttaagtctggg

SEQ ID NO: 661377 - DNA, 210 bp, Homo sapiens
gcgagagacacaagcaagagcagggaaaactgccttataaatccgtcagacctcgtgagaacccactatcacgaaaacaacatgggggaaactgcccccgtgagccaatcacctcccaactgggtattacaattcgagatgagatttgggtgggggcacagagcctaaccatatcaccacctctcttttgaggacccaggcccccatcag

SEQ ID NO: 661378 - DNA, 302 bp, Homo sapiens
tctcccctgggttgctgcgtcccagctcaatctcagaagagagtgaggacccgacagagcacagggatctggctggccccactgacctgtgacctcaggagagcaggccaataaatcgctgctggggcagtaaagcaggcgtgtcacctcactgcttcaggtcccttcccctgagtaggcccagacctcccagggtatctttcccttggggtcagtgggctgctggctctcagggaattcggagcatgatctcaggtgtttggtcatcccggggagaccagccgaggttaagaagcaaggct

SEQ ID NO: 661379 - DNA, 942 bp, Homo sapiens
cgctctatagtataatttataaatataaatattccctctatctaacttccaagacatcaactatccgtacccctcccgtattgactttccaaaattactcggcgcgaaaaatgttttcttgggtgtccgcccatgtttattggtccccccctccttacgcttctcctgtctcccccctcctggttctccccctttgccctttaaatttcttcgcgcaacccacaaatcaatttgccgtttccacgacaacctttaccgccctccacgcactgtccaagacctctataacgtgtttgcctttttgtagtgcttccagagggttcttttccccccgggaatttccggccgttgtccacttgcgggcggtcgccctttcccccccgattatggggggctctggtcccctaaacgcctcatcccgcgtaatatcgcctgtgtgttccccacgtcgcggctataacacccgcgttttatctggcgctcaggggtttttctaacccccgggccggctccccaatttgtgtgtattagcccttcacgccgtggcacctcattaattctgcgcacggcggtatctcacccagcattgaacgggcgttcttgatgtcacccctacgcagcctcccggattcgtggcctttcccgctcaccctgtttctgtcgggcgactttcgggatccaccaatttcgtgtcacacacgggctactccacgggttataccggtctatgttttggtcgcgcacaacgttacctgcccctagtattgtggttctgttcccccgacgtgataaatgttgctccatcaccacacggcgcccagcaaccggcaaggttcgggttttgaaggcctcgccgccgcggatcccttggcaatggttttcaataaatggtttaaatatttgatagtcacccaatttttgggaaggtccttacacaaaaca

SEQ ID NO: 661380 - DNA, 414 bp, Homo sapiens
  misc_feature (42)..(42): n is a, c, g, or t
  misc_feature (68)..(68): n is a, c, g, or t
  misc_feature (76)..(76): n is a, c, g, or t
  misc_feature (80)..(80): n is a, c, g, or t
  misc_feature (90)..(90): n is a, c, g, or t
  misc_feature (94)..(94): n is a, c, g, or t
  misc_feature (104)..(104): n is a, c, g, or t
  misc_feature (109)..(109): n is a, c, g, or t
  misc_feature (117)..(118): n is a, c, g, or t
  misc_feature (149)..(149): n is a, c, g, or t
  misc_feature (154)..(154): n is a, c, g, or t
  misc_feature (160)..(160): n is a, c, g, or t
  misc_feature (163)..(164): n is a, c, g, or t
  misc_feature (169)..(169): n is a, c, g, or t
  misc_feature (185)..(185): n is a, c, g, or t
  misc_feature (204)..(204): n is a, c, g, or t
  misc_feature (222)..(222): n is a, c, g, or t
  misc_feature (229)..(230): n is a, c, g, or t
  misc_feature (237)..(237): n is a, c, g, or t
  misc_feature (247)..(247): n is a, c, g, or t
  misc_feature (310)..(310): n is a, c, g, or t
  misc_feature (372)..(372): n is a, c, g, or t
  misc_feature (399)..(399): n is a, c, g, or t
caaagcataggtaaatatttttctttattaagcttctcactnagaagccctctttattttggtaaatntcactctntttnttaggagatntctncttttccatnaaatnaaatattnnctaaagccctgaaagaggcaagactacaatnggctnaaacanttnntatancaaccccagataagtncttcattttctttttatantagaagcaggtccatttnttttttnntttcctncacatctttngagtagttattacttctcagtttttccccccttaaactgcattgcctattcttttttcctganatgctatcaggtatcagtgtgttgaatacatactgcttgtgtatcagacttacgttactgtnatcaccattaaaagaattgcagccttnttccccatgaccttc

SEQ ID NO: 661381 - DNA, 123 bp, Homo sapiens
cagtggtgcatgatagagagcaggccttctactgaaggagtgactcaggaaggaggaggggaaggtgacaatgcccctgtggcaggagcccggtggccatgggatcattttaaacttgagacc

SEQ ID NO: 661382 - DNA, 137 bp, Homo sapiens
cttctgggtcgatctaaggatcccgtctcctgctggggttatttgtgttggctgaggaagaagaggaggcgccgcttactgatgctccgcttactgatgctcccttactgaacgcttactgatgctccgcttactga

SEQ ID NO: 661383 - DNA, 866 bp, Homo sapiens
tataatactagcattgaccatctcacttctaggaatactagtatatcgctcacacctcatatcctccctactatgcctagaaggaataatactatcgctgttcatatagctactctcataagcctcaacatccactccctcttagccaatatgtgcctatgccatactagtctttgccgcctgcgaagcagcggtgggcctagccctactagtctcaatctccaagcacatatggctagactacgtacataactaaacctactccaatgctaaaactaatcgtcccaacaaattatattaacttaccatgaatgatttccaaaaaaacatagtgtggaagtcaacacaacacccacaggcctaattataagcatcatccctctgcttattgtgtgtaaccaaatcaacaacaacctataaggtgttcccaaccttttcctccgacccaataaaaggccacctctaataataactacatgagtctaacccctcagaaggcatgggagcaaagtgccacgttatccagtgaccacgtatacacgaaaagaactctagccttcgtttataaagtctcctacgaagtctccttagtataacatcacaggcacagaacaagtcagataaagatgatctgggagcaaattatcccacccggatatcatcaccgggaggaacagccgaagcggaagaggcaaaagtcgatgaaaccaaaggcctacatacaggagagtaatcaaacaggcgaactcacacaggacgcaaataacggcacaaatgagcaagaacagagacagacatacaagggcacggaaggaacaggagagaccacgaaccggccggaacgcccccacccccccccgggggag

SEQ ID NO: 661384 - DNA, 112 bp, Homo sapiens
tgtgatctagaggatcctagcaggtacatttcctgggatggtgttaggaggggaattaaagctaagtccaatggctctttaataccagaatgggctctgacacaagagccct

SEQ ID NO: 661385 - DNA, 927 bp, Homo sapiens
gctcagagggcagcgaggaggtttcacgccgtgtgcggtggcggccgtctgaggtgggggcaccgcggaaggtggaggcggggccgcgcacggaaggccccgagtcgagcgcacacgaggggcgcccctgagcaagtgaggagtcctccggccccgaggcctgaattcagcccgggtgaccgggcccaccagcgccgggtgtccctcgggaggggtccccggttggttccctgaagcagaggtcctgcgggttcccgggagggtgtcctggtctctccccggcctcggattccatttctcggcccttggtggcgtcgggctgctcgtgtggtcgggggggcagagggcgccgtcatagtggcgagacgggggactctcaggcccgctttggaaggtcctggggatctctgggcgcggatctggggcaggcggggttcccgcgagaagcctcaggagcttccgggggccgcaggggtcctgggggcccccaggggcggggaaggcggcaaaacgcgaaaagggggatagccccagaggcccttggccgcgcaagaagggggtttcccttggaggggaccatccgccggcattggttccccttgggaaggttcatgggggcggaagggggcgctcggggcctcccaacgggggcgtggcgcgcagcgttgggggggcattcaccagggggaaagacgcttttgtgccctaccgtgtgggcgagccgttggttgccggtgaggaacccggggttattaaggagccagcgacggcttgtggtagaaacccccaaggggggcctggcacgtttccagggcccccaaaggtttctgtgtttcaccaagcccgataagcgcgccaggggggcttaaggttttgcaggcgcagtctggggacacacatggggggcccacacacactttttcgcaa

SEQ ID NO: 661386 - DNA, 220 bp, Homo sapiens
tgttcctcatagaggccacggacgtgactgtggtgtggtgggggggtcttaaaataactttttagcccccgtcttcctatttttgagtttggttcagactcttaagcagctccatgcaactgctattatatttattgactgacaacgactcccattctaaatgtttttctctctgcctagatcactttcatctccgtgcgccgtctactcacacttgggt

SEQ ID NO: 661387 - DNA, 387 bp, Homo sapiens
aacgaatgtcatggctcacctggtaaggactcagccaccggacaccagctcgaaacgcccattgccctcgtatgtggttttattgccaacagcagtggctgcgctcgatagccaggtgtctacttgcacctgcgccgaaaaagcgtggcctctggcaggagctccgccgaccagcactaccagagattggcctgggcgtagctgggcgtcccgttcggtagggttgtgccattgcgctaactcgatgggtttaccgtcgagttgaggatgctgaagcgtcaggttgaaaaagccctggcggccaaacctgtagccagtctcattggccggcacgccttgaaaacgtagcgcaatcaccgcagcctccacgcagatcacgttcagacg

SEQ ID NO: 661388 - DNA, 121 bp, Homo sapiens
  misc_feature (102)..(102): n is a, c, g, or t
gcttagaggatccctgcatgtgtaggacatttacagtcaatccagtgggtaaccaggggattctgtctgcatcatgcaggggttactagtgtgggactactngacctgactggtcccctcg

SEQ ID NO: 661389 - DNA, 489 bp, Homo sapiens
atcccccgggctgcagggaattcggcacgaggcgagtattacacagcgcttttttctttttttgggtgtggacctcactcgcgggccaaaaccgggagagtgcaaatcttggtcataccattttacatttttaccaactcacaatactgttgggcaaaaatcttctataaactattggcaaaaaaatcctccaatttacattcttttgggtccttttttcccacagatatagatttacttccgggttccgagagaaagacttattgggggtgcctgagcaagactgtctttaagattcacttggtggtctcatccaataaactcctgggttttcacataaagcgcgcctctttattgtgaatttttttcatggaactgggttcaatttcagaaaaatattaacggggtgatttccaacgtcaacactgatccttttttttaaaaaaccctccaatcaaagcccagaacccccgcaaagatcggtccttc

SEQ ID NO: 661390 - DNA, 102 bp, Homo sapiens
gcggcgcctactactactactgctcgaattcaagcttctaacgatgtacggggacatgttacctccttcagttgataataaacctttctgagatgcaaaaaa

SEQ ID NO: 661391 - DNA, 727 bp, Homo sapiens
gtactcaacttcctttcatattagcatcatcaaccccataaggtgaattagagggttgatgatgctagtatgaaaggaagttgagtaccgtgtatggatccgctaattaccatcatcaaccctctaattcacctgtatgggggaaagtgcttctattatggtgttgtagcatagctattattgatcatcttccttcatatctctttctcttgataaaaactgtattgtagatactcgtgcatgatgctttccaccgcaacagagtatctctttcaattagttctctatgttataagtagcagctgttcattatgcgaatatattctgctgcacagtcacaatctaaatgtacattttggcaaaagattgggtacttagttgcctgttactgagttagctactactcttttggaccaaagcaacgatgagagcaagtacttttcacacttgttaagatggagttataactgtcataccattcgggatattatgatcccaagtagtctattttatagacttggacttgtatcggtatgttggactcgttgatacaactttgggccaaatttcttagcgagaagaaactttctcctgagtcactttaggcttctatcctactttagcaaactatggtaagaacctggatgttttctcacagtgactatgtgcaccaacgttacaagttgtcccaacaggtctgcataacggagccattttccattacaaa

SEQ ID NO: 661392 - DNA, 670 bp, Homo sapiens
ttgtacgtagaagctggtaaagctttggttacggtcctggttccctaccagtattactaaacatgtcgcagttgctccacaggcatgtggtttgacctttttttcaagcttctagagagggaacggaagcagaagtgggacatcgagggctctggtgtcctctgcgctgggtgtggaatgctgctgcgacctgtcccttctgctggctcaggcaagtgtcttctggccctaggcattatctgtggggaaagggttcttaagtcctctgatgcttccatcttcctggtttaggccatgtgcccagaaacctggactgatcttgtcttttagagtagtgaacccctgggccactgaagagtaacgatggctccactggtacaccgaaagagagggatggaatcaacaggcagggggcctttgataagccttaggacaggaaactgagaactatgtcatctttggagcttttcaatactattggagtgattatgtatctttcgtaaacagggaaaataagtgttacaaaagcatctttgtatgtcagtttgttggcatccctcccccagcaccctgggtggtgttagaagaatgacgcaaaaaaaatccatcaccctttcgttactagaaagactcgttaatgattcaaaaaaaccaagactaagaacattaa

SEQ ID NO: 661393 - DNA, 197 bp, Homo sapiens
cactttcctaagtgtccctctgttgctgttccctgttgtttacactgactgaatattcttcaggcaccttggttcccagtgtctcatcctctatctgattggaacagactagacatcacctctgtcccaaagcagagtattcctggcaatttctagctcactggcattctcatcaatctccttgtcaggggagaaga

SEQ ID NO: 661394 - DNA, 951 bp, Homo sapiens
ctccttaattataacatgcacagccacagaagtaatcatattggatatcgttcttcgaagcctacacttatcccgcaccgttgggtatcatcacccgatgaggcaatcaggcagaacgccgtgaacgcaggcacatacttcctattctacaccctaggtaggctccctttcccgctactcatcgtgctaagtttacacgtcacaagcaccgctaggcgtcgactaaacgattcgtacgtacatcaccctcagctggcccgaaggaactatcaagactcctgagccaacgaactgtaatgtagtgacgtagcgttgactacaaatagacttctatagtaaagataccttctttacggagtccacttatgagtccctaaagcccatgtcgaagcccccatcgctgggtcaagtagtactgtgccgcagtactcttgaaactaggcggctatggtatagatacgcctcagcacgtcattctcaatcccctgtacaaaacatagtagctctacccttcgcttgtactatcccgtatgaggcataattataacaagctccatctgcctacgaaaaacagactagaatcgcgtcattgcagtactcttcaatcaggcacatagccgtcgtagtaacagcattctcatcaagacccctgaagcttcactgggcagtcattctcataatcgccacggacttacattctcattactattctggcttagcaacgtcaactacgaaagcactcacagtcgcatcataatcctctctccacggacttccaactctaactcccaataatagcttttgatgacttctaggaaggctcgataaacttggcttaacccccattatttaactatggggagaaccccatgtgccacataaacccgctgttccgagtccaatatcactctcctaataacggactcactacatagtacaggctataatacc

SEQ ID NO: 661395 - DNA, 367 bp, Homo sapiens
tgtacacttcattcctggttttcagagatttctacaaccaagacctcaattctttttcagagaatattgctgcttatatgctatccatcttcagggatttactttccactagtgaccctgttcaacttgattcaataagggcaagaatattttcttcaggctgcattcaaactcaccttttttttctctgcagctgtaagaactcccagctccttggagacttttaagaacaaactgaaaatgctcttatttgtctaggcttagctgtcggctaatatgctaagagtgtattttatattgtattttcatcatagccctttgaaatgctttgcataaaagaccctttataactgtcaaaaaaaaaaaa

SEQ ID NO: 661396 - DNA, 173 bp, Homo sapiens
  misc_feature (19)..(19): n is a, c, g, or t
ctctagaggatcgcggcgnaattaatttttggagtttatttaatatcgggagcagattgtgtaataaatgtatattgagaataagacggcttttgaccttttagggtctagggctgtaaagcgtctcagggttgcttgcgaacgagccattgcactccgggcgggtaccgagc

SEQ ID NO: 661397 - DNA, 210 bp, Homo sapiens
aggttgactggggccccctttggtaagggctgggaaaatgaaccaagttgggagcaaagcaggttttgagccccccttaataaggaacacatggtttacttcctatttcctgggacacaggtcatttccagcttccaaaattagaaaaattttttaaaaaaatccccccccccttcattgtaaaaaaaaaaatttggccttttttttcca

SEQ ID NO: 661398 - DNA, 801 bp, Homo sapiens
tctggagtccagatgggctcaggaagccccacggaatccagactgaccaaggctaaacattcctgaaatggaacccactcaaagatgtgtaaaaatggcggaattgtgttcccagtctgagaacttgtgaagtaaggcacctctcaaggaagctagatcacgatctgaccactttgagtttgccgaactcttagatgccagaagtccaactgggaaaggggaaagaagcaaaccaccttattgaccccactgacacgagaacactgggtcattgcccttagactactagaaggcagctcacccaagtccgttacccaaagagttccaacagcctatcaatcggatataattgaccactccataggtttcttatagagaaactaccctatagaattagacggccccggaaaatactgctcacatgctcacttacccattacaagacaatgccaaccaccacttatcactgtgtcaccccactatgacagacccaagatgataaaacgtcggctaaccacgtgttggcacacggcaccggggaaataaggtctccacaacccccacctggttagagcacgaacggggcaccacgcctctttcacggagaactggccatagctatggaagcttaaagccaagcctttgagcccgctgctccctttctagaaattgatcgccaccaacaccccggtgtaggtagaagcgatgttcattcccagaaaatttaggatagagtgccaatggagaactgggtaaattcaaatcatgttcatcccttccatgaatactgtgtagttgcta

SEQ ID NO: 661399 - DNA, 193 bp, Homo sapiens
  misc_feature (1)..(1): n is a, c, g, or t
  misc_feature (43)..(44): n is a, c, g, or t
ntctatttatgtactgcaaaggttgcttgaaagtatgaaacgnnctgctcacagaactaaatatgaacagctttattaaggagatggctcatcccaggataaagacagcaacagatgatatagagaagattacaccaaacaaatctgctgtaaactgcatttacccttaggagatgataaactaaagatgaag

SEQ ID NO: 661400 - DNA, 757 bp, Homo sapiens
cacaaaggaaattagaaaatattcataactaaatgaaaatgaaaacacaatatatcaaaattgtgagatactagaaaatatttgtgggccgggcgcggtggctcatgcctgtaatcccagcacttgggaggccgaggtgggcggatcacgaggtcaggagattgagaccatcctggctaacatggtgaaaccccatctctactaaatatacaaaaaattagccgggcgtggtggcaggtgcctgtggtcccagctactcgggaggctgaggcgggagaatggtgtgaacctgggaggcggaacttgcagtgagccaagatcgcgccactgcactccagcctgggtgacaaaagcaagactccgtctcaaaagaaaaacaaaagaaccatatctgtaattaaatgaacatgaaaacacagtatatcaaaattgtgggatacagtaatacagtgctttagaaggaaacttcagcctttaaaagaaaggtctaaaatcagtgacctaacattctgcttaatagaaagagaacatctaaatagaagagaaataatacagagctaaaagtagatgagatagaaaaaacgcgggtgaggtggtcactcctgtaactacccagcaaaatcgtggttgggcaaggtggagcggatggattgaagttaaggactcagagaccaacccggggcaaaatagccaaaacaacaaaaagtattaaaatagcaacataacggaagaaacaggacatggaacgacaacaaac

SEQ ID NO: 661401 - DNA, 457 bp, Homo sapiens
  misc_feature (27)..(27): n is a, c, g, or t
  misc_feature (149)..(149): n is a, c, g, or t
  misc_feature (360)..(360): n is a, c, g, or t
  misc_feature (362)..(362): n is a, c, g, or t
ttgttcccctaagttgtgggaagcaanaatccgtgggccgcaataacgggcggggcaaggccctgaaagtgcaagctaatgtttccaagtgtcctctgggtgtttcccaagagcaaacaggaaacgaataaatctctgatgggagtctnactctgtcaccccaggctggagtgcagtggcacgatctccgctcactgcaagctccacctccccaggttcacaccatcctcctgcctcagcctcccgagttgcagggactacagcacccgccacaatgcccggctatttttttgtgtttttagtagagatggggtttcactatgttagccaggatggtcttgatctcctgacctcattacncngccgactccggctcccaaagtgctggaattacaaggcgtgagacaccgcgcctggctccatcaaatgactttttaaataaaaatacggtctcacc

SEQ ID NO: 661402 - DNA, 272 bp, Homo sapiens
aacaaatagctagtctagtaaaatttacctgttctaaagatgaggccaggcacggtggctcatgcccgtatcccagcactttgagagcgtaaggtgggaggatcgcttgagcccaggaggtggaggctgcagtgagccgcgattgcaccactgcactccagcctgacgtacagagcaagactctgtctcataaaaactagttttcttttaattattttttttgggtactatacttttaaaaggtcccgtaaaaaagcatggggtaccgagct

SEQ ID NO: 661403 - DNA, 544 bp, Homo sapiens
gaggaccccagactcgagttatgtaggtctatacgtgcttttagagtctaaagaaagtcctgaacgaatatcaattaagcttacactcacaaaaacttaaaatgtataacaggagtgaataagtacatagataaactcggaatatgttcctgcagggcaacaggtccacatgcacacatctaacactggacagcataaagttaagggagagaacttaagaagggcccttaacatatatataacacataaaatatgacatcgaagaaacaaggtaccacctcatatttaaccttaaggatcctacttcggactatccaaacggatataaaaatatgcatgcctgacgggtgaaaagcctgggaaataatctggggacatagtttctctacaaaagggcaaagtaaattaaaattaacactcatccctcagcggtataaatatgctcataaaagcaaccttctagtaaaaggcagccaagatccttaaaaggagtctatcgggaccatttcgggggcaaggagacccagggcttccagaaacagta

SEQ ID NO: 661404 - DNA, 453 bp, Homo sapiens
aagacaaattatagattagaaaaagaagaacactcagcagcaagaaagccagccaccatgaggctaatacaggaaagtactcggtgaatggtgtgtctgtcactcagcacagtcattgacaacacttaaccattaattgcaagaaaacagcagttttatgcgagctttttttggcctgtctgctcagttaaatctttgtgaccacttctaatttttttctttgtgcagaggctgctttcctcttttcttctttagtccctcaaagtcatttaaacgtatatagatccttcttgacttacagtggggttaggtccagagagacacattgtaagtaaaaaaatctgaagtcaaaaatgcatgatattttcaaattataatgtttatctagagatagccccatcataagtcaaggagtgtagtgaatacatatcaattttgctccattgtaaagtc

SEQ ID NO: 661405 - DNA, 105 bp, Homo sapiens
gaactcctcacacccaattaggaccatctatcacctatagagactaatgttagattagtacatgaaacatcttctccgataagctcgtcagttaagcatgactga

SEQ ID NO: 661406 - DNA, 357 bp, Homo sapiens
tggaagaattaaataattcagctgggcatggtgggtcacgcctgtaatcccaacactttgggaggctgaggcaggaggatcacttgagcccaggattttgagattaataatattatttattactattattcaagctttgttaaatcaaacctaaagctcttggaactttaagttattctgagccttgacaggaattggtctctgcagcctgagtcatggggcatgcagctgcaacttccacctattttttttttttctgtaattacttagggaagacccaaatgggcaccaggaggataagacttcccttaggatcccccactttaggatccacccacccctttttcttcagggggg

SEQ ID NO: 661407 - DNA, 968 bp, Homo sapiens
  misc_feature (246)..(246): n is a, c, g, or t
ggttcggcgcatcgatgtgcctcgggttccgcgccccgattgagcagttccttggtccggtagtgtcggacctgggtaatctgtagtgaaaggcgctgctggaccaggtggctaaagcagagatctaggtcctctgtggtagctcggatgcattcatcgctggtctaagtaaacctctcgcaaggagggactgcaccagattgctgtgaactttctatagccatggcaccattcgaatcagtagantgttcaagtgagtgtatccagtaggagcttctctcctacgatagagttgggaagtagcggcatggtagcttgggaagcataacatggacggttgtaccacgatgactgtcagtgtcggatgaactacagctgactttgtgtctcacgtgggattgcttcattgtactaacatgcacgcatgtggatttgcctcagttggagcactgggatagaccgagcctatggggaaagctagtgagggagagaggaagacagatcacatgagtccacgattgctgacggataggctcaaaagagggagctctcgacggatgacccatggtcagcttgagtggcagaggtatgaatgactgggtaatgggtggaggaaacgcgaggtgccattcatggttaggtaatacacgtatgacttggcttctgtgttgaactgatacttttccaactaggaactagaataggcccatttgagtcctacttttttatatatagggttgatacttgtcttgtagagaggttacttgatgggatcaagatggaaggggaataatgctttttcctcgagttgtgaacaaattaccttgattgacatagggtttggagtgttattactggtatcttaagcaagaagtgacgtactcagggatataatcgaaaagtaaggatggtgaggcagtagtgaaatattgagtttaagcttcattaaatcggtcatggatgggaga

SEQ ID NO: 661408 - DNA, 308 bp, Homo sapiens
cccgagtaatgtggggactgatgaggccatcgctctctggcatggggctctccgtcgtgcgtcacctgctgctgccgcttgttgctcctgtagctgttggtgtgactatacccctcaggggttattgtattgttccctcacctatgttaccggtgagaaaagagatcgtgtgtgttccccagtataatatatgctccctgcccaatcattcgattcgctgtaccatgtgtcaccaaggaacctacttgtaccatgactgtccaggcccggtccaggatacagactgcgacgagtgtgagagcggctcc

SEQ ID NO: 661409 - DNA, 550 bp, Homo sapiens
  misc_feature (4)..(4): n is a, c, g, or t
  misc_feature (92)..(92): n is a, c, g, or t
  misc_feature (95)..(95): n is a, c, g, or t
  misc_feature (218)..(218): n is a, c, g, or t
  misc_feature (228)..(228): n is a, c, g, or t
  misc_feature (280)..(280): n is a, c, g, or t
  misc_feature (295)..(295): n is a, c, g, or t
  misc_feature (301)..(301): n is a, c, g, or t
  misc_feature (316)..(316): n is a, c, g, or t
  misc_feature (325)..(325): n is a, c, g, or t
  misc_feature (337)..(337): n is a, c, g, or t
  misc_feature (343)..(343): n is a, c, g, or t
  misc_feature (383)..(383): n is a, c, g, or t
  misc_feature (401)..(401): n is a, c, g, or t
  misc_feature (443)..(443): n is a, c, g, or t
  misc_feature (467)..(467): n is a, c, g, or t
  misc_feature (546)..(546): n is a, c, g, or t
ctanaacggggtgaaggcaagctctagctcctcttagccccgcctttgggagcttggcagtcctggaggggccctcgcggcctcagcggganatnatccggacaaactcttcaaagtccactcgtccatccccattgaggtccaaatctcggataatttcctctatgtctcggtgtcccacctgatgacccaggagcttcctcatagcctctcgcagntaaatggtgnttatttccccatcaccattggtgttaaactttcggaaagcatctcgaagttnatttaaaaaaataanatatgntgtctctgccaggantttaggccncattagctccangaagtnatcaaaatttaaatggccaaccaggttcatgttgatctgntgggacagttcgatgagntccatctcggtgggcatgtagcccatggtgcgcatgcagttncccagatcccggcagttgatgtanccatccttgtccttgtcgaattctctgaaggcctctcggagctcttcaatttcctctggtcgcagtgatctatcctggncaaa

SEQ ID NO: 661410 - DNA, 747 bp, Homo sapiens
caatggcttggtcgggctgtgtttaattggccgagggctgaccccagatgagtccctagctgcccaccgccgcgccgtcctagttaccattacaccccgtggatggagccgcatgtctgtccgcattccggccccagtctactcatcatcgcgcaatccatgagcaggctgaggccgatacccagcagctgcttgtcctgaccttcctcttgctgcccgaaccatctggggtgcgcccgttccccagatttccgcgagacatgaggggcgttcgatggcgccaacgcgtcaggtgggctcgtgggcctgtcagatctcgtcgttgctcgttcctcgttgcttctaggcgaacctacgacttggacaaggttaagatgtcccaagcaccgttgtctccctttcccaagaacaataccatttctgtgcacatccttggaggcgagattgatgctccgtttgcagagggccgagagtaagtgcaaagtcactggagtgcagggcagaggggtccatggcatacccgcagcgccatgggagggtatcatgtatcacttcattctctctccccgtcactggtatgggttcagagcaatgcctagggcccctctctgctcccctgcctagtggggtggtagtggctacctctcaggcccaatagtccctgctcctcttagaatcttcaacaagtggcaggccacctctgggcaggacacttgcgtctggcaccaggaggtgaggcagacacac

SEQ ID NO: 661411 - DNA, 156 bp, Homo sapiens
ggctgctagctgactcttgaggatccccttcctctcctcccacctcagcctcccaagtagctggaactgcaggggtgcaccaccatgcctggctaattttttaaattttgtagagatgagagtctccctgttttgcctaggctggccttgaatccc

SEQ ID NO: 661412 - DNA, 169 bp, Homo sapiens
cgcggaccgtgctgggagcggcgcggctggagcgcagcgccgaagggactgcagggctgaagtgtgcgggacacaagcccccgaatagccccggctgccacatcgcagacccaagcacgcgcgccgggcccagctgagccgcctcatgaaccgccccggcgcaggcacc

SEQ ID NO: 661413 - DNA, 375 bp, Homo sapiens
  misc_feature (13)..(13): n is a, c, g, or t
  misc_feature (32)..(32): n is a, c, g, or t
  misc_feature (34)..(34): n is a, c, g, or t
  misc_feature (36)..(36): n is a, c, g, or t
  misc_feature (48)..(51): n is a, c, g, or t
  misc_feature (58)..(59): n is a, c, g, or t
  misc_feature (63)..(64): n is a, c, g, or t
  misc_feature (103)..(103): n is a, c, g, or t
  misc_feature (112)..(112): n is a, c, g, or t
  misc_feature (116)..(116): n is a, c, g, or t
  misc_feature (118)..(118): n is a, c, g, or t
  misc_feature (120)..(120): n is a, c, g, or t
  misc_feature (125)..(125): n is a, c, g, or t
  misc_feature (128)..(128): n is a, c, g, or t
  misc_feature (130)..(130): n is a, c, g, or t
  misc_feature (135)..(135): n is a, c, g, or t
  misc_feature (145)..(145): n is a, c, g, or t
  misc_feature (147)..(147): n is a, c, g, or t
  misc_feature (150)..(150): n is a, c, g, or t
  misc_feature (152)..(152): n is a, c, g, or t
  misc_feature (158)..(159): n is a, c, g, or t
  misc_feature (162)..(162): n is a, c, g, or t
  misc_feature (167)..(169): n is a, c, g, or t
  misc_feature (173)..(174): n is a, c, g, or t
  misc_feature (180)..(181): n is a, c, g, or t
  misc_feature (185)..(185): n is a, c, g, or t
  misc_feature (191)..(194): n is a, c, g, or t
  misc_feature (219)..(219): n is a, c, g, or t
  misc_feature (222)..(222): n is a, c, g, or t
  misc_feature (225)..(228): n is a, c, g, or t
  misc_feature (306)..(306): n is a, c, g, or t
  misc_feature (346)..(346): n is a, c, g, or t
ggcgggcgcaaangcgggtcggccgcggagangngntgcagctcggcnnnncccggcnncccnnccccccgggcgccagccaacccccccgccggccgggccnaccccgccntacnancnccagnggngngagcncgggggggantncanangccccnnaanagaannnaaanncggggnngganaaacgnnnngtggggtattggaggttcaggaatnatngtnnnncttgtgttaaggagtgtactaggccgttagctactcctttggcgaaaaccaaacaaaactcgatatgggggaaaaaancaaaaaaaagagagggattaaccattacgcaaaacaaganggttatagcgttaaaaaaggatgtcaggc

SEQ ID NO: 661414 - DNA, 868 bp, Homo sapiens
agcgagcggagtggtggggtggtcgagtctcggaaaccggtatcgctggcagaatggatgaccaagtgattgacaagagcaggatggcagaacttcatagaagctttgtgcatctatttgatcaatagaggggtgactggaagctataagcaacaaagggaagtgggaaactggtaactgagtagtggtacgtgggagcatgaatcccagcaggaatactggagttagatggaacacgtgattaactgcaacagtagagtgactggagtgggtcaatggtcacaaaatatgaactattcactggaaatttactgaaccagagtgaatggacaagagagagagatgaacagagaacaagaacaggggatagaagagcattcaagagacagcattccaggtgttgtttgagtgaatggatgggttgaatgtgctatatagaaatgttggcagaagcattcggcaatgtgattgaccgagaacttggagagaagttaggcagagtgaagaagtcgactgaaattgatcagggaaaagcaagagtttgcgatggtggatggtcaggtgaatactgatgaagagtgtagtacagatgtgatgacggtgaacgtggcataccgtgtttcgagaatgtgtctacatatactgtgtactacaaagggtcatcaggcatttccttatttgcatgtaaccttatctgtacagggtgcttcccaaaggggtgggaatatatgcaggtttcgacattacggaatcagtcctccaggtggctgccatccttactgtatttgtctacaagcttttgaaacagtgtcagccaggtggatgggggccgggaatatcacggtgacagtactaagggcggattcga

SEQ ID NO: 661415 - DNA, 277 bp, Homo sapiens
agaatgaggctgggattggcagctcatgcttgtaatcccagcattttgagaggccaaggtgggagtattgcttgagtgcgggagtttgagctggcaagatagtgagactctatctctagaaaaaaaaattaaaaattagtcaagcattgtggagcatgcctgtagtcccagctacttaggagcctgaggtgggaggatccattaagcccaggaggtcaaggctgtaatgagccgtgattacaccaccgcactccagcctgggtgacagaatgagatt

SEQ ID NO: 661416 - DNA, 418 bp, Homo sapiens
caccacttgctttcttggatttcttaggctgaggtgggcggggtgcccgagtccccttgtcatcttcgtcaactgcagttcggcctcgatgtttctctgccttccgtttcttcttcttctcctttttctctctcttccgcttgggcttagatattgggccctgggatagggcagccagttgttcatgtactgcccgcagctgttcctgtagttctgccaaacgatgggccctttcttcctctgagtccgagctttcactctcctcttcttcctcctcctcttcctcatcctcctcttcttcctcagaggagctatcactgctactctcctcactggaggattctgaagaggatttggccaggccagggggcaaggcagttgagattggtaaaggccctggttccagtggttcatctgg

SEQ ID NO: 661417 - DNA, 662 bp, Homo sapiens
  misc_feature (198)..(198): n is a, c, g, or t
  misc_feature (344)..(345): n is a, c, g, or t
  misc_feature (368)..(368): n is a, c, g, or t
  misc_feature (374)..(374): n is a, c, g, or t
  misc_feature (380)..(380): n is a, c, g, or t
  misc_feature (478)..(478): n is a, c, g, or t
  misc_feature (585)..(585): n is a, c, g, or t
gtacagtaatgaaaactatactatcaaaatgtgaataaaattatagtcagccataaacatgcataatgacaaatatttaagattgcagacgggaccaggtattcttaattgggaaaacagtcaagtgaccatcatagctttttattctgaaaacattccttcatagttcagttagcttaaacaaaaacaagagaaacnaaaaaacattttgtttttcctattacaaaaaactcccactttttttgttacaaaaagtaatagaaaatggtaatagttaacattcattgagctgttaatatgtataagtgtccttggtggctaaaatggctatgaggtaacattcnnatttccaatctcttcaagggctntccttntaaacnattccccatgcaagtaaacactattattatcctcattttttagttgaggaaactgaggctcatagaggttgaaagatttattcaagatcccaaaaggnctttgggggggggccaaaggcttgtggggaacttggggactctggggatttcaatccagcctaacccatagtttatatgtatatgcacacatacatacatatatgtngtgtataaatgtacacttttcttaaggaaaccatttttgtgacaaaggaaatttggccctttagcttgaaaacccaa

SEQ ID NO: 661418 - DNA, 489 bp, Homo sapiens
gatcatccagacaaaggatttagataagagaagagggcataagtcaaagttctggaacatgccagtgcttaaaggttttctataaaaggaggagccagtaaagaagactgagaagaagtggccagggagagaagagaggcagaagaagatagattcactgaagggagggtttcaagaaggaagaaatggtaaacaacatgtaatatatctgagatgtcaaggaagatgaggattgaaaaatggccattggatttaaagccttgaaggtcatcggtgacctttgtgagaaacattttggtggagaggttggaaaaacctagtagattagagcctagtggatagtgaggacgtggagacagtctgggtaactgactgtttttggaagcttagccatgaaggggtagtgtatggaggtataagtgggaccaagagagggttttccttagatatgggagagatataccatgttacgtgccagtgcaaaggatc

SEQ ID NO: 661419 - DNA, 662 bp, Homo sapiens
  misc_feature (499)..(499): n is a, c, g, or t
ggttagttttcgaagtaactgctaagccgtcttccaaagatggctgtatcattttgcattcccaccagcaatgaataagagctcctcttgatccacatcctcaccagcatttggtgttactagtgttttggatttttgccattctaatagatgtgtagtagtatctcactgctgcttcaatttgcaattccttaatgacatatgacatttagcatcttttcatatggttatttgtcaacctctttgatgatttgtctgttcaaatcatttgcccattttttaattgggttgttcattttcttattgttgagatttaagtgttaacacgccttgatcagatgtgtcttttgcaaatatttttcccagatcatggcttggcttttcatacttttttttttcttttttgagatggagtctctctctgttgcccacgctggagtgcagaggtgcagacttggctcacttgaactttcaccccgctggttaagcaattcttctnccctatactcctgaggagctgggatacaggcgcctgcaccatgcccagatagtttttgatgttaaggacttggttttgcatgtagccacgctggtcttgactcctgaccctagggattcacccactaggcctcccctggtgggttacacgatgagcccccttt

SEQ ID NO: 661420 - DNA, 285 bp, Homo sapiens
aaggaaaggaaaggaggaccggggagatgggaaggtcctcagccattcagcacatgcggacgagctccgccccatgggcccgtcaccctgacaggatatgcctcacaaacgcttcatagtggctacaccattttacattcccaccaacagaagtaaatgttcaaatatctccacatcttctccaataatcattattgtccacttttttgattacagccatccaggtagcaataaaacggtcactcattatggtttttatttgcatttccctgttcggtttatact

SEQ ID NO: 661421 - DNA, 1005 bp, Homo sapiens
ttgctggctgtgagccacctccctcgcgtgcagcccgcaacgggaatggagtaaatgggagaccctgtcgacctgtgccacggggatcagcgatgtgaattaaacgcaactctttgtccacccatctggaagccgagaagcctctgagtgcgctatggggcggtggaggacgacggcttggaaaacggagagactggggagaaatcacgctggacatcatctccatggcggagacaaccatgactgccagacggagacttgagctggagatggcacacaaacttcagcgtctccgggaagtctcggtccgccgggagtctgagctcaggttcatgctgtgcaatcttgcacaaactatcttaccttctctgagcctcggtggcctcatctgttaaaatagccatgcatccacgtatctcgcagggttggtcatgaggagtaaacagagatcaagcgtattacagtgctcagtccagtgcctgctaccacgatggatgacatccagctctgccaggacatcatggacttgaagcaggagctgcagaacttgcgtcgccatcccaagacaaaacgaaaccaccacactgccgaagcagacgagacggatgagctaaatccagcaagactcacgacactggtgcagaccacgagacttcctggtggacgactgcggcaggtcgagcggacacgggacgcaagcagaacatcaagacaaggctgacaccctgagacacagtcaacacccaaaaacgacaccaatcccagccagaccggccgcacaacccaaccccaccagcaacccgcgcgccaccgggcggcatgccaaggactgcggggggacaccaaggggaccaagtagacgaaatcgctcactgcccagggaacgggcaagaacagagcaaacacagagaggaagaaacccagagaggaagaaaaacaagcacaaggaagcaagacagcagaaagacaagaacacagggaaagcgcagagacaaaagaccgaaa

SEQ ID NO: 661422 - DNA, 1291 bp, Homo sapiens
  misc_feature (763)..(763): n is a, c, g, or t
  misc_feature (1070)..(1070): n is a, c, g, or t
tgggacttaaaaatgagcttaattggttggttttccttaagtgcatttatcgatgtaaacagagcatgttaaagattcccggggagagcagactatggctgatatgtgggttttaatggaaaagaaacgatgatgccaagggttgggatggacagcagcttaaggaggaaaaaaaaaaaaaaagagaaaaaaagaacagggctggtgacaccccctgtggggtgtttgactctggtgccccagtgcgacagtccctataggggcaaagcaaactctgtgtcaaaactagaacccattggtatggcacggttggaaaaatcaaggccaaattggctggttgcgcggccagttttgccggccgtggagaatggctctggtggtcctgggcgcctatggtcccacacccaagggggtggcaacacacctgtggcgtcttgtgtacccccgagaatacaccccacaggtgtttctgcgcccactcgccgcgatcctgtcccaaacagagaccagagtaaatccgggctgcgacagtgggggaccccactacaacagatatgtgcgcgcgatacacattatcacaatgatacttccccgacaggctcaccaaacaacagaaccactgtccgccgagatctcggggagacacataaacgcggcgggaacgagacccatccagacaagcaaatgtgcggggcggcgcccaactctctgcggcgcgacgcgctcagacagaacggagacgggtggtgcgccccccacaaangttcttccagcgggagagggacaccacctattcgtcaaaccacggcgactgaggagagcgatagagagtacacaccaccggggaaggagatcacaacctgtgcgaccaaaccgacaaaacaaccacacagtggggtggcacccccctcattaggacaatgcgtctcccagcatgagggggagcaccccggcaaaagaaccggcgcggccccgagtggcaaacaacccacataagcgcccccccccggtgcgttccttcgtggcacacacaggcagaaagaacgggagcgtggaccgccacggagggncgctaccattgtcacccagtcaccaacaaaaaggggcattacaacacacgaggaggatagccccccatcaacaaataagtggacgccatccgcctcatggggaggtcacaacaccagccgtttaaacaacgcagacaaccacaatgtgtgaggggtccgccaaacacatgtgtggctttggcgccaccactgtgcgccaccaaacatctagcgacaaaaca

SEQ ID NO: 661423 - DNA, 410 bp, Homo sapiens
gccagtgtctgggaggcaaggtggaaggactgttgagcccaggagttgagaccagccgtgggtaacacagcaagaccccatctctacaaaacatttttaaaaattagttgggcatggtggtatgtgcctatagtcctggctactcaagaatctgaggcaggaggatcactggagcccaggagtttgaagttgcagtgaactataatcatgccactgtactttatcctggacgacaaagggagactctgtctctttttagaaaaaaaaaaaaaaggaggaggcaaaagtaggaggggaggatgactagaatccagaggacctaaaaccagaaaatatgactccagagccataatccgggggtatgaccaacagggcggggaaccgagcccgaatccgaacccagggccata

SEQ ID NO: 661424 - DNA, 199 bp, Homo sapiens
ctgagtctggttaataactgtgcgaacacgggccatggatatcctggatgactcggatcttagagagcttggaggcctgaaccgcctgtcacttatggcgacgcgcatgctatggaacagctccaaccttcaggacgtccagatgtaacagcagctcctccttctactcccctgcgaaaaatttcgagacatatgatat

SEQ ID NO: 661425 - DNA, 561 bp, Homo sapiens
  misc_feature (545)..(545): n is a, c, g, or t
gtccaaacagtgccgcatgttctttttagtttccatacatcgtctgtcccagagtgaggagaagttgatctccttcccacatccaccacaggctgcgtgagggaagcctggctccccacaacttgctccttctccagccctgcccccctcaattaaaacaatgctttcttttttcttttctttttttttgagacggagtcttgctctgtcacccaggctggagtgcagtggcgcgatcttggctcaccatagattcaaatgatcctcccacctcagcgtcccgagtagctgggactacaggtgcatgccaccacgcctaatttttttttttttgtattttagtagagacggggtttcactgtgttggccagtatggtcttcatctcctgacctcgtgatctgcctgccccggcctcccaaagtgctgggattacaggtgtgagccaccgcacctggcctgtttttcatctttgtgtcccagaattgccttacatttctggagatacaaagatgaatagaaacctcatctgattaatacatacttncagctcaacattttgg

SEQ ID NO: 661426 - DNA, 593 bp, Homo sapiens
cagaggatcgcatgccaataactccatctaaagtccagaccaaagaaagaatcttaagaactatgagacaaaagtgtcaggtaacccatatgttaatctaacttattagattaaaggacatttttcagcagaaatctcacagatcagaagggattagggtcctatctttagctgccttaaacaaaataattgtcaggcaagaaatttgaatccagcaatcctaaggttcataaatgaaggagagataaattatttttcagacaaatgctgacagaatttaccacttccaagccagcactacaagaaatgctataggagttctaaatcttgaaacaaaacctcgaagtacaccaaaataaaaccttcttaaagcataaatctcacagggaaagcaataactgacaatggggggaaaaaacaaggtattcaagcaacaactagcatgatgcatataacagtgcttcacatcttaatactaatgaacgtaaatggcctaaatgttccacttaaaagatacagaatggcaggatcgattaaaatccacaaccaagtatctgctgtatacaagagactcacctaatacataagcactc

SEQ ID NO: 661427 - DNA, 169 bp, Homo sapiens
tttcaggaatctgagagcctggatcagaaacacactgctgcggagagagatcgggaagctgacagaggagctgaagcacctgacagaggcactgaaggagcacgagaagatgcgcccgctgctgctctgccctatgaactgtagcgccagcgcctcccccggccggacc

SEQ ID NO: 661428 - DNA, 136 bp, Homo sapiens
aaaggggttttttaaacccccaaaaacttttttaaaaaaggggctttgggtttggcataaaacaaagttaaaaataaattttttttatttcccccccctttccccggggtcaatcaaattaaagggggttttccta

SEQ ID NO: 661429 - DNA, 282 bp, Homo sapiens
gggcccccccccccccctcggggggggcctttttttttggcccccccccccggggggttttgccccctttttttttattttttcaaaaccccccccccccggggcccctttgggggcctttcttttcccgggggggggtgggcccccgctttttttttttttccccccccttccccccggggttttgggttttttgggcccctgtttttttccgggggggcccccgggtttttccccgggggtttttttttcctaattaaacccccccgggcccccctggga

SEQ ID NO: 661430 - DNA, 391 bp, Homo sapiens
  misc_feature (2)..(2): n is a, c, g, or t
gnccaggactgtgtctgtggtgcctgaggttccagagggtgcaggaggagcaagggtcacaagagaggggcatgctggggacatggcacgaggtgttagaaggtgaaagaaggcatgaacattgtggaagccatggagcgttttgggtccaggaatggcaagaccagcaagaagatcaccatttccgactgtggacagctctaatttcttttgacttgcgggcattttacccatcaaaccattccttctgtagctcaggagagcgtccctaccccatctgctcgcaatgtcctgtaatctctgctctcactgaagttctttgggttccatattttcctcattccccttcaagtctagctggattgcaaagttaagtttatgattatgaata

SEQ ID NO: 661431 - DNA, 506 bp, Homo sapiens
gcacgagggaaactgtagtaaatttaccaaaatatctccgaataaaaagaagaggaacatcttttaatgaattatagagtacaaaagaatcatttaaaagagagggcgagtgaaaacatgaaaagaaacgttactaacttaattgaccttaaagtagcttcaccagttaagtgcattattgatcattccatgaataaccatttttaaagactaagatgctgagttgtgttatatagagagaaaaaaacgtactttcagtttccatatgaggtggagcgcaggtcataggtatgccggctcattgttttctattttaaaaagtaaaaaatatgctgctaaaggaacacgtgagaaattacattctccctaggtctgcgataacgcggtaatattacactgcccgccgccttccatgcctttggaaagcagacaatgatgctaggcggcgcccagcagtataaacttttcttgcttataaccagaacctctatcacaaaattagaaac

SEQ ID NO: 661432 - DNA, 604 bp, Homo sapiens
gatcaggtaggaggtcagcacaagattacgggttcataaagaacctgctgataaaactggttgcagtataagttagccggcctataacccaccaataccaagtatggcgatcaagagtgacctctgttcgtcctcattgctacactcctcaccagcgccatgacagtttacaaatgccatggctggccaggcgcggtggctcacgcctgtaatcctagcattttgggaggccaaggagggcagatcacctaaggtcaggagttcaagaccagcgtggccaacgtggcgaaaccctatctctactaaaaataccaaaattagctgggcatggtggcgcgtgcctgtaatcccagctactaggggggctgaggcaggaggatcgcttgaacccgggaggtggaggttgcagtgagctgagattgtaccattgcactccagcctgggcaacagagcgagagtctgtctcaaacaaacaaacaaaaaaacaaatgccacgtcaacatcaggacgttaacctttagaccctatatggtctaaaaaggggaggcatgaataatacaccccttgtttagcatatcatcaagaaataaccataaaaatgggg

SEQ ID NO: 661433 - DNA, 121 bp, Homo sapiens
ggtattatcatctgatccttacatcttggtagctgctttttactaatatctagctccctatctttattatcttaaaagaatatacaggccgggtgcagtggctcatgcctgtaatcccaga

SEQ ID NO: 661434 - DNA, 133 bp, Homo sapiens
agcgctcagcttactttaaatggatcctctgtgatggtgatagagttcagaaagatcaagccaaagaatgcgaagcaaccagagcgtaacgaaaagcgggtattggggtctgggtatggccagcgctgtggta

SEQ ID NO: 661435 - DNA, 243 bp, Homo sapiens
agtcgtctctacacgatcccctccttggcccgcaggcctggattagccggattgccttactaacgatttcctccgtatctgactgcaactcagcactcagctgcatgcgagcacaatgatgagccctgctggcagcaggttgcgtcttcgacgtgcaggatcacttgatacttagcggttattccagcttgacgggcggaccattctgatgccaaactggcctccaggagacttgtctatcat

SEQ ID NO: 661436 - DNA, 261 bp, Homo sapiens
accctgctatgtatgtgtgcacgtgtgcctgtatacgcatacctctaaaatttctcatgagtcccagtatgcgtcgcctgagaataagagcattttcctatggaaccacgatactttttgtaaatttttttttgccttgagacagggtctctctcgctctattgcccaggctggtctcaaactcctgggctcaagcagtctactcatctcagcactctgggaggccaagacgggcggatcacaaggtcaagagattgagac

SEQ ID NO: 661437 - DNA, 718 bp, Homo sapiens
gaatactgaggaccccagatgacgtggaactaatagctccctaacacacctgtggctacgcccgaaccccagtgtgtttctgccgaaagtcggaacattaatcaaggaaagcaacatccattgtacttatgacgactatataggatcattcgtgtacacaccaataaagttcccgtaggtgaacgtaggtaagagctaaaccacgttttgacatctgtcttcgcaacttggcaaggggaaaaactgtctgtcactctgacatgccataaatagttagctttgcatccacaaacgtccccaggtgtagaaaaaggcatgccgaaacagatgaagttctggacacgcctaagaattcattgaagtcccatctagttactcattggaacggctgtacatcgatcggtcggcccaaagagcgcgtgcaagtgtatgtgtgacctgggtccgtggtgttacccctctgctaaatatactgcctgtcatctactttattagctcgatatgttacatatatttatatcgtcagtatagctgtgcgagggtgtgcccttgaggtatacctaggttgaccaccttggatactagtgacttcgatcctgataaattccgataccatgaatgcttaacagttaaagttcatcgacaaggagtttctgtctgtacagacaaactggcaagtgttcccattaagatacgggggccatgcgccttaagtgca

SEQ ID NO: 661438 - DNA, 1200 bp, Homo sapiens
taggcttggcccttgagtttattccacaaaaccacggaaaaggatactgaaagggagctcttgccagcctccaagcaaggaggccccagcagccagttcttccagcccctttgagcccttttgtgtgttaggcccacacccaaaagaggaaaaccagtgtggtggtgcgcgaaggtacagtggcaaggcactttgtgaaaacattcccagttttaccggggggtgaaattgtgaactttacctctgtgaaacagatgtgaaaaggggacatgtgcaaatttggcgtgagcacatgtggagggtgtggggtagtagggtgaaaactcagtggtccgtgggttattaacccaggtttcctccaggtttaggggtgagcccgcccggtcgtggaactcagggggtgggcgggcccacacacccagggagtgaaggcggtggaacttcggcgggaaggaggaaaggggtgctcctgggaccagtggtcggcgaagaaaacgaaagccgtaaacgttatactctccagccaaagtgggaaaggccgtgctccagggggtttccccacagggttcgaacgtgggccgtggggtgaaatccgtggcaattcttatcaagcctcatattgcggggaccaaagaataatctttccttctggtcgggggtggcgaaaagatgagggggacactccgggccccttgcccactggggggcccatggggggattgtggccgaaaagagcgtggaacaagggggttgtgaatcgcctgtggccccccagaaaaacatttcccagggtagaacggggcatggggttaataagggctcactcgatcgtgggccggggtcttggttccaaagattccccttggcccatgtgtgaacacccactggtgcccctggggcgcctggaaaaaaagatggtgcccccgaagttaacagtgtctcccacacacgtggctatcttccccccttaggaatatggggcggaggaccttggacagagaccttcaaaagaggtcccaaaaccgctgaaacaacggggagcgggttagacgcgcccccactcacagagtgccgcagggcacaatcccaggaaccaaaagccggagaaaagaacgacgggaggcacacacaaccacagacgaagccgaaggtacccgccgagatgcacaaagaagtgagacacacacccgctgcgacaca

SEQ ID NO: 661439 - DNA, 731 bp, Homo sapiens
agcggctctcttccacagtgaggcctacagcgccgccgcttgtgctgcagccatgtctctaggtgatccctgaaaagttccaggcatattgtagcggagatactcaacagccaacatcgatgggcggggaaaatagccttggccatcactggcattaagggtgtgggccgaagatatgactcatgtggtgtcgaggaaacgcagacattgtacctcaccaacgcagggacgaggagaaccatcactgagagatgaggaatgagaacgtgtgatacacacattatgcagaatccacgccagtactaagatcgcacagactggattcttgaacatgactacgaacgtgatgtacaatggatgtgacaagatatcacgccaggatcctacgaccaaatggctcgtggaacaaacatagctcgcgtgaagacctcggagtcgactgaaggaaggatttcagggcgccataccagggggctgcgtcgacttctggggcctacgtgtccgaggggcaggcacaccaagaacattgggccgtcgtggtgccgtaaccgtgcggtgtgtccaagaagaaataacctctgtacggacttgctctgtataataagatacgtttatactatacaaaaaatgtacatgaagattgtgctgccaaggcagatatctcagataacgggagataacaatagaaggggggccccggaagccagatctaggaacctgaagagggaaaa

SEQ ID NO: 661440 - DNA, 137 bp, Homo sapiens
agtcctcccacctcagtgtctcaagtagctgggactatagacacacaccactgctcctggtgtgatgtttgttttgttttgttttgttttgtttttattgagacggatctcctgggcgacagagtgagactccatct

SEQ ID NO: 661441 - DNA, 337 bp, Homo sapiens
tataagctgttcaattagacggagacatgtattctctttattatgcctatttgggttggggtttctggtacatgtaactgacagcataccactataccatgtgttcctaattccctatcccacaactaacaataaaaaataacatctcatttatggttttaagttcctcatgttaacttaaaaatatatcataaccaagctggttatatattgaaatggtatacatcaaaaccacgtaaaatagagtgcatcaggtcctttgtctttccaagctcaacctgcctttccaagctcaaccagcctctttgcttcctgtggggcagggaaatgggaaggt

SEQ ID NO: 661442 - DNA, 206 bp, Homo sapiens
cccgtttctaccaaaaatacaaaaattagcccgggcgtggtagcgtgtgccactgtagtcccagctattcagaaggctgaggcaggagattcacttgaacccgggaggtggaggttcaagtaagctgagataacgctactcattcctccttgggcgcacagagtaaagactctgcctcaaaccaaaaaccccaacacaccagatat

SEQ ID NO: 661443 - DNA, 372 bp, Homo sapiens
gtgtaaactgacaggctgaacacatgacaagaattattattggtttatattactttccccagagaaagaacttacacagaggggactggcatagttaagactgcccgagccttttcttttcttttctcttttcttttcttggcttttttcttttctttttttggagacagactgtcactctgtcgcccatgcgggagtgcaggggcacagtctgggctcactgcaacctctgcctcccgggttcgggtgattctcctgcctcagccagtagctgggatggcaggcgcccaccactatgccgggctaatttttggtatttttagtagagacagggtttcaccatgtgggccaggcgggtctccaactccggag

SEQ ID NO: 661444 - DNA, 132 bp, Homo sapiens
ccgaaacagtacatggctattgaagagtatactgatagcattggaggaatacggcgtttgaggtcttggcgagtgttatggtgaggttagcgatggacgtcggattgttgctgccggtacaaatctagagtt

SEQ ID NO: 661445 - DNA, 160 bp, Homo sapiens
  misc_feature (119)..(119): n is a, c, g, or t
ggcagcactggtggggccccaaccatgggctgggaccgtcttcttcttgggctctctctcactgcacagctctgtgacctctctcataggtcttgaactctagagcacccctcgcgtgntctactctgcccccaggggaagacgggccacgcatttatcc

SEQ ID NO: 661446 - DNA, 184 bp, Homo sapiens
tgaatcggctgtattgggcctatcctcgaaacactggggctggccaaactcttggttcttcaacaggcgcattttactgtgtagcttttggttccattgtttggagaccttgcctgggcacagtttggtccgttagacttaaacgttgaatttttttttttttttttttttttttttttttttt

SEQ ID NO: 661447 - DNA, 317 bp, Homo sapiens
gagagggagtctcactctgttgcccaggctggagtgcaatggtatgatcttggctcactgcaacctctgcctcctgggttcaagcaattcttctgtgttagcccccccagtaggtgggactacaggtgtgtgccaccacacctggctgttttgtatttttagtacagacggggtttcaccatattggccaggctggtctcgaactcctgacctcattatctacctgcctcagcctcccaaagtgctaggattacaggtgtgagccaccacgccctgcaacattaaatattttattaatttcatctttttcaagaaat

SEQ ID NO: 661448 - DNA, 1317 bp, Homo sapiens
  misc_feature (479)..(479): n is a, c, g, or t
  misc_feature (1131)..(1131): n is a, c, g, or t
tggtctgggaggaagggggaccccaaaactcattgggcagcagaggttgagaacgaagcttcacaaaagagtgtctaagcaacagccaccctcagttatataaattccagaaaacaccgtggctagtgtgggtattggcaaaccttccccaactcaagtttcaccagaaaactcaggtgaaaaacgaggtttggagtttcaccacgtgagtgggtggctcgggtgaatctcaggctcataggaaaattcgacttcttcattaaacgagccaattcccataacgtgatctcgtggtacccagaaaaagagttcaataccgtggaagcccagacaaaaaaaatatgtgaaagagaaagcgtggtccgaaaatgggagggtctctccacatgtgtgttgacaccactgtgaacacaagccgaagggggttccgagctctaagcgcccgtgaccgcagggagcctcaaataccccgcgcgggngtctaagtgggtgtgagacgcggccatactaaacacgcgtgggcccgaacacatgtggggttcctataaaggaaacacaactcttatctcgtcctataaattttgtgtgacgtgtcacgccccatctgttgagcaccacagggtgtatacccgcgtggagcatgtgaaaccgagaaacaacgcgcgggctctttggaaccccacgtggccgggaacaaacacattcatgtggcggaaataacacatcacgggggtgtcgacaactagcgtttcgaggaccattcttctacaacatcttgtatatacgtttcctacacaccctttagtgtggtggggcacccatgtggggacactttatacagacgcccccctttctaaagaatcttgtgggcgcgcgtttaacccatcgtcggaacaggggccaaacatacaccaccaacacccaaggtgggctcgcacacattacattgggcgtcgccccgtggtctaccaattgggacaccaaaaaacgtcatggtggacagaagacgctctctcgaccccccgttgatcagggcgacaccgcggagcaaccgccggtctcagtccaaagacagcacacacaggggcaatctcccggggccatgcaacaacgtgggacaacgcaacaacncactcaaccccacacctcgcacaaaccgtcctcaaactcacaacattacagcccgttgaacagtgagcagcaaaatcccgaccaacttgtaaacagcaatgtcgcaagaacactcaaacgagagcacaccaaacagagacagatcgccgccggacgggcacacacgccgactaaccccgacggggc

SEQ ID NO: 661449 - DNA, 1029 bp, Homo sapiens
  misc_feature (147)..(147): n is a, c, g, or t
ggacacagtctgatctgccgcactcgttccaatatctgacagatgtcctctgtccagcgtacgtgatactcgcgaattaataagcagaatcgcttcgcttcgtagggtctaattagagtagaggtatcacggcgatgtgtccttggngtggattatggctggggtacgacggctcctccgccacacgcggtgatttacggatccatggggtgcggtgcgtcacgcgcagcactcctaggggccgctagaattggctgcgcgacgattgggtgcagcaacctggactcctaatggtgtagcagaaggcatggcgcgcaagaaacgactgagctcgcgcattctcttgagcaccgtaaaaatacccaccatttggagacactggtcatcgatctcccatctgtagtagggtaactggtacccacagactcttgggcatccagatcctgttcatatatggcgaagctgccgacgctcagcccctgcgaacgaagtctacgcgctagatggctgcatgaatgcggatggacgcgcgcctgaaacctgcgacaaggaagccacctgaggaagatcacatactgaaatcggcaattcaatggttttgatcgagctgttgatcacgctcgggcccaatgtactcttgcacagtccgaggtccagtgctagtcctcgatctacgcactctggtgttcgtagcacttggaaagtaagtgattgtgactctgagactatgggcccttgacctccaacacctgcgtgtccacattgcgtgacgcagtgcgttttaccgaccactgcctcctatgggcacaagtgacctgccgtttttaggaggctagggcattgtccccgggggactcgtagagggggactttacccttcaattggaacatttcatctaggtgcccgcgcgcttgtcctactaggtcttcaaccaacaagggtcccgtaacggggaaagagcgttgcgttgacctccacagaaacagctgagggtacgtcctgccctggtaacttgaagaaggcaatagc

SEQ ID NO: 661450 - DNA, 563 bp, Homo sapiens
  misc_feature (29)..(29): n is a, c, g, or t
  misc_feature (154)..(154): n is a, c, g, or t
atatgcagtagtggatccttgtcaatatntgtgatgttttccctggacaccagtgtgtaactgatcaaatacattttttttaaataatgtgattaaacacatgctggtctttttttttttcctcccccaaagccatcacatagatgtgggatanaattaatcctgtggaaatgatctcagatgatgatgagttactccgacattcctctctcccttgtttcatatttgctaaaaataactttgtttgcaatgccatttatcccaaagtccataattacaggcttcttagaattataaggacggcaggccggcgtttgggatcaatgtcttgttctgaacagatccagcgtggacgtcttcaaggcaagagttttcgttttacattgtcctcactcttaaagcatccctcgaattcattaaggtttatatacaacgtattttggaatatatattttggtactttttcagagcatctttgtgggttgtacagggaaaaacgacaagtcattgctcagaactacagccttttctgtatcaataaacaagtggagacgagcaccgca

SEQ ID NO: 661451 - DNA, 433 bp, Homo sapiens
tggagtaagaagatctagcacagtccttgtagcctggtgaaggatgtgattggggctgtagacagcaaagtggcagttatgaaaagaaagtgcgtctcacatgagatttatacccaagaaccgatagccagtccatcatgaggatgaagagtggtccgatgtttgcccaaggacagatttgaaacggaagaagcttgtacggtgatggggagtgtgtttctgcaagaatgccgcagggaggttgaacgaggttccaagcacggtcttctctactggacattttcagttttccttcaagaaaaagacccagaagtacatctttgcatcaattggacccgaagtccaccagtgatctctttcaaagcaagctgatttggtgagagaagtgggcacatgaggcgaaagggaacatacctgatcagcctggggatga

SEQ ID NO: 661452 - DNA, 117 bp, Homo sapiens
gcgatggcacaatcatcgctcactgtagccttaaactcctgggctcccgccacagcctcctgagtagctagggctgcaattgtgtaccatcatacccacaattttaaagttaaattg

SEQ ID NO: 661453 - DNA, 1147 bp, Homo sapiens
agcggagtgcaggcgaactgcagggcaaacaggtgggcgcagtccgagtggatggagagcaggaacagagaggggcagacacagatgatagttgttcgtgatctcggacctcagtgcagagagccgtcgcgagcaaaaacgatacgagaagcgaaggacgtggcgctgttgctcgtaaggaagactcggctgctccatcccactcatccactggcacctgtgtctgcgtcacgcatcgttccagagggaaatgtcggcgaaggctggaaccatcagacagaggctggggacacatcaggtctattctgccccagcaaggcttcgataggaacgagccgtagtgacataatgcactctctcgcaaggagggctcaggaacatctgcttcgggcgtcacatatacagtcgtggtcctttgcgggctgcatcgaaaacgcagcgtagagctgtaaccagcaacgtgagattccggtgtcgggtcaacccggagtcaatggctacatactggcctatgatggatattagagattccggccgtatcattaggtcaaacaagcgaccagcctatgccgctatcgacctttgacaagtttagacaaaaagtcgtgtgagacgaaaggctagtttttacaagttttgggctttctatcagaaatatatatcgtataatcaaatcccgtaaagatggaccgctaatcatggagggacagttgtcttcgagtggtgtatcatggaaatcttagaagtgaatactggcaaaatcgaaggggaaaaaattaaatcatgcccactatttgctaaatcgttactgaacaaaaatatacaagagaagagaaaaaggtttcattccacggaagtcttcgcggggggcgatccgggggcccagaagtaaaggggggcgctctgggataggtccccatggtcgaagtgcggggggggggtgcccgggtgtttcggacgtgggcgttatttaggatgccacctctggtaaatacgttgtgcaagcggcgctttacaaactgtaccgaaagctttgggtaggcatgtaaacttaacttgggggcgcaaaaaacctgtggtgtaccccgtgggtgtatgaactgcaacgggttacattacgggtatcaaacaatttttccacgataaa

SEQ ID NO: 661454 - DNA, 399 bp, Homo sapiens
  misc_feature (311)..(311): n is a, c, g, or t
  misc_feature (364)..(364): n is a, c, g, or t
  misc_feature (374)..(374): n is a, c, g, or t
  misc_feature (396)..(396): n is a, c, g, or t
ccacacctgtgaccatgacaatttagaacagaagaaaggtcttgaacccataccatggtatttcatcaattctaagatgccactgattgtaggaaggaccattattttatatatcactaagaacaaaaaggaatgttgccaattaaactatgatgtggtgtcttagctgtaatacttatgcagtaattgattatactaacctctcattgctttgacaattctttcatctattctgaaggatttgggcaagatctccaaatatattcagggatgcatttcatagcatgtgctatgcccaatgtttctccaanttgacaggggcacattaaatcacctggggcatcttgtttaaaaatgttagggntctggactgnggtgggtctggggggtgggccngga

SEQ ID NO: 661455 - DNA, 338 bp, Homo sapiens
ggtcgaccaaatgaaatatctcaattataaaagcagcatggccgggcacggtggctcaggcctgtaatcccagcactttgggaggctgagcaaggtgggtggatcacttgaggccaggagttcgagaccagcctggccaacacggtgagaccctgtctttactaaaaatacaaaaattagccaggcgcaccactgtagtcccagctactcaggctgaggcaggagaatcgcttgaactgaggcagaggctacagtgagtggagatcacgccactgcaactccagcttgggtgacagagtgagaccgtctcaaaaagaggagaaagaaaaaagtcgacg

SEQ ID NO: 661456 - DNA, 155 bp, Homo sapiens
  misc_feature (14)..(14): n is a, c, g, or t
  misc_feature (132)..(132): n is a, c, g, or t
ggcctttaaaaatnaaactgccaccggaactgctttaaaaatgtttggttcacagccttcactggattacctattggagcaaacaaagtgtaaccatgtaaaacctgtgagcttgtattgatatctcatggntagagttccaagcgaatgggtct

SEQ ID NO: 661457 - DNA, 158 bp, Homo sapiens
tggctaccccaaactgttgcatcaggtacccccattctatcatcaacgggtacaaaccgagtcctggccttgtctgtggagacggattacacctttcccacttgctaaaaggtcaaggccttcttggctgatccatctgcctttgtggctgctgcccc

SEQ ID NO: 661458 - DNA, 395 bp, Homo sapiens
ggaagtccagatgcgggtaatctatgaaagaaacaaactgacatatctaggcagacagttatctatgtaggtctgagggtcagcagctgtaagtctccttccttatggctcttgagatccacacataataactattagccctaaacaagggctcctcccacctaccacctgtagccccagttgaaaagcatgcataatgagctagaggtacagcctggatactggaatagcagcccacataaacataaaggaggatgtccctggtctgttccatccccacggatggtgtagctgctgggcaacagtgttggcttcttttaagtaccccctaacctcctcacccatctccaaactgactagcactcagagggacttatgataacaggtcagctccc

SEQ ID NO: 661459 - DNA, 145 bp, Homo sapiens
tggttcttgttgcgcaatgacgacatggtcggctcgcagctgctcctcagcgaactcgaggagaactgcataatgctgtccttgctcccctcggacagcgcgccgtccgggatctcgatgtagagtgctgccgacactcagcact

SEQ ID NO: 661460 - DNA, 140 bp, Homo sapiens
ttctggtctattgggcgccggtgcagcaagcgtctcgcagcagttcctgctctggcgccgatgtcaggtcgggattgtggagcgtcgcatatgctgacaacacaccggctgcatctcctcgtctggaacaggaattgcac

SEQ ID NO: 661461 - DNA, 452 bp, Homo sapiens
cgcgtggttgattctcctgttgttgggtcacggtgagtatggatggtctgcaacatggagaggatcatgaaggcacaagctttgagggactcaggcatggctggttacatgtcttctaagaagaccatggagatcacccagagaacccaatcatggaagagctgagaaagagggctgatgctgacaaaaacgacaagtctgtgaaggatttggttcttctcttgcacgagactgctttgttgacatctgggttcagccttgatgaccctaacaccttcggcaaccgcatccacagaatgttgaagcttggtctgagcattgatgatgatgctgctggagaagtcgatgttgacatgccagccctcgaggaagctgatgctgaggaatccaagatggaggaagtcgactaagcttggtgtttctaggttgtttctgattttactgattagtag

SEQ ID NO: 661462 - DNA, 156 bp, Homo sapiens
ggaaaggggaatttttttgggccccccttggtttttttttttgggggggggggttttaagttttttgttttttaaacccggcctttttttgggggcccccccccccccaaattttgccccgaatttttggcccccctttaaaagttttttttggga

SEQ ID NO: 661463 - DNA, 408 bp, Homo sapiens
tttatctctttattttaaattcatttttcaagccttactgtattggcattttatatctagtacaatgtagaatgaatatgctaacagcaggcacccttgttttatttctgattttaaagacatgcttaccacatttcactattaagtttgatgtttgcagcagatattttgcgaatatctttgatcactttaaggaagttccttcctattcacaattttctaagatgtttttaaaattatgaatgaatcttgacttctaccaaacatattttccgtatctagtgagatgatcatataatttttctgctttaacttgttaatatgatgacttacatgacatgatgttttctttcggttaagccaacctggatttactgagataagctccatgttgtcatgccatattca

SEQ ID NO: 661464 - DNA, 390 bp, Homo sapiens
  misc_feature (3)..(3): n is a, c, g, or t
  misc_feature (5)..(5): n is a, c, g, or t
  misc_feature (7)..(7): n is a, c, g, or t
  misc_feature (329)..(329): n is a, c, g, or t
  misc_feature (335)..(335): n is a, c, g, or t
  misc_feature (376)..(376): n is a, c, g, or t
ctntnantttatgaatgcctgtaacgataatagtcactcttggttactgagctacagctgtggtctagaactgttgtgaacgcttgtcataatgtcatagaatcttaccaatagcttttcaggataggtgctgttattctaatcttttccatgtggcaactgtgatgcagacattgtcccaggtcagacagctgttaggtctggaaccaagacaagtattccttcaggaaaaccccagagtcctcactcctggctgttgcacttggaatcttccctttccttgtaggacacacacacacacccccccacacccctttagagggcatggnttatantttgttacattcatttattggaacgggcataggtgtttccngggtaggcagccta

SEQ ID NO: 661465 - DNA, 1464 bp, Homo sapiens
gacctctctatacctgcttgcaaaaattacacatggagtaactatttttaaagcttatttttcaattcataacaaaagcacatttattttcagtcaaagtggatgatgtctccctcttttcccctattctcaattgttggcttgaatcttttatcattttacatcaaattctcccccatacccacttcctgatactttggtactctttcctgctcaggtcccttcattggtacttaggagttttactcatgtaataggtataacagaaaatatcgtccagctcgggatagcaaagcatggagaataaaacaagatagctaaaacaaagaaacaacagccccaagacaacaagagtgatggaaacacatagaaccactcagaaaagccatacacgaaccaacccgaggggcaccgcggccccgagcggcacatagacaactggacacaggggtccacaaggaaaccagagacagagcacagcgcggcactcacacacaaactaacacaagcgccgagagaaaaaagaaaaacgcactggcaacaaacacacacgatggcaccagaagagccaaaaggggaacaactacacgagacaacaaagagccggaattcatattacccgacagcggggggaaaaaaaacaaacacgacaacaaaacaacacacgaatgcaacaacgaaagacgaatgcagaacaagacaaaaaagcaacaacgacgagggaggcggaagggagcgagaaggacgcgagaggaggacagacaggaaaaggcgagaacacgagagaaaggcgcagacggaggaccgagcaggaacacagagcggcaagagagcaaaacgcgaacacgagcagcgaagcgagggaccgacagcgaagagagcgagagcaggcagcccggaaagcaaggaagccgagacgggacgacgcagacgggagcggaggagaggagcgaaggacagcaacggccgaaagccgcaggagaacagcgggcgagcaacgcggaccagaccacgcgagggccagcaccgcgaacaggcagcagggtggaggcagacgaagagagacggaagcgcgggagccgacgcacggcgatcaacaacacgaaagagcagaccacgcgcgagcgggggaccgacgggaagcgaagacgacggaccgcacggcaagagcacaagacagtgaagcgacaggaggagcagcgcagacacgaggagaagagaccgacagactcagaacggagcacagcagagagaagacagcgcgagaagcggaggaggaacggggacagcgacgacgcaccaagcagaagagagtgcagcaacaaccggcaggaaacaaggcgcaggctaggacatacaccggagacagcacgggagaagagggaagggaaagaacgagagcgcgcaaagaccagagacagggagacacggcagacagagcgccgacaaagaagaggggagagg

SEQ ID NO: 661466 - DNA, 294 bp, Homo sapiens
tcatctctacacggatccccttcgtcgaacaacaacggctcggttacgcttgctttgtacgggctcatggttagtggttacatgagggcaatcttctagatcaaataataagaaggtaatacctactaagaagaattttatggagaaagggacgcgcgcggcgggatttagggtcgaagccgcactcttaaggggtggattttcctatttatcctttgagttgtggtattccacaatgtaatacttattagatagtacggctaggagggtgttgatttgccgttgcttcttcga

SEQ ID NO: 661467 - DNA, 353 bp, Homo sapiens
tcaagactgcgtgaatggatggtcctggcggtctctactaaaatacaaaaatggccgggcatggtggcgggcgcctgtggtcccagctactctgggagtgctgagtgcaggacaatcacttgtactcagtgaggcagagtttgcagtgagctaacattgcaccattgcactccagcctgggcaaaaagagccagacttcatctcaaaaaaaaaaaattaaaattggaaagttcaaaaatactcctttgatcaggggccatagaatgggatgtggtgtaagtaggctttgacaccaaaatccattatctaggtacatctctgtcagattggcggcatgacaacctggcaatgga

SEQ ID NO: 661468 - DNA, 457 bp, Homo sapiens
tctgtaacttagggatcataaataccttgggcagtatggctgttttcacgatattgattcttcctaccgatgagcatggaatgttcttccatttgttgtatcctcttttatttctttgagcagtggtttgtagttctccttgaagaggtccttcacatcccttgtaagttggattcctaagtattttattgtctttgaagcaattgtgaatgggagttcactcatgatttggctctctgttattggtgtataagaatgcttgtgatttttgtagattgattttgtgtcctgagactttgctgaagttgcttatcagcttaaggagattttgagctgagacaatggggttttctagatatacaatcatgtcatctgcaaacagggacaatttgacttcctcttttcctaattgaataccctttatttccttctcctgcctaagttcagagccaggggg

SEQ ID NO: 661469 - DNA, 371 bp, Homo sapiens
  misc_feature (39)..(39): n is a, c, g, or t
cactgctcggactgggcacggtggctcacgcctgttatnccagcactttggaggcaaggccggtggatcacctgagatcaggagtttgagaccactctttccaacaaggagaaaacccgtctctactaaaaagacaaaaattagctgggtgtggtggcaggcacctgtaatcccagctactggggaggctgaggcaggagaatcacttgatcttgggaggcggaggttgcagtgagctgagatcgcgaaactgcactccagcctaggcaacagagtgagactctgtctcaaagaaaagagagaaaatgtgactcaatctcacaaccacaagaagctgaattttgcctcccaattcagcatgcctggaagag

SEQ ID NO: 661470 - DNA, 142 bp, Homo sapiens
tgagaattagtggttgtatttggatggaaaaacagctgctgtgtaattttattttgctatcgttattttaaatggacatttggtttgaaatggtagatgtctacttttgcaaactgaaagagaatgaccttacctttggatg

SEQ ID NO: 661471 - DNA, 764 bp, Homo sapiens
cataataatgatgacatttgactaccacaactcaagggctacatagaaaaatccaccccttacgagtgcggattcgatcctatatcgcccgtgcgcgttccttactccataaaagtcttcttcagtaagctatgaggctacttataattttgagcgtatgaaattcgcctcttctcttaaaccccgtacccatgagcccttactaaacaatgtaatgctgccacttaatagatgatgtcatcccctcattattaatctcaatcatccgtcagcccataaagttcttggaccgtagttgagtgacatacaacaaaaggatcagaactgaacacgacataaacaataagaagaaacaagaagcggaggggcccagtgccatcagaaagcccgccaaaggggcccaaccaagtcaccgcgcatcacaggaattcttggaccaaagggggttcactcaatggcggagccagtataagtaaggccatagcaaagggctcgacgctcctaaaacggtgcggggactgggggaaatcaggcaagctcggttaatgatttcgccgaagggaaccctgatttcagagcgggcggtcccaaccatttgtgacacaaatcactagacgcagcatttgaatgcctttcatacggtccatatctctaccttcatagagagtataaatggtctcaacagagcgtactaaggcgaccagtcgaaagatacgctaccgagtctgattcttgccctcttaaccagcgcagcgaaagggggc

SEQ ID NO: 661472 - DNA, 269 bp, Homo sapiens
  misc_feature (81)..(81): n is a, c, g, or t
  misc_feature (92)..(92): n is a, c, g, or t
  misc_feature (174)..(174): n is a, c, g, or t
  misc_feature (180)..(180): n is a, c, g, or t
  misc_feature (192)..(192): n is a, c, g, or t
caggtcgactctaaggaatcccctatttccacaggtcaaggtatatttatatactcatctgaactttcaaaagaagttaanggggagatatnctcaacaggcaaaaataagatatccaatctatggtccaagtttatggctccgatataaataaggggctataaacccgtatcnggaaancagtggcgcagngcgtgcttaatgggccagccattgaaaaccaaggtctcattctactcggtctttcagcaggtcagggggtaccggag

SEQ ID NO: 661473 - DNA, 220 bp, Homo sapiens
gcggccgcgtcgactgattaagtcactcacttctctgccaccctcatacttctttggactttgcttcttgccagctggagcgaaatagatggtggggaagcctctgacttcatatggagaaggcacatcattggctgtagcatccattttggcaatgacaatattgggatctttactgagcttctctcccaactctttggtcgacgcggccgcgaattta

SEQ ID NO: 661474 - DNA, 1666 bp, Homo sapiens
ctgcagcgccttcctggaggtgggggccgcccgcgccatggccgccgcccagcccaagtaccccgccggggcgaccgcccggcgcctggcccggggctgctggtccgccctctgggactacgagacgcccaaggtgatcgtggtgaggaaccggcgcctgggggtcctgtaccgcgccgtgcagctgctcatcctgctctacttcgtgtggtacgtattcatcgtgcagaaaagctaccaggagagcgagacgggccccgagagctccatcatcaccaaggtcaaggggatcaccacgtccgagcacaaagtgtgggacgtggaggagtacgtgaagccccccgaggggggcagcgtgttcagcatcatcaccagggtcgaggccacccactcccagacccagggaacctgccccgagagcataagggtccacaacgccacctgcctctccgacgccgactgcgtggctggggagctggacatgctgggaaacggcctgaggaccgggcgctgtgtgccctattaccaggggccctccaagacctgcgaggtgttcggctggtgcccggtggaagatggggcctctgtcagccaatttctgggtacgatggccccaaatttcaccatcctcatcaagaacagcatccactaccccaaattccacttctccaagggcaacatcgccgaccgcacagacgggtacctgaagcgctgcacgttccacgaggcctccgacctctactgccccatcttcaagctgggctttatcgtggagaaggctggggagagcttcacagagctcgcacacaagggtggtgtcatcggggtcattatcaactgggactgtgacctggacctgcctgcatcggagtgcaaccccaagtactccttccggaggcttgaccccaagcacgtgcctgcctcgtcaggctacaacttcaggtttgccaaatactacaagatcaatggcaccaccacccgcacgctcatcaaggcctacgggatccgcattgacgtcattgtgcatggacaggccgggaagttcagcctgattcccaccattattaatctggccacagctctgacttccgtcggggtgggctccttcctgtgcgactggatcttgctaacattcatgaacaaaaacaaggtctacagccataagaaatttgacaagatggtggacactcctgcctccgagcctgcccaagcctccacacccacagaccccaaaggtttggctcaactctgagctcctttccatctcactggactgcagacccggcctggtggggccagagagtccccagctagggacctgcacgtggacgtgggcacctcagtagcggagcatctccacgaaacggggcaccacaggatccctgtgcaagggctgggggcacgctctggccccaggcttgtgccccaccctggcatacagcccctgacacctcctccccagctggtccctacagggctgctcacttcccatcacctctcacagccacctggaacccaagccagctgagctctgaggggctctgctcccggtcttgggccctgggaaccccaccccaccccaccccacaggcgttgtaacctcgaatctgcccagactcttcccttagaagtcacaacatactcagtccaataaacctgtgagcag

SEQ ID NO: 661475 - DNA, 315 bp, Homo sapiens
gggggacaacgcaacctccagtgggggcgcgcacagacagggcacggcttaggaggaatcctgggggacaacgcaacctccagtgggggcgcgcacagacagggcacggcttaggaggattcctggtggacaatgcaacctacagtgggggcgcgcacagacagggcacggcttaggaggaatcctgggggacgatgcaacctccggcggaggcgcgcacagacagggcacggcttaggaggaatcctgggggacaatgcaacctccggtgggggcgcgcacagacagggcacggcttaggaggaatcccggcgg

SEQ ID NO: 661476 - DNA, 205 bp, Homo sapiens
ggaaaagcttgggacactgtccagagtagataccccgttgtctccatggtaccaggtacgtgactaccgaggagcctcagcaggcctacagccatcccctctaccagcagagccacctgtcccagcaccagcagcgtgaggacagtcagctgaagacctactctagtgactgacaggcccagtgccatgctgagctcccattttg

SEQ ID NO: 661477 - DNA, 1867 bp, Homo sapiens
ctgcagcgccttcctggaggtgggggccgcccgcgccatggccgccgcccagcccaagtaccccgccggggcgaccgcccggcgcctggcccggggctgctggtccgccctctgggactacgagacgcccaaggtgatcgtggtgaggaaccggcgcctgggggtcctgtaccgcgccgtgcagctgctcatcctgctctacttcgtgtggtacgtattcatcgtgcagaaaagctaccaggagagcgagacgggccccgagagctccatcatcaccaaggtcaaggggatcaccacgtccgagcacaaagtgtgggacgtggaggagtacgtgaagccccccgaggggggcagcgtgttcagcatcatcaccagggtcgaggccacccactcccagacccagggaacctgccccgagagcataagggtccacaacgccacctgcctctccgacgccgactgcgtggctggggagctggacatgctgggaaacggcctgaggaccgggcgctgtgtgccctattaccaggggccctccaagacctgcgaggtgttcggctggtgcccggtggaagatggggcctctgtcagccaatttctgggtacgatggccccaaatttcaccatcctcatcaagaacagcatccactaccccaaattccacttctccaagggcaacatcgccgaccgcacagacgggtacctgaagcgctgcacgttccacgaggcctccgacctctactgccccatcttcaagctgggctttatcgtggagaaggctggggagagcttcacagagctcgcacacaagggtggtgtcatcggggtcattatcaactgggactgtgacctggacctgcctgcatcggagtgcaaccccaagtactccttccggaggcttgaccccaagcacgtgcctgcctcgtcaggctacaacttcaggtttgccaaatactacaagatcaatggcaccaccacccgcacgctcatcaaggcctacgggatccgcattgacgtcattgtgcatggacaggccgggaagttcagcctgattcccaccattattaatctggccacagctctgacttccgtcggggtgggctccttcctgtgcgactggatcttgctaacattcatgaacaaaaacaaggtctacagccataagaaatttgacaaggtgtgtacgccgagccacccctcaggtagctggcctgtgacccttgcccgtgtattgggccaggcccctcccgaacccggccaccgctccgaggaccagcaccccagccctccatcaggccaggagggccaacaaggggcagagtgtggcccagccttcccgcccctgcggccttgccccatctctgccccttctgagcagatggtggacactcctgcctccgagcctgcccaagcctccacacccacagaccccaaaggtttggctcaactctgagctcctttccatctcactggactgcagacccggcctggtggggccagagagtccccagctagggacctgcacgtggacgtgggcacctcagtagcggagcatctccacgaaacggggcaccacaggatccctgtgcaagggctgggggcacgctctggccccaggcttgtgccccaccctggcatacagcccctgacacctcctccccagctggtccctacagggctgctcacttcccatcacctctcacagccacctggaacccaagccagctgagctctgaggggctctgctcccggtcttgggccctgggaaccccaccccaccccaccccacaggcgttgtaacctcgaatctgcccagactcttcccttagaagtcacaacatactcagtccaataaacctgtgagcag

SEQ ID NO: 661478 - DNA, 1795 bp, Homo sapiens
ctgcagcgccttcctggaggtgggggccgcccgcgccatggccgccgcccagcccaagtaccccgccggggcgaccgcccggcgcctggcccggggctgctggtccgccctctgggactacgagacgcccaaggtgatcgtggtgaggaaccggcgcctgggggtcctgtaccgcgccgtgcagctgctcatcctgctctacttcgtgtggtacgtattcatcgtgcagaaaagctaccaggagagcgagacgggccccgagagctccatcatcaccaaggtcaaggggatcaccacgtccgagcacaaagtgtgggacgtggaggagtacgtgaagccccccgagagcataagggtccacaacgccacctgcctctccgacgccgactgcgtggctggggagctggacatgctgggaaacggcctgaggaccgggcgctgtgtgccctattaccaggggccctccaagacctgcgaggtgttcggctggtgcccggtggaagatggggcctctgtcagccaatttctgggtacgatggccccaaatttcaccatcctcatcaagaacagcatccactaccccaaattccacttctccaagggcaacatcgccgaccgcacagacgggtacctgaagcgctgcacgttccacgaggcctccgacctctactgccccatcttcaagctgggctttatcgtggagaaggctggggagagcttcacagagctcgcacacaagggtggtgtcatcggggtcattatcaactgggactgtgacctggacctgcctgcatcggagtgcaaccccaagtactccttccggaggcttgaccccaagcacgtgcctgcctcgtcaggctacaacttcaggtttgccaaatactacaagatcaatggcaccaccacccgcacgctcatcaaggcctacgggatccgcattgacgtcattgtgcatggacaggccgggaagttcagcctgattcccaccattattaatctggccacagctctgacttccgtcggggtgggctccttcctgtgcgactggatcttgctaacattcatgaacaaaaacaaggtctacagccataagaaatttgacaaggtgtgtacgccgagccacccctcaggtagctggcctgtgacccttgcccgtgtattgggccaggcccctcccgaacccggccaccgctccgaggaccagcaccccagccctccatcaggccaggagggccaacaaggggcagagtgtggcccagccttcccgcccctgcggccttgccccatctctgccccttctgagcagatggtggacactcctgcctccgagcctgcccaagcctccacacccacagaccccaaaggtttggctcaactctgagctcctttccatctcactggactgcagacccggcctggtggggccagagagtccccagctagggacctgcacgtggacgtgggcacctcagtagcggagcatctccacgaaacggggcaccacaggatccctgtgcaagggctgggggcacgctctggccccaggcttgtgccccaccctggcatacagcccctgacacctcctccccagctggtccctacagggctgctcacttcccatcacctctcacagccacctggaacccaagccagctgagctctgaggggctctgctcccggtcttgggccctgggaaccccaccccaccccaccccacaggcgttgtaacctcgaatctgcccagactcttcccttagaagtcacaacatactcagtccaataaacctgtgagcag

SEQ ID NO: 661479 - DNA, 143 bp, Homo sapiens
ttctttttcctctattagcaaaccctatttatagctgcccaagagaaaagagtgtatgtttggcgtggacgaagatcggtttgaatctcatgaaccttgagtgctggagcatcctgatctgtctctatgccaccactggccac

SEQ ID NO: 661480 - DNA, 489 bp, Homo sapiens
tgtgaagggccaaattagagaatgaaaagaagaaaagagaaatagcagaaaaggagaaggagagaatagaacgtgaaaaggaagagctaatggaacgtcttaaacaaattggagagcagacaattaaaggtctgaaaggacctagaagaacagactcgaaaaggtctaaaacttggatcaagaacgaaaacgagcaaaagaagaaggcgaacgactttgaaaaggagcgtcgcgctgctgaagagaggaagagttgccatagcaaaacaagctgccgaccagatgaagaatccggagccggttagcagcagaacttgctgaattcactggccaggattgcacttctagaggaagcccagaagaaaaaggaagagggaactactgagtggcaacacaaagcttttggaggcccaggaagacttggaacagacccaagaagagtttaaaactgtgattgtctgccacccctcattcgcttattccataagg

SEQ ID NO: 661481 - DNA, 1945 bp, Homo sapiens
ctgcagcgccttcctggaggtgggggccgcccgcgccatggccgccgcccagcccaagtaccccgccggggcgaccgcccggcgcctggcccggggctgctggtccgccctctgggactacgagacgcccaaggtgatcgtggtgaggaaccggcgcctgggggtcctgtaccgcgccgtgcagctgctcatcctgctctacttcgtgtggtacgtattcatcgtgcagaaaagctaccaggagagcgagacgggccccgagagctccatcatcaccaaggtcaaggggatcaccacgtccgagcacaaagtgtgggacgtggaggagtacgtgaagccccccgaggggggcagcgtgttcagcatcatcaccagggtcgaggccacccactcccagacccagggaacctgccccgagagcataagggtccacaacgccacctgcctctccgacgccgactgcgtggctggggagctggacatgctgggaaacggcctgaggaccgggcgctgtgtgccctattaccaggggccctccaagacctgcgaggtgttcggctggtgcccggtggaagatggggcctctgtcagccaatttctgggtacgatggccccaaatttcaccatcctcatcaagaacagcatccactaccccaaattccacttctccaagggcaacatcgccgaccgcacagacgggtacctgaagcgctgcacgttccacgaggcctccgacctctactgccccatcttcaagctgggctttatcgtggagaaggctggggagagcttcacagagctcgcacacaagggtggtgtcatcggggtcattatcaactgggactgtgacctggacctgcctgcatcggagtgcaaccccaagtactccttccggaggcttgaccccaagcacgtgcctgcctcgtcaggctacaacttcaggtttgccaaatactacaagatcaatggcaccaccacccgcacgctcatcaaggcctacgggatccgcattgacgtcattgtgcatggacaggccgggaagttcagcctgattcccaccattattaatctggccacagctctgacttccgtcggggtggtaaggaaccctctctggggtcccagcgggtgcggggggtccaccaggcccttacacaccggtctctgctggccccagggctccttcctgtgcgactggatcttgctaacattcatgaacaaaaacaaggtctacagccataagaaatttgacaaggtgtgtacgccgagccacccctcaggtagctggcctgtgacccttgcccgtgtattgggccaggcccctcccgaacccggccaccgctccgaggaccagcaccccagccctccatcaggccaggagggccaacaaggggcagagtgtggcccagccttcccgcccctgcggccttgccccatctctgccccttctgagcagatggtggacactcctgcctccgagcctgcccaagcctccacacccacagaccccaaaggtttggctcaactctgagctcctttccatctcactggactgcagacccggcctggtggggccagagagtccccagctagggacctgcacgtggacgtgggcacctcagtagcggagcatctccacgaaacggggcaccacaggatccctgtgcaagggctgggggcacgctctggccccaggcttgtgccccaccctggcatacagcccctgacacctcctccccagctggtccctacagggctgctcacttcccatcacctctcacagccacctggaacccaagccagctgagctctgaggggctctgctcccggtcttgggccctgggaaccccaccccaccccaccccacaggcgttgtaacctcgaatctgcccagactcttcccttagaagtcacaacatactcagtccaataaacctgtgagcag

SEQ ID NO: 661482 - DNA, 1648 bp, Homo sapiens
ctgcagcgccttcctggaggtgggggccgcccgcgccatggccgccgcccagcccaagtaccccgccggggcgaccgcccggcgcctggcccggggctgctggtccgccctctgggactacgagacgcccaaggtgatcgtggtggtacgtattcatcgtgcagaaaagctaccaggagagcgagacgggccccgagagctccatcatcaccaaggtcaaggggatcaccacgtccgagcacaaagtgtgggacgtggaggagtacgtgaagccggcctgaggaccgggcgctgtgtgccctattaccaggggccctccaagacctgcgaggtgttcggctggtgcccggtggaagatggggcctctgtcagccaatttctgggtacgatggccccaaatttcaccatcctcatcaagaacagcatccactaccccaaattccacttctccaagggcaacatcgccgaccgcacagacgggtacctgaagcgctgcacgttccacgaggcctccgacctctactgccccatcttcaagctgggctttatcgtggagaaggctggggagagcttcacagagctcgcacacaagggtggtgtcatcggggtcattatcaactgggactgtgacctggacctgcctgcatcggagtgcaaccccaagtactccttccggaggcttgaccccaagcacgtgcctgcctcgtcaggctacaacttcaggtttgccaaatactacaagatcaatggcaccaccacccgcacgctcatcaaggcctacgggatccgcattgacgtcattgtgcatggacaggccgggaagttcagcctgattcccaccattattaatctggccacagctctgacttccgtcggggtgggctccttcctgtgcgactggatcttgctaacattcatgaacaaaaacaaggtctacagccataagaaatttgacaaggtgtgtacgccgagccacccctcaggtagctggcctgtgacccttgcccgtgtattgggccaggcccctcccgaacccggccaccgctccgaggaccagcaccccagccctccatcaggccaggagggccaacaaggggcagagtgtggcccagccttcccgcccctgcggccttgccccatctctgccccttctgagcagatggtggacactcctgcctccgagcctgcccaagcctccacacccacagaccccaaaggtttggctcaactctgagctcctttccatctcactggactgcagacccggcctggtggggccagagagtccccagctagggacctgcacgtggacgtgggcacctcagtagcggagcatctccacgaaacggggcaccacaggatccctgtgcaagggctgggggcacgctctggccccaggcttgtgccccaccctggcatacagcccctgacacctcctccccagctggtccctacagggctgctcacttcccatcacctctcacagccacctggaacccaagccagctgagctctgaggggctctgctcccggtcttgggccctgggaaccccaccccaccccaccccacaggcgttgtaacctcgaatctgcccagactcttcccttagaagtcacaacatactcagtccaataaacctgtgagcag

SEQ ID NO: 661483 - DNA, 1871 bp, Homo sapiens
ggcacagcaggaccgtcattgactgccatgagcgcgctgttgcgggtgctgcgcacggtggtgccccaagcgtgatgtgtgcctgcggttggggaccagttgccagggaccggggtcgcgccgtgcataatgagccttgtaaccacaactgaggagcgcggccagcccctgttccgaagaatttaaccggcctccttcgttcaacgaactcgttaccctggtgtccagctaatcatttttcccccccttttccatggattattcccttctggacagggttgaacctccttacaaggacggcaaccatgtgggaattcccttactgacaggacaaacggcagtgcgcagttggattgacattatcgacgaaatctggtctacatattgatgggtacgaaaaatacctcgggcgggaacaacatggctcaaaattggacggattgccaccaaagggacgcccattgaattccccatttaaacaattcagtgtaaccgcgatgggaaaagctacgcatatggtgcgcgaactatctcttcccttaacaaggggctcactcatctcggcaatttagtggtaccctcccctacaaacttggggaaggactcccctattgaacaaagcattaagcaggcacgagctgctttgggaggatacgtgactcctactcgctgttgggaaaatagggtccaaagattccctcttggtggcagacatttatcactgttgaagctccttggaatttgcgcgcctactggctgaccgtgacaccggtggcactatgggctcaactcggatgatcctgaagcccaaaggtacagactttgtgtgtcaaacgttcaccggttccggaacactctatggtgcaccatcgcccagtaacccaacctgtatgtgacaaaaggcgtttggttaccaagagggcgaacagggtttaccgctctctttccgcttctctacttcctcgtcttcgaataacagccaacagcacacccacaagccagaagaaacatgagactaaagaccgccaccaacagacacacagccgcgagcaaagaagaggagaagagaaagagaaggagaagagggaggacagaacaaagaaaacacaagaaacaaagagagacagccgaaaaaaggagaggacagaaaggagagaggaaagaagaagaagaaaagacaagagagaagagacacaacgagaagaggaggagagaacacgggaagaaagagagacagcacaagcaagcagaggcaagaagagagacaagagaagaaggaaaaagagaagaaagacaaagaaacaagaaagacaaaggagacagaacacacgacaagaaagaaacgaggaaaaccaaggagcacaagaaaaggagaaaagaagagcaaacagagcgacagacagaaaatgcagaaacaagagacgaaaatgagaaacaaaaggaagaagcaaaatagaagaaacagaaggaagagaaaaagagagaagagagcagaagcagacgaaggagggaaggagacaacaagacgaacaggcaaaaaagacgagagacagaggcaggaacgaggagcgagacagagaccgaaagcagagacacaggcgagaagaaaagagagaacgagagagagaaagagacagcgaaagaaacacagaacgaacacgaacaggaccgaaagagagagcgaagcgagcacgcgagacaagaccgaagaaacgaagggaaacagcaacacacaagaacaagagacacgagagacagaagagcagcaggaagacagaaaacacacgaacacccacgccacacgacaacagcaacaaaagacaacaaccaaagaaaagcacgacacagagcagacgagcacccgaaagaga

SEQ ID NO: 661484 - DNA, 1598 bp, Homo sapiens
ctgcagcgccttcctggaggtgggggccgcccgcgccatggccgccgcccagcccaagtaccccgccggggcgaccgcccggcgcctggcccggggctgctggtccgccctctgggactacgagacgcccaaggtgatcgtgccccgagagcataagggtccacaacgccacctgcctctccgacgccgactgcgtggctggggagctggacatgctgggaaacggcctgaggaccgggcgctgtgtgccctattaccaggggccctccaagacctgcgaggtgttcggctggtgcccggtggaagatggggcctctgtcagccaatttctgggtacgatggccccaaatttcaccatcctcatcaagaacagcatccactaccccaaattccacttctccaagggcaacatcgccgaccgcacagacgggtacctgaagcgctgcacgttccacgaggcctccgacctctactgccccatcttcaagctgggctttatcgtggagaaggctggggagagcttcacagagctcgcacacaagggtggtgtcatcggggtcattatcaactgggactgtgacctggacctgcctgcatcggagtgcaaccccaagtactccttccggaggcttgaccccaagcacgtgcctgcctcgtcaggctacaacttcaggtttgccaaatactacaagatcaatggcaccaccacccgcacgctcatcaaggcctacgggatccgcattgacgtcattgtgcatggacaggccgggaagttcagcctgattcccaccattattaatctggccacagctctgacttccgtcggggtgggctccttcctgtgcgactggatcttgctaacattcatgaacaaaaacaaggtctacagccataagaaatttgacaaggtgtgtacgccgagccacccctcaggtagctggcctgtgacccttgcccgtgtattgggccaggcccctcccgaacccggccaccgctccgaggaccagcaccccagccctccatcaggccaggagggccaacaaggggcagagtgtggcccagccttcccgcccctgcggccttgccccatctctgccccttctgagcagatggtggacactcctgcctccgagcctgcccaagcctccacacccacagaccccaaaggtttggctcaactctgagctcctttccatctcactggactgcagacccggcctggtggggccagagagtccccagctagggacctgcacgtggacgtgggcacctcagtagcggagcatctccacgaaacggggcaccacaggatccctgtgcaagggctgggggcacgctctggccccaggcttgtgccccaccctggcatacagcccctgacacctcctccccagctggtccctacagggctgctcacttcccatcacctctcacagccacctggaacccaagccagctgagctctgaggggctctgctcccggtcttgggccctgggaaccccaccccaccccaccccacaggcgttgtaacctcgaatctgcccagactcttcccttagaagtcacaacatactcagtccaataaacctgtgagcag

SEQ ID NO: 661485 - DNA, 427 bp, Homo sapiens
cgttagtacccatttagtgacaaaggattaaaccatccctctggatgttaatttggaagatgtaaattatatgttgtttaaatttttccaggcatctgaaccccttatctgctagccaatgtaagattcccacagagttatctgggattctgattttttaaatagcacatatcattaacccattttctttaaatgtaagaagagcagctaaatttttataagattatcagatttttctaaggccccagaaatgtaagaaaaaaatccctttatattgaaaaaagatgcagtcacccccccctcaaacaggcccaaactttaaaaatttcttcacccatctaatgctataaagatttttgttcttcctgttcacaaccagttgtataacagaaatactagctactgttttccttcctgtgtggaagta

SEQ ID NO: 661486 - DNA, 131 bp, Homo sapiens
tgactctacaggatctccgtcgacggtaccaacaagtcttaatattcattctttccaatgcccactatggaagagttagaaaaatagaacatatgcttcttacactagcacgagaggaaaatatgcatcca

SEQ ID NO: 661487 - DNA, 175 bp, Homo sapiens
tctcagaggttcacgcactctcatcaatagcggcacagttcagaaatagtcagaccacatctacaaaatgccagtatcaggcggcggcttctaacccgaagtgatgtttggatgtaaagtgaaatattagttggcggatgcgctataaatagagcaggttggggtaccgagctcg

SEQ ID NO: 661488 - DNA, 947 bp, Homo sapiens
ggctcttcatgttgctgcgggggcacagtcccttccggcagcacaagatcaacgacaagcatgagatcgagcgcgtgatgctgacgatggccgtgggagctgccccgagctccttctcccctgaactacgactcccatgctggaggggttgctgcagagggatgtcaagccggagattgggctgcctgggccgaggggctcaggaggtgaaagagagccccttgtttccgctccctggactggcagatggtcttctatgccgaagtaccctcccccgactgatccccccagcgaggggacggtgaacgcggccgcacgcctatcgtaccattggctccgttacgagtgcagtgaggtgactagcataaacggaactcaaggattagctgtgatcatgctgagtcacggaggctcatacgcgcaagcgttccccgctcacacactctcgggagcggctggcagcaaggaggttggacagagagcgtgtgcgttacgatcaaccactcaaccggcatgcagacaggacccgggcatggtaggcatcggcaaggaagagccgggaaccaagcacgctggggccagtgacggaagacatacgcccttgggcaaaggacgtgcattcatgcagtggctacgatgtccgaacgattgggcaagcctccttcgctgacccaagtggcaggcggctgagtagcattcgtacctgtacccgcaacgcgcctcgagtgggcgggggggaggcgcgaggccccgcggagacctggtgaccatggaggagatccagatcggtgggggagacgcggatcacggagcgcacagtggctgctcctcaagatccgcggaggggaaacggcaataagcagtgcgatagcgacccgagctgggtgcagaggaagaaggagtgcgcgaggctccgagaggcccaggagctgggccagcgggtgacc

SEQ ID NO: 661489 - DNA, 236 bp, Homo sapiens
cacactatatgtattattaagtagagacggggtgtcaccatgtaggtacaggctagatctcgaactcctgacctcatgatctgcccaccttgggctcaccaagtgctgggattacaggcgcaacccaccgcaccatctctgtatacattcacagacgtgtgtgtgtgcatttgtgtgtgtgtagtgtatatatggtttgttcgtttaaatagcaccaccttggattctgtgctata

SEQ ID NO: 661490 - DNA, 414 bp, Homo sapiens
  misc_feature (12)..(12): n is a, c, g, or t
tctggacagctngctagatatcaaacactactagagacaagaaaaataaataaataaaaatagcttctctttaggccatgaaataaataaaattaaaatctcccttgaaatttaaaacttaaatgtgaaaaagattacaaagaatattttccaagtgaagaatgacaaagaacagagtacacacatacacacacacacacacacaaaaactgaggaaacatataatatgttaacagggaggattaggttaataacaatattagcatctcatttatttcacattttattaatttatctgttcatcatctcatttattcctcacaattaatctcctaagggaggttaatatttaaccccattttgggccgggtgtgggtgggcttcacacctgttaattcccaggcactttgggga

SEQ ID NO: 661491 - DNA, 557 bp, Homo sapiens
tctaagtcatgaagagggtgtagtcaggaagcatctaatccgaggggctaggcagctgagctggccctggctcccacaggcccttcctctaccactggcttcgatacaccgggcctggagaactagagaaggacccggaggggcctgggagccgtgccttcagctctacagcatggtagcagtctcactcctacctggtaatttaagattccagagagtggcacctcccggtgcccaagaatagatgctgactgtactcctcccaggcgccccttccccctccgatcccaccaaccctcagagccacccctaacgagatacttcgtatcttcaacgcagccctgctttgggctgccctggtgctgccacacttcaggctcttctcctttcacaaccttctgtggctcacagaacccttggagccaatggagactgtctcacgagggcactggtggcccgacagcctggcacagggcagtgggacagggcatggccaggtggccactccagacccctggcttttcactgctggttgccttagaacctttcttacatta

SEQ ID NO: 661492 - DNA, 125 bp, Homo sapiens
agtgattacgcagttatgaggacgtcacttgtatcccctagctggttactgacggtggggcagtaataacaggacgagatagtgggggtcttagttggacttggttctttgctggcctctgtgct

SEQ ID NO: 661493 - DNA, 904 bp, Homo sapiens
  misc_feature (423)..(423): n is a, c, g, or t
agcgggctacccgggtaacgggtcccggctgctgtgaagctcccgcggggccgggatggacctcgaggaggcggaagagtttcattagaacgctgtactcagtgtgctagcctgtctcatagggggtactaaacgagacatatagatcgaatgaaatataggacgctatctagaatctatcaaaacttacctgaggatgattgtcatgacagttgttaactacgtgaatctttattcctgggataatgcctaaataaaagaagactggcgtcggacgcggggttatcgacaacataaaaatatacggaaaatgaatatcagaggactgaacgaacatacgatataatttcaacaaaagataacctgttatgatgacccttagacacttgcgttaacgatgacccggataatcaacaatcctgnaaagatatcaactcctacaataagacatcgaaaccaagaacaccatggatagaggagaacccaatatggcatctaacccgaacaataactattcaagacaaattcacaaacacaagaagaccgcaaaaaaatggaccacccagaaagaaaacacccggactgcatgagcaccaattaaggcaacgaactggacaagagcttgatcattcatcaaaataacgggctcagacccattcgaattgattagaagttcacacaattttccaactcttgcaacaatatatatcaaacatgcgctatgtaacacctatatgaaaccatctgagccgcttaattaaaagtcttatggcctcttacaaagctgactgaaaacacttgtaccaataacaactggcaaagacaacgactatggatcgacagttgaagagctaaaagaatactgcggaggactttatataatttataactttgaatgggaatc

SEQ ID NO: 661494 - DNA, 132 bp, Homo sapiens
atatgctgtctagtctgtgccgagcagttatatgggtggggtaggacagaagattcaataagagataatgaagatgggatggaggtggatacatacaaagttgctggacagatgaggatgcagatgttgatc

SEQ ID NO: 661495 - DNA, 275 bp, Homo sapiens
tgaggtgatctacccgatcttatctaaatggctgtcagattcttcttgtaacctttaaggacatgaatttttcttagtcttgaagacatgtgagatctgtatttttttttttggtaaaaaaggtgaatttttgggtcctctaattggtggtggcccggtgtactccctgggtggtaaagtcatctgaatcctgggttctcttaatactcaccaggtacaaataacgggtatgtttaataacgccgcagctagggtacacagccatttaggtatgt

SEQ ID NO: 661496 - DNA, 442 bp, Homo sapiens
  misc_feature (287)..(287): n is a, c, g, or t
cgcatactctcggctcagctctgagtagctgggattacagggcattgcacacacccagctaatttggtatttaaggtagagacggggtctccatgtgggtcaggctggtctcaaactcctgacctcaggtgatccggcccgcctcggcctcccaaagtgatgagattacaggcgtgaaccaccaggccccaccaaaaaaagttcttcatttacagaaaagatcatgacgcaggggacgggactataaagcagaccaaaattccccagaggcccgtctcctatctcgnctaagaagcaaaaaccttagagcaatttgcagggacacccgtggagtggaagcaacaggggctgggtaaggaggtaaggaacacataaagcttaagccatgggggaggaatgggaataaatactaggacttgactgcaaaagaaagacttatgac

SEQ ID NO: 661497 - DNA, 1435 bp, Homo sapiens
  misc_feature (928)..(928): n is a, c, g, or t
  misc_feature (1194)..(1194): n is a, c, g, or t
tcactgttgttgtctctttgttgatgatagtgtttccttctcctaacatgtgttttcccctcgttggtgtggggggggaacctacttcccaactacacacacagttgtgggtgttctctgtgttgtttgaattgttatacttggcttcgtgtatgatacacctctcctgtttggtgcggcactatcctgtctggatggtgttcttttgtttggggctcccatcgtggctgatggggtgggtgggtgagtgccccgctttttgttcaaccagcactctgcgtcttggttggccaaattatcctccttttttgggtatcgctctcttggtgcccccgcctttcgtgactgttgtagacgcgtctttggtttttctaggggggtgcacccctctttttggcccgcacgtctcgtcgcagatgagtcccccccccgacttggggggttgtcgccactccgcaatgtagtgagagcgacccgcccaacgatgttgtgttgtgtaaaatcacagcgagctgctcgtctcgatagcatggtcttgacaccgcgggtggtttgtgctctctgtgtgagcgatgcgctctatttttttgtgcgctgcgtctttgtttccccccgctcgcgctcactgcatgactcgccctccttttgtgtcacatcgctcgcttatggatgggcctctcctctatatattctcgccagcgcgctggtgttgacccccccgcctcgtagtgggtagacccatctctctcgggcgggtgtgagcgagagaatgttattttcttgcgcacgcgcgctcttcctcgcctgcttcttgttgtagatagaaacctctctcgctgtcgagggggctgttatctcataaataggcgcgcgagattttttctcacaagagagagaagggagacacatatattccttttcgtgaatnattctcgcgcggaccccctttaaaggggcggagatatatctgtttatgtggcgctcagctctttttgtgagagagtggaagagacaatatagtcgccttacattcatgttgtcgcggcagagcgtggtattcggtgtcctcacccctctctcccaagatagaagccctctttttttccctctgaaaagtgcacacacttatcccacgaaagaggtcacatacacagggtgttatcacaacaccgagagccacactagagctccacnggtggttccttcggagagcggcattgagaggggacacaccaccgccgcaaaaactccttacagcttttcatagaaggagacgaattggggccaccgagaacacctcggggagagagaagggccaaattctccttttttgaggggttatatgtgagaccccgcgtgggggttgttatattttttttttttttatatatttataaattttggttttaaaaaacccctcccattttgaaaggga

SEQ ID NO: 661498 - DNA, 1024 bp, Homo sapiens
cggacgcgtgggtcgcagctcatggtagcggaacgcaaggctaaggccgagtgttgatgagctgcggatgccgaatacggtgaattggaggagagggatcgaagggagagcaagaagatcgacggatgaaggatgccctgttgggcattcggcaggcagaaggtagcagatagaacgacctgcatcgccaggctggagtgccaccaacatgaggaggaggtctgtctcagagactggatgtgactggtcaggcttttgatggacatgccggaacagaccggtcggttgctactgtcagttgcgccgataaggatgatgccaactttaatcctatggtgtcagagcggatcaacgggccataccagagttctcaagctgctgcgggcacggagaaggactgagttgggcgagccggtccttgagcctcgaaatgtcccaggtggatgccctagctgctgactgtgcagaatctggatggagatcgtcgcgacgccttggtggaggcaagctcgcgggcgtgttgaagacaggtgctgtctgctgctcatggcacagcgcctggagctcaaccaaagcgtaaggctgtagaagcctgccagctgtgcgaggacctgaacgtgcacgctggagtcccgtgcacactcgggtgcggggagatccacaccttgctgcagaagccgtggtgatcgtgagaaaggagagttcacctaggaagtgtcaagaggacctctgcctgttggcgggcagctggaaaagcccagcaaaggtgggtctacgcgaatgcgagcaacacctcagagggaatccaggggcacaggaggggtgacggtcctgtggtttaccgggaagagtcgccttacacaggttccggtatggtcaatgtatggtgccatatgcgcaaaaataccagtacgagctgtcgcgacacacatactggagaaacaagagacacacggggggtataaagaagagagagaataatgcagtacgaaagaatctaggcgtgaaggatcgtgttgactag

SEQ ID NO: 661499 - DNA, 576 bp, Homo sapiens
ggcggtcccgcggcccgcacaagaggggaaagggtgtccatggcggatgagacggaccacctcattctcctggctatcatggccatcaccttcgacgtctgctccttgcctttcacgattttcgcatatatgaatgaaacctcttcccgaaaggagaaatgggacctccgagctcttagggttttatcaattaattcaataattgacccttgggtctttgccattcttaggcctcctgttctgagactaatgcgttcagacctatgttgacggatttcattatagagcaccagatgcgtcacagacttgctgtgctacacagtcagatgccagtgaacaggctgacctttgaggtcagtagtttgtgcttagctatatagcatctggaagatcattctggaattgctccctggagaaatgagaacagtgtgtgaacacaatgaagctgtcctaataggcactctatgtaacgtgtcagaaggagctacacaacctatcctgaatgagcatggtacttggcctttgaggaacccggtgtatcgaagaccccctgtctattgagttgctttattggtg

SEQ ID NO: 661500 - DNA, 295 bp, Homo sapiens
tgcgacacgaggatttgtgtgaggcaaaaggtgtgataggctgccagaaggacataagcagtcctttcccattctattagctccctaaattagccaaatagagacttcttttgtcaaatcaggaaatctcacaaaggtcaattcagatctgacattgacagacagttttgtcataacccgttgcactgcagcacctagtacagttccttggaaacagcgtggctcagtaaatttttactgattgattaaatgtggggccagaagattgttagaagagtccctttctgggttgcta

SEQ ID NO: 661501 - DNA, 428 bp, Homo sapiens
ctgtgtctctttaggtgtgcttatctgggagggagttgtgtgtctgtttccatacatcttcctgcagctgcaggcatacccccaggtctgcttttagcttccctatcttagtgcacctgaagggaaagaatgtgcttattaaggcccactgttatactggggcccaatgtatgagggtgaagtttggcaattacccaagagactttccccccacctccctctgtgcctgagctgtctcatctatgttttactgtctgctctttctgtctgcttgttgttagaagagaagtgattttcttgaaatgcatgaggctggaaagggagctggcacttaaagtggcggtgtttgtccgagaggatggtgctcctgctctgtcacagtgggcatggggattcagccactgccaccgaatttcaagagcccaagc

SEQ ID NO: 661502 - DNA, 352 bp, Homo sapiens
ctatttacatcatcattactaattatactaattataacactttgcggcggttcaaaacgtttctctctacaaaaggctttcatgattattattttggtcctaataacaatcctatgacacagacagaaggaatggtgcccacccattttacagatgggcacatgccattcagaaaggcttcaacacccaatcattaagtggtggaccgggctgtaatgcaagcctttgaattatgagttaacatacctttccatacactgtgcacacactttaatattttgcacgttaaaatgatgtgagatcatctttctatgttttaaatactctttatatatgcccagttaatacatat

SEQ ID NO: 661503 - DNA, 1644 bp, Homo sapiens
  misc_feature (858)..(858): n is a, c, g, or t
  misc_feature (1227)..(1227): n is a, c, g, or t
attctagttgcttgtggagtagcatgttgcgtcggtcggctgtgcttgtatgatattgcgagtgttgtcttggtgccgcccttattttgtgtggtcaggctccagcggttgatgagttgtgttcgttgtggtgaggggacaggccttggttgccacggcctggtctcgtctccccttgtgtttgggaacgacatgttgcggtctgtgttgttgtgtgtgaggtgttggtttatgtttggccacggcgtccccccttgctcgccccggtgtgggtgggtgtggtcgatactatgtgctgttactatgatcatcctccccacttctctgcgggggttacagaccacttttttcccgcggctgagcccacctccctggagtgtgctggggggacataaacaaggggcgggtacatcatttttttttagatgaggagagacactggggtggatgacacacacacgaggaggtggcgcgcccagagggggtggtcttcattaatgtcgtttccgtggccagctggtgggggtatgagtcgccccgtgctgctctaggcgagtgttccccccccaaagaatgagtgtctgtgaatgagaagtgccatgaagctggttgggggggccgtcactctccgggtgagccgccccgacgagcgatgaggttgtgttgttgttagaagtagtgaaaaggggtagaaggattgtggtgtgcagcacccgcttgttttatagaaggagggtttgttttttgtgtgagtgtgggtgtttggcgcttgtgttcgttatgttgtgtgtgtgtgtgtgttctttttttgggagacgcacacgttctctggcattcttgggtgcaacaccaccccancgcgcttcgggggggtgcgcacaccagcttggcgcactgtgagtggtttttgcgcacacccgcttgtagtgcctctcccccgcggtgtgcacagacgcacagatatactttgggggctcgcacacacgccgctccccgcccacagtttatatctttgggaggagatacacacagtgtgtgcacccgcgttatgccacacacccctcgggcgtgggaatattctcttgtgtttgtgtgtcttggtatgagagagacacacagaggtgtgtgacgcaccgcacacttgtgtggcccccagcgtgttgtgtgttcgcacacaactctctctctgggcttctcacgcgcgcatttccacacaccgccctctgntgcgccttctcccccacacagcagtggtgtctctagagagtgtacacacagcgggtgtgaggcccccgccaccaccccgcgcctcatattgttttgcttcttcgctgttgtttacatatttaataagattgtgggggggggtgtccccacgattgtgtacaccctcgggctgtgttcttcgcaaactcctccgcgcgccttgtaggagcgcgtctcctctctgggctccacaagcccacctatccacgcttctcacagcgtgttttttacactataaaagagacacctagccctcttttttttttaatactgcctccccatcgtgaagagattggctttcacccctcccccccatcgagttttgagaggccctcccaccccccctagaactgtaaatccccaaaaacctttttttta

SEQ ID NO: 661504 - DNA, 237 bp, Homo sapiens
gccctgacaaagacacatagcctaccccttcctgtactatccctatgagaacaagctccaatgcatactcttcaacatcattcaccggcgcagtcatttctcataaatcgccccacggggctttaccattccttcaatttacttatttctggcctaggcaaaacttcaaaacttaacgaaacggccactccaacaggttcggccatccaattaaattcccttcttcttctaagggaa

SEQ ID NO: 661505 - DNA, 317 bp, Homo sapiens
  misc_feature (17)..(17): n is a, c, g, or t
  misc_feature (23)..(23): n is a, c, g, or t
  misc_feature (174)..(174): n is a, c, g, or t
  misc_feature (228)..(228): n is a, c, g, or t
cttttataacatggtanctgtanagatgatctgggtaaggctgggcatggtgctcacgcctgtagtcccagcactttgggaggccgaagtggctgaatcatctgacgtcaggagttcgagaccagcctgggcaacatggcggaaccctgtctctactaaaaataaaaaaattgnccaggtatggtggtgcatgcctgtaatcccaactacttgggaggctgaagcgtnagaatcgcttgaacccgggaggcggaggttgcagtgagctgagattgtgcctctgcattccagcctgggtgacagtgagacgccatctc

SEQ ID NO: 661506 - DNA, 667 bp, Homo sapiens
  misc_feature (448)..(448): n is a, c, g, or t
cagggtggctcccacctgtaatcccagcactttgggaggccaaggcgggatgatcacttgaggtcaggagttcgagaccagcctgaccaacatgataaaactctgtccctactaaaaatacaaaattagctgggcatgatggcacatacctgtagtcctagctacttgggaggctaaggcaggagaatcacttgacacctaggaggcagaggttgcagtgagctgagatcacgccattgcactccagctgggcaacaagaacgaaactctgtctcaaaaaaaaaagaaaaaaagaaaaaaagcatatcaaggtattttttttttggtttttttttttgggacccgggacctcgtgtgttattcgggaaaggtccgggaaatttgcagtttatacgccgtggggcctcttatatgtggcaaatgtgcagttccctgtgggattacccancgtgggtggtagacttcttagaacagcgttccgtgaaacttcctttatagagcctctccgagttcctcattctttaaaaacaagagcattattgttggcgggtgtcgcttttaccttcaaacaagaacgtgcgtgggggggatactcataattaccaccttttagagagcccatttttacacggggtttttaattaccccagtattgaagagggcgatt

SEQ ID NO: 661507 - DNA, 615 bp, Homo sapiens
ttgctatacaccagtatgttgaccagatgtacaagttttcatcgctaacctgtcatgctcaggaggataggacagttgtgcttggttgcaacgtagtagacaggacagagcgtcactctagtccataattgtcctcagtatcggtcaacgcaacgatacagaaaagttcctcagtgcacatagagcatccacattattgcatgtaataccagaagatcacgacacagcagttcgccggtacaatccactgcacactgtggcctatacactttgtacatttaattgatatttgtgctgaggtgatattcctgtctaaaagaacaacattgtcttttcttttctagcacagagttatgcattcaaagatgcattacctagttagtttcctatatattcatgccatcttgaaaagacagactatggtgtaaccatgattctattatgtattggtacgtctgtagaccaagatataattttttaacaaataagtttatttcttttcaaggtttacaaattaacaaaggtgcaccttgtatttacaaattgccattatagatgaggagcgtgcattgcacagtcattttgttctaagagtaatattgtcaatgtaataga

SEQ ID NO: 661508 - DNA, 523 bp, Homo sapiens
cgtctcatcatagaatcctactcatagtcagtctccccgtagaacctgtcctgcacaaggtgctcggaatcatgcagcaacaacttttgcgctatacacattgagccattattcttaaaaaacaactcattttataaccaaggaaattgaggcttatagttagaccatagtctaagctgcttctgtgtttacaccctgctctgtctatctccagagctctatgatgggatattatcctgaattacaaggcttatttaggaatccatttgagtccagaactaggctccaaaatatatcggaatttagtatattataccgtataatttccaatcaatgagaaaaagatgattactcaatgtattaagtctgataaatgctgattaatacataccctagatctgcgtaatttataattaagatgaggttcaatatactcacaattcgacgtgtttggcgaggtctcacaatctcggccgaaggtcatagacacgtcttacattgcatcaggattcagaatatgata

SEQ ID NO: 661509 - DNA, 1098 bp, Homo sapiens
  misc_feature (362)..(362): n is a, c, g, or t
cggcacgtaagcgaatggcacacggtaggaaggaatgggaagaggcagagcttcaacgtcgtaagtaacctccccaaagcacgagaggcagactctgatacagcagttccaagccatggttaaagctttagtagaaggaagcagtccaggtgagaaagcgagacagccttggttggagaacccactctggtcggccgagtggaatgctatgctgaagtgaccgctcgatcggaatggcatcatggaggaactaccgtggcttgtcattggcagtctgatcccgtcacaggcggtcctcgatcgcagttctccgaagaccgttaacgggtcggtctactggtccgcggcatggagagagcaanatgactcgtggcgttatgatatccacatccgttacactgtacccagcacatagtgttcgcgtgccgtgttgaaccccagaatatacatgcgcctggcctcaagactgacacactacccaagggctgagtgaatcaaccatccgtccaccgggtgcaatttgaataggacatagggatggatatccaaaaggccattctctcatgcatcataacatagaggtaccttactagtagggcgcgaacgaagacttgcaacgacgcgaaaattctcgagtgacggtctccgttccagcgtagcagggccgcctgtcgaagaactaaatggaaccgaggtctcgagcctggcaacgtcccaggatccattcaggagtaaccccctatagtgggtaaacgtttcgccggggttgaaggacatcctgaagggagcagttgaagggggaagaaatgccacaactcgttttccacatctcccacttattcccatccctcttgtccactcaaagagcgcggttatccatagaaattaaaccggaaaaagaactactctctatggcccgggggaaggctttctttaccaaagacacctaggtttgtagggttaaacgtgggaattccgtgggaggctggggaaacggaggtcaaggggaatataggaagggaaactcttcggatgccggggccgggcctcgaagagtaagataaccgggtgatgtaaattagccccacgagatactaa

SEQ ID NO: 661510 - DNA, 253 bp, Homo sapiens
gttcatctcatttgctgtgaacctaagatgctctgaaaaataacagcctactataataaagttgaaaagatgccatgtttgaagaatgctgtccacgtaagcacaatctcttctcccttatagcttctgttcttggtagagctacttcgattaacaatggtgcctggcatagttacacagagtaccataggactagaccttttcttcgagtacagtgcatctacccaacgggtaccgagctctgcaattcgtc

SEQ ID NO: 661511 - DNA, 115 bp, Homo sapiens
aacattgcgaacggactgatcagggcgagtgtgtgtgtgtgtgtgtgtgtgtgtctgtctgtctgtctgtctgtctgtctgtctgtctgtctgcctggatcagtccgttcgcatg

SEQ ID NO: 661512 - DNA, 249 bp, Homo sapiens
aagtctctagataagctcagtcatagctatcaggatagggatgtgtggtagtttgagtgtggtttgtgtattgtgtatatggtttgtgtgcatgtaatgttggtggcatgtggtataaatggcatgtggggtgtgtgtgtgcgagggtgtgtgatgtgtatgtgtctctgtgtgtggcaggcatatggtgcatgtgtggtgtgagtgatgtgtgtgtgatatggtgtgtaaggactttcggcgtgtgca

SEQ ID NO: 661513 - DNA, 1885 bp, Homo sapiens
ggcgctccaggcaggtggctttggcactatcgctcgacccacgcgctccgtatacccacacccacccaagaacacgggctcgctcaagatggcagagcccggctaatcgcatacaaacttaaaactttacagtcagagcgttcaatatcctcctatctataacaacatacccactggccaacccatcctactcctcattgctacccacttctaatcgcaactgcgccaattcctaactgcttaccgaaccgacaaacattcctagcgctactaactacaacatacgcccaccaggccaccaaaacggataggcaacgcccccttacggcctctactctaccacaccctatcgcctgacagccactaacaaactcttcacccacaaagcagccaccatacaaaccccagacacaactcataccactcaaccactcatacaataacacgacaccccgcaccactatagcctcttcaacacaatatcgccctacatttcataacctacctgcaaacgcaccaccacttaacccaaccttacatcgctacatcccccccaccctgcgcatcacaaacatcctcccacacgcctatcaaagataccatcacctaaacctctcacttgaacactaacgacaaaagcccctaccccaacgacaacactaagtaaccagcctacttcaccctccgacagtaacgcacacacagacaaacacacacggcggctcggccggcaccccttcccacacaaccctccgacagaccggcacagacaacacagggacgacacggacccgacaacacctgcgacaaagacaccgaacgacagcccaagacagacaaacaccactccactgaccaatcaccgcaaaaccgaccccaacaccactgaagacgaaccatacaaagaaccgtgaccagacaaatcaagcacgcaaccaaccatacagccacaaccgcacaggcgcacgtcacacgtcagcacaacccatccagtacaccgcacaccccacccgaaaacacacacacacaccaccgaccagccaacagcaagcgcagcacccagcgcaagacacacacaatgctgaacacacaaccagagagggacacacccaagtcggggccgacaacccgacactaactgcgacagccccaccagccccacccgcccacaacacgccgaaacgacgcacaccccacacacaccgagcaacccgccacccaatgcccagcacccactcgacccgcagcacaggtagcgcgacccctaagcgaaacgagcgaggtaaacgcgcgcgacgcgatgacacgcccacgacgacgaaagcaagcaacacgctccacggcacaccctagcgcaccacaccaacccgcgccaacacgaccgcgaccatccaaggcaccagcagaacaaagacagagagaccgaggcagactcactcacaaccaccgagaacacacccaacacacgagcacaaccgcaccgccgaacgccaccacgccacgccacgcactaggaacccaaatccgagaaccagccagagacagcgacgtaacaacacaagagcgcgccaggcgaggctgcaccggcagacaaacacctcagcagcacgaccgagcgcgacgacccacgacgcgcgagagcatcacacagcagaagaacacccacctactcactgcccacgacgacacaaccgagcacaccccacggaaggacacacagacctacagccaccactaccaccccctcaacgcacaacagccgactacacaccgacagccggacgcgcgggcagagcaaagcagacacggacgcaacacccgacaagcacagaaccacacgacctagacaagccccagacagaagcacgaaaaccaacacccccaa

SEQ ID NO: 661514 - DNA, 106 bp, Homo sapiens
aatcacgcatggctaccccagctggtgagcggcgccccttgccaggcagtgggcacagaacttctcgcttggccgcagggaaggggctgcggagctgtgggaaagt

SEQ ID NO: 661515 - DNA, 118 bp, Homo sapiens
tgcactgttgttcataccacataaacctttttaaaaatagacaccccccgatacagcgaccaggtatgaacaacagtgcaggtatgtaacaacagtgcaggtatgtaacaacagtgca

SEQ ID NO: 661516 - DNA, 330 bp, Homo sapiens
gtgagatggtcagtacatgtggtgcttataatcacctggtgtggttatgctcggtcatagagtgagcccgaaggcgtaatgcagtcgacatgttcattgccgtctcccaataggggcagaggtgagcacccctggtgaaaagttaagactcagtgagtataaatacgccaagaagagctgtggcttctttcactggtgtcctcagaaaggctgtgagcagtgttggtggcatacctgtcacagcatctagcaaagcacctgaattctagtatgaattcaaatacatcttttgatggaaggagtgaagttcgatgaaagtgagaaaactaa

SEQ ID NO: 661517 - DNA, 477 bp, Homo sapiens
  misc_feature (45)..(45): n is a, c, g, or t
tctgctgcacaaataaacaacatagagagtgaaaatataccctanaatttattccagaacactgaagtataaaacatacctgtgtgtcctattaaagtggcgtaagtttgtattgtgaacagcaagccatgtgggtggtttcagtggctgggaaaggctcagataatgaaaaggcattgcatttacagttcccagggactcactgaatttcacttgctcagtcaacttcacagtgaagtattctgctgccctaaactaagtgaagaaacaatgtgcaaaagacaaagggaattagccaagttatatgaataatatcatggtggaagtctattaggaactaatatcccaataataggaaagatcaaaataaaagtcaatgtgaagctacagttttctggtacaaatctctcaggattccttctttgtgtgtgtgcgcgtgtgcgtttcaataaagtttgtacactttcttaacagtga

SEQ ID NO: 661518 - DNA, 622 bp, Homo sapiens
ctgggaggaccaactgatacctcgctatgtagctttactcctttatcctctaggtggcgtattagaatggtgccgtgctcacagggtgtgactggcccactatctagggtagtgagcctattttgtggcccctgtgtgcagtcaagccccaacctcctggcttggtctccgcttgttgttggctacctagttccaggttgagggcccactcctgtagttacagccccgtcaagtacacagtcaaccctgccacctgtccagagtgttatttatcaagaggatttatcgcagcactgagatagtatataagaatatgctgccaatttctgtcattgtctttgacctatctgtttgtgtatcctaatactccgcagcagcggaggcaatcgtgagcgccctcccaccacaaacgtgggatccgtgcacgtcagcgatcacgaggactatgcagcaaccctcgcccgtgatgaagggtaacctggctcgagcctcatagccaggcattattgagatataatgatgtgtcggggcactcctagaaggccatgccactgaggacagttccccaggcactgagtaccaccagccaggcacccttaagcagggtaacggagatcctcag

SEQ ID NO: 661519 - DNA, 169 bp, Homo sapiens
ccgctagagttaaccttactcctgtggaatttcaaggcctgggtctctttccaggaaaatgtaagctcaggaggtgggtgcaggccaggtgcttttccctatccacaggggtgtttgtgtgtgtgcgcgtgtgcgtttcaataaagtttgtacactttcttaacagtga

SEQ ID NO: 661520 - DNA, 136 bp, Homo sapiens
aaggagaattatggcaggtcaagattaaagcgcgatacagatcaaaaaggccgatctgtgttgcagatgctagggtaatataatgtatcctcatgatgctaggggtctatgttggtcccttatgcttaattgaaat

SEQ ID NO: 661521 - DNA, 269 bp, Homo sapiens
acccatgttgttactcatacactaccgattcacaccatctaaagggttagtaaggccactgctcctcctccgaggactcctgcgagatgccctcctcttcctcctttctccagttttttttagggtctagccccttgtgtttcctatccctggagttataggtaggttagacccgtgtgcttagcgagcaaatattcggtaccccctactgacgggtactagggggctctctatctttattagttaggcatacaaggggcggagagggg

SEQ ID NO: 661522 - DNA, 1535 bp, Homo sapiens
  misc_feature (229)..(229): n is a, c, g, or t
  misc_feature (442)..(442): n is a, c, g, or t
  misc_feature (465)..(465): n is a, c, g, or t
  misc_feature (501)..(501): n is a, c, g, or t
  misc_feature (505)..(505): n is a, c, g, or t
  misc_feature (532)..(532): n is a, c, g, or t
  misc_feature (580)..(580): n is a, c, g, or t
  misc_feature (654)..(654): n is a, c, g, or t
  misc_feature (656)..(656): n is a, c, g, or t
  misc_feature (658)..(658): n is a, c, g, or t
  misc_feature (696)..(696): n is a, c, g, or t
  misc_feature (731)..(732): n is a, c, g, or t
  misc_feature (749)..(749): n is a, c, g, or t
  misc_feature (962)..(962): n is a, c, g, or t
  misc_feature (1032)..(1032): n is a, c, g, or t
  misc_feature (1130)..(1130): n is a, c, g, or t
  misc_feature (1251)..(1251): n is a, c, g, or t
  misc_feature (1281)..(1281): n is a, c, g, or t
  misc_feature (1371)..(1371): n is a, c, g, or t
ggtgcgcactcgtgtctcttgccgtcgatctgccgtcgagtaactctgaccgggatgcaacttgtaagcacagcgagttcagtccgtctgctgcatcatttgagcttgttggatccgcggtctgtgttgcccttggctgtgtctatgctgctggtactgacgtcatccccggagccgatgctaccgttccagttcggtcgtaggtcgccccagaaccaacgctagtggncgttcgatgatgtgtgagcatttgtggcctcctggtacacgtggacatccgtgatccggatgggttgcctgagctggaggaggcaccgcacgaaggcgagagcagatagagtactctctagcactccctgtatatgttacgcaccgattgtgaaggccacactgtggccggaggttcgatccatttcacagagcagtcgtgggtaagcgcacncagtggcggagtacagggaatcntggtgcgactctacaaatcatgtcgtagctaagcgnacgntatggctgcctgttgaggcactcgcgnacgtgaagagacaacacccatgctgtcttggcttggtaagacagtagngggctccactcttagagaaaccactccgaaatgaggccaaacttagtaaggtaagtataagtaatagtaccatncngngcactgttactttggtttcatcggaaaagaacgctctncgagagcagtcccgctgtgcgccaatgtttaccgnntgtgtcactagttaccnactcgtgccaccgtttggctgtgggtacacgcatccgtaactggctcgtcatcggagactgacaggcgcaacgtgagacgagtttgctacactgtggacccgtcgtgtgaagcacagtgaggctacagcgcccgatcaactggatgacgcccactctttacagatgtgggcttacggcgccgtactcgcccgacagcgcaataccatggcgcntctgggatccctgtggcttggaccgtgggacacgtggagcctgactaagctgcgatagaaggactccctncaacttgtaggccgattggcttacggagctttcaccgaccccacgtggggctgaatgcggggcaaagtcctgttgccgcggaactaagttccagaggngaggaaaagcgcttggtggctaaacgttcaggcacctgagagctcttccgacagcattgcgaatgattgtggcccaccctggtcgcgatttcccttcccttcctgtcatcatgggacgaanagaagctaacaaaagcgttggcgcccgagntgtgacccggggtacttcacccgttatgccaatgaccggtacccgaggatcacgaaagggcaggtcccacgcctccttcctgggcgttgngatctctcagcggtcccgcgacccacgttcatcctctagagcgttggtgggctctcgcaaactcgttccacccggtttgggtgcgcacatctctccgcttgtcttcagagacaccctgcacagatatatatcccagaaagggggggccctcccccatagagagc

SEQ ID NO: 661523 - DNA, 311 bp, Homo sapiens
gactgaaactgaatagaggcaggtcaagtagctacggtcaattttaaagatgtatatacatttgaccggtgtgccatgttacagaggtaattctgcagcatggtagaagttgcaaagggaacaaaaggtatacattaaaaaaataagttactggccgggctttctgaatcttatactgtactatgtataagtattttcttttctttctttcttttttttggagacgcagtctcactctgtcgcccaggctggagtgcagtggcgcaatctcggctcattgcaagctccgcctcctgggttcacgccattct

SEQ ID NO: 661524 - DNA, 1271 bp, Homo sapiens
actcatgctttgtgatgatcaaggacggcggagtatgacaaggacgggaacctccggccatggtggaagaactcatccgtggaggccttcaagctgtcagatcctgatgtgcactggtacgaggtcacgtatcaagtcaaactacaggcggtgaagcggggaagccgagctgaatcgggacggtatcaccctgggtggagaacattctgcgcgaccaacggtgggtctcaaggacgcgctctactccgcgtgcttaccatagacctcgggtggaagcaagaacggtggctgcagtccactcgactccaccaccctggggctcaacacaaatcatagcagattcttcattaccgtgggctttgctctaggtctggtgctccgtaccggtagacctgagcagctcaccgatgcatacgggctgcagtcgaccgcatcgcacacaacaaggcgcactcatcgctttacccggcgtcatccgcgttcacgctcttccaaaattcgctaagggaacgttactcaaggatacactttacctgcttaggccaacacttggggactgcacgcactaatgaaatcccgtcacatcagcaacgctggccgaaagcctactgggagtgaaggtgatacggaacgtgcggtagcaagtgaagccctataaggaatctgcgccacgtgaaagggcgcgtaaacgcgaggtctgcagcgccaccgtagaaatcccccctaattccaggacccttccaaggggggcccaatttctgtcatccaatatggcgcccgtctttggagaccgatttccctgggggggcccgcctggggcgttttcgctcagcaacggtcgcggttggcgcgattgtatcaccgcccgtgaaaaacctggatgccccagttggggtgttatggggcgtcgtccatagacggtttggagcccggcaatctccttggagttcccccgtggtttaaacgaagaccggggaatatgttccccgaaggccgagcgatcggttttgtttggtggccccatacgttttccagtcatagtggcaattgctcggaggtttggcattgggctcggtgtggagtacaaatcacagagggccgtggggcgcccccgagaccttgtgaacaagagacgcgccgaaggaatactgtggccacccaatgttcccacttgtgtcggtcacccgttggctgtttccacagaagtatgtaacttttgtgggcgggaacacactcttttgtgttacacacccctcgtgctgtagatacaa

SEQ ID NO: 661525 - DNA, 90 bp, Homo sapiens
ggatttgctggtgcagtacaactaggcttaatagggacatgtatctttccttaacactcagatccctggttaatagaaaagaccacaaga

SEQ ID NO: 661526 - DNA, 284 bp, Homo sapiens
  misc_feature (224)..(224): n is a, c, g, or t
  misc_feature (227)..(229): n is a, c, g, or t
gagacagtgtctctcacccagtctggaatgcaacagcgtggtctcggctcactgcaacttccccctcccaggttcgaaggattcttgtgcctcagcctcctgagtagctgggactacaggcatgtgacactatgcctggctaatttttttgttatttttagtaaaggcggggttttgccatgttggcccaggcaggcggatcacttgaggccagaatttgaggncannnggccaaacatggcgaaaacctgtatcactcttttagacccttctgtcgtcttctc

SEQ ID NO: 661527 - DNA, 361 bp, Homo sapiens
ccttgactgaccttgatgtcctcaaaatttcctcaggtatattctgattataaaataacacactttcaaagatggctgaataggaacagctacagtctacagctcccagcgtgagcaatgcagaagatgggtgatttctgcatttccaactgaggttcatctcactgggacttgttggacagtgggtgcagcccatgcgagcatgagctgaagcagggcagggtatcgcctcactcaggaagcacaaggggtcggggaactccctgtcctagccaagggaagccgtgacacatggtacctggaaaatcgggacactcccaccctaatactgcacttttccaacagtcttagcaaacggcac

SEQ ID NO: 661528 - DNA, 949 bp, Homo sapiens
gacggtcgcagcggtctgagatgcttgacgagataggcgcccgctccggccggcaccatggactagcgaggcgattccatggagcgcgcgggactttctggacatgaacttccagtcaggctggccatgaaatcacatggcatcatgaagcagatggagctggactacggtctggcgggtgcgaaggttggatgaacgtgacacaagcaagcttggagatcgactgtggtcagacttcttcccgtcgcctccgtggtcccgcaggcctggaagcgccccttcttaggcactgacccgagtacagctcctaggcttcgagtaccttgagacccttcggcagactcgagggttccccctcggtaaggcggtcccacacgaacgtgcgcatgaacacgcaccgtttcggtacgaagtcagaagtagtgcagcccaaaccctactactccctacaagacgccgcgtgatcgcccatggggcacggcccgtccagtggcccggctgacaacccacaggcttctatccctggcaatgcacgggaacctgcctttaatggggccagcactgggaactcggaggaccggagccttcggtacctctcggtggaacgctccgtcggaccctccccggagtggagcggtcgatgggctagtctgtccccctttcgagcccgtgactgcgcctgtcccccaggtgaagtcacacggcgtaccaacagcgcccgcatacgcgacaccagtcagagtgggataaccaagccgcaatatgtactttgtcccgaacattgtccactggggatacggcctcgcagcgacattacataccacagatgtgaaggaactcagtgtgtgaagcgcagggagaggtagacctactatgcacttcagtacatctccaaagcatcgctgtcgtgcgcgtgcgaagaccccgagcccacctaagtttgaaaatg

SEQ ID NO: 661529 - DNA, 1865 bp, Homo sapiens
gccccaaggctcccggccctgccgtctgccatggcgtccgacgacatgtctaccgcctgtcgctcggcgtctctccattattcgtcgtcagtgagcgatccgagttacactcttcgccacgagtgccgcacatgaagctagcaccatggatctcatgagggcggccattcacagtcgccatgatcatagctctgagagtcttctactgtctctccattagcaggttatagcctgtctcatgattcgttacgtatcattctgagccagcggagtagactgatggcgatttcgatacgacactttgcgcaataggtaccttctcattcacgctagagtctctccaatcgacgcagatgacgggacacaatcgctagaacgataaacttgagtgagaggcttgctatgaaaacccacacagtaaggtgtggccggaacatctgtgccttgtcgaggggatttatcacaacgcatagctcaaatgcactggatggcaattgtacttgggggaaagcacgcgggggcctaggacatgggcatcatcgtgctagtaggtgtgcaattttgcacgtattctcgggacaacagaaaccttggttgcacatattccaggtgtcaatgctaccatgcgacagactgtgtcatgcaccattactgggacctccaccatggcagccataaacacaactgtgagcactgcctcaaaatgttgtgcagtgcttgtaccctttccacttgtgatacgccacccgaccatttttatccacggtgacaaaatgtggcacgaccagcgtgcattgtacaacgcagccccctaccgttccaatatagcgaaaaaccttttcggggggagttggacacgccaaacccgggttagtaaatccccacaggatgccgattattggtccgggagccccacaaacagcgtactggtgtgggagcaaaagactgtggcactacaaggtttaaaacattacggtagcggcgcatccttgtggtggcgcgggggccaacacatttactcttcctgtaccattctctttgcaagccacaactggccaatcacatatcactaccgatgggagaggagcacactaaccccatcgttcgaattttatactctagcaagagaaagggcgtatcaaaacgggccactcttcctggcggcagccattatagatggtgtgtccgccacccaagatttatcggcgcccaaagtggtagagccgctatgaaccttatccccgccatggagatgtgcaacacccaataatctgaggctccacgttggcaacttggcaacgtgagctactaggcagaggatataaccccattctaatatagtaccctgtgagtatggcctaagatacacatgctttggtattccgccgacaagaagcatattcccgagactgttacaggatgtcacttgtgggaaatttcgagtaacccccttgttgcgctttttcaaaaaatgttaccgacgaaaagtgccgcgttcacaccccaaaagcaacacacatcacaccatctcaagctgtgggcgggagggcggactgtctgaaaagcagagtacccgcgcacagcaggtgggccacccagactccgggaagccggtatgaaccacaaggtatgcacctgctgtgtcaacaagcgtgggtaccacctaacaagtgagaacgccgcaatgatcagggcaaaacacacacaggaccaggccgacataacaagacacgcgcaaacgcgacaacaccggcacgactgaggagacatcgaagacacagacaacccaacaaagctcgcgcagtacacacaaaaccgcagcagacgcccacaggcaatacagcagctgcgcagcaaacacaacc

SEQ ID NO: 661530 - DNA, 181 bp, Homo sapiens
ccagaggaggttgatgagtcgtcgtcaccacagcagggacccgagcagcttccattgagaatgtctgcaggacagcagccccgagcactgaggccgaggcccacctgctgacatctacctgccaggacggcccacctccatggagacggcccacggcctcgccaccaccagccccacctgg

SEQ ID NO: 661531 - DNA, 195 bp, Homo sapiens
acatgtcaccgtcgctagaggcggagcgccgcagacgatctatctccaggtggaccgcttcagacactgatgaccacggagcagccccggctacgggtgcctggttgcaaaccagacttagatgttcagacaaagctctatgactgccttgaggagcacctttcagagtccaactcgtccaatcttaaccctctt

SEQ ID NO: 661532 - DNA, 465 bp, Homo sapiens
ggctgctctagcaggatccccaggcacaagctcctacggtagagcgcgtggcatgatcatggctcaccacagccttgaccttcctgagcttaggtgatcttctcacctcagcttcttgagtagctggtacaggtgcacatcaccatgccctgctaatttttgtctttttagtagagacagggtcttgccatgttgcccaggctggtctcaaactcctgcgtttaagcgatcctcctgcctcagcctcccaaaatgccaggattacaggcttcagccaccacgcccaaactcggtgagttttataaagaaagcaacaccaacagagactaacatgctttaaaaaaaacgaaagaaagaaggaaatcccatagtctagtcacataaaatactagaattattttaaaatattattttaccccattcctactttacttagtctcctaccaaggtaggagcttatgcctg

SEQ ID NO: 661533 - DNA, 856 bp, Homo sapiens
gacagccggaacaagaaagcaaggaaggacggaggtccgatgcctcgaggggctcctagcaaaggggccgggcgggagtccatggagactgggagcgcgcccgttcatcctcatccttgtgctccagcttctccttcgcatccgacgcaaccggcagcagcgcgtgccgccgtgtcctcagccaccgtccctcttcccaggatgtgatctcgtggtggaaaggctaagttttaaaaccaccccaatggatgcagacaggttgatgtttgcttgggaccattctattaccacgtgtacggtcgtggtttagaacaaggagtgtcattttaacaccttaacgggacacgatgcttgggagggagcaaatgtcacttgataccccgtgattgtcggaacgcgtatgagtgaggctaagaaaccctagagttacggctacacattgtcctcaggaacacttatggcctgacgcacacaagtgaggagagaccgctaaatcgttgccagacgcttagcccggtagtcttgcagaagctacggtccaggtacatatcacagatggacgggatgtaacgtctggccgtgtgtaaccacgccattggaaatcggtgtgcagcaatccacaaagcacgaatagatcttgtggcagttagaagctgaattcatccggggagatgctatgggtacacttttaaaacttcctacgatttccccgcggagtttcaccgtcacgggcaaggcaaggctggttgctgtgcgacgattaccatgggttgaaccgggaaattcacccctatgggaaaactagaagatagcgggactggtcggacggtacatgtggaccatacacgcgaagcgc

SEQ ID NO: 661534 - DNA, 443 bp, Homo sapiens
taggagtctagagatccggcgacatttaattcccatataatgtacaaaggtctgtataagtctgttctcatgctgtaataaagacatagcatgatgggtaatttataaaggaaagaggttaatggatcacagttccacatgatagggaggctcacgatcatggtagaaggcaaagtagaagcaattttactgtgttacatggcagtaagcaagagggcgtgtgcaggggaactcccctttataaatctgatctcacatcagatcttgtgagacttattcactatcacaagaacagcacaggaaagacctgctcccatgattcaattacctcccactgggtccctcccatgacacgtggaattatgggagctacaattcaagatgagatttgggtggggacacagccaaacggtatcaggttccaattgctctgtatcctcaac

SEQ ID NO: 661535 - DNA, 126 bp, Homo sapiens
tcccgttcctcatcctttggtaggtggttagatattttaccagcaactccctaggattatctgtaaccccaaatacctcctcgagagcctgcatacattcatcgacagttattcaagtattgttta

SEQ ID NO: 661536 - DNA, 147 bp, Homo sapiens
catcttctggtcgatctctgcaggatccccatcctgccttggttgactctgatacctcgggccgatcgcgacgccccccgattccggcgaccacccagtgtccaccgtcgggtacccgagctcgatttccgttatctttgttcctag

SEQ ID NO: 661537 - DNA, 150 bp, Homo sapiens
agaataataatcaaatccattaactcggtcaaataacttaataacgccagcatttttccaatcgccagattgtacttcaacttgacaccaattattccccttcaattggagagtttaatatttgttttccgtctactctccataaggcca

SEQ ID NO: 661538 - DNA, 125 bp, Homo sapiens
tgggacacgggcccatctcgcccaatccctgcttgcccgatcccagaggttcctgaggggctaattctgggaagggagagttcttggctgcccctgtcgggctagtcggggggggatcgtctaga

SEQ ID NO: 661539 - DNA, 218 bp, Homo sapiens
ccaggctgaggctagtggatggacctgtgcagggattgagggcatcaagaacccctttactgactgcttgtcatgaagcctggtgttaggagggctgcatgcagccaggtggtcacagaactggagctggtggcttgccaagggactgtgccctctctgtgcacactggtatgttagtttgctaggtctcccacaacaaaatacctaagcctgcgtct

SEQ ID NO: 661540 - DNA, 302 bp, Homo sapiens
  misc_feature (130)..(130): n is a, c, g, or t
ttaaaagcccccccctttttttttaaggagaagggcccgttttttttccaagtccccccagggggggggaaagccttgtttttgtgtaaattatgaaaaggaaaattttttttattttccccctaaactnttttttttttgtttttttttgaaaaaagggcctttgggccccccctttccctttttttttccccccacttaaaaggtaaaaggggtttttttttccttgggggggggggggggcacccggggttttctttttccttttttttggccccgtttattaaaaggggcccctttta

SEQ ID NO: 661541 - DNA, 171 bp, Homo sapiens
ttaagcggaggacaccatcaagtacgccaccaactcctcatccagcaggaagagctataaacactaaagtgcgtctgctagctctcggtcgcacagatcctcagagccgggggatccatctgaaagtcagaccatgcattgcaatgcaatgccttgtgcacttggcctgtc

SEQ ID NO: 661542 - DNA, 309 bp, Homo sapiens
aatcaaacgcgatgtctcacgctccgttatgcctgctgtcggcgatttgaccgttcgtgacagttcttcacaattgcctttcatcagttttttaagatatttttgtttagtgcctatgggctgtgatgtatatagaagttgtacattagacataccctcatttttgtcttttctttttgtattttttgttttttggtttttgtctttttggttttttcccccttgtgagggtcgtaaggcgcctttttacaacactcgcgccccaggggggagccccgggcacaaaatctcgcaacaccgggggccaca

SEQ ID NO: 661543 - DNA, 709 bp, Homo sapiens
agcttttaaattaaaaaggaagctattcaccattgagcgactgcattttgcctccaggacttgtcagacacagtgagccgctcaagcaaaatggatctggcagaatccgccaagcggttggcgccaggctgtggcatgatggccggagaaagaagcacctgacttctagggatcctcccttagtcgctgcatgagaattctatgacactctaattatgatggctaatagtttatgtaaatatttttcttaaccaattggaccctccactctttgaaaaacacaggattataaaaatgtggccgccatttctcattttttacttttttacagaatctagcacagcagaatactttaaaattcttcccttaatgctctagagaaaatacttttattttaaataagcggcaaaaaatggtcaaattcacaaaaaaaaacatacagcaaaaaaaaaaccattgtgtggggcgccgcggggccatagagaaaaaggtttttaaaacccaactcctgttggggggggcgcgccccaagttgtgtagagtgcacaaagtggccacagcgctggtcccaagagaactccgggcaagagacatagtgcgtgcttttctaccaataaaaaaacgcgcgggggccacgggctcttgaccaacccaggcgggccgaggcagccgctcaaaggggccaggggcaatatcgcgccgggcagga

SEQ ID NO: 661544 - DNA, 545 bp, Homo sapiens
  misc_feature (525)..(525): n is a, c, g, or t
gtgagtattttgggtagctgggggggatgggtaataactggtgacagcaacaagtatcttattcccatttcacagatgaagacataggctcggggaaaaaaaaatcttcaacggtcacggattacctggcccaccccacgacatatcctaagaccgggcacgtgataatttaaatgaaatatcggggggaagtggattatggaaaggagaaagcagagccaggggggtggggggtggtgtgaatgcccactgaaatctgaagtagggtgcagattggtccatcagtgtgaaagttattcgggtcacatcggagggcggctctaggtcaccctaaaggcctaggcgggctggtctacgggtcagggggctgagtggccattcagagactcaagggagtgaatcgtacacatcaatcagggggtgggctgggccaccaccctggtggaacactaccgggccttctaacctcagggagagcctgaccaggcctggcacagagacctcagagtgccagagaatctccantgtgtccttagctctgcaca

SEQ ID NO: 661545 - DNA, 317 bp, Homo sapiens
cagttttctctcttataccccgccacggtagaatatgttaaagtagagtttgttccaatggaaattttgagggagacgcccccttctgcgctttctgagacgccgagaataggtctcctataatatagtatagagagagacccctccacattaaccctggagagtgaactaatattggaatgcccccacaccccgtgccaccaccacattcgagagagaccccgtgatatacattaaatttagaccaaaataggaaggaatcgaacccccccaagactggtttcaaaccaaccccatggcctccatgactttttcca

SEQ ID NO: 661546 - DNA, 828 bp, Homo sapiens
taacagttaagcttcctttattgtcaacgaaatatacaaactaattttcaagaggatacctttttgttctaagatatattcacactagcaagattttatttattttaaagataaacatcagcagataagccattttattttccaggttcagttttataatgtcactaaagtcattatcaaattttaaaggatcacatctataatcaaaggctgatgctgttaatattatacacaggattaacaactgtgttacaagagatgttagaacaaagcttatttctgtctacacatatgatgacatgtatttgtaatgctgttcagaattttgtgttgccatattactttagagtatggggaaattattttttgaaatgaatagcaagttgaagggacgcgtgttttttatcctagatacggaggtgagatttatgtatctatagtcgaccttactatgttggagatagtgtctaactaggggagttatgagtgactagactatgcttaagagatagagaacaacttggatggtgttcgaggtcgtgtttgagatgagtatgcgatctgtggtcggatatacataatgctggatgtgtgagttgatgagagagcttgttaacttattagatgcttgatcaaagtgactatcttagtttgtttgtctctggtttttgatgtgataatctgtttttgtatgctgataagagattgtatccgatggagagggacgattgtattactggttcttgtcgtataaatgaagtagaacaaagatcgaggaccgtgaatatactgctccgatgagatatgtgtagctcatggatgagtaag

SEQ ID NO: 661547 - DNA, 1206 bp, Homo sapiens
  misc_feature (897)..(897): n is a, c, g, or t
  misc_feature (1086)..(1086): n is a, c, g, or t
gatgctgaatttctaaatttcttttgtgatatccctgcaagggacaaactcgttgtttagagagaaagagcagaagtcacctgattgtatctcccaggtcaatgataatgatataggcggcttttctgagtgtagatatttgtctttttctttttggtctttttttttttttatgttttgtttttttagagctcaagagggttgggggcggaagaggcgccgaggtgggggtatccttgtaacagagaaaatttgtggtgggcgaaccaaggggtgttgagggtgtatttcttccaaatttttggcagaattttgtggaatggggaggcagggtggacaaatcagggtctctttccacctccctctctgtataaaggtctttccaaagatttgtggggaatattctctggggggagacctccgaccgatgtggggtctccctctgtgtgtgggtggtgaaaaagagtggggggccgcatagcgaaaaatacgtgggggggccagttgtggggtcaatacctagaaggggggagaagaacaaggtgggtggggactggggggcggagagaagctcataatggcagttatttggaatttaggggagctttcgattctttgtggaacacaagagagcgtaaaaaatgggtgggggggggagtatttttcccgcggggtgttttaaagaagtgtaaagccccatttttcgtggggtggtgcaaatcttcatgggaggagataacacagaaagggggaaggattcctccttggtaaaaacaggggggggcgccctcttatagaatatgtgttgcgcccggggttttgtaaaacgaaattcttctctaaaattacggggagggagggggagaaagaattagggcattttaaagaggagacccncttttcttgacggtccaccgggggaataatcttctattttggggggaaacgctcgtcttttttacgcgtcaaagaaatattggggggggggggaattttttaatggggtgcccaatatgtgtagtgtgttccacaacaaaattaatcgtatagttgcgagaaaggactgttctacagagatttgtttcncaaaatagacgagtgtcgaacagaaagagatgcccaattgttggggagcggggagcgagatcaggtgcgtcacaaaatcggcacaaaaggaggaggggggcggtgaacaaaagaggtcgg

SEQ ID NO: 661548 - DNA, 1010 bp, Homo sapiens
  misc_feature (66)..(66): n is a, c, g, or t
  misc_feature (74)..(74): n is a, c, g, or t
  misc_feature (97)..(97): n is a, c, g, or t
  misc_feature (106)..(106): n is a, c, g, or t
  misc_feature (123)..(125): n is a, c, g, or t
  misc_feature (127)..(127): n is a, c, g, or t
  misc_feature (134)..(134): n is a, c, g, or t
  misc_feature (139)..(139): n is a, c, g, or t
  misc_feature (142)..(143): n is a, c, g, or t
  misc_feature (160)..(160): n is a, c, g, or t
  misc_feature (162)..(162): n is a, c, g, or t
  misc_feature (164)..(165): n is a, c, g, or t
  misc_feature (177)..(177): n is a, c, g, or t
  misc_feature (181)..(181): n is a, c, g, or t
  misc_feature (186)..(186): n is a, c, g, or t
  misc_feature (206)..(209): n is a, c, g, or t
  misc_feature (237)..(237): n is a, c, g, or t
  misc_feature (266)..(266): n is a, c, g, or t
  misc_feature (274)..(274): n is a, c, g, or t
  misc_feature (283)..(283): n is a, c, g, or t
  misc_feature (287)..(289): n is a, c, g, or t
  misc_feature (297)..(297): n is a, c, g, or t
  misc_feature (312)..(313): n is a, c, g, or t
  misc_feature (325)..(325): n is a, c, g, or t
  misc_feature (337)..(337): n is a, c, g, or t
  misc_feature (352)..(352): n is a, c, g, or t
  misc_feature (355)..(355): n is a, c, g, or t
  misc_feature (371)..(371): n is a, c, g, or t
  misc_feature (400)..(400): n is a, c, g, or t
  misc_feature (405)..(405): n is a, c, g, or t
  misc_feature (409)..(410): n is a, c, g, or t
  misc_feature (415)..(415): n is a, c, g, or t
  misc_feature (418)..(418): n is a, c, g, or t
  misc_feature (422)..(422): n is a, c, g, or t
  misc_feature (428)..(428): n is a, c, g, or t
  misc_feature (430)..(430): n is a, c, g, or t
  misc_feature (452)..(452): n is a, c, g, or t
  misc_feature (455)..(455): n is a, c, g, or t
  misc_feature (459)..(459): n is a, c, g, or t
  misc_feature (476)..(478): n is a, c, g, or t
  misc_feature (484)..(484): n is a, c, g, or t
  misc_feature (889)..(889): n is a, c, g, or t
  misc_feature (946)..(946): n is a, c, g, or t
  misc_feature (974)..(974): n is a, c, g, or t
tttattttaaaaattcaaatatgcttcaaatgaaaactcctatccatttattgagcacccacagantgccaggnactgtacaaaacattagaaaganttgttcaanctcttttagagcaaaannnantattccnttgcnctnnccatgatgctgacattncncnnccattgccatanaccncccangatcttcaccccttgttcannnnacatgtttccaatccatagttgaaactnttcatgcgggtttttgttgatgtttactngtgatgtntgttaactntttnnnttattgtnctctccctctggganngccacctcttcntcctctggggcncccatcctccacctnctnttccacctctgagggnaccgcctctgcgaccacctctgcgacctnctccngtgnntcctnctngggntccggngngaccggctgtgggggggggttngtnaccngggggtggaggtaaaannntctgcngtggcagcagcttatatgggtctatataaaagttctgtagttttttaaaggatgaagccttcatgttttctgacaacttaactgaaaaataaaaatctctgagttgtccaaatatttcatccacttttccaatttgttctttgttttctaagtaaacaggagcattgaaataaggcaccttattttcatctgtggtacatttacaaactatgtcatcttcacagggatgcaggaactctcctaataagactacacgttctggaggtccttggtcttggcctttgttaaagcctccgcggccaccccctcgtccaaatcctcccctgccgccgcctctgaaattgccgccgcctccaccgccgcctccacctcggaagtggttgctgctgccacctcggttgaaancgccacctccaccacctcgatttaagcctccacgacctccgcctcgaaaagacattntctctcctcccggcgccacgtgcccctntggccctggccttgcgcacataccggggattccgga

SEQ ID NO: 661549 - DNA, 155 bp, Homo sapiens
  misc_feature (13)..(13): n is a, c, g, or t
gtcgaccagaggnccccgtgaggtttaggaagattttggaaccgtcatatttcatgtcaaaggaaatcagcagtgattgatgaagggttcgcggcgagcagtcccggacttgtctaaaaatgagcaggtttacaagttactgttctaaatgttaa

SEQ ID NO: 661550 - DNA, 1654 bp, Homo sapiens
agcggggagtcggcggcggcggcagaagcggcggcggcggtggcggctgggagccaacgcaggaggttccggacgcgtgcgttaggaaccggggactcaggacgtgccctgcgccctgagccgctcagctccagaggccgctcatggctgacgtaccgggacccttccctggcaaggaacctgaaccaagcaaaccgattcacgcccttgaaccgaatcttagcaaaccaaggctccaacgctcggcccctgccaacggccacagacgactccaccgaggctgaccccagcaagctgcacgcgaccaatccaccgttatccttgcgccaacttggcccctggcgcctctcaggcctctccctgcggaccgaaggcccaacaagcataccccctcggagcctacacgcacctaatcccttccttcgccttaccacttctgccaagcccacccagtcccactcttgcaaggcactcgtaccccctacccccgctcccccttgcaaccccttcaccttccacccttaactgccgctcaggcctttgcacacatatgccccgacagacagcccacccggttggacttgcacccctccgcacaccaccctttcgttccttggccacccggcaccccggcactctgacgcccctgccagcaacgcccataccccaacgctcctttacaactcccccgcgtttatatttccccattctcattaccactactcaccccccatacacccacaccattttcccccaacatcccctcaacctccatcttgcattccccctgccgacacatacacacccacatcccgttttgcaacctcgcacaccgccacgtaaattccacacatccaacccaccaccctcccggggccccctctcaccagctcccccatactccccaggcctcagcctaacatcgccggccccccctttgcagtcccccccaatcatgctcctgcggcaccggcggcacaaaagcccaacggcaacgcggaaacaccccgggctccaagcggaccccccatagttgcgccaagttcccggtgacagacccccacgcgtcttccgcgcccattgttagaccacggcacccccagactatgctcgcccttctctcaataggtcgtcacagcgacaggcgggcggtactgtgccaatacccggggttgtgccacacaacggccaccgtagggtcgccatcattctgattacagcacctcatagcagtttcacacccttgaactacgcccctatgtggcgcattcccgctttaaaaacgcctgctctcccacgttcttaacacccatttgagttgtgcacgagccatgctttggcacttggccattggcgtctgaccccggtatttggatatagcccacgtgcatctactacatgtggtaccaagcccatgtggagagcccttagagacgatacgaaggcgacaccatattgcagtttgatgcggacctcgacgttaacagtccacgcttcccactatgcccttaagaggcaattatgccccccactacgagaaacagactacaacaaagctggacgagggaaaaaaaatcggcggacgcgggactcccaacaacggagcctgtcgacacctagaccgacgcgaggccaaaaacggaccagagtagcc

SEQ ID NO: 661551 - DNA, 173 bp, Homo sapiens
atgtctgcaactattattgcatggatgaatagcgtgtgggttatggcattcagcacaagactagtactgcagtgcttgtacattctctgagatctcagccctccggtgccggggcagagagcaaaggctacaggttcattttcctgcacgacagcagtcacaaacagcgctcg

SEQ ID NO: 661552 - DNA, 1388 bp, Homo sapiens
cgcggacgcgcggtgcgagctggaactgctgcagcttgctggcgtcgccgggaggaaccttgatccctgtgctccggacaccgcgggactcgccatggacttgaaccagcctgatcttgatcgagcagaattgcagagttcaaggaggccttctccctcttctgacaaggatgtgagatggcacttatcaggcactcaaggagttggtggacatgtgactgatgattccctgaggatcacgaatccccaccctgaacgctatgaggctgactgcgatatagatcgatatagcaggttggattgcccgatcggggcaaccgtggagccattagcactttcctcagtgaagtatctctgagcaattggataggcgcgagaaaagcataaacgtgaccatcagtagcaggtagaaggcagtgagatcctgaagagggtcgattccagtgtcttttgagcaaagggatgtgtgacattggcttaacattctatggcgctcggtcaacgtaggcttagctggtccaaacgtgtaaaatcgatcgatagcacattgagcggcgccgaaagggtcttagtacccgactgaaccggaggtgtggaggactagaaggaatcgactacaacgggtgcatgggctagatattcctgattgggacgagtttgggggcaaggtgttgccaaacttgagtagacgacgcacagtttgtaaccaggtattcgcattggaacttggctaaaagttgaaaagggctcacacactcgggggttcgaagactaagagtctggacttgtcccacagttatgcttccttgtggagtccttcttactacctctccttgcggcgggcgcttggcaacttcgtcgtacatttcgaaataaccttccttcccttgtgagattcaacgcgcccggtgttttcctaatgccaaataacaaccctacatttggcatttggcacttgcgacagtaaacttacctgtaatttgaccaggttccaactctacacccacgggacattatggattccgccgaaaggtgactggttccagttgaacattgtgggtctaccatttttaccttcccgtttacacataccccgattggaggattccgtccttcggttcccaatttggccacccccgtttccaagtcattcttgttcccttttttattgtcacgtttcgggccagtccttgtgcccagattccccagtttgctcggtatgcccggagaggggccctgtgaattcgcagtttccgttacacggtgttggacagggcccgtatcccgccagagagattcccccctttgggtgggaagaggcgcgttcttaggccccgtatccggtttccacagggtccacgggaattggtgagtccttaccattccaa

SEQ ID NO: 661553 - DNA, 171 bp, Homo sapiens
tcgataagggccagaacacctctggacttaatcttcaggttcgttagtgctaagaaactagacatccgtggagtattagtctcaaggtgtctctcacctggttgttggagtcccaccgagaaattcccaattccttcccaaccgatctgctctgtccttggccttatcgag

SEQ ID NO: 661554 - DNA, 862 bp, Homo sapiens
tgtcatcccatcatcgcactgtccacaggcaccgccccaccgcgtgttccatgcttccacaggactggcacgcacagactgcgcagtcactcgtcctgcgccagggaccactggcacacacccactgctgcccctcgcatgcgccactcctcaccacgcgaccccccaggctccgagacggcgaccccaatgcccacaccgcaagacgcccccccccctacacgcgcccctccatgccagcccctcaacaacagcgcgcctcgcacctgccccccaaccggctgcccgccccccaccagcccccacgcgcaacagccaaccccaaagccccctaacgccagccacgcctcccccgccgcccccaccggaaacccgctcccacctgcccccaagccccccggcgcccccaccccccaacgcccccgcccaccccgcccccccaccccccacccccccccaacaccccaccgccccctccccccgccccgcccccccacccccgcaaacaccgacccccgtcccccccccccccccaccacacaccgccgacacccccccccacccacgcgccaacgacccgcgccaccccgccccccccgcacccaaacaacggccaccaccccgccccctcgcctcccccacccgcgcccccccacgcgcccccccccccccccgacccacacgccacatccattcaaccatcactccactctaaccccacgacacctctcactccccctcaccctctcccccccctcctcacaaccccctttcaccacatcaatccccacacctccaccaccacaccctctcctcccctccctccacccccccacctccccccccccccaccccaccccaa

SEQ ID NO: 661555 - DNA, 899 bp, Homo sapiens
aaggagcctttgggtcaactgcgcggtgtactctatcgtcttggaggcgtggaggatatcacctcttcgagagtcggatggctccctcagttgagttggactccataaaagttgtgtgaggaaaatccagcgccataatcacactacgctctgtcttcgggcccaatttgagagataggtctgcgaccgtatgcttctccaagtatatgctgcaatgatgcgtgtcctcttttctaccttagctatcactttgttcaataaatatactgctacggggtataccttgagacaccactacggccagatgtagcatatctatcatgaggaaaactgcattcgctagatagtgaggtcactaaagtggtggtatttgtaccaaaggttagctagaagaaataggttggggccttggcatgtgctgaagattccctatgcagggatatatccacatatgcgcaaattccctaagggatcattcgtgggcacatgtctttattcctacaattatgtaccaaatacatctaaggcccactcgattttgcagtgtcctttagtaaccgaggaatctactacgggatcaaactcaaagtcgaaagggtcatttttcctacacaattcgttagtattattctaggtttcccattcaataggcgggtggcagtcaggatgatgttggtcacacattctatataccggcagagtaacggttacctatccaaagataattcttctttaaagttgaacccgttatagtcatgtcgtaaaaggggttaactaccgcttcgtgtcggaaaccgtgaacaattttcatttctaccgtattttaatgttccgagcagggggggaaacttgatagtctccgtaggcacaagtttggggttcctccatatagaaagtgt

SEQ ID NO: 661556 - DNA, 320 bp, Homo sapiens
tctctacagtaagaaaatactccaaactattttcttaattctcttttttaggtcttttccagatatgcggcttttaatctacagggggcttggaaacaatataaccaaccttattatatgatgtataaaatagaagcaagcaacccctgagtcaaagtatatggaatgttctagtgctaggggtgggataggaacattgttggctggactctgggcactgtttggataggtaaggactttgttttagtttggggaatatttatattgatgctctgtttggattaaaattatttctattacagagcagccatttattgatg

SEQ ID NO: 661557 - DNA, 669 bp, Homo sapiens
ggggaatcataatcttgaaaatctttagtactaaagtctgggaatatatcaacaactgattaacatatgcagatgctattggataccaagggctttttaaaggtcatgggggggaaaaacccaacttggggaactcccagttaaacaaccaagacttcactgaagattaattccaattctagaatggtcctttttaattttaattttttcaactgactaacttcattaccttaaagcctagaacattattcggctttattaatatggctttctcactttaattttgtagcatgggttgcatcgacttttttactagagaattttactagatattggccattcaggttttcatctgctttataatggatacaccttgagggtcacttttctaatactttaactataaggtgcgaccacctcagccctaataaataatattttaacctaaggtcaaatctttttccagctaactaaaaactgtgtccaaaaggattgtttcgaaatatgcatgcaaatagttctgttaataacccactgttttacatctgttcacatctgcgactgctaatacggttaggtttctaactttttcggtcgtttgttcagtctgattcaaaattagcaatttgaacttaaggttttagggggtttctggtaatacacatcccc

SEQ ID NO: 661558 - DNA, 783 bp, Homo sapiens
  misc_feature (52)..(52): n is a, c, g, or t
  misc_feature (141)..(141): n is a, c, g, or t
  misc_feature (183)..(183): n is a, c, g, or t
  misc_feature (258)..(258): n is a, c, g, or t
  misc_feature (260)..(260): n is a, c, g, or t
  misc_feature (271)..(271): n is a, c, g, or t
  misc_feature (276)..(277): n is a, c, g, or t
  misc_feature (308)..(308): n is a, c, g, or t
  misc_feature (317)..(317): n is a, c, g, or t
  misc_feature (322)..(323): n is a, c, g, or t
  misc_feature (330)..(330): n is a, c, g, or t
  misc_feature (346)..(346): n is a, c, g, or t
  misc_feature (348)..(348): n is a, c, g, or t
  misc_feature (388)..(388): n is a, c, g, or t
  misc_feature (429)..(429): n is a, c, g, or t
  misc_feature (732)..(732): n is a, c, g, or t
taaaacctccacctccaggggttgtgatgggccccagtgattatacgttatnggttgctgtgggtctgggcgggcctggagccagaaggcgacttattttttctctcctatgccaccccaggtggggagggagggaggttncagactccagtttctcccttgcccttttattcccaagcctcnttggccccagtataagtgtggggaactctctgccagcttcctgagttctgcctaaagagggccccccagcacggntnggggacagggncaatnnggtgaccaccagtcatgcctaggaccggggncccaaaagncgggnnaacctcnggctacaggggccatngngtgcctcccagtgagaggggccgtgttcgcctgtgtccgncagtgccagtgcctgtgccagaggtgcgaggtgagtcctcnagagcttcctggccgggcccttcctcctgcctgttctggctcctctgctccccacgctagctgtcccttttctgattcttggtggatcctccctcccctaatttaaaagtctcttttttgccccacttggggggctgccgtgcaaaaacacacacaaacacacacaaaacaacagttgttgcgcgcctggcgcccagaaaagtttcaaccaactcggggggccgcgggccagtgagaactgaaagggtgccagcgtccccagggacaccggcagagcagggctgcttcccctaaaaaacgcgncgccgggctcgaccaccatgctgggtcgggcacaggcacagcaacgcccgg

SEQ ID NO: 661559 - DNA, 382 bp, Homo sapiens
tgtacttttagacggaatgtactgtgcatccagtagggcaaaaatcattcagattgctagacttgagggttcttgggtctggttttttgtaaattttttgtcttcttttttaggtcttttccagatatgcggcttttaatctacagggggcttggaaacaatataaccaaccttattatatgatgtataaaatagaagcaagcaacccctgagtcaaagtatatggaatgttctagtgctaggggtgggataggaacattgttggctggactctgggcactgtttggataggtaaggactttgttttagtttggggaatatttatattgatgctctgtttggattaaaattatttctattacagagcagccatttattgatg

SEQ ID NO: 661560 - DNA, 187 bp, Homo sapiens
gtcgcatctcagcaggctcccccatccaggcgcatagcagtgtggcagcaaatcaagggctttggccaattcatggcctgcatccccaattcttgctcacaagccttgcacgacatgggcccaatcaatcccctcatggtgcctcaccttcccagcaatttcatgttcccatgcaatgggcttttgc

SEQ ID NO: 661561 - DNA, 819 bp, Homo sapiens
  misc_feature (152)..(152): n is a, c, g, or t
  misc_feature (184)..(184): n is a, c, g, or t
  misc_feature (205)..(205): n is a, c, g, or t
  misc_feature (209)..(209): n is a, c, g, or t
  misc_feature (224)..(224): n is a, c, g, or t
  misc_feature (232)..(232): n is a, c, g, or t
  misc_feature (243)..(243): n is a, c, g, or t
  misc_feature (250)..(250): n is a, c, g, or t
  misc_feature (646)..(647): n is a, c, g, or t
  misc_feature (667)..(668): n is a, c, g, or t
  misc_feature (670)..(670): n is a, c, g, or t
  misc_feature (675)..(675): n is a, c, g, or t
  misc_feature (677)..(677): n is a, c, g, or t
  misc_feature (682)..(682): n is a, c, g, or t
  misc_feature (696)..(696): n is a, c, g, or t
  misc_feature (699)..(699): n is a, c, g, or t
  misc_feature (703)..(703): n is a, c, g, or t
  misc_feature (714)..(714): n is a, c, g, or t
  misc_feature (717)..(717): n is a, c, g, or t
  misc_feature (719)..(719): n is a, c, g, or t
  misc_feature (730)..(731): n is a, c, g, or t
  misc_feature (740)..(740): n is a, c, g, or t
  misc_feature (749)..(749): n is a, c, g, or t
  misc_feature (763)..(763): n is a, c, g, or t
tactaccggtggacccgcgcccacgacctgcgcggcttcctcaacttcacgctggcgcgagcccgtcctccttcgccgccgcgcacaaccgcacgtgcaggtatcgggctttccgggatgacgatggacattattcccagacctactggaantcttctttgccaatccgccttggcccttccgncaattgttgttttgaaggaangccnaaggcaaccctgtcntggtttcntcccactccantggtcantgagcgccccgaccctgtgctttgcctaattcgagcacgtggtgaggggtcggtgccgtcacttcctgctgtgtcatcttggtcaaatcagagctcttctctgcacctgcgttttccctgcctggcctcatccctgggttgtggtgtggacattgtgggtgtctccaggagccccagggccacgaaagctggggtggcctctgccccttctggggttccttttcctgcacagctgctttctgactccacccacagctgggagcaggtgccggagccccggcctgcctggccctgtgaaggccactctgggcgtttgggtgggcgtgagtgccttcctctgctcccagcatgtggttttctccgttggccgcctcctggacctcctggtgcctgacnncccacacgtctgtggagatnnangtgangngcgantactacctgggtancgncggnctgggtgacanctncngttgttttttnnccgaccgangccaccctncttcggcgggaccnttgtgcaccgtgctgagggcgttacgcgggttgcgttttgggccttggctggctgg

SEQ ID NO: 661562 - DNA, 287 bp, Homo sapiens
  misc_feature (44)..(45): n is a, c, g, or t
  misc_feature (51)..(51): n is a, c, g, or t
  misc_feature (162)..(162): n is a, c, g, or t
  misc_feature (214)..(214): n is a, c, g, or t
  misc_feature (251)..(251): n is a, c, g, or t
  misc_feature (272)..(272): n is a, c, g, or t
tctggggctggtggatctcagtcgagccaccgtatttcattatnnagaaantggtggttcatgctactgtatccacactccctcacaatcttaagggaaatacaataaacccactttcttctcctaaaatgatttttagcacatttggcaagaagaggtagnccctttaactcctcctcctttccttttttcctctcccttccttttttcctangaataactcaccgccacaaaactaagacaaacttttncaaagctcagctggagttggntggaactacacagag

SEQ ID NO: 661563 - DNA, 385 bp, Homo sapiens
ccaagttgccagagagctttttcattctaaaatattaatcccacatactggagttgttctggagccaagagccattttgaataaatacatggctctttaagatatggacctaaccatgtgtccctgttaactgtctcttaacccttttctggacgaagcttgtattccaagttgagagaaggatgtaatggagatatatctccatgagtgctacagtagaagtatataccatgagagcatagtgaagcaggatgaataaaggcagctcagtttcagtgacactgtcttatcctgtttttattactaatagaatttctagaagtggatgaatacccagaacatattaaaaacttggtgcagaaagagagagagttggaagaacaag

SEQ ID NO: 661564 - DNA, 318 bp, Homo sapiens
ttctcgccactctcacagaagctttagagacatcaagtaataagaataaattacctggcgatcggggcatgcagttcggtcttctgggaactggcttccagcatgtcaggctatgaggaaaaactgcagtccaatcctctacagcatctcttagaagattatgtacaagttactaaagaagcagcagatgataaaagtgtagccaaagcagcacaggagttcttccaacgactggcactgggcgatgtgcaagcactttcactgtggcaaaaatatcgggactagagcatcgaagagtacacttcgggtttacaagcg

SEQ ID NO: 661565 - DNA, 501 bp, Homo sapiens
  misc_feature (9)..(9): n is a, c, g, or t
  misc_feature (67)..(67): n is a, c, g, or t
  misc_feature (78)..(78): n is a, c, g, or t
  misc_feature (114)..(114): n is a, c, g, or t
  misc_feature (159)..(159): n is a, c, g, or t
  misc_feature (166)..(166): n is a, c, g, or t
  misc_feature (189)..(189): n is a, c, g, or t
  misc_feature (363)..(363): n is a, c, g, or t
  misc_feature (416)..(416): n is a, c, g, or t
  misc_feature (483)..(483): n is a, c, g, or t
gagggtgtncaagcactgcaagcgcccagttcctcggaggacggcgcgtggctcagtccaggctcangtccccctctncgtccttcttgtccttcgtgtcgccctctttctgcncgggcttggcgtcgtcctccatggctttggcaaacgcttccacancgccctngtcggcggcctccacagcctctncaggcagaccgaactggcacaagagggggcccagctgccccgaggccaaggctgccctgaacaggcccagggcctgctggaactggggcgaggccagggtattctggatctcatccgcggcctgcggcagcgactccccagaaggcaagtagggaagcaggcgcccctggacanccgcgtgggcgaggatgggagctattatctccggcgtcactcactggccaggnccacttgctggccgcctgccggcccggctggcacgtccatcgtggccaggatgctctggagggcgcncagctggatgggctgggt

SEQ ID NO: 661566 - DNA, 81 bp, Homo sapiens
cctgacgacacggctgtgtattactgcctgactgggagtcgttatctctcacagggtggtttcgatatctggggccaaggg

SEQ ID NO: 661567 - DNA, 370 bp, Homo sapiens
acttcatctttctgtgttacattctggtattggtagttcttgcgatttgtcaaactttcccattctttgtttgtatctctgttatgctgatctgtgatcagtgctctttgatgttacttttgtaattgtctaaaggtgccactaaccacacccatgttagaaacgtgaagttaataacgtgtcgtgactgcgcgattgctgacgtcttttctgtttctcttcctctccttgggcctccctattccctgaagcacagcaatgttaaaattaaggaagttaataaccctacaatgacttctaagtgttcaataaaaggaagaatcccaagtctctcattttaaatcacaagctaaaaatgattaagcttagt

SEQ ID NO: 661568 - DNA, 418 bp, Homo sapiens
tgagcaagatccaaatggttgtacgatgggctgctcattctaaattcccttattttgttctgctggtcgtagtcgtgtatttgtaccagcaccatgctgtttaggttactgtagccttgtagtatagttggaagtccgtgtagcatgatgcctccagctttgttctctttacttaggattgtcttggctgtatgatctctcttttggtttcacatcaattttaaagtagattcttctaattctgaaaagaatgtcaatggtagtttaatgggaatagcattgactctataaattattttatagcattgaatctataaattattattccatgagcatagaatatttttctatttgtttgtgtcctgccatgtagtaagtactcagtaaatgttagcatggtagcagataaagtagaaaa

SEQ ID NO: 661569 - DNA, 443 bp, Homo sapiens
tcccctgggtggacacagtcttggaggttggggaggcccgacaagcagagtatagactgggtgccgacgtgcagtgaacaacctgcccaactgtactggcccatctttccttctacccagggaaatggaagtccttagctctgaagtatacgattgcagccagtccctgaggacagcatctgccacccccaccatgaccactggcaaatgatgagcacggggagggagtggccaaagaaacaggccctgagccacctcaaggctacttcacagagccccatcctcacggaaccacccactgccttccaccacgctctgtccagcccccagcatgtagcaggtcagctccatcagagaacgaggctggctcatggggttcagttgagaggcctgggaccttaaagccacttggagacaggcttgacctggaagcggctggtctc

SEQ ID NO: 661570 - DNA, 549 bp, Homo sapiens
  misc_feature (241)..(241): n is a, c, g, or t
  misc_feature (245)..(245): n is a, c, g, or t
  misc_feature (261)..(261): n is a, c, g, or t
  misc_feature (263)..(263): n is a, c, g, or t
  misc_feature (274)..(274): n is a, c, g, or t
  misc_feature (301)..(301): n is a, c, g, or t
  misc_feature (383)..(383): n is a, c, g, or t
  misc_feature (392)..(392): n is a, c, g, or t
  misc_feature (394)..(394): n is a, c, g, or t
  misc_feature (448)..(448): n is a, c, g, or t
  misc_feature (468)..(468): n is a, c, g, or t
  misc_feature (495)..(495): n is a, c, g, or t
  misc_feature (523)..(523): n is a, c, g, or t
  misc_feature (526)..(526): n is a, c, g, or t
ggattagttaccacgctctcccatttctgtgtataccaaaatccacgcactactcaagttttcgaagtcagtcctgtggaatccacatataacacaaatgggaaaattagtgaggtgtggtgactaggcacctgtcacgtgtagctcattttttttttttaatttttagtagagacaaagtgtcactatgttgaccaggttggtggtgatctcctacactcaggcagttctctcacctcancctnccaaaatgctgggatnanaggtgtgagcngccacacctggctgagggggttaattnttaattatataaagagctcaaagcaaatattagaaggagcctaaatgcctccagcagttgactggtactggtaaattgtganacatccatntnataaaatattatgcaaccatgaaaaggattaagatagatcaataggtattggcncaaatgtccacgaaatatgnaaatatgaagtgatgttcaatcaccangtacgtatcttgaaggatatggcccatnttntcaactgcaattatttcctgaga

SEQ ID NO: 661571 - DNA, 489 bp, Homo sapiens
gtccgcgtgctcatcaggaacagtgatattcgaggtaactgaaaaactcgaaggataagatatagccgtggaacaattgaacactagtttaattgttcataacgctacctcccaccttttccacccacagccacccaatcccatccaggctgagtaaccagttagctcccttcaccaacaccactaccgacctgaccctcaaatgtaacacgtgaaactgccacagagttaagcattcatctcctattaactttatgcctcctgttttttaattcttacaaacagttgttattcatcatttatcatatttctgtgtactcaaagtacatgaatgtgccttctgtcttcgtaggtccaagggggcgccttcttgatatcgtcatgtatagagctatggccaaatgctgtgacatagggtatgcccctccagactcttgacgaggctgttctttctatgtaaacagtaccagtctctgagctaaaacactt

SEQ ID NO: 661572 - DNA, 261 bp, Homo sapiens
tacataagcctgaatatgttacgtgcaccccacaaactccaccaaaaaactcttataattactaaacaaactcagtaaagtcacaggatacaaaatcaacatacaaaaatcagtagcatttacatacagcaataacaaactagctgaaaaagaaatcaacaccagcactttgggaggccaaggcgggtggctcacgaggtcaggagatcaagaccatcctggctagcacggtgaaaccccatctctgcgtcagtatagata

SEQ ID NO: 661573 - DNA, 1058 bp, Homo sapiens
ggggtgacatgagccctgggaggccgggccgggctcggtggccactccggtgtgccctggtcatggatgtgctgccgtctgacaggtgaactaatttcgcgaggagctgcagcgccgcgtcctggacacttcgagtgcctcatagggtccgagcttgcgtgatacggctgcagtgctggcgttggatggcctgagtgatgcctgactgatcgagcgggagctcgacgcctgacgaccgaaccggggtcgacctcgggctactattcaatcgaacggcaggtcgagcaccgtaagcggtgggtctctctgatacttggacgtgggtgcactcgtctccaaggcacatactacctgcctcccggggaccttgacctagaacgcaatagaccggaaagtcacctgtgccgtgctttaacatcaggggcgactcgagtaccgggaaccactttatggactaggtggtaccaaagttagtatacgccaagcgtcacgaaagctcagaccttcttatcggactagtcccaatagggtctactccaagaccaatgaaaaacaccggaggttacaaggcggcttaacctggaagcacgtgcacggagcccatcgtgggacatcttcgtgcagcaattgaacgacaaggggtaccccttaagatcccggctcccccaagttaatatcatggaccatgctagcttggcaccgaacttgcatccgtcccatcgcggcgattgggcccattccacaagcgccgatggacgtttattactctttttcccccggtgaccctttgagaaagtgcctggtttgtcgtttcaaataaccctttccaataatgggcgccaaatgtaacacacaaggtggtccacaggcatattacgacgctttaccgcgaatggaaaggatatctggaggagcacggcaatgtggccccgatttgagtctggtaaacgggtacaccgtataaaccccgtgtgggtgcacatccgcggagggcggttgtatcaaccaattttgcgtgctaaggagctaaacccgtggcagtgtaaccggggcacatt

SEQ ID NO: 661574 - DNA, 138 bp, Homo sapiens
cagagagtgacaagagttacataacctaggtgatctgtgcagagctatgtcaaaacgccccagtaggcagagcctagataaatgttacatcacctgggtgaccagtgcagagatacgtcacaataccgtctgtaggcg

SEQ ID NO: 661575 - DNA, 149 bp, Homo sapiens
aatatagttctaaaactactgtatagcagtctttgccaagaacctgatgacggaaaccacgagataactggaaatacccaaattgcgcttaagaaaaatactacgagaatagagaatttcttaacgtaacttcctaagtgtaagatgac

SEQ ID NO: 661576 - DNA, 301 bp, Homo sapiens
  misc_feature (38)..(38): n is a, c, g, or t
  misc_feature (89)..(89): n is a, c, g, or t
  misc_feature (287)..(287): n is a, c, g, or t
ctgctcccgcatgttaagatatgcctgctcctgctttncttccacgtgattgtaagtttcctgaggcctcccaagaagccgagcagatnccagcatcgtgcttcctgtactgcctacagaactgtgagccaattatccctcttttcattataaattacccagtctcaggtatttctttacagcagtgcgagaaaaaactaatacagtgctctaggaccaaatacggattaggaagtgtcataaacttttttaaagtctatttttttcaacttttttttaatgggatngcctgttatgtgca

SEQ ID NO: 661577 - DNA, 382 bp, Homo sapiens
acatgatccgagatcattggtcggtcgtatcaactcaggaacctgatttaacactgctgctgttatcctgaccgtctttctgcatacggtacacatcagcttttcactgcctactgaattgagcctctgtcaggcattcgagactttccacaatatgacgccgagcaatccttccagctctgtattatattatatctccaaatgtacagatgcagaccaatgggatactgttctcttgcctgctaggccccttaatatccttgccagctgtgagcttcacctgcctggtgtccttctctgtcaaccttgcctgttgaacttgtgcatggaataaatgtcacaagaaggctgggcatggtagctcacacctgcaatcccagca

SEQ ID NO: 661578 - DNA, 784 bp, Homo sapiens
cacgcgtcgggagaagaaggaatgttgtggaacgaggcaggaaaatggaagagacgcccctgctaacgggaatgctaatgaggaaacatggggagcagtgagtgcgtgacaactgaggtagacgaagaagaggaagaaggtggggaggaagaggaggaggaagaagaaggtgatggtgaggaagaggatggagatgaagatgaggaagctgagtctagttacgggcaagcgggcagctgaatgatgatgaggatgacgatgtcgataccaagaagcagaataccgacgaggatgactagacagcaaataaggaaagagttaaacgtaaaagaaaaaataggccgccgtgatctattcacccttccatttcccggtctcagaatctaaatcgtggtccacctttccgagtagagaggtccgccggcccacctgtggtcgagtgcctagctcggtagatgacatcgcggctcttgctagcagccataggtgagaacgcagtgaggaattgtggaaccaggggggaggaagaatgagaatcagaaagttctcaagggtcctgtggttggaattctctctatacaagtaggttgtacagaggggaaaaattcggtacgagcaatctgtataaattgtaccgattcaataattccttggtgacatattgggtaacggcgccaaggccgatcttttaaagtgatcctcgggattgacccaatgccagtgcctttcgggaagagtatctctgatccttactttctggacctttacttgttgggtggtggac

SEQ ID NO: 661579 - DNA, 316 bp, Homo sapiens
tcttttttttgacacagagtctcgctctgccgcccaggctggagtgcagtggcagctgtagtacagtacggctatctcagctcactacacacaacatgcatgcgccacaacacctggctaatttttgtatattttagtagaaaccccatctctactaaaaacacaaaaaattagccaggcttggtgcagacgcctataatcccagctactcgggaggctgaggcaggagaatcacttgaactcagggcggaggttgcagtgagccgagatcgtgccactgtactccagcctgggcgacatagtgagatccgtctca

SEQ ID NO: 661580 - DNA, 268 bp, Homo sapiens
ccggtacccgcttcacgctaacaaaaatgttggtagtcagtgggaaagctgttgcctattggcatctttcacgtgaaccacgtctaaaagatccaggtgcctctctctgttggtgatcacaccaattcttcctaggttatgcacctccagtcaccatacacaggttaccagtgtcgaacttgatgaaatcagtaatcttgccagtctccaaatcaatctgaatggtatcattcaccttgatgaggggatcggaatagcggtgagggcg

SEQ ID NO: 661581 - DNA, 812 bp, Homo sapiens
  misc_feature (312)..(312): n is a, c, g, or t
gggctgggcgggggaaaggagctcttctgaagggggtcctgccgcagtgagtttagggagctcagtttttgctggggcgcgttctgtctttaaaatctcatatggtaaaattgtcagcttttaaaaaagttaacctgcttcagggtttgcgtgcagaatccaagccacgctctgtaattcgatcctgttgtcatagcaggaaccttaggaaattcccaacgacttgattttagggattagggaagtcataagcgaaccaaaggaggacgaagagttctcattaaaaatgtatatgtattgaagatggtggtnttatgttttagaacaggaatgaggaaccttcagacctcgggcaagctctctccccctttttagtttaatttcatcaaatgcaaagaggtgatcccccttgtactgacagttgtacaaaatgtgtcacggctttaaaaatcatccgtggtattttaacacgaattagaaaatccgtggtattttaagtgttaatgttgcttcgaccaagtgtaggccgggcgcggtggctcatgcctgtattcccagcactttgggaggccgaggcgggtggataaccagaggtcaggagtttgagaccagcctggcaaacatggtgaaaccccgtctctactaaaaatacaaaaattcagcggggcctggttgcccgcgcctgtaatcccagctactcgggaagctgaggcaggagaatcgcttgaacctgggaggtggaggttgcagtgagccgagatcgcgcccctgcactccagcctgggccacagagggaggccctggccccaatt

SEQ ID NO: 661582 - DNA, 347 bp, Homo sapiens
  misc_feature (52)..(52): n is a, c, g, or t
  misc_feature (179)..(179): n is a, c, g, or t
  misc_feature (199)..(199): n is a, c, g, or t
  misc_feature (241)..(241): n is a, c, g, or t
  misc_feature (245)..(245): n is a, c, g, or t
  misc_feature (252)..(252): n is a, c, g, or t
  misc_feature (263)..(263): n is a, c, g, or t
  misc_feature (277)..(277): n is a, c, g, or t
  misc_feature (337)..(337): n is a, c, g, or t
ggacattcgtagtgatgtagaagaatcagactccagtgaggaggcggcggcngccaggaacctctgcagctaaagaacgggacagctggagggcccaggcagcccccactgatggccctcggagccgggtggccgggcgttctgaccaacaggcacacaacagccacatagccgggcgnggctggctgtaaggggttgnccccccgacagtgccttggatatttctggggtgactggactngcgnccctggncaacctttctngagacagggagggncccaccccggttgttgggaaaggctgatgatctgtctccagccccttccttcttgcccanccaccttttt

SEQ ID NO: 661583 - DNA, 772 bp, Homo sapiens
tcgatatgtgaccaggcgtcgcgcgcaacagagacacaaacgtgcgacacgcgtctcatgtgacccctttgcttccagagatgaactgtggcactccctccttccattcctaagctctagccagcggcccttgatctctcatactttctccctgtctacacagtcgccatcttggtgacgtttgaagtttagtctggctcctgggcaggtcttctcctcgctctccagtccctattccctcctctgagaatggacccctttgtaattgaggagccaggtggttctgtggccttttcccgtctttgctggcgacgttcctgtttctcacgcctcatggtgactctgattgatctgggtaacatgagggactggcaagtcgcaggcctgtgttgaccctttcctggaaaatcgctcgtagctaagcgccccgtaccttcaggccagatttctggtctttgtgttgttcacatggaaggatcggcagtattccgcggtcctatgtgtgcaccaacggcgtgggagctggcaacatgcgtggacaaaatcgtctagtactcaatctggtcacacctaatcgcgcaattccgcgagtgcttcgacagcgcgacttcctccaccgagcttcaagggttcacccagaaggtacgcttgtggaacttacctgggcatgttgcctagccgattgtccgcggcttagattttgcttttctatctccttgtcttcctcttagtgtgcactaggggcgacttgttcttcacagtacaccatgtg

SEQ ID NO: 661584 - DNA, 1099 bp, Homo sapiens
ggtgaccgtcccgcggtgtggtcgtgggcgtgacagcggttcctcgaccgggtcaccttccgtggctcctcccgacagcaggtgagcagtacaaatgtaccagttgttccaggaattcggtggcccagagacgtgcaagttcgttagtctctactatatatccgagcaaagaaccagcgagccgggcgacgcgatagtgtcaccgactccctaccttggccaaagcgatactagcgttgcaagaggtcaattgccttttgattcccccagctagtgttataccagtcgcacattcgggtgttcatagaggggatgagaaactgataccaaactcggataaaagcggagtgcgttgatggcactaggtaaggaaacacagttcgtgacaattgcaaggcttcggggatgcgtgattccggaagcgaaactcacacctctattccacagcggggtcgacagtgccctgttgttgtcctgtgacatggtccaacgagtagtgtatcctcatgggaatgtcgggctgggctttctgggtctacactgaatggccagaagttgggcctgagtagtggtgggaactgtcctggctagcattataaatatcaagcttatccgtagagtcaccccctgtagactgtctcgagagtatgccgtggatcaaacgcggacttaccccaaatgcggggtcgggaaaattgggcggcaccaatgagaacataaggttggacgtatccgctcctggcacagtgacggggagaccacattgaatggggcatttgccaaagtagctcacactacgaactttgtcgtgcggtgggccacatccgggagatcggttccgttcccgtgacgaccaagacacgctgggacctggactgattccaaagggaagaaagactagagaacgcaaaccagaaaattagggaagaagggccagctaggacttctaccaaacttgagacttcgaaaggttgagatgggggtaccctggaagaaccaatgcgcacgagacgcggattaagacacgcccgggttttgtttgaccccttagtaatttggggttatggcaacacctggttcaaacgattggcggttacgg

SEQ ID NO: 661585 - DNA, 316 bp, Homo sapiens
gagtgatgagtttggtaagtacaatgccagtcagggcacctacggtgaaaagaaagatgaatcctagggctcagagcacttgaggaggatcatttcatatgggcttccggggagatgtggcgacgtcagctaaaataacttggaccggccggagggggactcgcgactgacttactggtacgcggacggtcgacaaatactgctcggtggtgtctaccggtctacttcctaccgtgtaaaatactactggtggtgctcaccacgactaaaccccctacggacagccaatttgactactcactcggcttcagaccca

SEQ ID NO: 661586 - DNA, 1004 bp, Homo sapiens
  misc_feature (228)..(228): n is a, c, g, or t
  misc_feature (642)..(643): n is a, c, g, or t
  misc_feature (828)..(828): n is a, c, g, or t
  misc_feature (901)..(901): n is a, c, g, or t
gggagaaccaggagagaaaggagtcccaggcaaggagggggtccctgggaagcctggagagcctggattcaaaggagaaaggggagatcctgggatcaaaggtgacaaaggacctcctggtggaaaaggccagcctggggaccctggaatcccaggccacaaaggccacacaggcctgatgggtccccaaggactacctggggagaatggaccagttggacccccagngcctccaggccagccgggatttccaggactgaggggggagtctccatccatggaaaccctgcgtcggcttattcaagaagagctggggaagcagcttgaaaccagactcgcctacctcctggcccagatgcccccggcgtacatgaagtcatctcaaggcagacctgggcccccagggccccctggaaaagatgggcttccaggccgggccggccccatgggggagccaggtcgtcctgggcaggggggtctggaaggaccctctggacccataggtcccaaaggtgagcgaggagccaaaggtgacccaggtgcacctggagttggcctccgaggcgagatgggaccccctggaatcccaggtcaacccggggaacctggctatgctaaagatggacttcctgggatccctgnncctcaaggggagacaggaccagctggacatcctggcctcccaggacctcccggtcccccaggccaatgtgacccttcccagtgtgcctacttcgccagccttgctgcccggccgggtaatgtgaagggtccctaaaggactctggaaagccagaagactgcagtggatttctgaaacttgaactnagagcccagtgggaagccagaggtcttgaaagacttcagccatgtgttcctttttttttctttcttttatcgnttgctttttggtttattttcttgagagacctttttttcttaaatccaccagacgctgcggtcggtcagattatcctcactatacttgtgtcgtaaatatataa

SEQ ID NO: 661587 - DNA, 608 bp, Homo sapiens
ggtatgaatggctccacgagggttcagctgtctcgttacggtgttaaccctagtgaaattgaccgtgcccgtagaagaaggcgggcataacacagtcaagactgagatagatccctagtggagctgtgtaatctctattaaagtgcaacacagtacataactgatcccacaggtcctggaactacgcaaatccaggcatgtagaaaattatcggattggggcgacctcggagcagtaactccaactctctcgagcaagtacatgctagagacttcaccagtcggaagcgaactactaatactcaagttgatccgaatcaacttgacacaacggaacaagtgtactcctagggataacagcgcaagtctcgtattctagagtccatatcaacaactatgggtttacgacctcgactgttaggatcaggacatcccgatggtgcagccgctattaaaggttcgtattgttcaacgattaaagtcttacgtgatctgagttcagaccggagtaatccaggtcggtttctatctacttcaaattcctccctgtacgaaaggacaagagaaactaaggcgatacttcacaagacgccgtccgccgtaaatata

SEQ ID NO: 661588 - DNA, 455 bp, Homo sapiens
  misc_feature (279)..(279): n is a, c, g, or t
  misc_feature (352)..(352): n is a, c, g, or t
gtgaactgggacttccaggactgaaaggtgaccgaggtgaaaagggtgaagctggtcctgcaggccctcccgggttacctggaactcatccctgttcacaccacatccacggatgcccggagaacaagggcccaaaggagagaagggcgatccaggccaatgtgacccttcccagtgtgcctacttcgccagccttgctgcccggccgggtaatgtgaagggtccctaaaggactctggaaagccagaagactgcagtggatttctgaaacttgaactnagagcccagtgggaagccagaggtcttgaaagacttcagccatgtgttcctttttttttctttcttttatcgnttgctttttggtttattttcttgagagacctttttttcttaaatccaccagacgctgcggtcggtcagattatcctcactatacttgtgtcgtaaatatataa

SEQ ID NO: 661589 - DNA, 198 bp, Homo sapiens
cccggttttattgtctatgaagattattcttttcaaagcctcagtggtccagcagggacccttccctggagacaccggcacacaatcccttgctgattcttttataaatcccgtgcttgcaaaagtttatattgcagtaggttcgggttgaattacacaggcattgaagtgtccccgtaattagggggggatcctcta

SEQ ID NO: 661590 - DNA, 330 bp, Homo sapiens
  misc_feature (173)..(173): n is a, c, g, or t
agaggatcccggctatcacataatcgggggaaggcgcttgtgaagtaggcttatttctcttgtcctttcgtacaggaaggaatatgaagtagatagaaaccgacctggattactccggtctgaactcagatcacgtaggactttaattcgttgaaccaaacgaacctttaatnagcggctgcacccatcgggaatgtccttgatcccaacatccgaggtcgtaaacctctattgtttgatattggactctaagaatagggattgcgcttgttatcccctaggggtaacttgttcccgttgggtcaaggttattgggataactgttgatag

SEQ ID NO: 661591 - DNA, 691 bp, Homo sapiens
  misc_feature (1)..(1): n is a, c, g, or t
  misc_feature (678)..(678): n is a, c, g, or t
ntggtcaaataatggcactggattaatttttaccaagtaaattattaaaggaaatctaaacggacaatttgcattatctttgagtatttgtgattattagctggtagtgacgaatttaacttgatgaatgcccatattgtctgtaaataaattaactcacttgagtgttctcatatttttcccgattttttagttgaatgcagctttagaacattaaattgtgccatatattaaataaaataattaaacaataccaacaagcactcttaatttgctcttctaaattttatatccttatgtagtttattattttattcaacaaatacttgtggagtggctactttgtaccaggtactcttttcatcactggaaatataacactgaacaaataggctgaaatctctgccctgatagagctttcattctggtacattctagaatgaggcattttaagaaaaaaaaaagtatgatatgtgggtgaaatagacagtttaaacaagaagtaaaatgactattaagccagttaataccaaggatatggaccaaattgaagccaataaggagcattgataatatgagaaaggaagggtttgggtctggagggggttttaacttaaaataaggtcatttgggaaagacctctttgattaagagttaagggatgggagttacaaagtnctaaggaaggaga

SEQ ID NO: 661592 - DNA, 154 bp, Homo sapiens
cacgaggggaaacggtagcttaggacagttggctgttaagtgacactgattctccccgccccgcctgacccccgagaaggaggcttgtcccccgctgcgtaaagtggtgcggaagtgggtactccattctgatacacctgggaggggggagtgg

SEQ ID NO: 661593 - DNA, 667 bp, Homo sapiens
  misc_feature (18)..(18): n is a, c, g, or t
  misc_feature (263)..(263): n is a, c, g, or t
  misc_feature (268)..(270): n is a, c, g, or t
  misc_feature (272)..(275): n is a, c, g, or t
  misc_feature (277)..(278): n is a, c, g, or t
  misc_feature (303)..(304): n is a, c, g, or t
  misc_feature (308)..(308): n is a, c, g, or t
  misc_feature (313)..(313): n is a, c, g, or t
  misc_feature (319)..(319): n is a, c, g, or t
  misc_feature (587)..(587): n is a, c, g, or t
  misc_feature (641)..(641): n is a, c, g, or t
agtgcctgtccacaatanaaaaaaagtcacaaaaacaaaaacaacaaccaaaacataaaaaagaaacaatttgccaaataagctaatttgttcctaagagtataaaaagtacaaaatattcaccttcttttcagatctctcccaagcataattatcctccttgacaaactgaacagaaagattcagcagccgccacactgcactggtctttcaggggacaatgtaagaaaggtggatgtgaaccacagtccctctgtaaagangtaannnannnncnnccaaagaattctagtcaacaaaacnngccncagtntgtccntccaatctctatccccaaacaaaggaaatcactaaaaaaacagatcacacttctttttataacagaaaaatatttatgtaatgatggcagcgcgcaaattgattgggatgttaataaataaaaaggaacaagtatcaacaagctgcaaatgaggaagaaaccaacctacctgaaaactacaaccaaattctcatggctaataagtgatggcagtcagaccatggcccctaatggaagtcagggcagcctcacccactgaaatgttgtntagttggagctgatagcctcagtgttagataaaaattgtgcaacacctgtagcnacaaatttttttttttttttggaaat

SEQ ID NO: 661594 - DNA, 148 bp, Homo sapiens
gtcccagtaacgaacatgtgtacacctttgcattctatacagtcccctagaaccagtaagttccttttcctgacaaagctgttgctgaaccatttcagggttccaccacattgaccactttaaggggtaggtggtaaggcaaagcaag

SEQ ID NO: 661595 - DNA, 327 bp, Homo sapiens
tggtgatatggcactataccgctagcacttcctttgttttgccacgggagcccccactgcatctctgcgctcgcctttctgcgctgccacccttatttcctttcatccgctcccacctcttcagttttctggcatattcttgagcatcttttaatccaagatctgtgcagagacgaactaagaaacgcagacgaatagtatttttctcctgaaaaataattacactttgcaatctctggaccagggagaactgacttccttggaaggaggtttaaagggtctctctccatgtgtcctgtcctcacgctgccagaaccacaaatatcg

SEQ ID NO: 661596 - DNA, 116 bp, Homo sapiens
ctgtgcactaggcccttgtttatatcctgctgcagaacttttccttactgatgtgtaagacatagttctatttactaaagaggcttgcaatcatatgggtgtgtgtgtgtgtgtgt

SEQ ID NO: 661597 - DNA, 934 bp, Homo sapiens
  misc_feature (1)..(1): n is a, c, g, or t
  misc_feature (19)..(20): n is a, c, g, or t
ngaatgcagagaaggcacnncgaaactcacgacggccccagtgatgccgctgacggtcgcccacctgtgaacaccaacacttgggctcgggaagaacgtcctgccccacggcggtaacgcgaccccggtggtgcggaaaaatgcgtcgccgaccacaaatgggggcccccccctctcatgtgagtgtcccctgcagcgtggttccaaaaccgcgtttcgccccccataacatccgggctgcgaaaatgaaggatgaaggccggcagaaattaaagacctggggcatgaaaaattcagggccccccctccacgcaacgcctgttgggagcgcctccccccatctctctgtgaggaacccgtccgcgatgagcaagcaggttgtcgcagcagtcccccccccgccatgggttatcagtagctccccccccgactccggccgaaatttgtccgtaaccctgcccccggaacacataatgggcgccaacgtagccaagaaaggtgagaaccaggggggcgcccctaaagaaacagagacaatgtcccccagaataaatcgcggggtgacccccaagataactcaccacagggccccagacgagaggaaaaagaggagcggtccaacacaagggcacaagagcaaacacaaacgggagcgtgacaacttcctcgcccctccccgccgcaccatggatacaactcaagagacgctatcccaaccgccctcggatggaaccacacccagcagttctcggcgcccacgcaacataccacaacagaacgggacatgtcagaccccggggagaccccctcacagacgagggagccgcgctccgcccagccccctgccgacagcgagcccgccgctccaagcagatgctcattccccggctcgacagcaaaaaatcttattactattacacaacaacaaagcaaa

SEQ ID NO: 661598 - DNA, 557 bp, Homo sapiens
caacgatggtcctcagctactcagtgaggtgaggcaggagaatggcgtgaacccggaaggcggagcttgtagtgagcagagatcgcaccactgcactccagccggggcgacagagcaagactccatctcaaaaaaaaaaaaagaaaatattaatctagtacgtcaaaactacagacaaaatatgtctgagaaagggaaaattaaggtaagataacatttcaattggaggacaacaatccaagagccatggtcaaatattcttatagggtatgactattgggtctcattcagaaggacctcaggtccacagtaataaagctttcaacacttcctttaacaaccatctcggcaaatattagttatataattaataagcaagagaggtaataggggagggtaatcaaggagggcttccagtaagtcaagactgggattcagcctctatcactggtaattatgtgaccttggttaagtcacattctagagttcctcatctaaaaattgggaatattaagtcacctcaaaggtactgaggccatatgtgagcaaaattaaac

SEQ ID NO: 661599 - DNA, 471 bp, Homo sapiens
tttttgaacaattccaactccgttctagtggcatcatctgttcgccatgcaatgggaaggggcattagctgacagagtggccttaaccaagcaaattgttttgaagaaatgtataggaatcttcacatgcaaaatgatcatcctcatgagatgctagaaggatggaagattcatgtatcttttatatgtatttttttgaagaagggttctcactgagtggcccaagctagagtgcagtggcgcagactcagcctcctgagtagctgggtctacaggcacagaccaccatgcctggttattttttttttttcttttggtagagaaagggtctcactatgttgcccaggctgcttgaactcctggcctcaagggatcatcccacctcagcccctcaaagtgctgggattatggatgtgaaccattgctcccaactctatcttttttttctttttaagaaggagagtgtttatt

SEQ ID NO: 661600 - DNA, 143 bp, Homo sapiens
  misc_feature (138)..(138): n is a, c, g, or t
gccgggcgggccgcgaggctaggaggcggcgggagctgggcagagcgcggggcggccggggctctcgctccgacccgcgcccgcgacccttcctgggacccgagcccgagacccccgccggcccccccggggccgctngcggg

SEQ ID NO: 661601 - DNA, 759 bp, Homo sapiens
ccacgcgtgcggttacattggaccggctatggagtcgcgcggtaagaagcgaacaacctctcgtcttcggctcgcgtcatcagtgtcggcagtcgcgaagcaggggtcatgcgtgagtgcgatctcgcatccactgtggctctgggtggtgtcctaggtattggcaatgccttgcttgggagctctagtgcctggaacatcgggtatccagccacgattgggcagatgccaagtgagcaagaccacttggaggcgaggtagatgattcgcttcaacatgcttcttcagtgacgacgggggctggctagcatgtgccccggcgtcgagagtaatgtaagactgtggatacccacagtactagttgatgaaagttcagcgagcatggcacctaccgccatgactcttctcgaccctgagcaaattatcaacacggcaccagaagatgctgccaataactatgcccgaggagcactggcatcgcaatgtggcaagggaggagtcacttgaccctcgatgtcggaccctgacatttcagcaacgcgtggctcgatcgaggtgcccgggtctccgaggggctttcgtgtggttttcctagcagcttcggtgggggaactggttctggggttcagctcgctgctcatggaacgtcgtcgtcagttgattatggcaagaagtccaagctggagttctcgtatttacccggagccccaggtgttccacagctgtagttgagccctaaaaattccatcctcaccaact

SEQ ID NO: 661602 - DNA, 155 bp, Homo sapiens
ggccgacgatgctcggaatacgcggaatgagatttcagagataagcgggtcatccagaggtctgcaggctgacgatcgacaacatcaagaaccagcgttgccaagttggatggccgctcattggcgaggctgaggagcgtggggagctggcgctc

SEQ ID NO: 661603 - DNA, 124 bp, Homo sapiens
tgcttaccttcttgctttaatggaattgttaagggctaagcacatagaaggccaaaaaaggagtttcccaaccccagcaaatcaagtgcttggattctagaactgccaaaagaaacctgcactt

SEQ ID NO: 661604 - DNA, 336 bp, Homo sapiens
agtgtgatgctagtcctgcatatgtcgtcaatacacatatatggtttccctgaaagggattatctcatccctctacctatgccctgctcgttccatctggacttgtccacatatccctctggttcccacaactgccccactgtccacagtccccacgattaagcacccctcttctgccatctctcaacagcccctgactaacaacattctccaagcctacattgccccctcgcttctaccactgccaccacttatgggccatccagcttggggcatacctctagcacgtcgacctgacaggcctgctagccttggccctcgaccgtacgttactac

SEQ ID NO: 661605 - DNA, 906 bp, Homo sapiens
ggaggcgtgggcacgggacgcctgaggggttcagctcggacgaggtcgtggggccaagagaggagtgggtgacagtcccaagttgggctgcggagaatcgctgtttctccacgcccactcactaactctgcactggaagtgtctgacggatgacaggctgttcgtactgcttgcgctctcttcatcatcgcgagctccggggagaagccggtccccagctctccccgcagtgtcaccagtgggccccaatgtgaagatcaacgtgctggaagacttgagggagagaaccctcaggtgcccaaggttgagaagagcatcagcgggaccagcccctaaacgggaacaactgccctgtggcgtgggcgtcgccttcttcctcatgacgtgtcttggcctcctagctctgcgccctcccctgggggggggcagcagatggggcgggggcttggaaggagcagggagcctttggctctccaggggaagcctagtgggcctagaacccgtcgtgccatggtagaagggggcctgcaccatacatctgtgtccgcccctctacccttgcccccacgtagggacttgtgtggaccaatggcacgaggacgtcgtgggtccaggcggcttgtggtcctggtaggtgggtagcaactggggccagaagggaggctaaggtgctggcctggtactttcctgatctgtgcgtctcgttggcccagaagatatgcccagagaggaactgacgtgggggcccatggccctcaggcagaacgggcgggcatagggggggacatgcaggcgtcccgtagaaaaggcccagcatcagggggtgggtacaagatacacgggggaggcaagaaggaggcaggcaaactaataaaagacaccatgagacaaagagcagaagcatca

SEQ ID NO: 661606 - DNA, 334 bp, Homo sapiens
  misc_feature (13)..(13): n is a, c, g, or t
  misc_feature (19)..(19): n is a, c, g, or t
  misc_feature (81)..(81): n is a, c, g, or t
  misc_feature (145)..(145): n is a, c, g, or t
  misc_feature (152)..(152): n is a, c, g, or t
  misc_feature (212)..(212): n is a, c, g, or t
  misc_feature (222)..(222): n is a, c, g, or t
  misc_feature (263)..(263): n is a, c, g, or t
gtctcactgtttnccaggntggagtgcagtggcatgatcttggctcactgcatcctccagccccccgggttcaagcaattntcctccctcaacgtcccgagtagctgggactacaggcgtgtgccaccataccttgccaattttngtatttncagtagagatagggtttcaccgtgttggccaggctggtcttgaactcccgacctcatgtnatccacccanctctgcctcccaaagcattggggattatagacatgagccancatgcccagttcatcaccctaaaaataatccccacgggccggggggcagtggcctgggccaaatatgggtg

SEQ ID NO: 661607 - DNA, 245 bp, Homo sapiens
ctgccacgccgtaaaacagactgagcaatcgggatggacgaagtgttgctgcacacgccgaggaaccatacacttcttaaaatcatatcagaatggacgaagttgttgctgcacacgccgaggcaacaacttcgtccattacgacctctcgtgtgttgctcggcgtgtgcagcaacaacttcgtccacaaagaccttactgcgaatacagggtactcggcgtgtgcaattaggtcactcggcgta

SEQ ID NO: 661608 - DNA, 188 bp, Homo sapiens
aaaaaaaaagaaaaaaaaacagaaggcagtgagctcactgtgctggaccgactatatgcaccatagacataacgactactgaatagcaaataatagtgaacaataagccccacaaagtccctttaggtattgatttagaaggttttcgaagctcacttgacatacctgcattaatgaatcggcacacg

SEQ ID NO: 661609 - DNA, 100 bp, Homo sapiens
  misc_feature (23)..(23): n is a, c, g, or t
  misc_feature (28)..(28): n is a, c, g, or t
ccgcggcgcaacgtaggcatccnggacnatccatctccaagttaaccagcccgtgctgcccaagttctggggcaggtaggagagggccgtcacacacctg

SEQ ID NO: 661610 - DNA, 197 bp, Homo sapiens
  misc_feature (113)..(113): n is a, c, g, or t
ggggggtgcttctttattatatgccagagggtgctttcaaaggaattatcaaaacaatggcatggactaatgtggccaccgtatcttttatccttctgttttaaaaaataaancgagcaaatcattactcctctcctgtttgaactagaaatgttgggaaacccctagagtgcttatcacggtgaagtttagcagtg

SEQ ID NO: 661611 - DNA, 224 bp, Homo sapiens
  misc_feature (38)..(38): n is a, c, g, or t
ggttttttttcccccccctttggggggttgggcccccngggccaaaaatttgggcagggggcccccccaatttttgggggtttcccttttttttgttttccccccccctttttttttttttaaaggtggggccccccccttcccccccagggggggggccctttcacaccctttggtttttttccccaaaaaaaaaaactaccaaaaaaaaggtttaaacctta

SEQ ID NO: 661612 - DNA, 305 bp, Homo sapiens
ggttttggccggttttccccccccccagccccttttttgggcccggcccaggggatttgggccctgggttttttttccaaatggggggtttccaaaggccccccccccggggaagaaaccaagggggttcccttggggggagggggaggccccatccctttccccccttttggggggggccccttttggggaaagggggccggggggggggcccaaagcccccccgcccaggggcccctttcccggtttgttttcaaaaaattggccccccccccttttggggggggggaggttttaccccccca

SEQ ID NO: 661613 - DNA, 166 bp, Homo sapiens
tcgcctagatcactgtagtaggctcacccaggcccagaagtgagcttattcactaggctaaaactggactagacagcaaaagatctcgcaggaagccaaaatctcgcaagtaggtaaggaaaagggcaaatacaaggaagttgctaggggggtacgagctcgaatc

SEQ ID NO: 661614 - DNA, 619 bp, Homo sapiens
cggtctgagcagatagcggacgtggagcacatcctccacagcccagatctttcatttttttgcgacaggatctcgctctctcacccaggctcgagtgcagggcatgatctcggcccactacagctttgaactcctgtgctcaagtgatcctcctgcctcagcttcctgaatagctggggctacagacacatgctactgtacctggctaatttttgtattttttgtagagatggggtctccctatgttgcccatgctggtctcaaatgcctgagctcaagcaatcctcctgcctcaatctcccaaaatgctggaggagataagcgggacgtgtgagccatatcctccagagcccagattctatcatttttttgagacaggatctcgctctctcacccaggctcgagtgcagtggcatgatctcggcccactacagctttgaactcctgtgctcaagtgatcctcctgcctcagcttcctgaatagctggggctacagacacatgctactgtacctggctaattttggtcttttttgtagagatggggtctccctatgttgcccatgctggtctcaaatgcctgagctcaagcaatcctcctgcttatctcctcggggatc

SEQ ID NO: 661615 - DNA, 957 bp, Homo sapiens
gggctccccgaagcggcagaaagttcctggccactctctgccgcttgtggttgggcgaagccaggaccgtgccgcgccaccgccaggatatggagctactgtcgccaccgctccgcgacgtagacctgacggcccctgcatggctctctctgctcctttgccacaacgtgacgacttctatgacgacccgtgtttcgactccccggacctgctgcttcttcggaaggacctggaccctgctgcctgatgcacggttggggctgctgctcctgaaaccctgaatgagcactctgcacttccccgcatgtgcgtgtgcaccctggcccctggtgctgcactgtgatgtgactgatgcatgtgctgctgcagcccagctgggcaccaccatggccgtgggccgctgcctactgtgtggcctgcaagggcggtgcaaggccgcaatgaacaccaactgcccgacccgcctgcaatggcccgccgccatgctgctgaggctgtgagccgccatgagcaaatgtaaattgatgtgcctttgagacactcaatgctgctgcactgtctgaggcaatccaaaccaatacggttgcccaaggtggatgatcctgcgcaactgccatccgcataatatcgatggggcctgcagtgctctgcttgcagcgacacatgtgacgccgcgcccctggctgccgcatgcctgccttctatgcgctgtggcccgtgcccccgggcctgctgtggctgagcactacagttggcaactccgacgcgtccagcgctgcgctcaatgctctgacggcatgatggatacagtggccccccgggtggagcctgtggtgaattgtaaaagggcctctaaacgatggccaggacatgcctggaagagtgtggttaagctaatgctgcccattgaggttccacgaagcttggccacctgtggaggcatgggccgcgaattgc

SEQ ID NO: 661616 - DNA, 323 bp, Homo sapiens
tagtcaaaacttgtaagctgatcatactaagtccagatgcacctcaattaacgatgggagtaacatcctgataaatacacagtgaagtcaaaaaaatattaagttgaaccatcgttaagtcacatggctagagtacaataaaactaagggaatgataggggagtcatgaggatgcacaagtcagaccccagtctaacgaaaagaggtacatggttagagtaatgccgataacctttacatttcatattactggcactcatacttacctagaagaggaatggacatccgtggcctctaataaattgggtaccgaagctcaactt

SEQ ID NO: 661617 - DNA, 107 bp, Homo sapiens
catttacgatttcgaaaacattaaagcaaacccccaaacaccccacaccgtacacaaaggcgtggtttggaaatcaccactgagatgctggttctccctcgcatgtc

SEQ ID NO: 661618 - DNA, 369 bp, Homo sapiens
agacagagccctggtctcgccaggctggagtacagtggtgcaattatggctcactgcagcctcgacctcctgggctcaagtgatcctcccacctcagcctcctgagtagctaggactatagacatgcactaccatgcccggctaatttttgtattttttgtggagacagggtttttccatgttgcccaggctggtcttgaacttctggactcaagggatccacccacctcggcctcccaaagtgctgggattataggcatgagcactgcacctggcccttgttaagttttaattaacttttttgtttgtttcttttttttttttgcgacagagtctcactctgtcaccctggctggagtgcgtcgacgc

SEQ ID NO: 661619 - DNA, 403 bp, Homo sapiens
  misc_feature (53)..(53): n is a, c, g, or t
  misc_feature (215)..(215): n is a, c, g, or t
  misc_feature (286)..(286): n is a, c, g, or t
  misc_feature (343)..(343): n is a, c, g, or t
  misc_feature (349)..(349): n is a, c, g, or t
cgggagtgcagtgagctgagatcatgcccctgcactccagcctgggcaacagngcaagatcctacctcaaaagaaataatctcgggcgggtgctgtgggtcatgcctgtaatcctgggcttcccaaagtgctgggattacaggcgtgacaacttgcgcccggctggtttgtgcttgttgtatcaaatttggggaaatccttctttgctgccaggnatgttgttttaataaatacagtagtatacctatctataaatgtgggtatatctcatcttgacatttatttnccaatatttgctttgattacaaagggcagacttcttaggaagtttgctttcttaatnaccttnggggttataggggccacagggtttttaaaagggaggttgggattttgcccttac

SEQ ID NO: 661620 - DNA, 318 bp, Homo sapiens
aaatcccaatcacaacccttggtgggaaggctttccactttccacagaccagaacctaacatcaccggtaatacaattagtcacaaatacagtcctcgagttttaggcccatacacatgagtattggtctaaaacatgtcttcttggtagcagctaggcccggccaccacggtgctgggctgagttcacaaatctgtggtaaccggtagcttcccggtcacttctcgggctctcctctccggctaagcttggtttcctaattaacatcttctggccacggccatagctacggcggctatggaaacttctacaactagg

SEQ ID NO: 661621 - DNA, 185 bp, Homo sapiens
gtactattggtgggcacctgtgcaaagaagcaccttgatatgtaacttcgtgtaatatggccagagatggccaatagatgtctctcaagtgtatctgatcaccagtgtcagtgctatagggagtgatataatatggtggttcctaaagttatttttggtctctttttttttttttacgctgctat

SEQ ID NO: 661622 - DNA, 357 bp, Homo sapiens
  misc_feature (351)..(351): n is a, c, g, or t
ataacgctgggcggtggcggcatcgggtttctcgacgaagcggctgacctggaagctttccttgttcaggccctggcctttctcgatatagccaaagccggtctcggcgtgggtgggcaccaggccgaaggtcaccagccagccttgctcggccaattgccgggcgctgtccacggcgttggcgaaagcctgcacatcgttgatcaggtggtcggcgggcagcaccagcagctgtgcatcatcaccgtacaggcggctcacgtgcagggcggcggcggcaatggccggtgcggtgttgcgcccgaatggctcaaggatgaagtccagttcgacccgggccttgttcagcangcgcta

SEQ ID NO: 661623 - DNA, 544 bp, Homo sapiens
acacgttcttttgtggtggcatgtcaactgtataggcattatttatgggtaccgtgttgaatcgtaaatccatagggttatataattattaacactattaatgttgccaaactatcaatatgggttgtatctctatgtatgttggtaatcattttgatcaatatttatagatttctaggtatatactgctcaggtttgtacgtggattcctaagtatttcttgatttaagttctctagcatatggaagtgtttttaaattttcttttaaaattgtttattgttaatgtgtggaaattcaagtaatgtctggtgcggatattgtattgtgcgaatccactgaatttattgcgtagtatggagggaagagataggcctctcatattgttttatattgttttatactcagtagctgttttaggacaaagacgaggaagtgaactccgcgacaggcagaccggcgccaggtctgaaagcagggctgggcctgcctggcctctctccagtagttcagaatccctgtggaaaggtagggatcctctagaa

SEQ ID NO: 661624 - DNA, 439 bp, Homo sapiens
  misc_feature (44)..(44): n is a, c, g, or t
ccggggggtagtgcccacctcaaaaacctcggggctggtggcancagcgtcgtcataggtaatattggtgccctgatgggttacgccacccacaagtatttcgatagtgaggaggatgaggagtagccagcagctcccagaacctttttttccttttgggcctaactcttccagttaggatctagaacttggcccttttttttttttttttttttttttgagaggggttcccacaatattgtccagggtagagtgcagtggctattcccagatgcgaacatagtaccctgcagcctccaactcctagcctcaagtgttcctcctgtttcaccctcccaagtaggattacaagcatgggccggcgatgcccagaatccagaactttgtttatccctctccccaacaacctagatgtgaaaacagaataaacttcccccca

SEQ ID NO: 661625 - DNA, 360 bp, Homo sapiens
aggggctttagggactgccaggctgtttcaaccaggaaggccaaaatcaagagtgaaatgtagaaagttgtaaaataaaaaaagtggagttggtgaatcggttgttctttccccacaattggatgattgtcataaggtttttagcatgttcctcctttttttcccccccccctttttttttttattaatcaaaaaaaacttcaaagttaatgggatggtcggatctcccaggctgaaaactcgttcccctccaagcatttcatgaaaaagatgctttttattaatcatacaaactctccccatgatgtgaaaagtttcccaaatctttcaaaataaaaagtaatggcttaaaaactgcca

SEQ ID NO: 661626 - DNA, 188 bp, Homo sapiens
ctggtcactctaaggaccagctccacagagcatacttattatgatagaacagtacaacttcaacagctgcgtactcttgagacacaaaaaagtgctccatatagttacttgttaattccctaatcgcattacaatatcattactgttgttcttccagggctcggactagcctttagctctcgacacat

SEQ ID NO: 661627 - DNA, 237 bp, Homo sapiens
gacctgttgttcgaaaacgtgttgatgctgctgctcaagcccgttctgcctgctgcactaccgccagccagcctctggtcgtggctgtgggcgcttggcaccatgacggtcatctcgctgctggtggggctacgaccatatcgcttgttgctggcacgcagcctttacgcgtattacgtaatgatgtggtagcgaacgtctggccgctgaagttttatctgccgattgtcagtgtgg

SEQ ID NO: 661628 - DNA, 308 bp, Homo sapiens
  misc_feature (1)..(1): n is a, c, g, or t
  misc_feature (17)..(17): n is a, c, g, or t
  misc_feature (25)..(25): n is a, c, g, or t
  misc_feature (75)..(75): n is a, c, g, or t
  misc_feature (84)..(84): n is a, c, g, or t
  misc_feature (130)..(130): n is a, c, g, or t
  misc_feature (151)..(151): n is a, c, g, or t
ncggccgccgacacggntgcgagangacgacagaagggggaaaagaaaatgtaaaaacctctagaaaactgaaanaccttccanagcttaaatcagccgtcccattgccctgccatccccccacagcaanctacacttccagacagccacnttcacagcagcgagcccaggctcttcctcaggcttgaccgccacagtggcacaagccatgcccaacagtccccaactcaagcccattcagcccaagcccactgttatgggagaacctttcacagtcaaccctgccttgactccagccaaggacaagg

SEQ ID NO: 661629 - DNA, 265 bp, Homo sapiens
  misc_feature (132)..(132): n is a, c, g, or t
  misc_feature (200)..(200): n is a, c, g, or t
caatgatattgatggtcttgacccagtgtaggtctaggctaattttctttgtttgtgtctaagtttttaaccaaaagtttaaaaagtaaaaaaaaaaaaaaaaaaaaaagtagaaaaaagtttttacaatangaatataaaaaataaaatgctttaatatttttaattgagggaaagaaattaaaaataaatttaatgtngccaaagtatacagtgtttataaagcctacaatagtgtataggtaatgtcctagggccttcacat

SEQ ID NO: 661630 - DNA, 354 bp, Homo sapiens
ttatatacaatacgagctcgtgtacctgtgtgtatcatcaatcaggaagggtccccagcgtggggagagccccacagttgagaacaataagtgaacaattgttgtactgaacactagtcacgatgactgctgatcataaacaacctgtgtgtactatgtattcccctacacacgtagcacccttcagcaggaccctataaaactttcctccagcccttgcctctttgcaggttgccccttctctgctgagctgcccactgcaacatattttcacaatttctctaataaatctgcccttctttacctacaactatcttggtaaatggctttaccacctgcaaaactgaccctagg

SEQ ID NO: 661631 - DNA, 1755 bp, Homo sapiens
  misc_feature (1084)..(1084): n is a, c, g, or t
  misc_feature (1429)..(1429): n is a, c, g, or t
tttttggatagtatcgtggtctcaatatagagaatctatccactcctctgtgtggagtaatagaggtatctcttctctcgactcctgcgctgctctttgttgtagatgatgatgtttgcctcctgcgccgacgaaaggtatacatcatcccgccggtgggttccgaatatctgggctcccgctgctactcaaaacccccccctacaggatgttgtcccgctgacctttgggtttctgtgctccatttcttctggggtcgctccgcccgacgaagcaagaatgtgtataggggtccccccaacccccctgctgatattggtgcgaagggagattccctcccaacagggggttggttgaacacctcggggtgatgggcgctgacaaccatttttttgtgtgctccctccggcaaggaaaaaatctgtgtgtggcaaccattttgtgggggcgtccctccccttcctgctgatgagtaatgtggctcttttttttgtagctgcccctcactcccacgacgagggtgttgaaaccacccctccgttgtgtgggtgaaacacacacccacaagatggtattctttttagttggtgcacccacgagcggtaatattatttgtaggaagatttggtagtgttccgttgaagaccgcttttcatactattaccgcggggggttttggtacaaccaccaccaagaggaggctcactaaagaggggcttttacaccaccaacaaagagggggggttttccaccaccacacgcatatctcggtgtgggccaccacgcccctccccacgaggagatagccttgtccctccgcccgcgacacagagcgcccccccccgagtagtgccctctggcgtgccaacacagagttggcgcgccctcggtaattttggggcgcactattgcgcacatctcctggtcgttcctcggtgtgtatagcgccctctgtctctctctttgggacaacacgccccgccacttggggggcacacagagaaagagggtgctatcaccagctggctccccgcgcaccctcgagggagattctcaccccacagagagcagagattgctatatnataacagagatttgtggcccacaccagcggggcttatcaccccgcttatggtctcaacacagggatgctgtgcaacacagtcttctgagtctcacacagagacacacactagcgcgctctcgcacctcgggagactctatatgagacttctattgtctctgacacacacagagagcgactctcctacacccttctctctggagagtgtgcgtctctctgtgtggcccacactcacttggtgtgtatagatgtgacactcacatgtgacactgttgtgtctcactgtcttgtgataagagccgtgtgtgtgtgtgttgtggggacacaccacagagatacaccggngtgtctctctacaccctctccgccacagatcctcttgtcttgtggtgtccagacacaggaaacgcgccggcgtcttgtggagaaagaattgcacccttaagagtctcattgaccacccaccctccccagatttggccctaggcccgcttcccaggaccctagggagagagaaagaaaagccattccatggggcacccctgaagaaaagaacccgaattgccaaggaagaaagagagacttaatagcccgggcaccagattttcccacttggtggggtcctccacattaaaggttattttcccccgttaaaaaaaagaaaaaataaa

SEQ ID NO: 661632 - DNA, 247 bp, Homo sapiens
  misc_feature (72)..(73): n is a, c, g, or t
cgcagacttcgggaggcgagggggtgggtgtagcaggccgagccgccgctcgctccgccgcctaggactagnngttgagttttgtacaagtccgatgccgggggagacggaagagccgagacccccggagcagcaggaccagtaaggggtagaggcggccaaggccgtcggaggagccccaatatcggccccctgaggcggtcgcgcggcgctgcaggaccactagcagccgcgtgctgaggggagg

SEQ ID NO: 661633 - DNA, 326 bp, Homo sapiens
gctctgcttatgaggtcatagaggatcccatcaggcgaagacatgttgtcagagaaagtgtgcaatcatatggactaccatggatgggcaggggtggtcatagcgagagtgatcgtcatcacctatggtgatgctgaagcaagaaacagtacagatccattcatcatggtgtggtgagaggtagatgccgctgtcacccgagaggagcgccacctgtccacagatgcagtagaagggatacgaatatggaaggctacaagttctttgcaggcaggagtggagaactagaacacgccgtgtccacagtgtctacgcctgatgggtac

SEQ ID NO: 661634 - DNA, 452 bp, Homo sapiens
agggaactgggaagtgcctcccaccccagcttcccatgaagcttacctgtcaccttaaagttaaaaagctatgtagctttcctttttcaccgttgaatggagaacttggtcgagtcttagaagtttgattaatatttcagattcagagtcatagtgacttttttgttgttgttcatacatcttactgaacattgtaaacctttaaccttttcttaaaaatgattggtgtttgaccaaatacaccttccctgcctcaagttactaaaagccccttgtcagacgtcctgttcacttccctccatctcggcccccccaaccccgtgaacttttactccctcttccctaccctgtacctctccctggcagtgtctggtttggcacatgacccctgaggacatctggagattctgcgccccctgggacaaacagggcctaggttattaagcaggtga

SEQ ID NO: 661635 - DNA, 346 bp, Homo sapiens
gcttacccatgagaagttgctattctaggctctggggaggtggcggtatctagctgaacataatgggggctaggaccctagaatcaattcttttagaagaaaagccattccaaacatccttgccaatacaataactaaccgctagctcactattcattaaattcaacaaacgcttctccatcacctactaccgtgtaaggggactagggagtgtagatatagagtaacacctagtagacccaacctaactaagacagtaccgctagagggctggtacttaggtataacgcccccaaagctactgctacccatagccctagacccatacagaggccccctacctaca

SEQ ID NO: 661636 - DNA, 104 bp, Homo sapiens
ctgtggaagatggggaccacgtgtgtgcaggagtggcctggtgggactaacaggaccagcatcaccagttgcgaccgcgacggaccagcgtggccctgattggg

SEQ ID NO: 661637 - DNA, 151 bp, Homo sapiens
agctcagctgtaacattgacagatgggaaggccatggtttaacggcagctatctcgctcacagagagctgggctactgtttcctatgtcgccgcctccacagacacttgaagactcgcaccatgaagccatgtccagggtgggtgccactg

SEQ ID NO: 661638 - DNA, 686 bp, Homo sapiens
aagcactgtattttggttgagctggttcacgaacggcttaggagtcaggaccggtaactgcatccacgtgtctgagacctgtgtggagtgtgaccgtggggacagtactgatatcctaacattcaaggataaaagcctgcctacataggggaacttgtatacaaacactaaactatgggcttcagagagcttctgggctgttgaacacattgaggtgctgggagggtgtaatggcgtgagagggcatgaaagttccatgctgtccacctcccatttactttgtacaatgcacgacttacatctgactgtacctgagtcatatgtacaaggaaggaaaaaactatttgttccctatactctaataccactcaacagaatatttctgacaccagatgtatgggggtatttccttacacaccaagcaattctacaagagacaacggttgtgtgtcttctaaattaatacagttctgacactatttacctggaggtagcatcaggtcccacaggttaagggctcattcccacaaggagtgaagtgcctccatttccgataccagacataagtcatagttggtcgcctatactttttgcccaggttgtaatcaagagttccacaaccgccttgcaggttcaatacattgtgtagtagctttcgagcgcaggcatttttctgtgcaggaggc

SEQ ID NO: 661639 - DNA, 1042 bp, Homo sapiens
tggccgaataggaacagctccggtctacagctcccagctgtgagcgacgcagaagacgggtgatttctgcatttccatctgagaccagtgaccttttctatttcatagtaaacaaacttcatgagtacttgccggagtctagggatcgagaatgcactacaaaatcaaagccaaaggggtcgactgacgctggtggcactgcattgacactcttatacagaccctaagtaatcgatgttacagagaaacagaaaccgcagtcatcacgcctgcaacaccattgggcagctacagcaacgggagccactattttaatctctgtggtaaattcttaacttagttgagcctcagattccaaaatcttgtcctgtgttgagatatccagttaggatggctgattcagctttagctcagaagtgtcttcttgacgctgagttacagaagcttattctggaggtatacaaatactggctacagcacctttactatgagatacttctggtcttttcagccagggcacactctcgcgatcggggatccaccaaagcgtggctatatagctggataatgtcctttctaccaagcctgtcctcgcatcactacttttgctggccaggtattgtgaaccaggtggttgcagggctccttcagcttcattcagctggctagtcctgccaaccactctgttgcccagccaattcatctcagtactgtcttggcccagcagcacctagcggagccttcccgcacaaccacgggaacaatcaggcaccatcccagccgcctgcgcaaaaggcccccgggtgaccccaccacacctcccctctgcagaattcccctgcttcgttatccccacattccgcgtcttccacaccttatatcccacaccctatttcacacgatttgtatatcgcatcacccacaaatatgctccctgtccatacctttaaaaaccactcgcatcatcctctactcactcccaactcaacacactccacactacccccctcatactcctctcactcctccactccaccccccc

SEQ ID NO: 661640 - DNA, 235 bp, Homo sapiens
gtacgttgctatccaggctgtgctatccctgtacggctctggccgtaccactggcatcgtgatggacttcggtgacggggtcacccacactgtgcccatctacgagggggtattcccttcccccattgccattcttgcgtcttgaacctgcttggccgggacctgacttactaacctaagaaggttctcaacgagcgcgggctacagagttcaacacacacgggccgcgcgggga

SEQ ID NO: 661641 - DNA, 367 bp, Homo sapiens
  misc_feature (194)..(194): n is a, c, g, or t
  misc_feature (349)..(350): n is a, c, g, or t
taatttccttggttggaacgtgtagttattttatttattcctatattaaccatctaaaccaagtgtaagtgacatggtacactaaatacaggaatggaacattggtagttgtgggcaggtgaacccagtgtgtgtggtgcaatttcaaagctttagaaatatgcggaatggattgtgctgggctattatttccnttgtgcagcagcagcaaaggcaggcaagcaacatgagaacccttaataggtgcatcagtgaactttcaggggaacagttaccggaagaacccatgggtgtccccctcgtgcgtttactgggtgtggacatgcaggcaaggggttaattcatctgnngattccagagctggcag

SEQ ID NO: 661642 - DNA, 644 bp, Homo sapiens
agcggactagcgctgctggcggccccgtgcggccgggcagctgctgcctgcaatgatgtcctgtgctgacctgcgggcgcggggcgggccgtggcgctgtgccggggtgacctcgcgctcgtccctgtgcatggcgtgtgtcatgtcagcgccctgctgtcccggccgcgggctacgtgatcgtgagctccgtagtcttggtgccgtcaccatcgaggtgtgacgagtgagctggacgcgcctccactgaggaggctatgcccgcgctgctgaggattcgggcacatctggcgaagcttccccgcctctgcccacaaggaggacgcgcacctgcggccccgggcgggcgccgcccgggccaggcagccccccgcgccacccgggatgttctcctaccggcgcgagggcggccagacggccagtgcgcccccgggccctagactgcgcgcttgccaccgcccgctccctggcccatgccagcgtctggggctgcctggccaccgtgtccacccatcaagaagatccaaggactgccatttgggaactgcctcccgtcagtgatggcccttcatcaatagcactgggattcctttcttctacatgacatgcaaggagccctgtggtggctgactctgatgacgaaa

SEQ ID NO: 661643 - DNA, 241 bp, Homo sapiens
ccagaggcaccaaggagtgccagaggcaccaaggaggccagaggcaccaaggaggcagggacccttgcctccttgcagcctctgggccccaggctgagcctcagtctccctccctcgaggcccatgcagaggctcacaacacacagaacagagctcagccctgcggccagagagagagggatgtagctgtgcagatagagaggcatggcaacgtaagactcggtagtagtacacacttgat

SEQ ID NO: 661644 - DNA, 300 bp, Homo sapiens
cggctagttcgagcctggtgttaatcggccgagggcgagaggtatactgcgttccatcccgacccggggcacggtactgggccctgtttcccccctcctcggccccgagaagccaggtccgccttctgcagggttccccagtggcccccgctccaggccgggctggaccgactcgctggcgcttcatggagaacttccaaaaggtggaaaagatcggagagggcacgtccggagtgtgtacaagccagaaacaagttgacgggagagggtggcgcttagaaatcgcctacccccccgggg

SEQ ID NO: 661645 - DNA, 157 bp, Homo sapiens
ctctagaggaccgtcttacacaggcgtacatattattatacttatacagttataacttcattcatggtcctgatcctgggcatccggtgaaagttgcagttttactcctcagacgatgagaacaacttccccaaacaagtttgccagggcaggagaa

SEQ ID NO: 661646 - DNA, 131 bp, Homo sapiens
taggggcttactgtgagcggcactaacccaggaggaactgctccgggaggacacgatcacagaagagcttactttacggtcactggagacatactgagcggctcgaggctgactaaccacagaagcaggtt

SEQ ID NO: 661647 - DNA, 912 bp, Homo sapiens
gcttcggaataagctcccatatggtaacttactactccggaagaaaggaaccatgtggatagcataggtatggtactgagctatgatatcaattggcttccatagaggttcatcggtgtgagcacatcgcatatatttacacgtaggaatagaggtagacgcgagcgaggcatattgtcacctccgactaccatgaatcatcgcatatgccctcagccggcgtcaagagtattgagctgagtcgccacactccaacggaggcaaaatgagatgatctgctgcagtgttctgagccctaggattcgatcttctcttgtgtcaggcgtaggtggatctgatctggcattgtattagctaaactcgatcaactagacactcgtatcctacacgtagcgtagtacggtgtagctcacttccagtatgtgctatcaataggagctggatgggccatcataggaggcttcaattcactggatttcccctatgctcaggctacggcgctagagcaaacctatgccaaaatccatttcagtatgcatatgcatcggtgtaatctaacctttttcccaagaacttgctcgtgagtatccggaatggcccgaggttaactttggatagccgatgcgtacagcgtatgaaaatctattatctgtggggtcattcatctctttaacagtagtgatattagtattggccatgatttgggagcgttaggttggaggaaagtctgttagttgaagaagcctcaattagggtgagtgatattttggtgccggacttgcaattggggacgtttgtaatagaaaggggggtggacccagtggtgagggcccggcccgttcaaaaaaaaaaaagggggggggaaaaaaggggggaaaaggaagaaggagtgaagggggaggtgaagagcgg

SEQ ID NO: 661648 - DNA, 907 bp, Homo sapiens
  misc_feature (764)..(764): n is a, c, g, or t
  misc_feature (775)..(775): n is a, c, g, or t
  misc_feature (781)..(781): n is a, c, g, or t
  misc_feature (784)..(784): n is a, c, g, or t
  misc_feature (793)..(793): n is a, c, g, or t
  misc_feature (802)..(802): n is a, c, g, or t
  misc_feature (817)..(817): n is a, c, g, or t
  misc_feature (819)..(819): n is a, c, g, or t
  misc_feature (831)..(831): n is a, c, g, or t
  misc_feature (835)..(835): n is a, c, g, or t
  misc_feature (839)..(839): n is a, c, g, or t
  misc_feature (841)..(841): n is a, c, g, or t
  misc_feature (844)..(845): n is a, c, g, or t
  misc_feature (851)..(851): n is a, c, g, or t
  misc_feature (860)..(862): n is a, c, g, or t
  misc_feature (865)..(865): n is a, c, g, or t
  misc_feature (868)..(868): n is a, c, g, or t
  misc_feature (876)..(876): n is a, c, g, or t
  misc_feature (880)..(880): n is a, c, g, or t
  misc_feature (890)..(891): n is a, c, g, or t
  misc_feature (894)..(894): n is a, c, g, or t
  misc_feature (897)..(897): n is a, c, g, or t
  misc_feature (899)..(899): n is a, c, g, or t
gtggcctgctcttcctgcgggctagctgggcggtgggggctgccagcagcagcggaagtgcggtgcacgcgtggccatggctccctgttgcggagtgccgagcactcggcgctgaaccctgctgctgcgctggtgtggctcacgctgaccgcctgccttcctgctgaccctactgctgcagctcctgcctgccctggcctgctccctgggctgcgctgatcttccaggacctgatccgctatgggaaaaccaagtgtggggagccgtcagcgccccgccgcctgccgagcctttgatgtccccaagagatatttttcccacttttatttcatctcagtgctgtggaatggcttcctgctttggtgccttactcaatctctgttcctgggagcaccttttccaagctggcttcatggtttgctcagaattctcggggcggcacagttccagggaggggagctggcactgtctgcattcttagtgctagtatttctgtggctgcacagcttacgaagactcttcgagtgcctctacgtcagtgtcttctccaatgtcatgattcacgtcgtgcagtactgttttggacttgtctattatgtccttgttggcctaactgtgctgagccaagtgccaatggatggcaggaatgcctacataacagggaaaaatctattgatgcaagcacggtggttccatattcttgggatgatgatgttcatctggtcatctgcccatcagtataagtgccatgttattctcggcantctcaggaaanataaancangagtggtcnttcactgtnaccacaggatcccantnggaaactggttngaanatgntnctnnccctanctacttagnnnagntgntgatctangttntcctggccgnnacnttngngttccaca

SEQ ID NO: 661649 - DNA, 437 bp, Homo sapiens
aaagacatacttgagactggttcatttatacttgagactggttaatttataaagaaaaagaggttttattgacccacaattccacgtggctggggaggcctcacaatcatggtggaaggtgaaagtttatatcttacgtagtggcagacaagagagaacttgtgcagggaaacttctctttataaaaccatcagatctcatgagacttattcactatcatgagaacagcacaggaaagacccacccccatgattcgatcacttcccaccaggtccctctcatgacacatgggaattgtgggagctacaattcaagatgagatttgggtggggacacagccaaaccatatcaccttactttgaaactttaaaatgttttgtatatagttgataactttggagagatttgggttaaatgttggtcgacgcggccgcgaa

SEQ ID NO: 661650 - DNA, 655 bp, Homo sapiens
  misc_feature (30)..(32): n is a, c, g, or t
  misc_feature (512)..(512): n is a, c, g, or t
  misc_feature (523)..(523): n is a, c, g, or t
  misc_feature (529)..(529): n is a, c, g, or t
  misc_feature (532)..(532): n is a, c, g, or t
  misc_feature (541)..(541): n is a, c, g, or t
  misc_feature (550)..(550): n is a, c, g, or t
  misc_feature (565)..(565): n is a, c, g, or t
  misc_feature (567)..(567): n is a, c, g, or t
  misc_feature (579)..(579): n is a, c, g, or t
  misc_feature (583)..(583): n is a, c, g, or t
  misc_feature (587)..(587): n is a, c, g, or t
  misc_feature (589)..(589): n is a, c, g, or t
  misc_feature (592)..(593): n is a, c, g, or t
  misc_feature (599)..(599): n is a, c, g, or t
  misc_feature (608)..(610): n is a, c, g, or t
  misc_feature (613)..(613): n is a, c, g, or t
  misc_feature (616)..(616): n is a, c, g, or t
  misc_feature (624)..(624): n is a, c, g, or t
  misc_feature (628)..(628): n is a, c, g, or t
  misc_feature (638)..(639): n is a, c, g, or t
  misc_feature (642)..(642): n is a, c, g, or t
  misc_feature (645)..(645): n is a, c, g, or t
  misc_feature (647)..(647): n is a, c, g, or t
gcgcccgctccgatctcctaagagaaaaannnaaaaaaaacagatcgcaactttactaataactaccacttttatttcatctcagtgctgtggaatggcttcctgctttggtgccttactcaatctctgttcctgggagcaccttttccaagctggcttcatggtttgctcagaattctcggggcggcacagttccagggaggggagctggcactgtctgcattcttagtgctagtatttctgtggctgcacagcttacgaagactcttcgagtgcctctacgtcagtgtcttctccaatgtcatgattcacgtcgtgcagtactgttttggacttgtctattatgtccttgttggcctaactgtgctgagccaagtgccaatggatggcaggaatgcctacataacagggaaaaatctattgatgcaagcacggtggttccatattcttgggatgatgatgttcatctggtcatctgcccatcagtataagtgccatgttattctcggcantctcaggaaanataaancangagtggtcnttcactgtnaccacaggatcccantnggaaactggttngaanatgntnctnnccctanctacttagnnnagntgntgatctangttntcctggccgnnacnttngngttccaca

SEQ ID NO: 661651 - DNA, 305 bp, Homo sapiens
tttttgggaattttgccccaaaaaaaagccaggccgtccaaaccaattgttttcaaaggggggggcccagggtccctggccggcttatttttagggaggaaaagggggggcccccccttttatgaacaaatggcccttttttaaaactggggggccctaaaaagggggcccggtttttcccccgggagcctttgtttttcctttgaaaaggccgtttttcgggccggttttttgtttaggggggggcccaaaggtacatgtttgcccccttttagttggaaaaaaagggggttttttttttttta

SEQ ID NO: 661652 - DNA, 642 bp, Homo sapiens
  misc_feature (499)..(499): n is a, c, g, or t
  misc_feature (510)..(510): n is a, c, g, or t
  misc_feature (516)..(516): n is a, c, g, or t
  misc_feature (519)..(519): n is a, c, g, or t
  misc_feature (528)..(528): n is a, c, g, or t
  misc_feature (537)..(537): n is a, c, g, or t
  misc_feature (552)..(552): n is a, c, g, or t
  misc_feature (554)..(554): n is a, c, g, or t
  misc_feature (566)..(566): n is a, c, g, or t
  misc_feature (570)..(570): n is a, c, g, or t
  misc_feature (574)..(574): n is a, c, g, or t
  misc_feature (576)..(576): n is a, c, g, or t
  misc_feature (579)..(580): n is a, c, g, or t
  misc_feature (586)..(586): n is a, c, g, or t
  misc_feature (595)..(597): n is a, c, g, or t
  misc_feature (600)..(600): n is a, c, g, or t
  misc_feature (603)..(603): n is a, c, g, or t
  misc_feature (611)..(611): n is a, c, g, or t
  misc_feature (615)..(615): n is a, c, g, or t
  misc_feature (625)..(626): n is a, c, g, or t
  misc_feature (629)..(629): n is a, c, g, or t
  misc_feature (632)..(632): n is a, c, g, or t
  misc_feature (634)..(634): n is a, c, g, or t
ccccagcccgcctagggacggcagccgggaagccaggggaggtaatatttctccacttttatttcatctcagtgctgtggaatggcttcctgctttggtgccttactcaatctctgttcctgggagcaccttttccaagctggcttcatggtttgctcagaattctcggggcggcacagttccagggaggggagctggcactgtctgcattcttagtgctagtatttctgtggctgcacagcttacgaagactcttcgagtgcctctacgtcagtgtcttctccaatgtcatgattcacgtcgtgcagtactgttttggacttgtctattatgtccttgttggcctaactgtgctgagccaagtgccaatggatggcaggaatgcctacataacagggaaaaatctattgatgcaagcacggtggttccatattcttgggatgatgatgttcatctggtcatctgcccatcagtataagtgccatgttattctcggcantctcaggaaanataaancangagtggtcnttcactgtnaccacaggatcccantnggaaactggttngaanatgntnctnnccctanctacttagnnnagntgntgatctangttntcctggccgnnacnttngngttccaca

SEQ ID NO: 661653 - DNA, 402 bp, Homo sapiens
ttggggctccattcaggtatagacgtcgaggaggcagccgttctcgctctcgtccccgtccaaatctgcagaaagggagggagggcacaaagaacgagaacgagatagggagcgggatcggaataagagggaccgagatcgagacagggatgggcacagaggggacagggaccgtaaacgatccagcttatctccgggtcgaggaaaagactttaaatctcgggaggagagagactctaagagggatgacgaggatgaccatggtgataagaagcctaaggcccagccattatcccgtggaggagcttcgggccaagaaaagggctgaggaagaagctgaggctaagcccaagtttcctctctaaagcagaaggagaggctgaagctctaaagcgacggcag

SEQ ID NO: 661654 - DNA, 439 bp, Homo sapiens
  misc_feature (30)..(32): n is a, c, g, or t
gcgcccgctccgatctcctaagagaaaaannnaaaaaaaacagatcgcaactttactaataactaccacttttatttcatctcagtgctgtggaatggcttcctgctttggtgccttactcaatctctgttcctgggagcaccttttccaagctggcttcatggtttgctcagaattctcggggcggcacagttccagggaggggagctggcactgtctgcattcttagtgctagtatttctgtggctgcacagcttacgaagactcttcgagtgcctctacgtcagtgtcttctccaatgtcatgattcacgtcgtgcagtactgttttggacttgtctattatgtccttgttggtgccttactcaatctctgttcctgggagcaccttttccaagctggcttcatggtttgctcagaattctcggggcggcacagtt

SEQ ID NO: 661655 - DNA, 487 bp, Homo sapiens
acagccatgtgacgtgggcactgagatgatttgggagattgaatgctcctcagtggggctagaggccacaggagtgataggttactgtaaagaaagcaaaaaagatgcaaaagcctacatgacaaaccaggcacgacacaaaggagaggcttgagaagaggaagtgaaggagggagaggattccacaagaccgaagtgcccaaggagacatggagggaagagagggctcttcacagagctgagtttagagaccaccctccatggttctggaaggaaaccagccagctttcatatgtggtgacaggctgttcattaatttgtagtgtacagcattaaataaatgaagtatgtagagaacattaggaaacaatataaaaaggtaggggaattcgtggataaagggaataacctgggtaccatatttcatcacattattccatgggaataagtcatcagtgcaaaggactgtaaggagtgcacagcagca

SEQ ID NO: 661656 - DNA, 359 bp, Homo sapiens
tagaacattttcctcctatctagctgtaattttgtagcctttaacaaatctctgtctctcccttcaccctacccttcccagcctctagcattctctgtcctactttttacttctgagatcaacttttttttttctttttagcttgcttccacatataactgagaacatatggtggttaactttctgttcctggattatttcacttaacataatgttttccagttccatacatgttgccttgaatgacaagattttattttttttcatggctgaatagtattttattatttatatataccccattttccttatgcataaatttgtttgtgtactcaagcaataaaatgattgtttaacta

SEQ ID NO: 661657 - DNA, 183 bp, Homo sapiens
gatggtgtcagcatcagtagtcccagcatgcattaagaggctgaggtgggagaatcacctgtagcctgggaggttgaggctgcagtgagctatgaccacaccactgcactctaacctgggtgacggagtgaggccctgtctcaaaagaataaaatgttttttaactcagaggggcagctcccc

SEQ ID NO: 661658 - DNA, 626 bp, Homo sapiens
  misc_feature (598)..(598): n is a, c, g, or t
cttaccaggaatggagcttagaggttggaagttgctctgtatgagtcagtgagtgagtggtgagtgaatgtggaggcctaggaaattattctacactactgtagaatttatgaacatttgggctacactaaatttataaaaaacattttcttcttcaataatgagttagctcactgtaacttactttttaaactttttaaatgttttttaagtttttaactcttgtaataacacttagcttaaaacacacattgtacagctgtacaaaaatattttctttatgtcattctataagctttttaaaatattttcaaatgtatttttttttttaaagcttaaaaaaaacatgtaagaggccgggcgcggtggctcacgcctgtaatcccagcattttgggaggccgaggcgggtggatcacgaggtcaggagatcgagaccatcccggctaaaacggtgaaaccccgtctctactaaaaaaatacaaaaaattagccgggcgtagtggcgggcgcctgtagtcccagctacttgggaggctgaggcaggagaatggcgtgaacccgggaggcggagcttgcagtgagccgagattgcgccnctgcactccagcctgggcgacagggcga

SEQ ID NO: 661659 - DNA, 934 bp, Homo sapiens
cggagctggcgtgccgggccttgccccccggcgcacaggagcggtacgccgagccgcgtccgacgcacggggagctgctgtacctggggccgatccgacacatcctccgctgcgggtcaggaaggacgaactgcgacgggcaccaggaacccatgtcggtattcggcatgcagtgcgctgctacagcgctgacgagatgaattcccgtctgcgtgacaacgccaaacgtgtgttctggaagggtgtgtcgggaggagttgctgtggtttatcaagggatcctagcaaatgctacaggagctgtctctccaatgggagtgaagaactctgggatgccaatggatcccgagactatattcgggactagcctgggattctccaccagtaggaagacggggacttgggcccaggtttatggcgttccacgtggaggcagtttggtgcagaagtaagtagatctggaatcagacttagttcaggataggcacgttgatcaagtgaggatgagtgacttgaaacaatcaagatcagaccctgagtagcatgacgtaatcagtcgtgtgcgcttatgcgaaatccccaacattaatcttcctccttggattggcgagctgccttccaatggccagtgaccatctgaccagtgtctagtgtgggtgaacacgtgagcttgtccctgaccaggcctgtagcaagaagactcgggagagaccactggggcctccggctgtcggcttccacgcaatcgctcaggtacgcactggttcactgtccctcattgccgccaatcacgggcgcctgacgacaggcgagcttaatagaccacttggggcatgcccatattttcctgacctccaatcgaagccggaaatcacgatcaggtagaccaaaccttcaaggccaagattcaagatggaaaggcgctaacgagcgta

SEQ ID NO: 661660 - DNA, 232 bp, Homo sapiens
ttatgtctaccggtcttcgcatgtgtggtcggtggggggctccatattgtcactccaggtttatggagggtacttctactattaggacttttcgcttcgaagcgaaggcttctcaaatcatgaaaattattcatattcactgctgttcgagaaatgaatgagcctacagattataggatgtttcatgtggtgtatgcatcgggatcaatccgagtaacgtcagggcatacca

SEQ ID NO: 661661 - DNA, 230 bp, Homo sapiens
ctgatcaccccacagcatgcctgcatgggcactcttgttctggttttgacttgacttgaattgctggatactttggttttggttttgacttggcttgaattttttggtactcggattttgaatttcgtgattttggtttggtataaacggtaaaagtgtgtgtgccctctttacctgttctttgtcttgtggtatgtgtggtgtgagcgtggtattttgtctggaaaaaa

SEQ ID NO: 661662 - DNA, 120 bp, Homo sapiens
agcagctcgcacctcagcttcagagtagctagcactacagaggcacacacatccggttaatttttgtattttttgtagagccaggttttcgccatgttgcccaggctggcctcaaactcc

SEQ ID NO: 661663 - DNA, 317 bp, Homo sapiens
aatggcctgtggtatcaaattggaatcgtaaactgggaaatgggctgtggtcggcccaatcggcccggtgtttacaccaaaatcagccccccctttggtggatccaaaagttgatggcccaaagtggcatgtcccagccaaacccctcctggccactattttttttcccttttttttggggtttcccactcctggggccggtttaagcccacctgagcccatgcagcctggggcccctgccaagtcaggccctggttttttttttttttgtttggtaaaaaacacattccagttgatcccctgcagggcatttttca

SEQ ID NO: 661664 - DNA, 748 bp, Homo sapiens
ggcggtgccgaacagtgtatacttatttatatagaatatagtatattatatttattatctatcctatatttatattatatatatgataatattattattatatatatataatatattataataatatatatatttatatatattaaatatatcatatattaatattattatatatattattatgtagtatgatgtatcagaatggaggaagagagaggaagagagtgagtgagagagaggagaagagagaagacgagagagtggagaagtgagatgagagagataagaggagagaagagaggaaagagagagagaagaagggaggaaagggagcggagcgaaggtgcaggagagggagagaggaggaggcgaagggacaaggaagggagagaggagcagaagagagacgggcgagcgagggagacaggaggaggagagaggaagggggggaggacacgaagaggagacgaacaaaagaggcggagacgagagagcgggaaacgggaggagacagaacaaaggaagaagagaggcgaggacgggcgagggaacgcgaggaggagagaaggacaaggcagaacgagcacacgcggagaggggcgagagggaggaacggagagagagcgagggagggggcaggcggcgacagcaggcgacggagagagagagacagagaacaggcggaggagaagacaggaggcggaggcgccacggaaggaggggggagcggagagaggcgggggggcgc

SEQ ID NO: 661665 - DNA, 111 bp, Homo sapiens
atgtgtatcaatctatcgataccagacatcatgagcagcttcttagtgcacgggtgcggagactatgccagatgccccgtggggtgcagcgcatgacggcgtaccatgcac

SEQ ID NO: 661666 - DNA, 374 bp, Homo sapiens
accatacccagctaatttttgtatttttagtagagacaggtttcaccatgttggccaggctgttctcgaactcctgacctcaagtgatccgtccaccttggcctcccaaaatgttgggattacaggcgtgagccaccgcacccggcctcaatatttgaagcgctggttatgcgatgtgtggttgtcgtcatggagaataactgggccctttctgttgagcagtgccacagcaggccttgcagtttttggtgcatctcatcgatttgctgagcacacttctcagatgtaatggtttcactgggattcggaaagttgcagtggatcagaccagcagcgtcgacgcggccgcgaatttagtagtagtaggcggccgc

SEQ ID NO: 661667 - DNA, 126 bp, Homo sapiens
tcactctagcaggatcccgtgtcgccagcaacaggataacaggatcagaaataggtcagctcatcatgcttggctttgttggtctggtagttaggtcagctcatcatgcttggctttgttggctgg

SEQ ID NO: 661668 - DNA, 461 bp, Homo sapiens
  misc_feature (194)..(194): n is a, c, g, or t
ctgggatcatagaaggtcatcaaatatgagggaaaagaagttatgtaactgatggcagtggagattttaacaagtaatagagatgatgagataatgtgtgaaaaaaacaagcacaatggtacatcataagtacccaaaatttggtggatattattagtagtattttatccacttagcagaaaatacaaaatganaatggaaatgataataagaaaaggaaaagtggcaagcattagaaatgtttacaactgattaatgttttttatgatcatgaaatcaatcactagtgttatttggtagaactcaaatatggtctggagtaaaccacttgcgagcttccaagtgtttgctctcggtgtaatcacaaaggataggctcaattccgtaattaacaagttataactgtatatgtgagcagtcatttatctgtgtctttacattttggattatgtctacctata

SEQ ID NO: 661669 - DNA, 434 bp, Homo sapiens
tgttatacaagaacctggaagtagatacatcacactgtggaagacaagcagtcatgtaagctttaagcacttgcagtgctaccagaagggctggcatcctcaggagcctgactatgctagactagctatctgaaaaaaaaaaaaaaaaggtaaaaaaaggtttttacttctatacagatggccaaaggggtatcaggcctagtttttaataaaaaatggttctagcaggttcttccagggaacaactaaataatttgtaggttcaaaagaataatgtaataattgggcaaattagatttatttatttccccccctgggaggcccctttaaattccgattttggaaaaaatttctaacttccaaggccggaaaacttaatgatcttccaaagggctgaaattcaacatattcatttataaaaaagaactttcttg

SEQ ID NO: 661670 - DNA, 1271 bp, Homo sapiens
gccgacatggtagagcggggccatacggtcgcggccaaggacgggcggcatccttcgacctgcggcgcttcctgacgcagaccgcaggatggatggcgcgcgccgatgtgcattgggtctgtcgactgtggcatcgtgattcgtcctagcatcatactggatgcagggctacacgcaaatgccacacgaagatctaagacagactgtactgcgtgatatcaacacgcgaacgcaggatgccatgccgcatatgagccagtgccatcaggggatgctggccttccatggaccatcggccctatcttcatatggtggtcgacgcgatcatttccccacagatcagacaacgaccactcgcaccgcaaagtacctaggtccatatagagtagacctagctctatctcaagctctctagggaccttcctagtaggtataagtcgggttctctaggctatccctccaccaaacccagtaggcgcacgtcacacgaacccccgacaggcacgtgcatgcgatgcgtgaggccgcactcatgctagaggggcaacgccaatacaccatatcaggcatatctctgttcacatccttactccatgagaggtggtgcttggccttaccctgagcctcaccgagacgactcacacaggactcgggcagctggacagactaacaatacacagaactaccgctaggacccccacatcccgagaccccaacacactgcctcacgccctcccataccccaggtgcacatcaggtgcgcaccacaactaccaaacagacccaaccccgtaccaccccagcaacagcggaagacaccaccgcaggggcgtacccaagcccgcgcccccctggcggtaccatggacgcaggacggacaaagcgacgacgcacaggcgcggcaccagaacagcggcacacacacacagctggacccggggcccgcaccaccaaagaaagccccctcccggcaaaccaggcacagagccaagcacacaagcacacccgggaccacccccctgcgacccgaagcgcgcaccacacagctaaaacgcgggcgcccacaacccacgggccagagcgacatcacagagcaccccccaaccaggcgcacgggaacccacgcgacaccagctacggccggccgacaacgcccgggacccactaccaccaacggcacaaccacgaacatgcaccacaagcgcacacacaacagaccaacaaaaccatacgaacaccacagcgaacacaccaagcacgaccaagacacg

SEQ ID NO: 661671 - DNA, 458 bp, Homo sapiens
ggttattaacattatcagtaatcaaagaaaggtggcccatcatctgggcacccctgttcctctcctaagagagacagacacatttgacacaggcatttaaaacttggtttagataaaaatctaggttctgggttacagtgtaaagtaaaaattgaatgtaaagtaaaagcacaatttggccaggcatggtgactcacacctataatcccagcactgtgggaggccgtggcaggtggatcacctcaggtcaggagttcgagaccagcctggccaacgtggcgaaattccgtttctactaaaaatacaaaaattagctggatgtggtggcgggcgtctgtaatcccagccacttgggagattgaaacatgagaatcacttaaacccaggaggcagaggttgcagtgagtcaggatcatgccactgcaccccagcctgggtgacagagtgagactgtctca

SEQ ID NO: 661672 - DNA, 366 bp, Homo sapiens
cctaggatccactagcagctatcagcactattcagctgatataggatatgtgtaaaagaacatctagagaatgcacagacaggctagtatggtacagtaccgatataaagacaattgcccatgatagcctgaagcactgaaatcaagtacttctgaatcgaatcaatgatactaggtagttttatatcctcatatatatcaaagttttactactgctgataattttgtaaaccaggtaaccagaacatccagtcatacagcttttggtgatatataacttggcaataacccagtctggtgatacataaaactactcactgtactcatctggtatatacccgcacgaacattttgaaattccaattt

SEQ ID NO: 661673 - DNA, 1121 bp, Homo sapiens
  misc_feature (1121)..(1121): n is a, c, g, or t
catgttttatctgcaatgttggaaagtccgaggcccagaggccaggagagagggcggctgggatcagaggccaagcctccctccctggctcctggagccccgcagaggtcagggcgataaggaacaatgactctcccattcaggaggaggaaggaagtccctgctgccacctaatctctgctcctctgcttctcccctgctcccgagccttttctctagagaagactttcaaggcgacttttgtgctgagggccagccgccatcagcttgagaaggtgaatttggcaaatgacatgaagattcttcaaggcagaatccttgcagggaagcttcaaaggactccatctgcagatgttctgaaaacctctgagtctagaaattgattattcacccaggatacctaattcaagctcccagaactcagccgaccaaggagcttggaagactttgcaactttggaccaagcacaatgaagtattccctctgggctctgctgcttgccgtgctgggcacacagctgctgggaagcctgtgttccaccgttcggtcccagaggttccgaggaaggatacagcaggaacgaaaaaacatcagacccaatattatccttgtgctcactgacgaccaggatgtggagctgggttccctgcaagtcatgaacaagacgagaaaagatcattgggaacagggtggggccacctttcaacaatggctttgtgaccaccgcccatgtgctgtccaatcaggctcaatccatggtcaactgggaagatacgtgtgatatacccaaggtttacaccaaaatgggaaatgcgctcatccctcgtgggagcaaatgaacgagacttcggacacttgtgggtatacacgaaaccggggtaaagaacgtctggcacgaccccctgatggaaacaaggggagcaaaaacaccggacaggaggaaagccggaataaaaaaaaacaggtaagaccaggcgagaagcggcagcaccacacctgacacaagcagcaccagacaaagacaacaaagagaagcaccagaccaagagagacccagtggacacgcccgagcacacgcagaaagacagagacacccgaccgacgtcgcatccacactactn

SEQ ID NO: 661674 - DNA, 630 bp, Homo sapiens
ccactatgctcgtttcattgtgtgtctcagccttccgtcctacgtttgcatttgtgcgttcgctttttatgaacgagtttttgataattctgccttataacgatgagtagatgtctcattaagaagactcttggaggcagcatggtctgactagcttaaggtacagtctttcctctgagagtttcctgtggttttactaactcttagcttgccctctgacatataaactagaagccgtaaattacgcataaattccactacgtgccataagagatctttaaaactctgcatggcaaagccactatgagacacgtcatgaactaaactgtgagataggtgcagcttatatctcagacgtggcctgctgactgaaattatgaatcaagtattattagaacacagtcacactcacttgcatgcatattgtaagcggctgctaataccctatggtggcagaatttgatagctgcatcagggaccatatggtccacagaacgcaacaggtttattatactgcgcttgacagaacagtttgccaactctcgctctgatgaataaggagttgctacgactacacatcaatatgacacgaccctgaccagtttattaggcatgagatatgattgtgtg

SEQ ID NO: 661675 - DNA, 847 bp, Homo sapiens
  misc_feature (24)..(24): n is a, c, g, or t
  misc_feature (27)..(27): n is a, c, g, or t
  misc_feature (34)..(34): n is a, c, g, or t
  misc_feature (51)..(51): n is a, c, g, or t
  misc_feature (72)..(72): n is a, c, g, or t
  misc_feature (88)..(89): n is a, c, g, or t
  misc_feature (95)..(95): n is a, c, g, or t
  misc_feature (102)..(102): n is a, c, g, or t
  misc_feature (108)..(108): n is a, c, g, or t
  misc_feature (119)..(119): n is a, c, g, or t
  misc_feature (130)..(130): n is a, c, g, or t
  misc_feature (133)..(133): n is a, c, g, or t
  misc_feature (137)..(137): n is a, c, g, or t
  misc_feature (142)..(142): n is a, c, g, or t
  misc_feature (146)..(146): n is a, c, g, or t
  misc_feature (164)..(164): n is a, c, g, or t
  misc_feature (172)..(172): n is a, c, g, or t
  misc_feature (178)..(178): n is a, c, g, or t
  misc_feature (183)..(183): n is a, c, g, or t
  misc_feature (204)..(204): n is a, c, g, or t
  misc_feature (217)..(217): n is a, c, g, or t
  misc_feature (245)..(245): n is a, c, g, or t
  misc_feature (267)..(267): n is a, c, g, or t
  misc_feature (276)..(276): n is a, c, g, or t
  misc_feature (287)..(287): n is a, c, g, or t
  misc_feature (291)..(291): n is a, c, g, or t
  misc_feature (321)..(321): n is a, c, g, or t
  misc_feature (331)..(331): n is a, c, g, or t
  misc_feature (401)..(401): n is a, c, g, or t
  misc_feature (429)..(429): n is a, c, g, or t
  misc_feature (434)..(434): n is a, c, g, or t
  misc_feature (468)..(468): n is a, c, g, or t
  misc_feature (545)..(545): n is a, c, g, or t
  misc_feature (554)..(554): n is a, c, g, or t
  misc_feature (562)..(562): n is a, c, g, or t
  misc_feature (588)..(588): n is a, c, g, or t
  misc_feature (590)..(590): n is a, c, g, or t
  misc_feature (599)..(599): n is a, c, g, or t
  misc_feature (605)..(605): n is a, c, g, or t
  misc_feature (620)..(620): n is a, c, g, or t
  misc_feature (660)..(660): n is a, c, g, or t
  misc_feature (663)..(663): n is a, c, g, or t
  misc_feature (684)..(684): n is a, c, g, or t
  misc_feature (688)..(688): n is a, c, g, or t
  misc_feature (708)..(708): n is a, c, g, or t
  misc_feature (732)..(732): n is a, c, g, or t
  misc_feature (738)..(738): n is a, c, g, or t
  misc_feature (744)..(744): n is a, c, g, or t
  misc_feature (749)..(749): n is a, c, g, or t
  misc_feature (753)..(753): n is a, c, g, or t
  misc_feature (774)..(774): n is a, c, g, or t
  misc_feature (786)..(786): n is a, c, g, or t
  misc_feature (836)..(836): n is a, c, g, or t
tctcatttaacttttttaatgggnctnaaaattntgtgaaaaatttttggncaagttgtttccattaaaaantactgattttaaaaannaaaaanttaaaantgccanacgcaaaaaanaaaaccaaagnggnccanaaaanattntcctttccttctgaaggntttacgangcattnttatnattaaccagttttttactacnaaacttaaatggncaattgaaaaaaaaagttctgagaccgntcttccaccactgattaagagnggggggggngggattagggntaanattcatttagccttctgagctttctggggngagttggggnccttgccagccccagcagccttcttgtccactgctttgatgaaacccaccgcaactgtttgttttatatnacgaacagcaaagcgacccaaagggggntagtntgagaagctctcaacacaaatgggcttgccaggnaccatataaacaatggcagcctcaccagacttcaagaatttagggccatcttccagctttttaccagaacggcgatnaatcttttncttcagcncagcaaacttgcatgcaatgtgagcngngtgggaatncaatanaggggcatagccggngcttatttggcctggatggttcaggataatcacctgagcngtnaagccagccgcttccattggngggntatttttgctgttaccagcnacgttgccacgacgaacatccttnaaaganacattnttganattnaagcccacattgtccccaggnagagctttactnaaagcttcatggtgcatttcgacagaatttacttccgttgttacgttgantggggcaaagg

SEQ ID NO: 661676 - DNA, 1949 bp, Homo sapiens
  misc_feature (1647)..(1647): n is a, c, g, or t
ggcagccgcacgcctatgactcacccaacagctacatcccctgtaatcaacccaagacagctcaatcgagcgctgacttagtcagtctacggcccctcaatctccatgtccagtggtgccatgtaactctgcgtctcctctagcttcctgtgtactactggcctgtcttgccgtggacaccactcgaccacctccacagagccctatggcctccatctcactctgacatgcgagtcagtctcagacgagcctccagtgtcacaactgagcagacaatcgacgcgtgccaacaacgtacatgcccctggcacgcgtgcccctgtcgatgcgcatagctgcgctgcgagtccgatcccatcgcccaatgcccgtaccacgagtcgcctatatgactcactgaagcctgagactcgcaagggtcctgatgtaactcgcgcctgcccgtgtaaaccgactgcgaaccgtgcgacacgtcggtccacgaccctgaccgtgtgctgaccggtgcatgagcgcaatacccgcgagacatcactccctccgcccacgatatccgtaggcagagcacagcgtaaatctccgtacagcatgactatgcacaatacccattaatgcccttgcggctccccgagtgatatgatcggccctaggtgacacccccaagggcagacccggtgcacggcattcctacgcgtgtagcaccgcctctgggcagccgagtcccgaccgactaacgcttagcctgccgcctgcactgcgcgggagcaggtcgcgcgcccgactctttccgctccttcgtattctcccttggtgagcccctccggctcgaccatgcacccggttccatgtgtcctccggtgccactttgcaagtcctccgttccctccccgacgtcagtctccacggcgggcgtactccgatgctcggctaccgcgctaccgtagccagccggtcttctccccagcgtggcatcagcatttcgtttcccctccaccgggtgcggacccccaaagcgtattaaacgcaagcaaggagtcgtcaaagcacgcgagaactgtctgtcgcgcgaggtgggctcccttactccctctcatcgctcgccgcttcgccaccccatagcccatctctccctcttgcctctctcagccgcctcgaacagggctgagctcaccgcccgccacatcgtgccctcgccgccgcgcgcgtcctccctgtctgagctcctccaccgctcgcggactcatcccccttagagcgcacccgttcacacagcattctctcagtccggccgttcagcgcattcacgtgtctctctgcctagagctacctcggggtccccgactgcgttatcaccgccggtcatttaccgctatccccccgcggccgttatcgcggccccgtccttagtcagcgcgcgaatagcttctaggaacccatagtgaagcggtgctggacgaatccacgtctccactcgctacctttcggcgcgccgtccgcgcgtgcacacccccgccgccgcccgccacctctcctttgtggtgtggtgtagatccctcaccgccagaccatcgcatcgggccattcctctccgcggcgcgccctgcgggcattcgctttcctcacggcgcccacgcctctatcggacgntcgtggggcgttctcccttctcgtccgttccatcgtgcccgagtactcgctcccgctagggtccctgcgtcctgcctcgcaggttctttcacctacacgcgcagcagtcaacactcgatcatatcggaccaggagcatcgcttcatgtacaatcgttcaagacttctcaatcaggcgtatgggagttcgtgcgtccccgtagtactggtgacctcgccgcctgccgctcctggcgtctagttgatcgggtggcggtctttaaaaacgggtgttgtcgcttccttcttcagctgcgcactaca

SEQ ID NO: 661677 - DNA, 398 bp, Homo sapiens
  misc_feature (95)..(95): n is a, c, g, or t
atttgaatgtaatagttaatttatgtgaatttctgagaaagaatatagctactgaatgtcatttagttattttcttatgccacattgtcaaatgntctgtgtaaaagactatttaaatgttttcctgctttgtaagcattaagattttaagaaaatattcaaactatttttataaaatgaagttatgatttttaacttattgattcctctttgcccctacccccccttttggaagaatattttgattccttataacttttaccctaaggctaaaaaatgttttttttcccaagtgcttcctggcccccagccacccaatgaaggggttcaaattcagtgttgtatgtatgtttatggcaacatttttgaaaataaaaaattaaatgtttttcttcaaa

SEQ ID NO: 661678 - DNA, 819 bp, Homo sapiens
  misc_feature (594)..(594): n is a, c, g, or t
ttccccaaagtcaaggcccgcccattcccggagggctttaagggtccaaattttcctgctcccccaccaacaagtggcggccaaggggccccaattggaacagccctttcccatgccccccgccggggagtctcccccccggtgagaaattcaacttaaaggatggtttttaaggttgctcgtttaatctttgccctccaccccgtttaatttttatagcttttcccaggtgttctagatcccaatctatttatatacaagttatatgttatgtgtgtgctcctttgtgtgatctggcagccccagccctcgagtgctttttccttctggccctgactctcctgactccccgatgtaatgtgcaggccacttcttaccccagatagcctcgggcgctgcctgtagtcatgctgacagctgtccagtaccccccaaaactgctcccagctggagacggttctggtttcaactacggtatattgatatcggaagtattctagccagacccccggttgggttttctagcaacatgtttgtattgcccagatcccccccccccctcctatagtgttgtcttcctgtgtgttccggggnttttgggcaactgggcctgcccggggaagtccttccaggtgggaggccatacaaaaaccccctgtgtgcccctgagcgtccccctgctgctgggcaactggaggactccagggggcccccggtgcctctccccttttttatcccaccagctcctgtgctgccctcccagttccgttttggacctgtaatactaaaggaaaaaataacctcctattttgtttaata

SEQ ID NO: 661679 - DNA, 585 bp, Homo sapiens
  misc_feature (1)..(1): n is a, c, g, or t
ngtaacagtttctaaaatgctaagaatcgcctctagagaagggattatctccgtcatctgttaaatgagatatgggttggactggtgattgatagatgaaatctgtcaacactgtgtatcaggttagactacctgataccaaataagggttggccaaggcgaatttctttgcaattgattaatacttcttgaaaaaatgaagcaccaaagctggtatactatgagacaagcctgtagtcccttgaagtatggtagactttttagtcaatcagcagccataatctccccttttaagaaaatcttctaaacccaaggcattgtcttccataaagatgttgactggtagaatcttgaacactctaaaaatgcagacacaccaaaaaactgccaacaaatggcctttttcaaaatgtcaaaggttcttcataccaactgctggtcattgtgtggggttttgaacactgtatgccaatacttaacctcacaaaatttatttgacaaagacagtttcatcagaacttgggacatgcatcaacttcatttcttctcagtacgctaaaaaaaaaactcgagactagttctctg

SEQ ID NO: 661680 - DNA, 559 bp, Homo sapiens
gcatctaccggccgactcctatggaagagagagacaacgatgtgtgcctctttctgtgagctgtcgccgcgggtagatttaagaggcgaacacaaaggagtgactgagccttggctctcttggatggctactggaatatggtacactgcagtgttactctccagtattgcagtctctagatggtaactgaaaaaacctgaaactctgaggaacggaatctaaggcttatagtgcttgagtactgatggggaacaactgcagcgaacagcaccagggaagctggaggatgctcagtaggtgaatcgcatcttttgtgagtagcccagttagtccaagttgggatggcaggccagctgcaccattgggggtggcccacaaagcagtaccagcacatcatcccctggagcgggcaggtgttcccggatcatgtcggcagtcacaaagcccttgctgtaggcccaatcttttgggggatgatccagagtgaaccagagcttacagcgattgggatagcgggactgcagttcctctaagtcctccgggagatgatatctttact

SEQ ID NO: 661681 - DNA, 420 bp, Homo sapiens
  misc_feature (18)..(18): n is a, c, g, or t
  misc_feature (53)..(53): n is a, c, g, or t
  misc_feature (74)..(74): n is a, c, g, or t
  misc_feature (410)..(410): n is a, c, g, or t
aaccccacaaaaattgcnaaataaaataaagcctatgaaactttggatgtacnacctataaatccccccttaantcctataaatttgtgtctgtaaccctgaaatagtttgaaaacttctttaaaaatctcttgtatttcatccgggcgcagtggctcacacctgtaatccccagcactttgggaggccgaggtgggcagatcacgaggtcaggagtttgagaccagcctgaccaacatggtaaaaccccatctctactaaaatacaaaaattggctgggcgtggtggcactcgcctgtaatctcagctacttgggaggctgaggcaggagaatcgcttgaacccgggaggcggaggttacagtgagccgagatcacatcactgcactccagcctgggcgacagagattnactccatctc

SEQ ID NO: 661682 - DNA, 509 bp, Homo sapiens
  misc_feature (11)..(11): n is a, c, g, or t
  misc_feature (436)..(436): n is a, c, g, or t
gggagatgccntaaatgtaagggtcgtctgggaatgggacttagtagtaagtgtgtgagacagtgcattaccaatgatatttttgtggatttaattttttgttagttttgcttgaattcctgttaattgcttctggacatgacctaaggctagcttgtccaaccttggccatgatggttttgaatgtggcccaagacaattcgtagctttcttaaaacattatgctattttggccaggcgcggcggctcatgcctgttatcctagcactctgggaggctaaggcgggtggatcactgagctcagaagttcaagaccagctggccaacatatgaaatcccatctctactaaaatacaaaaattagtcaggcgtggtggcgcatgcctgtagtcccagctactcgggaggttgaggcaggagaatcacttgaacccgngaggcggaggttgcagtgagccgacgtcgtgccactgcactctagcctgggtgacagactgagactccgtctc

SEQ ID NO: 661683 - DNA, 233 bp, Homo sapiens
atgggagatggtcggagggtactttctcttccgggtaatcctcgggcccagccttagggcagaatagaggtatgtgtaggctattttggtaatatgggcttctgggtcaaaatcccggtgtagctggaattcccaatgcccggtattggtcacagccctcccatctccctctcaccactctcaatctggggcctggtctggttctggaactgggtcagtttcactggtcaatc

SEQ ID NO: 661684 - DNA, 260 bp, Homo sapiens
ggctgatctagtcatctaagaccagtagctcacattttcgatgtgtactgggctcacctcaatgggtgatggtcttccgggaagggttttcacgaagatcttggaattttgactgttagcggataccagggatctttgggccgttcacattttcgatgtgtcactggtcactccagatgatggcttgcggcaggtctacacgaagatctgcataccaactctcagacgcaggacgcaggttgcaagggggtccgaacgtc

SEQ ID NO: 661685 - DNA, 385 bp, Homo sapiens
  misc_feature (385)..(385): n is a, c, g, or t
gatgcttgtggatattgtgctgttacttgtcagtgcagtgttataagctgacgcaggcttatgcggaggagaatgttatgatgttacttatactagcattaggtcttctatagggtgatagactgtaccaattgggctgtgaggagtatacttatatgctagggatttgcttaggtactgggtgtagaactagagcgctatcttaagtggagagtgcttttacgcctactatggctgttacaactactactctctctacgacgcactttcctagggatcgagctgatcctctttggactaaccgtagggttcacaaggcgatttagaggggtctgtggtgacctatatagcagcactacaatgctatctggcacgcagctatccn

SEQ ID NO: 661686 - DNA, 613 bp, Homo sapiens
agtggagctgtagcactcaccacggaggtccatggctatctatggccttgtaagccgtgtgatacaaccacgaacccgttcagatcaagaaaagaccgttgatcaggagaaggacttcgtcgtactctatttactggggacacacttacaggatttctccatagatgcaggtgaaggtacgctcgcaggtcgtggtcattgaggacaagtcgtacgagagatcccgagtacatctacagtcagccttacgtctgcaggtgtacccaagcagctccgaagagacagcgaccatcgagaacgggccatgatgacgatggcggttttgtcgaaaagaaaagggggaaatgtggggaaaagcaagagagatcagattgttactgtgtctgtgtagaaagaagtagacatgggagactccattgtgttatgtgttaagagaaaattcttctgccttgagattctgttaatctatgaccttacccccaaacccgtgctctctgaaacgtgtgctgtgtcaactcagggtgtgaatggcattaagggcggtgcaggatgtgcttagttgaacagatgcttgaaggcagcagtgtccttaagagtcatcaccagtccctaa

SEQ ID NO: 661687 - DNA, 1285 bp, Homo sapiens
gttcggactccccttcggacctattcttcatagaccgaatacacaaacattattataatacacaccctacaccactacaatcttcctaggaacaacatatgactgcactctcccctggaactctacacaacatatttagtcaccaagacccatacttctaacctccctgttcttatgacttcgaacagcatacccccgattccgctacgaccaaatcatacacctcctatgaacaaacttcctaccactcacccatagacataacattatatgatatgtctccaatacccaattacaatcatccagcattcccacactcaaacctaaaaaacagacgaaacaagagggacggaaggcacaagcaagaaactcccaccgaagagggcgaccaaggacacacagacggtaccgcagaataacgttggtaacaaagggagtacacaaaaagagagagacaagaaccacagacagacaagacgccaatagaggccgcacggcgtcagcccacaacgccacggacgcacgcggcacacacaaggaagaccacgcggccacacccaacgcacgaagcggacagccgccaccaaacaaggagaacgtgaccaacaaaacgagcgaccaacaacaaaccgtaccgaagcaagtagcgaagagcaccccgcacgcgccaacacacccaccccccggcgacacggcggcacaccaccgcggccccaccccacgagcggacatacatggccagtgcggcacgcgccacgaagaacaggcacaccacggaggcggcaagtccgcgaacaacagaaacacaccagggagcaccggacacacgagggggagaggggacgggaggaagcacgggggggagggggcgggggggaggaggggaaggaacagagaaagggggagaaaggggaacagagggggcgggaagggggaggggagaacggaagaggagaagaagagggaggcaggagaaacagagcaggagaggaggaggggccagggaagggggggggcggggggagcgggagagcagaggggggagagggcgcaacggaggaggggagcagggagggcgcgagggggaggaggcagaagggaggggggagacggcgggcgcggacgggagagagagaaggacaaggcgggcgggcgggggcggagagcgacgggagagcggagggagggagagggagacgggagagagagccgggacagaagaacagggccgggagaggggaggaggggagagagaggggagacgaggaggggaggggagggggac

SEQ ID NO: 661688 - DNA, 270 bp, Homo sapiens
acttgggcgtcgatgatactagatcacttctgagccatgtatctgaagaacgttccacaaagtggtgagtcagctacctcgtcctgtgactcacctgacgtattacagagagttgctttgtagaccttttaacagtttagaatgttccatctagctctgtacttttcttgtctagccagatgcctaggctgaaccttagacagaaaatgacctatttcatgttgattatcttgcctacatcaataccatgttgtcacagtgctaccggtc

SEQ ID NO: 661689 - DNA, 1637 bp, Homo sapiens
gaaagacagaaaacaagggcaaaacaggagatgaggaaatgttaaaggataaaggaaagccagagagtgagggagcaggcaacaagcaaggcaaagtccgcagcagggcagggcagcagtcagcagcatggcagggcaggcatccagcagcagcagcagggcaacaacccagcagcatcagcagggcaaagccgagagcagtgcacaggcagcagcccagggcagtgcaaacaagtggctgcacggaaatgcgcccatgctgacggcatgatgtacgccaggacaagccaataacgaccaaactaagtacaggggcatgcgctcatttcaccgtcaacggacgtactaaacacgacggcacataacacatgagtccatgcacactctctccagtccatatagccagcgcacgattgcatccaagcagcacattctcgcaccacactcatcgggcatccacagagctgctacgcgcactgcaagccacagcacgcacacaccacagccaagacccacgcacacatttgcgcgcgcgccagctcctcaccgctcgcgcatgccgacagtggtacagacattctaccacgcggaacgcactcatgatactaacacgccttagacgcggttcccaatacggcgcaacctgtcacgcaggcgatgagacattgccagggggacaccaccttcgcaacagggtgcaccactttgcaaacgaaacgcacttatcccttgtactcgctgcatacagcatggactccacattggtggcactgcggccacactttcttcagcaccaagagggccccacgctgaatagccctccaccaaacccgctactacgcgcgcttacatatcacttctctacctatcacaagggggcaactacacacgttcccccttggtctggcctaagaccaagccccctcttagattgcaacgcctaatatcaatagcaacaatgccaagcgctgatctcacttcacgtactcaggggccaaacacgggatccaactccatcagcacccacccttgctggcaaacaaacgcaaaggcacggactcggcgagacacactatgcatcacacacagactacccacaacacaaccacaacgttgagcgcaaaagcccgacacaacaacaaaaaacaacacggagcgtcagaccgaccctcacaccgcgcatccccacacccacacggcgcccccaacagccacaagcaacgctagcaccccaccgtcacccttgaacaaacaagaagcaccccccataagcgcggacagctacacactaaacagacccactcgacacgcgcgccgtccgaccaaaacacacccactaagcgcagcacccaacgcccacacggacaccaatacgccaggccaccccactacgaacgcgtcgccgccacacgagcccaccacacacccacaaaccactcaccgcagcagggcagaccaatcaccgaaccagcacacacccgccgcccacacacacccatcccgtgccgacaccggcgcgcgactcacacaaacgcgaccagacagcaaggacgccccgtacacccgtccccacctcccagcccccgacctgccgccagccatcgagtcaatcgagcgacccagcccagccacagcag

SEQ ID NO: 661690 - DNA, 812 bp, Homo sapiens
gaaattctatgttggaattagtgccgggcgcggtggctcattcctgtagtcccaaggtgctgggattgcaggcgtgagccaccgcacccggccagagtccagatcctttttatatgactttttttttttttcccttctgttatcagtgtccaaaatttcaaaatgacgtattaatacctgcctgtggcgaaggtctgttcccatgccaggcccctttccgagtgaactcttgtccttaattttctgggaaactttctgtgaatttcattctcagtgattttctcccttaggtggtctggtggttttcctttttctttttttttttaaagactgagttttcacgcttgttgcccaggctggagtgaattggtgccatctcggctcactgcaccctttgcctccggtgtccaggcaattctcctgcctaagcctcccgagtacctggggattacagggcaccctgccccaaaaccggggctaatatagggtattttacagtaaaggcaagattttcaccatgtgggtcaggcgggtctcaaactcgtgacctcgggtgatccgcctgcattgggcctcccaaagtgctggggataacaggcgttgagccacacaggcccggcagtgtcgtggggattataccttccgggaaatttcggttactcaaaagtgggtggacccagaattatacctctccctcccgtgtggtgcccccaacccccaatttttcatattactttggatccattaattaaggggaaggatacctccaagttgaattcatctgaatggtccctttatatccgtagaatatg

SEQ ID NO: 661691 - DNA, 416 bp, Homo sapiens
ctactgatgatgtggtgccgagatcttaggctacatcctcgagaaacgagaagtgcctaaagccgactggtatagcatagattccagagtccgaaatccatctctggtggtaaaaggcctcaaagagaatgtagactaccatttccgtgtttcagcagaaaaacagtatggcataagcaaacccttgaaatctgaggaaccagtcacaccaaaaacaccattgaatcctccagaaactccaagcaatcctccagaagtactcgatgtaaccaagagttctgttagcttgtcctggtcccggcccaaagatgatggtggttctagagtcacaggctactacatcgaacgcaaagagacatccactgacaagtgagtcagacacaacaagactcagatcaccaccacaatgtacactg

SEQ ID NO: 661692 - DNA, 289 bp, Homo sapiens
gtggggaggctctcctgatcagatgtaggcatttgctcatcctcacgggtcttgcgagtggataggcagccagctccttagtgcccctgagatataactgttgctggagattcttttggcatctgctgttgtgagcatgtaggctggtgtaagttgggtgtcaggtagattaatgctggtggtcctgccaggcggattgggcttcctagatgtctgttggccattgctgagaatcctaaggtctggctgtggctcccatatatgccctgttcagccagatggcttctgc

SEQ ID NO: 661693 - DNA, 675 bp, Homo sapiens
gaggaggagaatatggagaggaaattaaactgctgtgtgacgatagtgacagaggatgagaacgcgtgtctgaattggcagaggagaatcggttgctaaggtggaaaagagactggatgagctggaatgagagactggccgaggccaaagaagagaacgtgggcttgcattaggacactggatcagacactacaggaacttaagctgtatatgagcaaggaccagaagagtctcgttccaacagaaactctggagctccgtgggtctttctcttctcttgtaagaagttcctttcgttattgccatcttcgctttgctggaaatgtcaagcaaattatgaatacatgaccaaatatttagtatcggagaagctttgagcaccagttaaatctcattccttcccttttttttcaaatggcaccagctatttcagctctcttattttttccttaagtagcatttattcctaaggtaggcagggtatttcctagtaagcatactttcttaagacggaggccatttggttcctgggggaataggcagccccacactttgaagaatacagaccccagtatctagtcgtggatataattaaaacgctgaagaacataaccttttgggtcacctgttggtccaactataggagagaccagggacatcactgggtagggattt

SEQ ID NO: 661694 - DNA, 843 bp, Homo sapiens
  misc_feature (415)..(415): n is a, c, g, or t
tgtactcggacgaggcaggctgggattacaggagtgaactcccatgcctggcctcatgatcctttgtagactgagggacaaaagaagagggtgaggcctcccctctcctcagcgctgagtgcaaggaccctcaaggcaactcttggcaaagccccatgtttccactggctgtttaggtggaattgcgtccccccgcttccgtatgttgaagtcctaattttcgggccctccgcttgtgaccatatttggaagtagaggctttgcagatgtcatgagttaagatgggggcctcctggagcagggcaacatgactgtatcctcataagaagaggagagacagaaacagacacacacagggagatgccacgggactcccaaagccacaagaaagcctggaacagccccgccctcacancctctgaaggaaccagccctgccttcacctggatctgggacttccagcctccaggactgggggagaatgaaactctgttgtttcggccacttaggctggggtcctttgttatggcagctgagtgggtgcctccctctctggggacggccaatccctgtaggggaggcagtggtcccggtccaggaaggtgagagaggctttctcagtgtcttcacttcgccagctcacgtggagactggtagcggctggagcccaagctcttctggggagccggtttactcaaggtcacccttgatccagcggagcccaaggtctaggtcaagcttcctctggggatgtccccaagggctcttcaaacggtgtccgtcagccatctgcccagggccgtcagccctggaggtgtagccggctgatctgcggcggggtgc

SEQ ID NO: 661695 - DNA, 214 bp, Homo sapiens
  misc_feature (150)..(150): n is a, c, g, or t
gcaccgtgtcccatctggccttccttttctccttttcaatgtagcaaactccctatctgtcatgaattatcattaaaagcttccatatcagcagtagatgcaaggcctaataagcaacaattccagacaaccacaccgagctacaatgtncaatgcatgtctcggacctagtgggcacactactggcattctcgcacaacgatgaaccagtgac

SEQ ID NO: 661696 - DNA, 103 bp, Homo sapiens
gcatgctgagtgacgtgtatcaccactgcggtgcatccctccctagtacagttcgtcgacacgtgagcaccgtgctgactccaaatatcgttaagctggagct

SEQ ID NO: 661697 - DNA, 184 bp, Homo sapiens
aaggggacgctgccggacttgattaggatgtcgctgtcgtgcttcaacacaccacaagctgctatcctgacatgtaaataaatcgcgatagagtctcgctctgtacatccaggctgcagtgcagatgtacaaaatcgggtcactgcaacctctgcctcccaggttccagtaattcccatctcag

SEQ ID NO: 661698 - DNA, 288 bp, Homo sapiens
aaatgtttcaaatgtaattgttgctcaccagggcagttatcaatgcaattttatattccttgaggggaaaaaaaggggttttattgtacatgtccaaggggggtgataaaagtattatttgtttaatttaattggaacaacccattgttttaacccacccatggtttgaatttgtttttttggggtgcccggggcatgtaaaaccagtatgctttttggatgtaaattttaaaaatccagtgtgaatgtaggttttcattaataaaacattaccccccgtttactcca

SEQ ID NO: 661699 - DNA, 205 bp, Homo sapiens
gccctgcagcagactgcttttcccagtgcaaggccttcagcatggccacgacatagtggcacatagctcatgatcctagcttgtttttggtcaactgtcctctgtcatcttgtgtgccaacctatccggcgatatctattggagttatctgggtccatgctcagcaccccagccctcatcttcatctctccccagtcatctccgt

SEQ ID NO: 661700 - DNA, 233 bp, Homo sapiens
tgatgtatacgggcacgagcacgcttcccaagcttggtgtgggcaatgtctgcaagtcgatcgagcttgctggctgacaccctttgggatcttgtggcttaacctccttgtggctttacgattggccttgcatagcctcgtgcacgtgcactcactggccttgtgcattgtttggcctgcatcttctttagtgcccttttttgttgtggtattgctcatgcgctgggtacctg

SEQ ID NO: 661701 - DNA, 368 bp, Homo sapiens
cattctcctggcgtccgcctcccgagatcgctgggattacaggggtgtgccaccacacccggctagatttttgtatttttagtagagatggggttcaccatgtggccaggctggtcttgaactcctgacctcaggtaatccacccgcctcggcctcccaaagtgctgggattatagacgtgagccaccgtgcctggccggttcattgatcttcatggtttgatagattagtggtttcagcaaatttggggaatgtcagccattatttcttctaacatttttttctcctttctcttttccagtctgcttttacacatatgttgctatgtgtgatattatcccagaagtatctgaggcacagattgcagt

SEQ ID NO: 661702 - DNA, 558 bp, Homo sapiens
  misc_feature (3)..(3): n is a, c, g, or t
gantggggggggaatacccgggtctttaggacccccaagcccggatggtgtttggtcttttccaacccctagttccccgccttatgggggggtcctaattaaaacccttaaacaaatattggcctttttcaaagggcccaattttcctttttttttggccttaaccccgggtccttagggtggggcccccaaaaccccggcccggggttttttttttccccccccgctttatcccccaatgtgggggggggggggccccgcccccgtttttttcccaacccccttccctttgccctggggccccaaaattttcccctttaacccaagccctgcctttttcccccccccctttttccggggccctttgttttccatccccccccccctgcccggcccccggtttggaatattgggggggggaagggggaaggggtgggcccccccccccccccccccttaaagggcccccccttttggggccccccccttaaaggggggccggcctggggggggcccccccttttttttcttttgggccattaaactgttttggcccca

SEQ ID NO: 661703 - DNA, 417 bp, Homo sapiens
gcagaatagacatctagacgtatggctaactggataacctagagtcctcctgcaacaaaacaccaagaggtgtcgaataaattttttttattttttatttactcattttttttggagatggagtctcactctgtcaccaggctggagtgcagtggtgcaatctaagctcactgcaacctccatctcccaggttcaagcaattctcctgcctcagcctcccaagcagctggcactagaagcgcatgccaccaaacccagctaatctttgcatttttagtagaggcagggtttcaccatgtaggccaggatggtctccacctcttttttttctttatcttttcttttttattttttttttttacagaaagggagttacaccctggtcgcccgggcgggagtggcaagggcgcgatccag

SEQ ID NO: 661704 - DNA, 1131 bp, Homo sapiens
tctcgttggttccgttgcctgttgtcttttctttccttttctcttccgttcttacgggttcctcacttcgcggtctgctgttcctacgttttcctgattttctgggctcctttgcactgcacaatggcacgtgctttcatgtacttaaccattcaggcaggccttggccctgttctgctaccggggatggtcactgtgctacctttcacgtcttggtcccccggccgcccgtacacagagtggaccgacatgggctccgttgtcccttgtcacgcggaagaagcaccaggtacgggatgtctttctcccttttgttggttgatgctcgagaccttctttgttgctttttcgggtatctccggcttacggtgtgttctatcctgtgtcgcttctagcgtgcacccttgtggtcgccgttcgcattgggcgtccccctgtcttccagtttgtggtgccctattacgtaactgacggcatgacaatcctacggccactgcctagaagtcgcgattctagtctacagctctcaggtttgttagtctgcgtacggcaattggtggggttctccgggttaatcacttttaggatttaaacctgttgtcccggttaatgttgtagggtatatctagccagcagtgatgcacgaatctttgaacattcgcttatggggcaaaacatcctttaactttgggctcgtctgccagaatgcagggtctgggagtgtccatgcagttcccgctgtatatagagggaaatgacctggtatggcatacgagccccacaggtccaccgtctcccctcccctcatattgtaagaatagctacacactaacattttgggaaggagaggcacatgaactttttgttaacatatgtggtccaacctagagttatgggactctatcattgtcagctacttgggatatatatttaagtttctctgtaaatgtacgctcgttaaactcatattttataggtttcgatttcagactcctagcaaacatgtataagcctgcatagcagcgagtgcctcggcttttgccggtctctattagttctttactgtcactgtcatgtaatcaagctaattctctgtggatgttgctgtaaagtatgcatggttcctttcag

SEQ ID NO: 661705 - DNA, 964 bp, Homo sapiens
  misc_feature (948)..(948): n is a, c, g, or t
ccctattcttttcatggccctcttctcctctattccgacgtgaatcaaatctttctcaagtgcctataatatgtctccatttgtaattcccattggtagttccctctacgatagtgctacgacaccatcgttgttgacgaatcttgtccgaacactctttcccatctcagattatctatcgcctttcctgtctggaataatctctgggtctctcctataagggccactttgccttttggtgctttactcaaccttccgcagtgccttcttggttctatcctcgatggcttgtttccgcaatatggaggtcctccatttctcgtttgcactatgtgggtatggagtccaagtaagccttcgtctttagtttctctctctgaccgattcgtttactcacgtgaattccactcatgcctcttcgtttgttacgtcatgctacattgccaaaggcatattctctttttcactcaccgaaccacttttgtttcggcttaggacatacgttttgtcaagttaggtactgtgtacaagccatgaaatgaactatgtgaatgagatcacttcaaacatttaatgatatctgtgctgaaccaggatcggaatgcaagatcctcgtgatagtcattagtctcccgacgcttatcatgagtgaatcctatgtactgatcgggtgattcatgtgctcaatcggggatatacactatggattcatgcttgtgtgcgacgtcatgaggtctcgggcactatgctgatgtccgttccttagtcactaggattacggtaaccgtccgcacggattccaacgtgttgagtctgagaagggtgctcgccgaccgttccgctctatccggccaaggtgcttttctgtcaatattctatggaatgcaaaaggaggtttttgttttattttgtttttttgtaagcgcctcaagatcaaataaaatctanaggctgagcctctata

SEQ ID NO: 661706 - DNA, 147 bp, Homo sapiens
gtgtatcctagcgttttacttccatctttgcttgtagaatctagactattatcatgaacccaagatataatcagtatacttacttacagtatggccaaagtgaggcaggtctggaacgaggggagggtaaaagacaggagtctccca

SEQ ID NO: 661707 - DNA, 392 bp, Homo sapiens
ccgtgcgactgttttcactggcagacctgcttgttgcttttatggcacatttccgtgtttggatcattaactaaatgctcatcacagtttcataaatagaacgagttctactggccgactttgctgttactgcttctctttgtgcagtgttagtattcaccctggtcagtgagtgccatgctttttggtgagggcagatcccagcacctattgaattaccatagagtaatgatgtaacagtgcaagattttttttttaagtgacataattgtccagttataagcgtatttagactgtggccatatatgctgtatttctttgtagaataaatggtttctcattaaactctaaagattagggaaaatggatatagaaaatcttagtatagtaga

SEQ ID NO: 661708 - DNA, 249 bp, Homo sapiens
aatcactcggtaccggtcgacagcttcctgagtagctgggattgcaggcactcaccacaccccttgctaatttttgtatttttagtatcagatggggtctcatccatgttggccaagctggttctctatccaccctacctcggcgtcccaaagtgctgggattactggtctctagccgtcgcacccggccaattagttagatctttctacggaagaacaactgacttgctaattttagtctgtcatcat

SEQ ID NO: 661709 - DNA, 148 bp, Homo sapiens
aaactttctggcatatgctaatcatcatgaactcccaatagctgaagctgaatggctttaaagtaacagactaataagcgtctcatggatatagtattcctatttgacgatgccagctgacaggattcgaaaccgctacatccacatt

SEQ ID NO: 661710 - DNA, 922 bp, Homo sapiens
gaggcatgcaaggggggaaatgaagtgcatcaaccactacgggggctacttgtgcctgcccgtccgtgccgtcatcaacgactacatggcgagggacccccgccaccagtgcctcccgttcaaaccccaaccctgcccaccaggtatgagcccgaacgatcaggacagctgttgtggatgtggacgagtgtgcccaggccctgcaacgagtgtcgccccagccaaggactgccataacttgcctggtccctatcagtgcacctgcccctgatgggttaccgacaagaatcgggcccgaggttgtgtggacatagacggagtgcccgttaccggttagtgccaaggcaccgctggcggtggacaccttgcctggttccttccgctggcagtgcgacccgggccttccagctggggccctaaaaccgctcctgtgtgatgtgaacgagtgtgacatggggggcccccaatgcgagcaggcgctgttcaactcctatgggacccttccctgtgtgggtgccaccgtgggtatgagctgcactcgggatggctctcctgcagggatattggatgagtgtaagatactacaggctaccactgtcagctaccgctgcgttcacgaggcagcgccggttaactccggcaattgcccacaagagctttaccaggctgctggccagacgcctctgcaagaacttggtgagtgtgagtctgtgcgcccagtgtccagagccaaactgtgtaactaccatggggtaccggtgcgggacacaacggtggtggggccttctccaggttctagaaccggttcgcggcaacctatggagaggctacatggcggatacacctgagagggcggattcaccggccacgggaacgaacgggcgggatagaccgcgccgcgccggaggaaaaacgcggcgcc

SEQ ID NO: 661711 - DNA, 220 bp, Homo sapiens
atctcaggcaggacgagcgagactttgtctcacaaaaaaaaacaaacaaaaaaaaaagaggccgagcgttggtggttcattgcttgtaatcccagcacttggggaggccaaggggggacagatcacgaggtcaggagatcgagaccatcctggccaacttggcaaaacccggtctctattaaaatacaaaaatttacctgagggtggtgcccacaccttg

SEQ ID NO: 661712 - DNA, 1021 bp, Homo sapiens
gggccggatgcggtggtcaagcctataatcccagcactttggaaggccaaggcgggaggatcatgacgtcaggagtcaagaccagcctaggtgaaaaccccgttctccattaaaggaatacaataacaacttacagggttttgcgccaaccaacaaccacaagcgtaaatttgtggtatacaaatacattaagtagaaggacccgggtcttcacccaattgtttggtgcccaggccttgagttctacacccgttgcactatgtgcggaatcccagccccgtacctcaaggcctcccccaaaaaagtgcttggggacatacaccaagggggtgttgaagcaccacccaacggtcattggaccttacaaagtccgcggggtcctggagcttagtgctaatagtgcccacaacttattggggcaccccgttgaccttccagagggcctaattctcacattttaaggccctcccagctcctatagacaaattgccttgatagattccccttcaacacttttaaccgtgcgcatcctctgggtcccccacacaacgtggacactacttgttttggctcacagagctcacaggcggttacactctcacgtgaggcacgaattcattgccattgagacacgcagctgtgccccaatagcttgcttggcaaactaaacaattattgcccgtgacttttcacaccagttgacgttgggcacccactattttattactaaacagcacgcgctaaactggcaaacgtgcggctaactcctcatgtgataccccctttcacagcgtttacgaacacagtcgactaatagcacattgtaattcaacaaagaggcgcggcctttggctagaacactaaatggcgggtacagcggtatcactcccttgagatagaaccattacacgcaggaccatataacctaacatcaggcaatgtctcaacacaacatatgagacggcgctagcccaacagtggagacataacaaaacgttcaatcaacagcacgtcaaatgca

SEQ ID NO: 661713 - DNA, 859 bp, Homo sapiens
  misc_feature (4)..(4): n is a, c, g, or t
  misc_feature (282)..(282): n is a, c, g, or t
  misc_feature (286)..(286): n is a, c, g, or t
  misc_feature (297)..(297): n is a, c, g, or t
  misc_feature (330)..(330): n is a, c, g, or t
  misc_feature (333)..(333): n is a, c, g, or t
  misc_feature (343)..(343): n is a, c, g, or t
  misc_feature (352)..(352): n is a, c, g, or t
  misc_feature (355)..(355): n is a, c, g, or t
  misc_feature (366)..(367): n is a, c, g, or t
  misc_feature (373)..(373): n is a, c, g, or t
  misc_feature (413)..(413): n is a, c, g, or t
  misc_feature (424)..(424): n is a, c, g, or t
  misc_feature (428)..(428): n is a, c, g, or t
  misc_feature (440)..(440): n is a, c, g, or t
  misc_feature (442)..(442): n is a, c, g, or t
  misc_feature (445)..(445): n is a, c, g, or t
  misc_feature (452)..(452): n is a, c, g, or t
  misc_feature (456)..(456): n is a, c, g, or t
  misc_feature (459)..(459): n is a, c, g, or t
  misc_feature (468)..(468): n is a, c, g, or t
  misc_feature (470)..(471): n is a, c, g, or t
  misc_feature (476)..(477): n is a, c, g, or t
  misc_feature (479)..(479): n is a, c, g, or t
  misc_feature (492)..(493): n is a, c, g, or t
  misc_feature (504)..(504): n is a, c, g, or t
  misc_feature (508)..(509): n is a, c, g, or t
  misc_feature (514)..(515): n is a, c, g, or t
  misc_feature (517)..(517): n is a, c, g, or t
  misc_feature (519)..(519): n is a, c, g, or t
  misc_feature (522)..(522): n is a, c, g, or t
  misc_feature (527)..(527): n is a, c, g, or t
  misc_feature (535)..(535): n is a, c, g, or t
  misc_feature (537)..(537): n is a, c, g, or t
  misc_feature (539)..(539): n is a, c, g, or t
  misc_feature (546)..(546): n is a, c, g, or t
  misc_feature (552)..(552): n is a, c, g, or t
  misc_feature (564)..(564): n is a, c, g, or t
  misc_feature (570)..(570): n is a, c, g, or t
  misc_feature (584)..(584): n is a, c, g, or t
  misc_feature (598)..(598): n is a, c, g, or t
  misc_feature (601)..(601): n is a, c, g, or t
  misc_feature (856)..(856): n is a, c, g, or t
aganaaaggttacaaagtaatgcaaaaagactaggtacagttatttcaaaacaaatatttaaaagtataattttgcataacgtttaacattctcataatgtttattgctttctccacacagtagagaaatgaagtgcataatacatgctgtgtctcttatcttttaaacaaaaactctcacgtgcttgatttcagcatattaagagattattttgtcattaaacgaaatcgaaaaagacaaaaccacaaccccattacatagcactagtttaggcatgggcnaaanttacttatgtncatcccattgcatacattcatcttgttttgggntcnaatgcgatcnctaacttgncanagagctttaannattgtngcttttctcttcctagtgctccctccttgcttcatcaccnccagacatgtnactnctcccaaagggngncangaatagntgtngcntcattaggngnnaatgnngngggtaaatatatnngggtggtcctnatgnnactgnntngnttnggccnaactcctncnanctggggngtttcnagttggcatganttaatngcctctggtggacncatggtaggcaacngcncataggtgcactatataaatgtaaggtttatataaagaagcaccatattttgagccatccaaaaaaaaaagtgcctgggggcctgcaggcagagcagaaatgcttgttaatctgagaactgatgaaataattgcttataccaatgcactgctaaatgtcacctcttggcatgtctgtacaaagaaggcaaactaagataaaactagatctttcaacttgaaaattattttcagcagtcattttgaccagtaaaanctg

SEQ ID NO: 661714 - DNA, 1138 bp, Homo sapiens
  misc_feature (379)..(379): n is a, c, g, or t
  misc_feature (660)..(660): n is a, c, g, or t
  misc_feature (677)..(677): n is a, c, g, or t
  misc_feature (679)..(679): n is a, c, g, or t
  misc_feature (713)..(713): n is a, c, g, or t
agcggagcggggctcctccgtgagccgcgcggcgcgcttcgctgcctggcggcctttccccgagcctgagcccgacttcccgaggccgccagtcgtcgcctgcccgcagctctgcggagcgtcccggagccgtgaggtggcacggcggcggcatgtggctgcgctgtttgcgagctgtgcgggccgtggggcgcgctgctggctccacgccggactgaccagctagctcctcagtagtcctgtggcggcgtggcgtgccggcgacgacgtgaggccactgaacctggcggagcgtgctttagaccgagatatatggttaacaagactacagaggacaacggggtgccaggacacgatacagttccttccttctcatgangcatgcaataggtagagatatggcctgtggcttacgtgcagatacgattatacctggattgcatgcggaagcctccccaagaaaaggcactctttgggacaagaaaatcatttgttcgcatcaaatgggagaatatacaaatggcggagaaaaagaaagacggctgagttgggaagccctcatataaaggaaatgggttcattgcgtggacgcaaggacatagaggattgaggcaaagtcgcaaaaagaccagagcctggcttaaaacctagcttacgggncgtcttttccctagggnangcgaagggaaagcgattggggctggggctagggnggcgaaaaaacaccggaacggtgtagcggagaaagaaacaagacttgaattccctccaagggtggggttgcgcttaccaaaggggtatgtcagcgaaaagggagtttgaacaatttgccgaaattgggggagccggagcgaggagagtaatggtctgcgaagggaatgggtttgcgtatccacttccttggggaaaccttggacttaccttggtgtccttaggggggggtaaggagcaaggtcctaatcgattagagaaatacgtctaggtgttgactctcaaacggaatgaatccccgggggatagcacgcaaaaatttcgaactttggtgtaagaaggggaactttatttggtgccacttggaaactaatttctgttgtgcatatgaaacgcggatagtacgttaaagaaccatgatttgggg

SEQ ID NO: 661715 - DNA, 349 bp, Homo sapiens
cagccacaacgtgcgtaacctcattccacgaggaaacatcagaaaaactcaacatcggggacatgttataaaataactggctcatacgctacaacatgtcacattcataaggacaaaggaaggctaaggagctgttcctaattagagatgactaaatacaatgcattagcctggagtggatcctgcaagcagcaaatgttttctcattgggtgaaaagcacatctactgggcacccattggtgcacatccgcagtcaacgtctgtcagcactccagtaaatttcagacagcacattcaggtacacaggtcatcgatcattccaattttcaatgcacgttcgcacacaat

SEQ ID NO: 661716 - DNA, 238 bp, Homo sapiens
caggaggcagtattatctgcaacggggcatgatggagcatcgtgccagtgctgggctcttccgtatctagatctgagtcatggctagatgcatgcatgctttctgaagcttcactgagctgtatatctaagacctgtgcactttgctgtatgtatatcacacctcaatggaaacttgtaaaagaatttaattacttttttttttaaagcttctaagtgaactttacctaaaggtatat

SEQ ID NO: 661717 - DNA, 210 bp, Homo sapiens
catgagctggtaccagtttcacttcctgagagaagtctttgctgactctcagttgtttcaggtttccttctccctgtggatatcatagcatcctaagctttattttcatggcatgtatcatagttttttattagaatgtaaactgtctgagggtagggactttgtcttgctcatcactgtatttcctgtcctgaagaaaagagtgcttgg

SEQ ID NO: 661718 - DNA, 902 bp, Homo sapiens
  misc_feature (500)..(500): n is a, c, g, or t
agcgggttaccaagagctctcgaagaaggtgacttcaacatcaaattcatccgcctgataattctcttatatatccctaaagagaggaagagaagcgcatagaggagaagggaaataatgtctcaggagcctatcttacggttcatgagcgaaatcttgcggtgctcagttgtagtaacgcctacaactcgtcctctcgtgcgtagcgttggtgcgcggcgtaactacttgtcagtctggtcgcacggagtacagccgtctacgtgaggggtgatcaagtgacgcgaaccattctttgcttaaatgtgcgctccgacagcccggagccttgtacgcgggcggtttggctttcgttaggggtgtagagctttgttctagtagtccctggtagtggttggacctgtaggtgttgtgttcgatgtgtgcctggactgccttgtgtacttcctgctaaacacatctgtgcgacttacttgtcatgagtctgtaccgtggacaanaactccctttaggctggtcagagaggcactcaggcctattgagggttggaagccctaggttgacatcgctatgctgaggacactgttgaccgggcccaggtgatctccaaggagtacaggagagaggcatttacccctcgcgtaacctaagcccaagacggccgtcctccttctgcaagagcaaggtcccgtctgagaaaagcactgggcactgctatggttctgctcctctagaaggataacataacatgtcccataatcgggagctctcacccgctgctggcgctttggtacctgcgctctgtgcgagttgatggatagttgcacgaatcgtttcggtgaaaagacccgttgacgctggtgaaccaaccaagtcattgccctggaaggtggtaggtccca

SEQ ID NO: 661719 - DNA, 222 bp, Homo sapiens
gacaaatctccctgtcagcattcacttggtcttgataccctggacaacctcttaaagtggagtaccatctgtcaaggagctacagatcaccagagagaagcctcctgaacctgaagaaggatcagctgtagtaccaactagagcttagtaatttctaaaaacgaaaaaatgatctttttccgagcttctaaacaatgtgactataactagcataaactcatt

SEQ ID NO: 661720 - DNA, 415 bp, Homo sapiens
acacggcagtgaatcgatactctggacctagctattatcttgggtatggataaggagagctctgggcatctggaggttactatgttagggaaatggagttattgtattttttttttttttgggaaaaaaacccggccccgtggggcaaaagcctaccccaaaaaaaagggtgtctaaaatgtccacggtcccttctttggcctcaaaaagtgacttttatctcaaagaaaaaaaatggacaagatgctccactcccttggcccccttccctcccccctcctgctgctcctcagcccccagagattgaccccgggcgggggcgtgggtggcaggacagcccctcagattaggtcagcaacattgaggggctttcctcaagggaggtgttgtaaaggtctccgtgtccgaagagtct

SEQ ID NO: 661721 - DNA, 306 bp, Homo sapiens
  misc_feature (118)..(118): n is a, c, g, or t
  misc_feature (141)..(141): n is a, c, g, or t
  misc_feature (206)..(206): n is a, c, g, or t
  misc_feature (208)..(208): n is a, c, g, or t
  misc_feature (265)..(265): n is a, c, g, or t
  misc_feature (299)..(299): n is a, c, g, or t
actctgtctgccaaatatttgcacccagccaataccactcctgaaacagaagatgaatcattccatcacaatgtcgcaggaacagattgccagtcttttagctaatgctttcttctgncattttcacgactaaatgctaanatgaaatctgagtattctagtacccagacattaacttaatcgattgtttgagggacgttcatcangnaaaccctactgggttggtgacattaccagacagaagttttgaagattttcagaatgnggatttacctttgcccgattgcatgtacttaccngaccctt

SEQ ID NO: 661722 - DNA, 715 bp, Homo sapiens
atttcctgccgctccgcctgtcgcgtatctctgccggtcgcaatggaagaagagatctgccgctgctggtcattgacaatggctccagtgcatgtgcaaatgctggttttgctggggactgactgctccccgagccgtgtttccttccatctgtctgtggctgccccagacaccatgtggctgtcatgtgtgtgtgcatttgtgccatgaatggactcctactgtgtgtgctgacgatggcccatgatgcaatgcgtgtgcatcctgaccctgaatgtaccccattgatgcatggcatctgtcaccaactggagactgacatgtgagaatgatctggcaccacaccttctacaactgatgctgcgctgtggccccggagtgatgcacccagtgctgctgaccagaggcccccctgaaccccaatggccagacagagatgaagatgactcaggattatagtttgagacctatcaacaccccgtgccatgtactgtgtgccatcccatgccgtgctagtccctctacagcctactagaggctgcaccacatgggcattttggtcataggaactctttggacgactggggtcacccaacatcgttgtgcccagtcttacgattgggctatgcccatacacccaacgccatcctgccgtctaggaacttggctgtgccgggacctgaacgactacctcacttgaagatcctcactgatc

SEQ ID NO: 661723 - DNA, 269 bp, Homo sapiens
tgagcgagcacggatcgaaccttcatcctcacggatactaatcgaatttgtttctgctcctccacaatggaaactctgaagatactttctaatcttaaagtgccaagctattacttttacttatctttatatatgattaaatagggccacacctacagcatatggaggttcccaggctagggattgcatcagagctgtagatgccagactactccacagccagaggaactcgggattttttagccatgtctgcaacctacaccacagta

SEQ ID NO: 661724 - DNA, 139 bp, Homo sapiens
  misc_feature (84)..(84): n is a, c, g, or t
  misc_feature (91)..(91): n is a, c, g, or t
  misc_feature (98)..(98): n is a, c, g, or t
  misc_feature (129)..(129): n is a, c, g, or t
aaaaattaaaaaattagctggatatggtgcacacctgtagtcccagctactcgggaggctgaggtgggaggatcttttgaaccntggaggntgaggcntaggacatgtgatcatgtcactgcactctancgtgtcactc

SEQ ID NO: 661725 - DNA, 108 bp, Homo sapiens
  misc_feature (68)..(68): n is a, c, g, or t
ctcagcggcggtttcgagctcacctccatctccgcctggcgcgagtggcgcaacaagcagatccgcgncggcgatttccactccaccaacagcaactacgccaactcc

SEQ ID NO: 661726 - DNA, 1561 bp, Homo sapiens
gcttgccggcggtgcccgcaagtgaggctctcgtgtcttactcccgtctgaatagtaatagaatctgagggcggcttattgaacccctaccgacttagtccctacgcggatctactgactactgcatctgcaggactactgcagaaacaatgcgatcctttggctcaattgtacacctgtctatgctagtggaaaccatgcacaagccatactcaaggtggattgcgcctaggagtgctcgattctatgaccaaaattcaaatccagtgaagtcttccacacgaaatatcgtgtctactacagtatatttgccatcggaaccgagtagaagggtgctatgcagttcataacagtgcccaggatcgaatgttcgtctcacgctgacatggttcccttcggataacagacatagcccgttcttcgtacgtagtgcccatggcatacattcttcatagccgacacacagcatttggtgtgccgatactgtcggtgagaactccgtgcaaggtcgaacgtcccatctttatacttgacatcttggccggacactcttgggccccccgagacgggggcgaatatgagaacgccgatgttgggctttacccaaacaagccgggtctgcgccttagaagggtattcgtgggtcacattcactggagtttattgcagtggccagcaggcatactttcattaccataagcgagcaggtcacataaaaaagttgacgcataggattcaagttagcgtgggacgcttatatcaattccgcgagacactgcacgcgttgtatagaaagctccgtcaattgacgcacctaggaatgagcaaatcgtcttgccaagacaataggcactctcctttaagagagtcctgactaggtgccccctggggggttcctttgcggcaaggtaacgggaaaaccccacgaatggtccttcgtggaagccattcacctgcgccaggcaccgtcccacctcgaacccttaaaactagagcggacacacgctgcaacgtccgacgaagtccaagccgaaacggagctggggggaaggcacaccatggcgctgaagggcaaaggctccaagccacaagcgaaggcgcccgtgagcgggtagcgcacccgcggaaacggacctggccgaacctgcgcgcaccgagactacctgcccacaatgccgcaccacagcggcatcgcaccccccgaccaaagtgtcacccgttacctatatgcacacggtcgacgatcgtggaacagaccaccacaacgcctgaacacttcgcctgcgccgacagtgaagccccgccagcagcgacggcacgtacccaacacaaagagcgcggcaacgcccgtggacacagcacatgacgcacaacggtcgcactgtcccgaggcccacacatccaggggccaccacgtgccaggctacccggtacatcacgctagaacgagcgcgccgcgtggtggcagtctccagacgtcggtagagacccgagcagcgccactccacgagccacgcaacagacacagcagacgcacgctgcgagagaagacaagaccaca

SEQ ID NO: 661727 - DNA, 475 bp, Homo sapiens
  misc_feature (179)..(179): n is a, c, g, or t
  misc_feature (192)..(192): n is a, c, g, or t
  misc_feature (217)..(217): n is a, c, g, or t
  misc_feature (282)..(283): n is a, c, g, or t
ctaaattagtgcagtcaagttctaacatatctcattttatagactccattgacaatggtccaaccgaaaagaaaaattggaaatgactgctaaccagacctcgttatgaaacctaatgtatgaaaagagtcgactatggtgcaccgtctcgaactaaaactaggtatgcgatttttccngtagtttcgttgntagtagtgcgaagatcgtatttacngtaggctaatgtgtttcgaactagacgcgtagtaaagcagaaaccatatgtaaaagatgttgttnngttagcccgtcgctcgtcgtgtccccctgcagtctaacacgacagagactctctggagaccttggcaaatgactcagaggttggggctttctgagtaaaagggacatttctttaagcatcatctatcaaatttatttcaatgtatgatgtttttacaactggtcagttcttttgtattcttacagctatggt

SEQ ID NO: 661728 - DNA, 879 bp, Homo sapiens
gccgcctgggtgtcagcggctcggtcccgcgcacgctccggcgtcgcgcagcctcgtgcacctgcaatggtccgtgcgtcccgcggctggctggccctgactccgtcccggcaggaatgggccatgatttccctcccgggccctggtgaccaaacttgctgcggtttttgtcctggggctggtgccctcggccccctcgcgggccagctgcaatggacttgcccgccaaccggttgcaggccggtggagggaggggaagtggtgcttccagcgtggtacaccttgcaactggggaggtgtcttcatcccagccatgggaggtgccctttgtgatgtggtacttcaaacagaaagaaaaggaggatcaggtgttgtccctacatcaaatggggtcacaacaagcaaacctggagtatccttggtctactccatgccctccctggaacctgtccctgcggttggagggtctccaggagaaaagactctgggccctacagctgtccgtgaatgtgcaagacaaacaaggcaaatctatggggccacatgatcaaaacttagaatcaatgtactggttcctccagtcctccatcctgccgtctccagtgttgtgcccatgtgggtgcaaactgtgaccctgagcttgcagtcttccaaggaggtaagccccgttgtccattacaggtgggatcggaggctccatcccttccagactttcttttgccacagcattagatgtcgtccgcgggcgacttaaaggctcaccgaacttttcgtctccagtggtggggcaatgtttggagggccacaatggggtgggactcgcacattaatttgaccttttgattaaccaggcgctgccgcactgttctgcgctttggc

SEQ ID NO: 661729 - DNA, 318 bp, Homo sapiens
gggctccgtgtcggcagtaaagggtccaggccaactggcaaaagaggtattgttgggcctcttcagctagtcgggagatgggcttagctcaaggctaactgtagcttgttttgggacagagacgttagccaggagtagccactcggattgcagctagctagttgcgatgatccggtgtaaaggttcagagcttgcggtaggaatccggagatgtggtagagaaagagcagtctgatatgctctgggttgatgtcgcgctggtgtcctagttagctttgaagaccggtcgacgcggccgcgaatttagtagtagtaggc

SEQ ID NO: 661730 - DNA, 197 bp, Homo sapiens
agtccatggaacttcccggggggaaaatgaatgaatcataaccgatgaagttatattccaacaatatgatgttcagaaggagtcttgggccagatgagaatcaggaaactggtttcttttttttttttttttttttttttttaacatcttttttttttcttccatttattatccttaaaggtttaaggggacatggt

SEQ ID NO: 661731 - DNA, 507 bp, Homo sapiens
cttaaaaatttcatctttcaaagtcttctcgtgaccattcttttgtggctgaatcagccttacattaccattaaataattgtccctctaaaaataatcagccacgtaaagatttcatccatcccctcagccatcctcttttgagacccattagcctaacactgtgtctattccttgatacttttgttgttgttgcttttgctcttatctaaattagattaagttacataagtatctgtcggcatttgcaatatttttccccgaaatagtagcattagagagtggtaattttgctcttatttgaattgaaagccatgttttattacagagaaagtagagataattctgctaatttgttagcgacttattaagatattcactattttggggggacttaacatattttagcttgtgtgaatgtgtgtgtatgtgtgtgcatatgctcatgtatgagactatgtaaccagtttatattatgaaccagaataataaaaaaatcagaaaaagg

SEQ ID NO: 661732 - DNA, 177 bp, Homo sapiens
ccccccccccggttttggcttggtttcccaagggggggtttaggggaaggtgggtttccgcctttttttttttaaaaaagaaggttggggaattttggggggggggggggtcccccccttcccggttgggggggggggttgggattaagggttttttttttaaccccccccggccca

SEQ ID NO: 661733 - DNA, 904 bp, Homo sapiens
ccagctcgcgctcgctatggcgtcgctcagcgtgataggcctagccttctgggtaagtggggacgcggcgtgggagattcggcgtttcatgttttctgctgtgtccccgagtcctgaggcggacgcggaggctgcggggtgtccgggagcctgagagcgggtgcgtgaggcgggttggccgcctgttcccctggctgcggtgcatgaggcaggcttccaggcgcacgtaccgtcgatgaggacggggacttggttgccgttttccagtgacgaggaatatgacaatggccaggtcctacgtgaaggatgacatcttccgaatctacattaatgagaaaaaagagtgccgggggaccaccggccatcgtgtgctcaggaggcgccccggaaatggtgcacccaatgtgatctgctgatgtgctgcaatgggcctgtggtatggaacccgctactggtgcagcgtctggccagagtacgacttgtgtagcgtctgcgagggacaagggcttgctaccgggggcgacaccaggctcgcattccccagccccttcgggcacctgtctgagggcttctcgcacagccgtggctccggagggtgcacatggaccttcgggtggccatgatggggcatgggtccatccagggaaactgtagcccacgtcctcctcgtgcgtgtgaggtcagcctggcccacggagaatcatgcttctggtccattcggagtgatccgagtgtggatttcctggagaccgttggggagagtttgggggtggcctacctctgggctggattgatatcgatgtgcgccggctggaaaggaaccggtgacctcgttcagaaagtcggagcggggaagggtcacgcaggtggtttgccccgagcgtggactttgggccctctgcgc

SEQ ID NO: 661734 - DNA, 967 bp, Homo sapiens
gtgggtccgaagctggcaggcgtaggatgccagggatgccgcctgacattcagggcttccattaccaaccaggtgagaatcccacgcgagcccaagccccacgagttccagtttgaaatgggtaccttggtcgctgatccgtcaccataggtcatgagtgcgtaaaggagaggatgagaaatctcaattcggtcttcattcgtgaaattcatctgagaagaagtcttcatttttttcctaggagtacgattaccgaagccaaatttagcagcctaagccgccgattctactggccggcccaaatccgtcacagagcaatgctgcacgctgaacttagagaaaaatggattaccctagcgcaccaacggcatccaaccattcgtggagcagctttaaacacaccagctcattcgtcgtgggatttataattgttttttggttggatgggctggcggactcagaggaggctgatcggcctccacagtgcgacacagaggcttattcatcccatcggtcagggcaaccaggcgaggggccttctccccctccatgacactccacaggcagcctcgacgatcctgcaagattgctcccttgccaatgggaagggaaatacgctcaaggcgatctaggctctgtacgtaaacccaagaaatacgattttctgtaaaatacaccgccattaaagccaggaggccaagatggcaaagcggtatgaactccccgacgcagcttgggatctggttgcagatatcttcaccaaaaatcagcgcaccgggcgccctcgggccgatgatcgcctgatgctaaacggtattctctgggtgctttgctctggcgcagcctggcgagacatgcccgaacgattcggccctgggtcaacgatctatcaagggttccggggatggcgtgattgcggagctttggatcagatgctcaagggtcttcatatccgatggaatgagca

SEQ ID NO: 661735 - DNA, 235 bp, Homo sapiens
tttggtatttttagtaaagacagggtttcaccaggctggccaggctgttcttgaactccagacctcaggtgatctgcccgcttcggcctcccaacgtgctggggttacagatatcagccacctcgcccggccccagcactttctttcacagactagcatttacctctgactctcatattccccagttataatctctagttggttccctcataattaaataaagatatgataagta

SEQ ID NO: 661736 - DNA, 535 bp, Homo sapiens
gtgggtccgaagctggcaggcgtaggatgccagggatgccgcctgacattcagggcttccattaccaaccaggtgagaatcccacgcgagcccaagccccacgagttccagtttgaaatgggtaccttggtcgctgatccgtcaccataggtcatgagtgcgtaaaggagaggatgagaaatctcaattcggtcttcattcgtgaaattcatctgagaagaagtcttcatttttttcctaggagtacgattaccgaagccaaatttagcagcctaagccgccgattctactggccggcccaaatccgtcacagagcaatgctgcacgctgaacttagagaaaaatggattaccctagcgcaccaacggcatccaaccattcgtggagcagctttaaacacaccagctcattcgtcgtgggatttataattgttttttggttggatgggctggcggactcagaggaggctgatcggcctctcacagtgcgacacaagatattcatcacatcgtccaggcatccagggatcctctag

SEQ ID NO: 661737 - DNA, 268 bp, Homo sapiens
  misc_feature (175)..(175): n is a, c, g, or t
  misc_feature (184)..(185): n is a, c, g, or t
atctatcatctcgtgcatttatcatttctttgtggcgagaacattttaaaaatccctatttctagctattttgtaatataccacttaccttactgttgcgaaccataagtcaccctactgtgcaatagaacaccttgaacttattcctcctatctagttgtaactttgtacccanttgaccccnncctcccttccttccactctcccctccccagtctctggtaaccactgttctgttccctatgagataaaactttttttgtcttcc

SEQ ID NO: 661738 - DNA, 500 bp, Homo sapiens
acttctgtacaccaatacatacagttcattcagttatctctgagtaatcatgtactgtactaaagtctagtcagctaccactgcacctaagaactccccaatatttctctctaaccctgccctctctaatgaactccaggccaatattcctactagatacttctcttcttagacaatccatccataggcaactcaaattcaccataacccaaactgaactcactttaatataaagaggccacaaggaagcaaggaaaattcaactgttttctcagagttgaaaatgaacacaaaatggattacagcagtgataaaggaaccttaaggaaaacaaagggcttcccaaacctgtaagtcaagtgtgcattcaagctgaatgtactaatctgtctaaaaacaaatgccttaatcataaaaggatctgggaagcaaaagcaagcagaagaggtgaacgaagaggctttaccacagggaaaaaccaccatccctaaaagtaagct

SEQ ID NO: 661739 - DNA, 272 bp, Homo sapiens
tgggttcggtcctgtaatggatgaggttcacactagacatttacacaggcagaacgagggccacggtctttacatttccatatgcctccagtatatgtccagttgtctttttccctgccactgtatagtatgatggtggtcaggacctgggggtgcccttgagtgatctcaaccatacctctaagctgagaagggaaaggtcactgattattacttaagccagacttaaagaacagtcccaaagcttctgacagccaagacaatgtcctctt

SEQ ID NO: 661740 - DNA, 151 bp, Homo sapiens
atgtcccatctatgaggctacgtttgcccatgcatcagcgtctggactggctggtcgggactcactgactacctcatgaagatcctcactgagcgtggctactctttgtcaccactgctgacgtgaaattgtccgtgcattaaagagagct

SEQ ID NO: 661741 - DNA, 228 bp, Homo sapiens
ctgagttagtgctggtgggtcaggtgtctctggctcttttaaaaaatttggtcttggtgaatggagatcgaggaagctcgggccaagggaggggtgggctgcctgttttgtccagtttacaaatatccacgcggaacctggggtttctaaacttggatgtccgttacgtgtaaactgggtctgggatgcttggccctttccttgggtgaatgcagtcttcttttcttc

SEQ ID NO: 661742 - DNA, 379 bp, Homo sapiens
  misc_feature (106)..(106): n is a, c, g, or t
  misc_feature (139)..(139): n is a, c, g, or t
  misc_feature (204)..(204): n is a, c, g, or t
cgccctcctgcagacccagtgtcccaccaccacggtacccgggaccctcgggacaacggttccaggtccggggccctcccttataatgggcggctattggagaagnctgtagaaaaaaggggtcggagaaaaggaggancccccccaaggaggaggaggaaaaggcctattacccgcccgccccgcccccgtatttggagaccnatttgcaggggtcccaaaagggcaggctcaaaaaaaatttggccctgagtcgggaaagtttagtggtttgatctgccgtttttaacggagcttttgtatttttttttttaatttaaaggaaccctgataaagccctcccaaccccctcccgggtttaataaaaggtatattccca

SEQ ID NO: 661743 - DNA, 344 bp, Homo sapiens
actgatccttctatttacccctctattgagtccccacctccacatatcacatcaacaaactactaatacaccacccaaaaatgactaatcaaactaacctcaaaacaaataataaccatacacaacactaaagaacgaacctgatctcttatactagtatccttaatcattttaattgccacaactaacctcctcggactcctgcctcactcattcacaccaaccacccaactatctataaacctagccatggccatccccttatgagcgggcgcagtgattataggctttcgctctaagattaaaaatgccctagcccacagtacacatggaatgcacacaca

SEQ ID NO: 661744 - DNA, 341 bp, Homo sapiens
cactgaccccccctgaaatttttggccagtcctctttcccgcagctgcagagaggaggaagactattaaagggcagtcctgatgacatgtttcgtagatggggtttgcaactgcccctgagctggagctgggtaaggacctccttgatgcctgtcggcacttttgaaagggccaaggccaagaactcctggccagggctgcaagggtttgcagccaatgcagaaaatggggcaggtcctttgagaacccctccccacctaccccttccttcctctttatttctcccccattgtcttggtaaatatagacttgggaattaaaatgttggttgaagtttggga

SEQ ID NO: 661745 - DNA, 125 bp, Homo sapiens
  misc_feature (52)..(52): n is a, c, g, or t
  misc_feature (73)..(73): n is a, c, g, or t
  misc_feature (100)..(100): n is a, c, g, or t
ggggccctcaggacatccacgtgagcgtctgcccagctgcactgatattgtnttgcaaatccagatttgttgncattactgatgggcgcgtgaaaccagngagagatgcacaagatttacaggcc

SEQ ID NO: 661746 - DNA, 707 bp, Homo sapiens
  misc_feature (10)..(10): n is a, c, g, or t
  misc_feature (167)..(167): n is a, c, g, or t
  misc_feature (310)..(310): n is a, c, g, or t
  misc_feature (313)..(313): n is a, c, g, or t
  misc_feature (430)..(430): n is a, c, g, or t
  misc_feature (456)..(456): n is a, c, g, or t
  misc_feature (462)..(462): n is a, c, g, or t
  misc_feature (500)..(501): n is a, c, g, or t
  misc_feature (511)..(511): n is a, c, g, or t
  misc_feature (614)..(614): n is a, c, g, or t
  misc_feature (620)..(620): n is a, c, g, or t
  misc_feature (625)..(625): n is a, c, g, or t
  misc_feature (700)..(700): n is a, c, g, or t
aaacacttantatcacacatacttaatatattagatatacacaataataaaatcactccctacacttgaaaactttacagaagcatttttaattttacaacacaaagctcaaacgaacctacaataagtctagtagtctgtttacgtgccaagggataaggctgtanaataaattaaccctttaaaaatgtctatgatcaagtacaattttctttttgagttcttcagagcaatgaccactaagaaatatttttaaaggctgaacagaatccagcggcaatgaagttaattaaataagaagactaagagnaanatttatagttctatattaactatacagtatatttgccagcttaatcaaatcagtttatacacctttaaaacatgaatactgaacttagtaaaatgtttttttgtatctaattatttnattttctgtttttttttttttttttntttttnaaatagtttcttctctcttacacaagactttaaagcgnntccaaacagncaatttaacttttttggaaaatatattcactgcagaaatgcccacaataagccatgctatctgatggtatggtaatgtgaaatggcatggtaacgtgaaatanaaaaantttanctagataattctcccttcaaacctgaagcaaaagtacagaatgctgagttcattactttatgtatctattgtaantaggaat

SEQ ID NO: 661747 - DNA, 244 bp, Homo sapiens
  misc_feature (236)..(236): n is a, c, g, or t
ttttcttattatagaatgagtttcctaggaatattcctactccaagtcatagtagcctttgtttcctcctttcgtagttaatcctgtgtattagttcattttcatgctgctaataaagacatacctaagactgggaagaaaaagaggtttaattggacttacagttccacatggctggggagacctcagaatcatggcgggaggcaaaaggcacttcttacagggtggcggcaagngaaaatga

SEQ ID NO: 661748 - DNA, 147 bp, Homo sapiens
tataagtggtatcttaaagggacataaaatttaaaaatcttaaatattggtgaatatggacaggataacctaataatgtggtgatctacattaaaatggacaaactatggatactggctggctggtcaaataaaaaaaaagaaaaag

SEQ ID NO: 661749 - DNA, 1397 bp, Homo sapiens
agtggggtctcatcagttgtggggggtatgataagtgagctgctgggtgatgaggtggttcgttgtgtggagagtgaagaagagagtgggggtggcgccgacgagttggtgggagtgtagctcgtgtggggcgcgaactgaggtatggttgtgcagccaggtcgagagcagaggggtgttgtatgtgaggtgatgttacaaggtcgtttgtggatgcatatgtgtagggggatgggtcggtggtgtgtttttgtcgtgggaggcggtatgtgttttttgtgtagcaaggaggagaaggttgtgcgttgtagagttgttggaaatcagtgtgtgttgtgtgggagaggggagagagtagttggtggtggtgtgcggtggtgtggagagaatggtgttggtacgagcaagaggttggggggggttgttgggggtgtgggctggtgagtagatggggcccatcgtatgccgcaggagttgtttgagggggcgccgcgtggtgttgtagggggggcctccgcgagggtagcctggcgtgcccccacaggtttgtgagggggaagggtgggctgcttgttgggggtgctgaatagtttgttggtagagccccgcctctatctccttttgaattgcggtgggttctggcgcgaattgtcggggagaggtgccctcttgttgggttgcacgccaagtgtgtctcacccgcacagcgcttctcgccctgtgtttaaccccctcgtgcccccttttgaaagagtatagagttcacactgtttcacgcagggcacaagtgtcctgtgaacacaccacacacaggggtatttctttggcccctcgggggcccgccacagggagcctctcttgagaagcctctttctctgttgtggcgcctcttgttttgttttgttgcactacccctcgtgggttttgtttttcaatatggagctctttcacggagattttggaaatttcacataagccgtgtccacaaggctcgcacccacactttcctataaatgtgttaaagagaactttaagtgtgaccacggttcacagttgagaaggtggctgtttgtaagaacttaaccaccgccacggtgagaagcccacgccactcagtggccaaatcccttgaaatgttcttctttaaagaaaaatgagatgctggtcaatcgcagcgttcaagcactctcctggttttttgaatgctgtggctccctctgctaatctcacgtttcctggcttttcctccctcagccccttttcaccccctttgctgtcctgtgtaagtgagatttggtgagaaatcgttgctgcacacccttcccccagcacccactttatgaggtctcaagcttttattattgccaataaaagtgctttatgccggcttttcccca

SEQ ID NO: 661750 - DNA, 1572 bp, Homo sapiens
ggttcactctacagcccggcctgttgcctcaactaccacgtgcaggtcgccaccattcatgctacgtgtagggtacactccatcgtcgatccgctgggatgatgactgcattaccatcaggcgtgtcccgcaaggttggatcgctggacgcgagtctcgaccagctggctctctggagcatggctcgctgctggcgccacaagcatggcccacacctcgctcccggccattgtcgctttgcgtctcctgcttggggtctgccatgcccatgctgccattcaatctctgtgccgcgaggcactgtcctggacttattctctcccacctacaatgaccgcctctcaagacgtctcgaggcacatgggcgcgctacgtggccttactcagttacatgtcttcacgaatcacgaaggtgaaacgacctgggggctcacggcggagttcgcatcgtcccaaggccatgagtgatgcttcacggcctcgtttgacccaaacggtagacgttgcttctgcccgcgggtgcccgtgtgtccacgtctgccaaatctatccggtgctcggcgtatcagtaccgtagtcgcgacgacctgtggcgtccctcgtactttgagggggcgtcacggtcctaggcgtgccgtggcgggcactcggcccatgcgccggatggaactcctcaccatcgtggccagggcgcatggttggaccaccctggtgcggaggaccccttatttcccaagtttggccgaggaccggggggcctggcgggcttgccaacgggcaggcttggccgctttggtcccttaggttggcgaaaggccttgggggggccttgttggaacactgggcctttggcgaggtggaaccctttggcggtgtcttgcacccgggcatctgctgcaattgaaggggcctgtggggcttaggcgcgccccggatcacctgtggcgcggtttggcccgtgcccatgtgccctgtggccgttgcgggccacggctttgacctaggcggggcttccccttttttggcctttcccccgaggaactcctgttgaccggagacgcccggcctccgccagggtgacaccctactaaagaaacgctgttcaacccttggcagcacaggtttggcttgagttggaggaaccaaccaaccgtgcgacctttccacaccggactcgggagtttgcatgcgcattggccatgcgctggggaaagactaggcagtggcattggtgtggcttattgtaaccggaacttaaccgtagcaagtggtaataacagaagggagccctttggtgactaaagtcggctggagagaccccagtccttgcattggaataacaggccttgatacctacccaggcgaagcaaagcacacaccgggaccccggatgaaggcccttggaaatggccacggcaccacagagcccacgacctatcacacccaggttggagcagtaacccactagcgacggcgcgacccagaaaaacgccaggcacacacgcggatcttcacaattggccacaccatacgcaccagctgagcagggggctactcttggcgactccccag

SEQ ID NO: 661751 - DNA, 151 bp, Homo sapiens
ttaatctttactcctacatactccccccattattcctagtaaccaggcgatctgcgactccttaaatgttaaccatcgatgtagtactcccgctgtgaagcccccatacgtataaataattacatcacaagactgtcttgcactctgtggt

SEQ ID NO: 661752 - DNA, 663 bp, Homo sapiens
gctgagctgtgtttcgtcggaagctgtctctcgaggcacatcacgctggagcttggattctgtggcagctgtcagtgactggagcccagtcatggcatgctgcccccgttcccagctgagatgttgccaggcgagcgcttctaagtgcaggcagagtggcgagcatctggtgactcactcgtgcagaacttgctccccacgtgccgcatgtcgatgagcgcggccagtcctatccctcgagggcaggtcccgtggaccagtctcactgttttgctaggtgccagaggagccaagtctattaaaatggaagtggtattctgtgatggccgggcttgctgcatcgatgtaggcagctgcgagtttgcggaagctcgtgcctatgggcggactgggctagtgaggactggaggcatgggggctcatgcttccgtacagcccgtagacgtgcgagctcatggcgaaggttggcggactgtcatgtggcttggtattaggtcatggcccgtcgatggttgtggggtattgaatgtggtaagtggcaggcaagtgtgggaaacgtctgtgcgaggtgctggcttgagacccccgaagcgttccaccgtgtcccgtctcctatgtggcagctggggagcaagtgagatgtggactttgtatgctggccaa

SEQ ID NO: 661753 - DNA, 823 bp, Homo sapiens
  misc_feature (12)..(12): n is a, c, g, or t
  misc_feature (93)..(93): n is a, c, g, or t
  misc_feature (99)..(99): n is a, c, g, or t
  misc_feature (108)..(108): n is a, c, g, or t
  misc_feature (111)..(111): n is a, c, g, or t
  misc_feature (135)..(135): n is a, c, g, or t
  misc_feature (154)..(154): n is a, c, g, or t
  misc_feature (202)..(202): n is a, c, g, or t
  misc_feature (229)..(229): n is a, c, g, or t
  misc_feature (245)..(245): n is a, c, g, or t
  misc_feature (259)..(259): n is a, c, g, or t
  misc_feature (299)..(299): n is a, c, g, or t
  misc_feature (321)..(321): n is a, c, g, or t
  misc_feature (368)..(368): n is a, c, g, or t
  misc_feature (372)..(372): n is a, c, g, or t
  misc_feature (379)..(379): n is a, c, g, or t
  misc_feature (409)..(409): n is a, c, g, or t
  misc_feature (423)..(423): n is a, c, g, or t
  misc_feature (457)..(457): n is a, c, g, or t
  misc_feature (534)..(534): n is a, c, g, or t
  misc_feature (561)..(561): n is a, c, g, or t
  misc_feature (578)..(578): n is a, c, g, or t
  misc_feature (681)..(681): n is a, c, g, or t
  misc_feature (804)..(804): n is a, c, g, or t
tgttcgggaggnggcagggggcccgggcagggggagtgcgcttcccaggcaccattcgcttaaagtgtgttaatgatttgtccagcaagtttntttacnttcccacanccnttttctcaacgtccccccagagtnttcaggggggccttcgacntgcaaaagcttcacaggagtgcgaggggccccagctcccaggggggcngatggagcttcaaacggtcactttttncatcacgtttttagcnacgtggacttcgtntgcttggacggtgacagctgctgactggcggcatatgtgntggtgatttttccagtccttgngttggcagaaggtggagcagtagttgactttgtggcagctggtgcantcgnttatagntttctggtcgaagttaaaaaaggattgttntttccgctctggtnaggtggattttggcttggtttgtggcagcttttnggtaggtgctggcatgtttggtttgtttaaacagcgtttttagctgctgcgctgtgttgagcaaggagttgaccatnttttctaggtaaagccagctccgcggnctctgacagctccagcncattgatcaacgcgggaggtgccgctttggtgggagtcgggggtgggaccgccagcgcaggcagggatgtcaacactatttttgggatgtgacgttggcaacnagctttggtgggagtcgggggtgggaccgccagcgcaggcagggatgtcaacactattttgggatgtgacgttggcacgcgcttctggaaacggtgcgatctggcagctgtcctgatagcggnggtagtgaggctcagggtg

SEQ ID NO: 661754 - DNA, 744 bp, Homo sapiens
  misc_feature (339)..(339): n is a, c, g, or t
gggagcgtcttctggaccattcgttgccgccgtcaccaagtgagcctaggggacgatgtacctagctgtgccctcgtagatcccaggtggcctctgtgctagaggcgtaggatgcctcccgcaactccatagaatacgcccgggtggtcacccgtatgcagtcctagagcaaggtccgagatggcagccatagatgcgtcgattcctggtcgtctacccaagggagagttccagagggaggctcgagatcgacaataccactcacccggccttttgtcgagattgtcccaaaaccaacgacacacctctgtcacgtccgcggcccctactgtgctgggnttccccactgctcctcgcctaccccctgctgctccgctgcaacccgggcttcacacggccgtgccttctcccctctatcgcacggcaccccagccccacactccgctcgctcgacccggtgctcgccgaccggcacaccccccccacgcaacgtcccgccccgcttacccttcccccccccgtgcccaccctccctcgctcgccgctacttaccaccctttcgcccccgcacgccgtgctccccctctcgcacaccacctcgcggccgctcgccctgcgcccttcccttccaccctcacgccttggcgcacgcccccccgccgcgcctcgcccccctcttcccccagtcctcgccttcccagctgaaccctctcgcctggccccttcccgccccatcggccctgg

SEQ ID NO: 661755 - DNA, 820 bp, Homo sapiens
  misc_feature (205)..(206): n is a, c, g, or t
  misc_feature (221)..(221): n is a, c, g, or t
  misc_feature (265)..(265): n is a, c, g, or t
  misc_feature (276)..(276): n is a, c, g, or t
  misc_feature (281)..(282): n is a, c, g, or t
  misc_feature (298)..(298): n is a, c, g, or t
  misc_feature (310)..(310): n is a, c, g, or t
  misc_feature (332)..(332): n is a, c, g, or t
  misc_feature (394)..(394): n is a, c, g, or t
  misc_feature (460)..(460): n is a, c, g, or t
  misc_feature (572)..(572): n is a, c, g, or t
cgaccgagggactgggagtcgttagtgagagtttcactcttgttgcctaggctggagtgcaatggtgcgatcttggctcatcacgaccttcgcctcccaggttcaagtgattgtcccatttcagcctcccgagtagctgggattacaggatgacgcggtcatggcacagaacttgcacccgcagggtggccgtctaacacgctgnnccatcgagcacatgnacagcacaggacacaggttccgggggacccccttccggggcccntaattgggggnacccnnaggaaacaattcgacnttgggaaagggnccccccgggggggggcaaaaanttgggccccccgggaggctctttgtgggggggggaacaaaaactaaaagcgggcggcacatnttccgggaaaccttgtgccatttggatataagtctccctcaatcccccttttgtccaaaagccccntgttgcgcaaaccaggggaaaaatatttccccgcccgttttgggaggccttttctaggaaaattttttccccaaaagaccagcccgtacccggcccagaaaagggacgaacnttttgcgcgggggaccccccctgtttataaacacccgcccctgagtgttggcggcattttcccaaacactttttggcgccaaaaccagcgccgccccctggggcgatcttttgtggggcgaaaaggcgggcgggggacaccccacccgcagagaaagtgtttatccccaccccccaacttttgggggcgcgggcgacgcaacaaaacggggcatctttttataaaaaccccccagagaacatcttttg

SEQ ID NO: 661756 - DNA, 163 bp, Homo sapiens
aacaaatgtctaaaattatatggaacctagaaagagctgaatacccaagcaatactaagctgaaagaacaaaatgggacttcaaactaaagtgtaaggctacagtaaccaaaatagcatggtattgatacaaaaacagacacatagacctattagaactggct

SEQ ID NO: 661757 - DNA, 161 bp, Homo sapiens
cgcgggagtacttaggtcgatggacctcgcactcagtgaggagacggccatgcctttcaagtgcatgcagcgcactgatttcatcctctagtatccgcgagcgtgcccacctagaagtatgtccgacaagcctggcagaaggcagacatcaatactcatgt

SEQ ID NO: 661758 - DNA, 312 bp, Homo sapiens
tccagttgtcaaatgatccttttttgaaatgttttcctttgggcttaactgggtgggctttccacagcacccctgttgatgtcatcgatgatgtcatgaggatgggggcctttaacattacagcccactgactgggcagtccccaggatctttttaagggttccagaaagttctttggctaaggatcggggccgcatttgtcgagcaatgttgacaatttcatcaaaagggattttcccactgggtttaatggttttctggttctttctggcttttgggggttccttgagggctttgatgatcagggcaaag

SEQ ID NO: 661759 - DNA, 275 bp, Homo sapiens
cacccagctcaagccttcgctcccagcccagtagacacacacacgtagatactactactactaatacggttgcgtacacgcgagggtgatccgattacgttagcatagcactagccattatttttttcatttcatctcatccgggatctgtcagttacaccacggtactagtagtagttgctgcggcgattccccgggaaaggaaaaagaggttgctgcggtgattcccgccatggaggtgtgctgctgctccacctcgtcctccctcctcgcct

SEQ ID NO: 661760 - DNA, 99 bp, Homo sapiens
gccccttttttcggggggcctttttttttttaagggtcccttaaaaacccccaaaagggggactttgcccccttttttcccccccaaataaaaccccca

SEQ ID NO: 661761 - DNA, 463 bp, Homo sapiens
  misc_feature (97)..(97): n is a, c, g, or t
  misc_feature (153)..(153): n is a, c, g, or t
  misc_feature (204)..(204): n is a, c, g, or t
  misc_feature (274)..(274): n is a, c, g, or t
  misc_feature (349)..(349): n is a, c, g, or t
  misc_feature (402)..(402): n is a, c, g, or t
  misc_feature (450)..(450): n is a, c, g, or t
attggcaacagacacacccagaaacaatactttggatgctttaatcccatcaagttgacacttaatattaaccatcacaggggaggtgatagccaangggtacagagtttcctttggagataataaaatattgggagaaaccagcccccgatntttcacgtaggttcttttctagtttccctaagtgtcagccagtctgagaantaaagggaaagagtacaaaggagaaattttaaagctgggtgtccaggggagcatcacatgtcagcaggtnccgtgatgcccccctgagccataaaaccagcaagtttttattagcaattttcaaaggggagggagtgcacgaatngagtgtgggtcacagagatcacatgcttcaagggcaacaaaagatcacaaggnagaagatcagggcgaaacttagaatcacttaatgaacttccatgtccntctgtgcatgatt

SEQ ID NO: 661762 - DNA, 696 bp, Homo sapiens
atttttgtgggggtttttccccaagggggaaattttttgggccgagaaaaacccccaaatttccgcgcgccgagagacttttttttaaaagggcccccccaaaaattttttttcccaaaaaccccctttaagcccctaaaaatccttttgggggcagaaccttttttttttccgcggcaaccctttcctttttttaaaggggccaactagttcccccaggggggggccttttccttaaaaagaaaaaagattttcaccaaaaccaaggggaattttttaaaaaaaaaaaaaccggggtgggggggtttttccaaaaaaatgggcctttaaaaactaaattccctccaacagggaaagaaaacctttttcccccccctaatttccaggggggaaaaaacaacccacttcccctttttaaattgggtgaaaagcccacttttgtttcaaaaaacaaatcaaaaaaacttttttaatttttggggagccctagcccttttttaatataaaaagcgggcgggggggcccctttcccaaatgaaaaagttcttgcccaaggggcccccccaccctttttaaaatatttttttttaaactctctgaacgggaatctttataattttgcccattgttgagccgggaaccaaaaaataaacccttgtttttgggggggaaacataaaaaaaaaaatgtgactga

SEQ ID NO: 661763 - DNA, 1147 bp, Homo sapiens
gttgttgttctttgagacagtcttgctctgtcacccaggctgggagtgcagtggcatgatctctgcaacctctacctcccaggttcaagcaattcttgtgcctcagcctcccaagtaactgggatctacaggtgcacgctaccacacctggctgatttttattatgtctttagtagagacagggtttcaaccatgttgcccaggttggtctcaaaactcctgagctcaggcaatccacccgccttggcctcccaaagtgctaggattacaggtgtgagccacacacacccagactatttttatctttcgtttattaattttacaagttggggggggtctcaagtttgttaccctggcatggtctcgaactcccggacttaagcgatcctctgggctccaagacccaacgtaccagtctcaggtattctttactaaacagatcacataaccttaagcttctcttatctgcatgccatgtgagatgtggcttttcacccttccggccatgatcggtgaggccttcaccaagaccacgttgggcaactggtaagcgtccaattaaaaccctcgtgttgggtacaactttaacaacacacaacacattccaccatcattcgaccagacaatactaacgaatcgctgagttggtggacctgcacgaaggacgatacaccaccgacacatgaccgcaccacagtcgcggaagctacacacgcgaagtctcccgaacgacacccacagagcaattcaccacaaccccaaaacagtcgtaaacacaagtcacacggcgacaaagccaagataacgagccacccccaaagcgatcgggcacactgggtcgcaacagcgggcgacccaacaagagcagacgaccggagaagcagcacgccagaagagaggagacttggataccacacaagagcacccgcagaaacgcaccatcagacacaacaagcacccagcatagacaaacgacgctggacgcaacgcaacaacgcgcaggaacacgagaactcgcccacatgaggggatcgcacccaacaggacagcatagccacggcgatccgagcgcaggtacagaggaggcacagaaggtgttcatgtaacgccaggaaagacgacacagcaacgcacacgcagcgcgaac

SEQ ID NO: 661764 - DNA, 360 bp, Homo sapiens
gacttcctaagtaacctcctatttcatacatgtcattaaagccatttcatgggcatgtccctacagaagcatttcaagaagcagaaatttctggctgggtgcggtggctcatgcctgtaatcccagcactttgggaggccgaggcggacggatcacgaggtcaagaggtcaagatcagcctgaccaacatagtgaaaccccgtctctactaaaaatacaaaaatcagatgggtgtagtggcgcgcgctgtaatcccagctacttgaaaggctggggcaggagaatcgcttgaacccgtgaggtggaggttgcagtgagccgagattgcaccactgcagtccagcctgggtgacagggcct

SEQ ID NO: 661765 - DNA, 264 bp, Homo sapiens
caccctggcgcactctctggcgcaccgtgcgacggtatgcttgccccacaatataccgatgcgaggccaggccgctctggtaccgtctcaaggtgttttgacggcttcccaccgcccctacgacctcgaaaaatgcggatgcgtggtcccgtgctgccctcaacggtcgctgcgtctgcaagcctcccagaaatgtttgcctcattcttgggtcgcctgtgctcacgcagcgttgcgtctggaagctaccagagacacgctgac

SEQ ID NO: 661766 - DNA, 616 bp, Homo sapiens
aggatcttgaacggtctgttactcattcagctgataggaaggtaccgctgttcatgccattgcgaggcaagctgaccggtgccggcatcacggcaacggcatctataccgtagtgacgtgctacgcgaaaaagggccgggattgaggtcgacggcttgggggtccatggactcagaagcgaccgcagccaccaacgccctggagcatgaagcagatatcgccaaggtccaggattggcttgggacatgccaacatcagcacgaccaaaatctacgatcggcggcagaatcgaccagaggactcgccgacctataaagttcggtattagaaaatcatgatgactcgaagctccactaggctacagagattctgtacgtgcatgtgcctcaacatcattactcatgatcgtccttcgttgtcgactcattcagcgtagcgtgaagctatccgccgagatgggtttccttcaggcacaaaaaacccgccaataggcgggggcatgtctaagactggtcgtctgtatcgaagcggtccagaagccttggaagccaagcgtagagccaggcaaaagctcgaaccataccgattgctttcgcacacagacataccaagcgtc

SEQ ID NO: 661767 - DNA, 239 bp, Homo sapiens
catgcatcgtatttttaatatatttattagagacagggttcaccagtattgggcagattagtcttgaactcctggcctcaagtgatccacctccctcggtcttccaaagtgctgagattacaggcatgagcaaccatgcctcacctgtcaaatcttaacttaaaagcaactgtagtttcttcaaacattcttctgtcgaaagaatgcactccttttggtaggtatgatgcaggacgggt

SEQ ID NO: 661768 - DNA, 986 bp, Homo sapiens
  misc_feature (187)..(187): n is a, c, g, or t
  misc_feature (265)..(265): n is a, c, g, or t
  misc_feature (417)..(417): n is a, c, g, or t
  misc_feature (438)..(438): n is a, c, g, or t
  misc_feature (449)..(449): n is a, c, g, or t
  misc_feature (470)..(470): n is a, c, g, or t
  misc_feature (497)..(497): n is a, c, g, or t
  misc_feature (508)..(508): n is a, c, g, or t
  misc_feature (552)..(552): n is a, c, g, or t
  misc_feature (568)..(568): n is a, c, g, or t
  misc_feature (603)..(603): n is a, c, g, or t
  misc_feature (610)..(610): n is a, c, g, or t
  misc_feature (682)..(682): n is a, c, g, or t
  misc_feature (686)..(686): n is a, c, g, or t
  misc_feature (726)..(726): n is a, c, g, or t
  misc_feature (734)..(734): n is a, c, g, or t
  misc_feature (810)..(810): n is a, c, g, or t
  misc_feature (971)..(971): n is a, c, g, or t
gaccggaagagacacgcggggcttcaggctgctgccccattggaagattactccccaggcttcccttgccccaagcagtgagctgactggaatggtaccccgggaggcccctgagtctgctcagtgcctgtgcccttccctcaccatcccaaatgccaaggatgtgcttcggaagaggcacaagagnaggagccgacagcaccagcggttcatggcccggaaggccttgctgcaggagcaggggctgctgagcatgcctccaganccagggtcctccccactgcccacccctttcggggcagcgacacaactgaagctgccagcagtgggaagcagtgtctgagggctggatctggcagtgccccatgcagcagaaggcctgctcccgggaaagcctcagggcccttgcccagcaantgtgtggctatcgactgtganatggtgggcangggaccccgagggcgggtaancgagctggcccgctgttccattgtganctaccatggcnatgtcctctatgacaaatacatcaggcctgagatgcccatcgcngaataccgtacccgcnggagtggcatcactcggcagcacatgcgcaaggcngtccccntccagggggcccaaaaagagatccttaagcccctgaagggcaaaggtggggggggggcacgcgctgcacaangacntccaggcgctcaagtatgtccaccctcggagccagacccngggatacnacctatgtcccaaacttcctcagcggagcccgggcctgccacaaccccgggcccggggtctctctaaatggacctnggccctgcaggctgctgcaccaagaagatccaggtgggccagcacgggcactcatcagtagaagatgccacgacagccatggagctctaccggctggtggaggtgcagtggggacagcaggaggccgcagctctggacctgcccgaggacagagaactgangcagacagacatgga

SEQ ID NO: 661769 - DNA, 323 bp, Homo sapiens
  misc_feature (15)..(15): n is a, c, g, or t
acggtgacgagtccntagtccaagtaagcggaagacggatgatgagtgtattaacaagttaaggtgatgcgtgggccaagtacattgcagaagttaaaatgtacaaagtctctaccagtgcggtgactatcatgaaactcggcccctggtgaaatgacgcccctcccccacctgcccatggtcctgggattctctgcgcatgtcattactatttaatgcagcggttgcggcgactgccttccctgagaggacttaaaatgcagttggaaaccgatatgcttcccgccgcctttgacggattctccaggcctcgtcggtccgtg

SEQ ID NO: 661770 - DNA, 291 bp, Homo sapiens
atggtgcaatctcagctcactgcaacctctgccttctgggttcaagtgattctcgtgcctcagactcccaagtagctaggattacaggtcatctgaatatccaggcacaacccaggcatactagaccttgatcacactggaagtgcgtgaccatggggatgtggtgtgtaaagcaagaaaacatagggacagaaatacaacactggagagatcacttgatgtcatttctgatggcttttatccatcctgcccaaataaaataaacaaattaccctgctactttaaaaaaaa

SEQ ID NO: 661771 - DNA, 389 bp, Homo sapiens
ggctgtctttttgtactttttgttccagagctgcttctgtctggtttatttaggttttatccttccttttctttaagagttcgtgaagagggaagccagcattggggccttgatgcagagtaagagcatgtgaggggtagtgggatggtggggtaccagtcactgtaggggtcatccttgtccatcggtatcagaaatgtgtgatacatttgcatcaggagtggttggcctgtgcctgggcctagcacgaacatggtgctgtcctgacagcactcttcggcaggcatggctggtgcctgaagtccccatatgtgagggctccgccaagaatttgtggcctgccttgttagggatagcactgagcatctctagcattgtcagccccagcc

SEQ ID NO: 661772 - DNA, 169 bp, Homo sapiens
aagtagagatggggtttcaccatattggccaggctggtcttgaactcctgacctcaagtgatccacccacctcagccttacaaagtgctagggttacaggtgtgagccactgcgcctggccccttccctcttctttaacgccaccttccatcccttctgtcgtcttctc

SEQ ID NO: 661773 - DNA, 280 bp, Homo sapiens
tgtgttgagagaagttggtatgagttttaatggtcatttgtctatccgtatttaggccttacaggtcgcactccatctctgtcacatattgctgtcatttttaccccctttcttttctttttataatcctttcaaagaatgcacagcccacccttagctcacaggatgtactagaacaagttgcgggttgcagtttggctcgacctgctctgtgccactgctgacttgccattcttggagcccactttctgttcttgtcagccaattccctttctggtgt

SEQ ID NO: 661774 - DNA, 415 bp, Homo sapiens
  misc_feature (369)..(369): n is a, c, g, or t
  misc_feature (388)..(388): n is a, c, g, or t
  misc_feature (399)..(399): n is a, c, g, or t
gaaactctcaccaaaccagaaatagaagggaacttcctcaacctgacaacagacatctacaaaaaccctgcagataaaatcacacttaatggtgaaagactgaatgttttccccctgagatcaggaataagagaacgatgttcagtctcgccacttctattcaacattgtactggaagttctagccagggaaatgggtcaagaaaaataaataaaggaaattcagactggaaaggaggacacaaaactgtctttatttgcagatgacatgatcatctatgtagaaagtccagtgaagctacaaaaagctactagaactaattcactgaatttaattaaggctggcagggaacaaaatctattacacatnaagttcaatttgttatttnctattacactnggcaacccggcaattg

SEQ ID NO: 661775 - DNA, 473 bp, Homo sapiens
aacacacacacacacacacacacacacacacattcacacacagacacacatagctgtaaattattgtagttacttgcagaagataaaattgtacaactcaattatataatgggaaactaaacattatgagaaacagttaatgttatgaaaatgaaagtatataaaatatgtctggatccttcttggggtgatcaagaatgtttgtaacaatattctaagtaattgcacatagcatgtaaaggaagaaaaccaagcaacatgccgttgctctctaataaagtataaacttgaaatagatatatgcaaacaaaaaatatgaaacagaagttacaaaaaaagtatcttggatgtgccaagtaagggtttgatcgtctctgccatcccttaatctccattggaaaccatatcattttctttcttttcttttcttttttttttttttttttgagactgagtctcactctgtcacccag

SEQ ID NO: 661776 - DNA, 313 bp, Homo sapiens
cacaaacgtctttagagaatgccatttttaagttctaattttcagaacgtatgtatttattttttttttttggagacggagtctcgctctgtcgcccaggctggagtgcagtggcgcaatctcggatcattgcaagctccgcctcccgggttcacgccattctcctgcctcagactcctgaatagctggggttacaggtgcccaccaccacacttggctaattttggtattttaagtaaagacggggttacagccatgtcagccagagctgatcttgaactcctgacttaaggtgatccacccgcctcggact

SEQ ID NO: 661777 - DNA, 355 bp, Homo sapiens
  misc_feature (113)..(113): n is a, c, g, or t
  misc_feature (310)..(310): n is a, c, g, or t
aggccccccaaatctgtggaatgttgcctggacccataataaatgattgttgaaggcccgggtgccggttgtcacgccctgtaatccccagcactttgggaggcccgaggttnttggatcacctgaggttgggagtttgaggccagcctgacccaacatggtgaaactccgtctctactaaatacaaagttagccatgcgtggtggcgcatgcctgtaatcccagctacttgggaggctgaggaaggagaatcacttgaacccaggaggtggaggttgcggtgagccaagattgtgccattgcactccancctgggcaacaagagtgaaatccgtctcaataaaaaatcataata

SEQ ID NO: 661778 - DNA, 197 bp, Homo sapiens
gcttggcacacactgaggttggggtgagtgtaggtctattgatatgttctttgttgcctccttagctgcagcaatcagtgatgtgaggctggagaagcgtgttggtaatcttcaggaatagatagctgtagcagctctttaggctgagcccctcttccgcagcccagaattcgcaggctagcaactaagcgtcgaac

SEQ ID NO: 661779 - DNA, 461 bp, Homo sapiens
ggctggagtgcaatgcccccagatcggacccctttattcgggggcagatttgtcaggcaatttttattgtctttttctaaggaaatgctcgctgaacagggaagcacctcggtgcctccctaagcgttgctgtttccaaggcagagcttgaaaaataccgggcttgacaggttgaccccttgcgggggaaactgccagccccatattttcgggggtatttccaatcttggcgcaacccaaattttagacaggcttggccagaaactttttaagaaaattgacagtcagttcaaagctaattttttttataccgaaaagtgctcactttttgagaaagggttttgcctcgcgtagccaagaactgactcataatttagctcagcgtcaggacacctttatagaagaacagcggggtttatgaatcaagcccagaattttgtataggtcggtcaacccaaagc

SEQ ID NO: 661780 - DNA, 495 bp, Homo sapiens
cttgctgttaaggccacggcaccctgagagaactaacacttgtgttaggaaggcagcgggttcacagccgcttcctgagcagagcgcgtcaggcccacctgtgtggctgttgggctgcagttggctcctggagacatgtcagggacaggcgcctcagagaaggatgatctggagtcaggcactcgtgtgaggcactgctggagtgaggggtcgaaagagggaatggatttgtgatttttttctaaagtgaaatttctcctgggcatttccactttcctccgaatttgcctatgctttaaccctttgctaagccttgcctcaagcacatccccaccgccaccgtctgcatttcactgttctcagggccgtaaatgtccggtattagccacaaccttttactggatttgcctttgccatcttacattgaaaacaatgccttaaaagggagaccgagatttctgcaagacgagtttcagctcaaatttctcgcccatg

SEQ ID NO: 661781 - DNA, 317 bp, Homo sapiens
  misc_feature (40)..(40): n is a, c, g, or t
taattagccaacgggggtcgacccgcgaagaggacgtcanaccgcccgtgccgaggtgcgcgccacccaggcgcgtatcgcgatgtttcaggcgcagatccgccaggcccaggcgagcttgcgcagtgacgaagcagaactgggctacacacgcatttatgcgccgatgtccggcaccgtggtcgcagtggatgcccgagagggccaaagcctcaatgcccagcaacaaacgccgctgatattgcgaatcgccaagctatcgcccatgacggtctgggccgaggtctccgaggccgacatcggtcacgtcaaacctg

SEQ ID NO: 661782 - DNA, 252 bp, Homo sapiens
gacgagatggagttcaccgaggccgagagcagtaccaggatgccacagccgaggaggagggcgagttcgaggaggaggctgaggaggaggtggcctagagccttcagtcaactggggaaagcagggaagcagtgtgaactcgtttattcacttccaggctgtcctgttggctgtccactgttccacttgctgttttacctgtccacatcctgctgtacagagaccacgcgttagaggattttcgtgagtcga

SEQ ID NO: 661783 - DNA, 2076 bp, Homo sapiens
ggacctggtgcctggggccgggcggcagggcgcgcaggtggcgtgcccagaggcctctgcagcatctccccggggtcggggttggggcagcaggtgcccgccttgggcagcccggttcacgctgtgtggccactctccctggggtccaaagtcccttcccgagggccggcctgtggagctacgggggtgctgggccagggtctgtgggcctcagtcccctctgaacctcactgtgccccagatcgtcaacacctgcagtggcccagacatcgcacgctccgtctcctgcccactgctctcccgagatgccgtggacttcctgcgcggccacctggtccctaaggagatgtcgctgtgggagtcactgggagagagctggatgcggccccgttccgagtggccgcgggagccacaggtgcccctctacgtgcccaagttccacagcggctgggagcctcctgtggatgtgctgcaggaggccccctgggaggtggaggggctggcgtctgcccccatcgaggaggtgagtccagtgagccgacagtccataagaaactcccagaagcacagccccacttcagagcccacccccccgggggatgccctaccaccagtcagctccccacatactcacaggggctaccagccaacaccagccatggccaagtacgtcaagatcctgtatgacttcacagcccgaaatgccaacgagctatcggtgctcaaggatgaggtcctagaggtgctggaggacggccggcagtggtggaagctgcgcagccgcagcggccaggcggggtacgtgccctgcaacatcctaggcgaggcgcgaccggaggacgccggcgccccgttcgagcaggccggtcagaagtactggggccccgccagcccgacccacaagctacccccaagcttcccggggaacaaagacgagctcatgcagcacatggacgaggtcaacgacgagctcatccggaaaatcagcaacatcagggcgcagccacagaggcacttccgcgtggagcgcagccagcccgtgagccagccgctcacctacgagtcgggtccggacgaggtccgcgcctggctggaagccaaggccttcagcccgcggatcgtggagaacctgggcatcctgaccgggccgcagctcttctccctcaacaaggaggagctgaagaaagtgtgcggcgaggagggcgtccgcgtgtacagccagctcaccatgcagaaggccttcctggagaagcagcaaagtgggtcggagctggaagaactcatgaacaagtttcattccatgaatcagaggaggggggaggacagctaggcccagctgccttgggctggggcctgcggaggggaagcccacccacaatgcatggagtattatttttatatgtgtatgtattttgtatcaaggacacggagggggtgtggtgctggctagaggtccctgcccctgtctggaggcacaacgcccatccttaggccaaacagtacccaaggcctcagcccacaccaagactaatctcagccaaacctgctgcttggtggtgccagccccttgtccaccttctcttgaggccacagaactccctggggctggggcctctttctctggcctcccctgtgcacctggggggtcctggcccctgtgatgctcccccatccccacccacttctacatccatccacaccccagggtgagctggagctccaggctggccaggctgaacctcgcacacacgcagagttctgctccctgaggggggcccgggaggggctccagcaggaggccgtgggtgccattcgggggaaagtgggggaacgacacacacttcacctgcaagggccgacaacgcaggggacaccgtgccggcttcagacactcccagcgcccactcttacaggcccaggactggagctttctctggccaagtttcaggccaatgatccccgcatggtgttgggggtgctggtgtgtcttggtgcctggacttgagtctcaccctacagatgagaggtggctgaggcaccagggctaagcaattaaaccagttaagtctcccagga

SEQ ID NO: 661784 - DNA, 571 bp, Homo sapiens
  misc_feature (13)..(13): n is a, c, g, or t
  misc_feature (279)..(279): n is a, c, g, or t
caatgccctgcanatgcttctattcaaattaatcattcatcttcttcactgtcaaaggttgagcttgttcaaatagtcatcgatggaatcaattacctggtggattgggaaaagaaatttgagaaaggccaaaatattaaagggccacccccttttccttaatttggcaaaaaattaacttttcctttcccaatttattaattatctggcttcttgtaccaccaacattaatctctacttttaaaagttttattcacttggaaaaattttaaattgganatacttgctatatttacaattaaactctttcctaaaataaaaaaaaaacattactgtgcccgactttacacaacgtcgactgtggaaaacctttggtttcccaaatttaaatccttttacgacatatccttttttcaactggtggcgtaatcgcaaagaggcccgccacagatcgcttttaaacaactgttgcacctccatagtggatagtggaaaattgacagcgttaatattttgaaaaacaccttaaaattttttaaaccctttattttccaccaatcgcttcgctttt

SEQ ID NO: 661785 - DNA, 539 bp, Homo sapiens
taaaccaggaagccaggtcttgcctgggtcagggcaggcactgggcccgaaggaggagggccacttcctgccagccctccaccgagcccacctatggcgcctccccaggaagtgctccggccagcccagggtaaacacgctagccctgcccctctgggaccatagcccggggacccagactcttggccacgctcattcccacccctacccaggaccggcagccggagccttgggtccctgcatgggcctggggcgccctgtgccccttcacctcgtcctcgtccagttgactgctgtggcagccggtgctacccgctgtgtccactgcaccctggccctgttctgagcggtcacagcagctggggagaagggccatcctggaagccgggcagatgaggacggaaccagacagtcccactgtggtgggcagaggtggggcctgggcctgaccacggggcagtgcaaggagagaggcatcctgagagggcctgaggtgtccccacctcccctgaacacccatccctcagtggccagcctgg

SEQ ID NO: 661786 - DNA, 571 bp, Homo sapiens
gcggccgcagaccctgaagtagggcagcgggcggagcggggtcgcagggggcggggaggggaggagcccggcaggggaggggaggagccggcaggggaggggaggagcccggcagggagggagggtcaggtgcgttcccggcggggctgagcaggaccccctcgccctccaggggacaccaggagaagattcggcagcggcagtccatcctgcctcctccccagggcccggcgcccatccccttccagcaccgcggcggggattccccggaggccaagaatcgcgtgggcccgcaggtgccactcagcgagccaggtgggccgaggggctggagggggctccacagggctcgttgtggggggctcggtgagcagccgccgtgtcccccatcaggtttccgccgtcgggagtcgcaggaggagccgcgggccgtgctggctcagaagatagagaaggagacgcaaatcctcaactgcgccctggacgacatcgagccaggtgggccgaggggctggagggggctccacagggctcgttgtggggggctcggtgagcagccgccgtgtccccc

SEQ ID NO: 661787 - DNA, 182 bp, Homo sapiens
cggtgaccaagctggagtggtcaggctgacatcgaccagcaggttcatgagcatagccaatgcctggaaggaagaacaggactgaggagacacagtgggaagcccgacctgtgggattagaggtggcttcccaaaggtggtgacctccacactggggacctgcagctctctagccaggcatt

SEQ ID NO: 661788 - DNA, 525 bp, Homo sapiens
ggacctggtgcctggggccgggcggcagggcgcgcaggtggcgtgcccagaggcctctgcagcatctccccggggtcggggttggggcagcaggtgcccgccttgggcagcccggttcacgctgtgtggccactctccctggggtccaaagtcccttcccgagggccggcctgtggagctacgggggtgctgggccagggtctgtgggcctcagtcccctctgaacctcactgtgccccagatcgtcaacacctgcagtggcccagacatcgcacgctccgtctcctgcccactgctctcccgagatgccgtggacttcctgcgcggccacctggtccctaaggagatgtcgctgtgggagtcactgggagagagctggatgcggccccggtagggcagggcagagcagtgccggggcttcatggggggccagcgctgcatgggggccagcaagggggtcctggtgggccagttctggagaggcagggctgacttcaggacctctcaccccagttccgagtggcc

SEQ ID NO: 661789 - DNA, 869 bp, Homo sapiens
  misc_feature (64)..(64): n is a, c, g, or t
  misc_feature (78)..(78): n is a, c, g, or t
  misc_feature (91)..(91): n is a, c, g, or t
  misc_feature (138)..(138): n is a, c, g, or t
  misc_feature (408)..(408): n is a, c, g, or t
aacaaggttcacgtggactttgtgatgggtttagtctgagagtaatgatggatggacttctcanagctctggagaatnaaaggcagctgcngaagctctcagctttactaaatgttcttctgctatttcaaaagcatnggaaaccttgaattcttgcaagaaattaggaagagatccaaccaacgatcttactttttatgtttcacaaaagcgcaataatgtatactttagtcagtcagcagctaatttagacaatgcttggaagaggatatcagtcattaaaagtgtattttcgagtcgatctcttctctatgtgggtaatagacaagctagtataattgaatacctgccaacccttcgaaacatctgtaagactgagaagctaaaagaacaaggaaaaagtaaaanaagattcctgcactattttgaaggaattcatcttgacattccaaaagagactgtgaatactttggcagctgacttcccttaatgttccatactaacaatgctttgtatagattatcatgtggtccttaagatacatttttatattatgtggatcttcatggaaaagtatatttctcgatgtacattttaaacaaacaatttgtatatttttttattggcgggtaaatatttaaaatatttgagttacaaatttgatatattgatggtaatcttttctgaatttctgattatctgaattaagcttgtggagtaattttggattgtgagtgaactgtctggaggaaaggcactaagatgactcccatttcagggtttataactttaagatacaaattcgaaacttatctggcgggcaaccttcaggtccacactgggtaaaacccccgcgaaatgggggttca

SEQ ID NO: 661790 - DNA, 3552 bp, Homo sapiens
taaaccaggaagccaggtcttgcctgggtcagggcaggcactgggcccgaaggaggagggccacttcctgccagccctccaccgagcccacctatggcgcctccccaggaagtgctccggccagcccagggtaaacacgctagccctgcccctctgggaccatagcccggggacccagactcttggccacgctcattcccacccctacccaggaccggcagccggagccttgggtccctgcatgggcctggggcgccctgtgccccttcacctcgtcctcgtccagttgactgctgtggcagccggtgctacccgctgtgtccactgcaccctggccctgttctgagcggtcacagcagctggggagaagggccatcctggaagccgggcagatgaggacggaaccagacagtcccactgtggtgggcagaggttcctcctctcccggccccgccccggcccggccccgccgagcgtcccacccgcccgcgggagacctggcgccccggccgaggcgcgaacagacggacgcaccggcgagcgccgaggggacaggccgagcgcggggcgccggaggcaggtgtgggacaggcactggcctcagaccggggccacactgaggtctgcccttctcccgctggccgccacccaagacaccatgagccagtccggggccgtgagctgctgcccgggtgccaccaatggcagcctgggccggtccgacggtgtggccaagatgagccccaaggacctgtttgagcagaggaagaagtattccaactccaacgtcatcatgcacgagacctcgcagtaccacgtccagcacctggccacattcatcatggacaagagcgaagccatcacgtctgtggacgacgccatccggaagctggtgcagctgagctccaaggagaagatctggacccaggagatgctgctgcaggtgaacgaccagtcgttgcggctgctggacatcgagtcacaggaggagctggaagacttcccgctgcccacggtgcagcgcagccagacggtcctcaaccagctgcgctacccgtctgtgctgctgctcgtgtgccaggactcggagcagagcaagccggatgtccacttcttccactgcgatgaggtggaggcagagctggtgcacgaggacatcgagagcgcgttggccgactgccggctgggcaagaagatgcggccgcagaccctgaagggacaccaggagaagattcggcagcggcagtccatcctgcctcctccccagggcccggcgcccatccccttccagcaccgcggcggggattccccggaggccaagaatcgcgtgggcccgcaggtgccactcagcgagccaggtttccgccgtcgggagtcgcaggaggagccgcgggccgtgctggctcagaagatagagaaggagacgcaaatcctcaactgcgccctggacgacatcgagtggtttgtggcccggctgcagaaggcagccgaggctttcaagcagctgaaccagcggaaaaaggggaagaagaagggcaagaaggcgccagcagagggcgtcctcacactgcgggcacggcccccctctgagggcgagttcatcgactgcttccagaaaatcaagctggcgattaacttgctggcaaagctgcagaagcacatccagaaccccagcgccgcggagctcgtgcacttcctcttcgggcctctggacctgatcgtcaacacctgcagtggcccagacatcgcacgctccgtctcctgcccactgctctcccgagatgccgtggacttcctgcgcggccacctggtccctaaggagatgtcgctgtgggagtcactgggagagagctggatgcggccccgttccgagtggccgcgggagccacaggtgcccctctacgtgcccaagttccacagcggctgggagcctcctgtggatgtgctgcaggaggccccctgggaggtggaggggctggcgtctgcccccatcgaggaggtgagtccagtgagccgacagtccataagaaactcccagaagcacagccccacttcagagcccacccccccgggggatgccctaccaccagtcagctccccacatactcacaggggctaccagccaacaccagccatggccaagtacgtcaagatcctgtatgacttcacagcccgaaatgccaacgagctatcggtgctcaaggatgaggtcctagaggtgctggaggacggccggcagtggtggaagctgcgcagccgcagcggccaggcggggtacgtgccctgcaacatcctaggcgaggcgcgaccggaggacgccggcgccccgttcgagcaggccggtcagaagtactggggccccgccagcccgacccacaagctacccccaagcttcccggggaacaaagacgagctcatgcagcacatggacgaggtcaacgacgagctcatccggaaaatcagcaacatcagggcgcagccacagaggcacttccgcgtggagcgcagccagcccgtgagccagccgctcacctacgagtcgggtccggacgaggtccgcgcctggctggaagccaaggccttcagcccgcggatcgtggagaacctgggcatcctgaccgggccgcagctcttctccctcaacaaggaggagctgaagaaagtgtgcggcgaggagggcgtccgcgtgtacagccagctcaccatgcagaaggccttcctggagaagcagcaaagtgggtcggagctggaagaactcatgaacaagtttcattccatgaatcagaggaggggggaggacagctaggcccagctgccttgggctggggcctgcggaggggaagcccacccacaatgcatggagtattatttttatatgtgtatgtattttgtatcaaggacacggagggggtgtggtgctggctagaggtccctgcccctgtctggaggcacaacgcccatccttaggccaaacagtacccaaggcctcagcccacaccaagactaatctcagccaaacctgctgcttggtggtgccagccccttgtccaccttctcttgaggccacagaactccctggggctggggcctctttctctggcctcccctgtgcacctggggggtcctggcccctgtgatgctcccccatccccacccacttctacatccatccacaccccagggtgagctggagctccaggctggccaggctgaacctcgcacacacgcagagttctgctccctgaggggggcccgggaggggctccagcaggaggccgtgggtgccattcgggggaaagtgggggaacgacacacacttcacctgcaagggccgacaacgcaggggacaccgtgccggcttcagacactcccagcgcccactcttacaggcccaggactggagctttctctggccaagtttcaggccaatgatccccgcatggtgttgggggtgctggtgtgtcttggtgcctggacttgagtctcaccctacagatgagaggtggctgaggcaccagggctaagcaattaaaccagttaagtctcccagga

SEQ ID NO: 661791 - DNA, 509 bp, Homo sapiens
  misc_feature (10)..(10): n is a, c, g, or t
  misc_feature (24)..(24): n is a, c, g, or t
  misc_feature (48)..(48): n is a, c, g, or t
gtcttggggnaaactacagaatanctaaaaaacaggaaaaagtaaaanaagattcctgcactattttgaaggaattcatcttgacattccaaaagagactgtgaatactttggcagctgacttcccttaatgttccatactaacaatgctttgtatagattatcatgtggtccttaagatacatttttatattatgtggatcttcatggaaaagtatatttctcgatgtacattttaaacaaacaatttgtatatttttttattggcgggtaaatatttaaaatatttgagttacaaatttgatatattgatggtaatcttttctgaatttctgattatctgaattaagcttgtggagtaattttggattgtgagtgaactgtctggaggaaaggcactaagatgactcccatttcagggtttataactttaagatacaaattcgaaacttatctggcgggcaaccttcaggtccacactgggtaaaacccccgcgaaatgggggttca

SEQ ID NO: 661792 - DNA, 343 bp, Homo sapiens
gtgcaagagagcacctgaccaccatatagcaatcacacgcacatcatggaggctgtgcaaaagtatcctacaacccacaacttcagcaggcaccatatccatctcactacccagaggtacatcagagagcaggagccaggcaggtgacaaagatgtggaaggcttctaagtggttggctttgccgtctcagaagtgcgacgaaatgaaaatccatcaaaacagaatgccattccatgtttcaggcttttacctcacctcaaatcaaatgtctgtactttcatttattggtcccataagtagacacgcacttggacttctggttttagaacattctatggttat

SEQ ID NO: 661793 - DNA, 3680 bp, Homo sapiens
taaaccaggaagccaggtcttgcctgggtcagggcaggcactgggcccgaaggaggagggccacttcctgccagccctccaccgagcccacctatggcgcctccccaggaagtgctccggccagcccagggtaaacacgctagccctgcccctctgggaccatagcccggggacccagactcttggccacgctcattcccacccctacccaggaccggcagccggagccttgggtccctgcatgggcctggggcgccctgtgccccttcacctcgtcctcgtccagttgactgctgtggcagccggtgctacccgctgtgtccactgcaccctggccctgttctgagcggtcacagcagctggggagaagggccatcctggaagccgggcagatgaggacggaaccagacagtcccactgtggtgggcagaggttcctcctctcccggccccgccccggcccggccccgccgagcgtcccacccgcccgcgggagacctggcgccccggccgaggcgcgaacagacggacgcaccggcgagcgccgaggggacaggccgagcgcggggcgccggaggcagcaggaccctcccgagggcctgaccgtggaggtagcactgcacacccactccctgtgggccggagccaggaggcacttcctgggtgtcggagcccagaaggaaaccagtggccgggaagcaccagctgggtgtgggacaggcactggcctcagaccggggccacactgaggtctgcccttctcccgctggccgccacccaagacaccatgagccagtccggggccgtgagctgctgcccgggtgccaccaatggcagcctgggccggtccgacggtgtggccaagatgagccccaaggacctgtttgagcagaggaagaagtattccaactccaacgtcatcatgcacgagacctcgcagtaccacgtccagcacctggccacattcatcatggacaagagcgaagccatcacgtctgtggacgacgccatccggaagctggtgcagctgagctccaaggagaagatctggacccaggagatgctgctgcaggtgaacgaccagtcgttgcggctgctggacatcgagtcacaggaggagctggaagacttcccgctgcccacggtgcagcgcagccagacggtcctcaaccagctgcgctacccgtctgtgctgctgctcgtgtgccaggactcggagcagagcaagccggatgtccacttcttccactgcgatgaggtggaggcagagctggtgcacgaggacatcgagagcgcgttggccgactgccggctgggcaagaagatgcggccgcagaccctgaagggacaccaggagaagattcggcagcggcagtccatcctgcctcctccccagggcccggcgcccatccccttccagcaccgcggcggggattccccggaggccaagaatcgcgtgggcccgcaggtgccactcagcgagccaggtttccgccgtcgggagtcgcaggaggagccgcgggccgtgctggctcagaagatagagaaggagacgcaaatcctcaactgcgccctggacgacatcgagtggtttgtggcccggctgcagaaggcagccgaggctttcaagcagctgaaccagcggaaaaaggggaagaagaagggcaagaaggcgccagcagagggcgtcctcacactgcgggcacggcccccctctgagggcgagttcatcgactgcttccagaaaatcaagctggcgattaacttgctggcaaagctgcagaagcacatccagaaccccagcgccgcggagctcgtgcacttcctcttcgggcctctggacctgatcgtcaacacctgcagtggcccagacatcgcacgctccgtctcctgcccactgctctcccgagatgccgtggacttcctgcgcggccacctggtccctaaggagatgtcgctgtgggagtcactgggagagagctggatgcggccccgttccgagtggccgcgggagccacaggtgcccctctacgtgcccaagttccacagcggctgggagcctcctgtggatgtgctgcaggaggccccctgggaggtggaggggctggcgtctgcccccatcgaggaggtgagtccagtgagccgacagtccataagaaactcccagaagcacagccccacttcagagcccacccccccgggggatgccctaccaccagtcagctccccacatactcacaggggctaccagccaacaccagccatggccaagtacgtcaagatcctgtatgacttcacagcccgaaatgccaacgagctatcggtgctcaaggatgaggtcctagaggtgctggaggacggccggcagtggtggaagctgcgcagccgcagcggccaggcggggtacgtgccctgcaacatcctaggcgaggcgcgaccggaggacgccggcgccccgttcgagcaggccggtcagaagtactggggccccgccagcccgacccacaagctacccccaagcttcccggggaacaaagacgagctcatgcagcacatggacgaggtcaacgacgagctcatccggaaaatcagcaacatcagggcgcagccacagaggcacttccgcgtggagcgcagccagcccgtgagccagccgctcacctacgagtcgggtccggacgaggtccgcgcctggctggaagccaaggccttcagcccgcggatcgtggagaacctgggcatcctgaccgggccgcagctcttctccctcaacaaggaggagctgaagaaagtgtgcggcgaggagggcgtccgcgtgtacagccagctcaccatgcagaaggccttcctggagaagcagcaaagtgggtcggagctggaagaactcatgaacaagtttcattccatgaatcagaggaggggggaggacagctaggcccagctgccttgggctggggcctgcggaggggaagcccacccacaatgcatggagtattatttttatatgtgtatgtattttgtatcaaggacacggagggggtgtggtgctggctagaggtccctgcccctgtctggaggcacaacgcccatccttaggccaaacagtacccaaggcctcagcccacaccaagactaatctcagccaaacctgctgcttggtggtgccagccccttgtccaccttctcttgaggccacagaactccctggggctggggcctctttctctggcctcccctgtgcacctggggggtcctggcccctgtgatgctcccccatccccacccacttctacatccatccacaccccagggtgagctggagctccaggctggccaggctgaacctcgcacacacgcagagttctgctccctgaggggggcccgggaggggctccagcaggaggccgtgggtgccattcgggggaaagtgggggaacgacacacacttcacctgcaagggccgacaacgcaggggacaccgtgccggcttcagacactcccagcgcccactcttacaggcccaggactggagctttctctggccaagtttcaggccaatgatccccgcatggtgttgggggtgctggtgtgtcttggtgcctggacttgagtctcaccctacagatgagaggtggctgaggcaccagggctaagcaattaaaccagttaagtctcccagga

SEQ ID NO: 661794 - DNA, 250 bp, Homo sapiens
  misc_feature (69)..(69): n is a, c, g, or t
gatgcctatgctcctcttcatgggggcacagcggcttgcgggcaggcagcgagaggcgcaggtgagganggctggacggtgagagggaggtgctcagcccctgaccgtgatccttggacagacacccccaaaccaaagcttatgcctttaagcattcctttctgggacagagaatggggtccaggatatgagaaggggcaggaaaaaatggacttctttggcttgggagccccaaggggaggctggactg

SEQ ID NO: 661795 - DNA, 4364 bp, Homo sapiens
  misc_feature (1089)..(1089): n is a, c, g, or t
  misc_feature (1110)..(1110): n is a, c, g, or t
  misc_feature (1288)..(1288): n is a, c, g, or t
taaaccaggaagccaggtcttgcctgggtcagggcaggcactgggcccgaaggaggagggccacttcctgccagccctccaccgagcccacctatggcgcctccccaggaagtgctccggccagcccagggtaaacacgctagccctgcccctctgggaccatagcccggggacccagactcttggccacgctcattcccacccctacccaggaccggcagccggagccttgggtccctgcatgggcctggggcgccctgtgccccttcacctcgtcctcgtccagttgactgctgtggcagccggtgctacccgctgtgtccactgcaccctggccctgttctgagcggtcacagcagctggggagaagggccatcctggaagccgggcagatgaggacggaaccagacagtcccactgtggtgggcagaggttcctcctctcccggccccgccccggcccggccccgccgagcgtcccacccgcccgcgggagacctggcgccccggccgaggcgcgaacagacggacgcaccggcgagcgccgaggggacaggccgagcgcggggcgccggaggcaggtgtgggacaggcactggcctcagaccggggccacactgaggtctgcccttctcccgctggccgccacccaagacaccatgagccagtccggggccgtgagctgctgcccgggtgccaccaatggcagcctgggccggtccgacggtgtggccaagatgagccccaaggacctgtttggtgagtgaggtttgagaacgggctggacgtcacaggggagaaatgggcactgcatccaggtgggggacagctgctcctgccccacagctgtgcctggtctggcccaggggatctccgggtgcccagggaggcctctggaccctaatcaaccttccgaaagctcctggccactggatcccctcccccacacccgtaaggggagaggcctttactaataattcagggagcatcaatattgattccgctgcactcattgctgtaacctgatcacagcgaggttcaggcaggataagccgccaggtgtctgctccaggaggggggcctggccagnccccacctccccccactctgnccttccccagagacgaccctgccctctcgctagctagatgcacccttcacttatgtctttggacaaggtgcctagtctggaaagcgagaagacctgggagggcagggagagtgaagctggcagctctcagagtgggaagaagccgggctgggacccccttcctgtcccccaccctccnggacagaaaccccccgggcacaggctgctggtccccactccactcagagcaagcccatcgccttctccgagctgcgtccttctccaagggggcttccctggagggagggagggggcttcctgcaggtcctgatttcacacccacatccttcctggtggccaagaggtccacggagcagcctccctccgcttgactccaccttcccttgtgggtccagtcccaactggacgggaggctgtgggtcctgcccgtcgggggagtgactggtgtctcccggttcagagcagaggaagaagtattccaactccaacgtcatcatgcacgagacctcgcagtaccacgtccagcacctggccacattcatcatggacaagagcgaagccatcacgtctgtggacgacgccatccggaagctggtgcagctgagctccaaggagaagatctggacccaggagatgctgctgcaggtgaacgaccagtcgttgcggctgctggacatcgagtcacaggaggagctggaagacttcccgctgcccacggtgcagcgcagccagacggtcctcaaccagctgcgctacccgtctgtgctgctgctcgtgtgccaggactcggagcagagcaagccggatgtccacttcttccactgcgatgaggtggaggcagagctggtgcacgaggacatcgagagcgcgttggccgactgccggctgggcaagaagatgcggccgcagaccctgaagggacaccaggagaagattcggcagcggcagtccatcctgcctcctccccagggcccggcgcccatccccttccagcaccgcggcggggattccccggaggccaagaatcgcgtgggcccgcaggtgccactcagcgagccaggtttccgccgtcgggagtcgcaggaggagccgcgggccgtgctggctcagaagatagagaaggagacgcaaatcctcaactgcgccctggacgacatcgagtggtttgtggcccggctgcagaaggcagccgaggctttcaagcagctgaaccagcggaaaaaggggaagaagaagggcaagaaggcgccagcagagggcgtcctcacactgcgggcacggcccccctctgagggcgagttcatcgactgcttccagaaaatcaagctggcgattaacttgctggcaaagctgcagaagcacatccagaaccccagcgccgcggagctcgtgcacttcctcttcgggcctctggacctgatcgtcaacacctgcagtggcccagacatcgcacgctccgtctcctgcccactgctctcccgagatgccgtggacttcctgcgcggccacctggtccctaaggagatgtcgctgtgggagtcactgggagagagctggatgcggccccgttccgagtggccgcgggagccacaggtgcccctctacgtgcccaagttccacagcggctgggagcctcctgtggatgtgctgcaggaggccccctgggaggtggaggggctggcgtctgcccccatcgaggaggtgagtccagtgagccgacagtccataagaaactcccagaagcacagccccacttcagagcccacccccccgggggatgccctaccaccagtcagctccccacatactcacaggggctaccagccaacaccagccatggccaagtacgtcaagatcctgtatgacttcacagcccgaaatgccaacgagctatcggtgctcaaggatgaggtcctagaggtgctggaggacggccggcagtggtggaagctgcgcagccgcagcggccaggcggggtacgtgccctgcaacatcctaggcgaggcgcgaccggaggacgccggcgccccgttcgagcaggccggtcagaagtactggggccccgccagcccgacccacaagctacccccaagcttcccggggaacaaagacgagctcatgcagcacatggacgaggtcaacgacgagctcatccggaaaatcagcaacatcagggcgcagccacagaggcacttccgcgtggagcgcagccagcccgtgagccagccgctcacctacgagtcgggtccggacgaggtccgcgcctggctggaagccaaggccttcagcccgcggatcgtggagaacctgggcatcctgaccgggccgcagctcttctccctcaacaaggaggagctgaagaaagtgtgcggcgaggagggcgtccgcgtgtacagccagctcaccatgcagaaggccttcctggagaagcagcaaagtgggtcggagctggaagaactcatgaacaagtttcattccatgaatcagaggaggggggaggacagctaggcccagctgccttgggctggggcctgcggaggggaagcccacccacaatgcatggagtattatttttatatgtgtatgtattttgtatcaaggacacggagggggtgtggtgctggctagaggtccctgcccctgtctggaggcacaacgcccatccttaggccaaacagtacccaaggcctcagcccacaccaagactaatctcagccaaacctgctgcttggtggtgccagccccttgtccaccttctcttgaggccacagaactccctggggctggggcctctttctctggcctcccctgtgcacctggggggtcctggcccctgtgatgctcccccatccccacccacttctacatccatccacaccccagggtgagctggagctccaggctggccaggctgaacctcgcacacacgcagagttctgctccctgaggggggcccgggaggggctccagcaggaggccgtgggtgccattcgggggaaagtgggggaacgacacacacttcacctgcaagggccgacaacgcaggggacaccgtgccggcttcagacactcccagcgcccactcttacaggcccaggactggagctttctctggccaagtttcaggccaatgatccccgcatggtgttgggggtgctggtgtgtcttggtgcctggacttgagtctcaccctacagatgagaggtggctgaggcaccagggctaagcaattaaaccagttaagtctcccagga

SEQ ID NO: 661796 - DNA, 205 bp, Homo sapiens
accggatcgggcgagaaagtgttgtgggaagacagtcagatttacgccgattactatgatagtgaaatggatttaggcgtaggtttgatctggggtgtagcctgacgaatagtgggacatcagtgcaatgaagcctcctatgaatggcaaatacagctccgtattgtataggacatagtggaagtgagctacacacatattacgt

SEQ ID NO: 661797 - DNA, 3617 bp, Homo sapiens
taaaccaggaagccaggtcttgcctgggtcagggcaggcactgggcccgaaggaggagggccacttcctgccagccctccaccgagcccacctatggcgcctccccaggaagtgctccggccagcccagggtaaacacgctagccctgcccctctgggaccatagcccggggacccagactcttggccacgctcattcccacccctacccaggaccggcagccggagccttgggtccctgcatgggcctggggcgccctgtgccccttcacctcgtcctcgtccagttgactgctgtggcagccggtgctacccgctgtgtccactgcaccctggccctgttctgagcggtcacagcagctggggagaagggccatcctggaagccgggcagatgaggacggaaccagacagtcccactgtggtgggcagaggttcctcctctcccggccccgccccggcccggccccgccgagcgtcccacccgcccgcgggagacctggcgccccggccgaggcgcgaacagacggacgcaccggcgagcgccgaggggacaggccgagcgcggggcgccggaggcaggtgtgggacaggcactggcctcagaccggggccacactgaggtctgcccttctcccgctggccgccacccaagacaccatgagccagtccggggccgtgagctgctgcccgggtgccaccaatggcagcctgggccggtccgacggtgtggccaagatgagccccaaggacctgtttgtcccaactggacgggaggctgtgggtcctgcccgtcgggggagtgactggtgtctcccggttcagagcagaggaagaagtattccaactccaacgtcatcatgcacgagacctcgcagtaccacgtccagcacctggccacattcatcatggacaagagcgaagccatcacgtctgtggacgacgccatccggaagctggtgcagctgagctccaaggagaagatctggacccaggagatgctgctgcaggtgaacgaccagtcgttgcggctgctggacatcgagtcacaggaggagctggaagacttcccgctgcccacggtgcagcgcagccagacggtcctcaaccagctgcgctacccgtctgtgctgctgctcgtgtgccaggactcggagcagagcaagccggatgtccacttcttccactgcgatgaggtggaggcagagctggtgcacgaggacatcgagagcgcgttggccgactgccggctgggcaagaagatgcggccgcagaccctgaagggacaccaggagaagattcggcagcggcagtccatcctgcctcctccccagggcccggcgcccatccccttccagcaccgcggcggggattccccggaggccaagaatcgcgtgggcccgcaggtgccactcagcgagccaggtttccgccgtcgggagtcgcaggaggagccgcgggccgtgctggctcagaagatagagaaggagacgcaaatcctcaactgcgccctggacgacatcgagtggtttgtggcccggctgcagaaggcagccgaggctttcaagcagctgaaccagcggaaaaaggggaagaagaagggcaagaaggcgccagcagagggcgtcctcacactgcgggcacggcccccctctgagggcgagttcatcgactgcttccagaaaatcaagctggcgattaacttgctggcaaagctgcagaagcacatccagaaccccagcgccgcggagctcgtgcacttcctcttcgggcctctggacctgatcgtcaacacctgcagtggcccagacatcgcacgctccgtctcctgcccactgctctcccgagatgccgtggacttcctgcgcggccacctggtccctaaggagatgtcgctgtgggagtcactgggagagagctggatgcggccccgttccgagtggccgcgggagccacaggtgcccctctacgtgcccaagttccacagcggctgggagcctcctgtggatgtgctgcaggaggccccctgggaggtggaggggctggcgtctgcccccatcgaggaggtgagtccagtgagccgacagtccataagaaactcccagaagcacagccccacttcagagcccacccccccgggggatgccctaccaccagtcagctccccacatactcacaggggctaccagccaacaccagccatggccaagtacgtcaagatcctgtatgacttcacagcccgaaatgccaacgagctatcggtgctcaaggatgaggtcctagaggtgctggaggacggccggcagtggtggaagctgcgcagccgcagcggccaggcggggtacgtgccctgcaacatcctaggcgaggcgcgaccggaggacgccggcgccccgttcgagcaggccggtcagaagtactggggccccgccagcccgacccacaagctacccccaagcttcccggggaacaaagacgagctcatgcagcacatggacgaggtcaacgacgagctcatccggaaaatcagcaacatcagggcgcagccacagaggcacttccgcgtggagcgcagccagcccgtgagccagccgctcacctacgagtcgggtccggacgaggtccgcgcctggctggaagccaaggccttcagcccgcggatcgtggagaacctgggcatcctgaccgggccgcagctcttctccctcaacaaggaggagctgaagaaagtgtgcggcgaggagggcgtccgcgtgtacagccagctcaccatgcagaaggccttcctggagaagcagcaaagtgggtcggagctggaagaactcatgaacaagtttcattccatgaatcagaggaggggggaggacagctaggcccagctgccttgggctggggcctgcggaggggaagcccacccacaatgcatggagtattatttttatatgtgtatgtattttgtatcaaggacacggagggggtgtggtgctggctagaggtccctgcccctgtctggaggcacaacgcccatccttaggccaaacagtacccaaggcctcagcccacaccaagactaatctcagccaaacctgctgcttggtggtgccagccccttgtccaccttctcttgaggccacagaactccctggggctggggcctctttctctggcctcccctgtgcacctggggggtcctggcccctgtgatgctcccccatccccacccacttctacatccatccacaccccagggtgagctggagctccaggctggccaggctgaacctcgcacacacgcagagttctgctccctgaggggggcccgggaggggctccagcaggaggccgtgggtgccattcgggggaaagtgggggaacgacacacacttcacctgcaagggccgacaacgcaggggacaccgtgccggcttcagacactcccagcgcccactcttacaggcccaggactggagctttctctggccaagtttcaggccaatgatccccgcatggtgttgggggtgctggtgtgtcttggtgcctggacttgagtctcaccctacagatgagaggtggctgaggcaccagggctaagcaattaaaccagttaagtctcccagga

SEQ ID NO: 661798 - DNA, 125 bp, Homo sapiens
  misc_feature (65)..(65): n is a, c, g, or t
atcaaacccttttatgttgctgtgcggaggtaaaatcattaacttgtgcaaatgacaaacaactnatatcaaagatacaggttaccaagcataaaacgatacagttaaaccaattcgagaaaaat

SEQ ID NO: 661799 - DNA, 257 bp, Homo sapiens
aaagatatatgtagacacaaagagagagagaccctgtctcttaaaaaagaaaaaaaaaagcaaagctgttttctatctatagtggatatggaattatacattcccaccagcaatgtataaaagttcaagtttctccaagctccctggcagcatttagtgttacagtttttttaattttaactatctaacaggtaagtagtgatatctacggtgattcatttgcattcctgatgtctaataatgtgaacatgttgtcc

SEQ ID NO: 661800 - DNA, 3812 bp, Homo sapiens
taaaccaggaagccaggtcttgcctgggtcagggcaggcactgggcccgaaggaggagggccacttcctgccagccctccaccgagcccacctatggcgcctccccaggaagtgctccggccagcccagggtaaacacgctagccctgcccctctgggaccatagcccggggacccagactcttggccacgctcattcccacccctacccaggaccggcagccggagccttgggtccctgcatgggcctggggcgccctgtgccccttcacctcgtcctcgtccagttgactgctgtggcagccggtgctacccgctgtgtccactgcaccctggccctgttctgagcggtcacagcagctggggagaagggccatcctggaagccgggcagatgaggacggaaccagacagtcccactgtggtgggcagaggttcctcctctcccggccccgccccggcccggccccgccgagcgtcccacccgcccgcgggagacctggcgccccggccgaggcgcgaacagacggacgcaccggcgagcgccgaggggacaggccgagcgcggggcgccggaggcagcaggaccctcccgagggcctgaccgtggaggtagcactgcacacccactccctgtgggccggagccaggaggcacttcctgggtgtcggagcccagaaggaaaccagtggccgggaagcaccagctgggtgtgggacaggcactggcctcagaccggggccacactgaggtctgcccttctcccgctggccgccacccaagacaccatgagccagtccggggccgtgagctgctgcccgggtgccaccaatggcagcctgggccggtccgacggtgtggccaagatgagccccaaggacctgtttgagcagaggaagaagtattccaactccaacgtcatcatgcacgagacctcgcagtaccacgtccagcacctggccacattcatcatggacaagagcgaagccatcacgtctgtggacgacgccatccggaagctggtgcagctgagctccaaggagaagatctggacccaggagatgctgctgcaggtgaacgaccagtcgttgcggctgctggacatcgagtcacaggaggagctggaagacttcccgctgcccacggtgcagcgcagccagacggtcctcaaccagctgcgctacccgtctgtgctgctgctcgtgtgccaggactcggagcagagcaagccggatgtccacttcttccactgcgatgaggtggaggcagagctggtgcacgaggacatcgagagcgcgttggccgactgccggctgggcaagaagatgcggccgcagaccctgaagggacaccaggagaagattcggcagcggcagtccatcctgcctcctccccagggcccggcgcccatccccttccagcaccgcggcggggattccccggaggccaagaatcgcgtgggcccgcaggtgccactcagcgagccaggtttccgccgtcgggagtcgcaggaggagccgcgggccgtgctggctcagaagatagagaaggagacgcaaatcctcaactgcgccctggacgacatcgagtggtttgtggcccggctgcagaaggcagccgaggctttcaagcagctgaaccagcggaaaaaggggaagaagaagggcaagaaggcgccagcagagggcgtcctcacactgcgggcacggcccccctctgagggcgagttcatcgactgcttccagaaaatcaagctggcgattaacttgctggcaaagctgcagaagcacatccagaaccccagcgccgcggagctcgtgcacttcctcttcgggcctctggacctgatcgtcaacacctgcagtggcccagacatcgcacgctccgtctcctgcccactgctctcccgagatgccgtggacttcctgcgcggccacctggtccctaaggagatgtcgctgtgggagtcactgggagagagctggatgcggccccgttccgagtggccgcgggagccacaggtgcccctctacgtgcccaagttccacagcggctgggagcctcctgtggatgtgctgcaggaggccccctgggaggtggaggggctggcgtctgcccccatcgaggaggtgagtccagtgagccgacagtccataagaaactcccagaagcacagccccacttcagagcccacccccccgggggatgccctaccaccagtcagctccccacatactcacaggggctaccagccaacaccagccatggccaagtacgtcaagatcctgtatgacttcacagcccgaaatgccaacgagctatcggtgctcaaggatgaggtcctagaggtgctggaggacggccggcagtggtggaagctgcgcagccgcagcggccaggcggggtacgtgccctgcaacatcctaggcgaggcgcgaccggaggacgccggcgccccgttcgagcaggccggtcagaagtactggggccccgccagcccgacccacaagctacccccaagcttcccggggaacaaagacggtgagagctgctgcttcgaggcgggggtcccgggcccaggccacctgggggaggaagtgtggggggggtccctgggccgggggcgggggcaggggcaaggcagcggcgggcctgagtcgcgcgccccctcagagctcatgcagcacatggacgaggtcaacgacgagctcatccggaaaatcagcaacatcagggcgcagccacagaggcacttccgcgtggagcgcagccagcccgtgagccagccgctcacctacgagtcgggtccggacgaggtccgcgcctggctggaagccaaggccttcagcccgcggatcgtggagaacctgggcatcctgaccgggccgcagctcttctccctcaacaaggaggagctgaagaaagtgtgcggcgaggagggcgtccgcgtgtacagccagctcaccatgcagaaggccttcctggagaagcagcaaagtgggtcggagctggaagaactcatgaacaagtttcattccatgaatcagaggaggggggaggacagctaggcccagctgccttgggctggggcctgcggaggggaagcccacccacaatgcatggagtattatttttatatgtgtatgtattttgtatcaaggacacggagggggtgtggtgctggctagaggtccctgcccctgtctggaggcacaacgcccatccttaggccaaacagtacccaaggcctcagcccacaccaagactaatctcagccaaacctgctgcttggtggtgccagccccttgtccaccttctcttgaggccacagaactccctggggctggggcctctttctctggcctcccctgtgcacctggggggtcctggcccctgtgatgctcccccatccccacccacttctacatccatccacaccccagggtgagctggagctccaggctggccaggctgaacctcgcacacacgcagagttctgctccctgaggggggcccgggaggggctccagcaggaggccgtgggtgccattcgggggaaagtgggggaacgacacacacttcacctgcaagggccgacaacgcaggggacaccgtgccggcttcagacactcccagcgcccactcttacaggcccaggactggagctttctctggccaagtttcaggccaatgatccccgcatggtgttgggggtgctggtgtgtcttggtgcctggacttgagtctcaccctacagatgagaggtggctgaggcaccagggctaagcaattaaaccagttaagtctcccagga

SEQ ID NO: 661801 - DNA, 1401 bp, Homo sapiens
  misc_feature (1401)..(1401): n is a, c, g, or t
tctcaaaattctgtgacaaattttgagacccattgagcacgcagttaaatgagaaaagatagaaaatgaaaaaaaaaaaaaaaagaaaaatagaaagaaaaataaaaaaagaaaaacaaaacaaagataatgccgtgcgcggcactgtgacttatactatgcactaacgagacgacgacgcaacagtagcgtactcagcaatctgattattctccaattgggggccctccatagaccatgcactgtctatcttatgttgacttactccaatggagggccccgaaggacaactagagaacctattacacgacaaacacgatgatttacaggggactatctcgaggctaagactgtagctgatcctgaatctgaatgcagagaatagagatgatagcgctcgaccacttcccgaacggctgatgtattcttacccatacacagtagggaccaagacccacgaagaatgcatatgaccctttcctgcgccggtacaccagctcggagctgtcaaaaactcacctacatcgggatcccgaaagttatagcacaacataggcatatccaacatgttatcaaccaaacacactaatcagtgaacaagaaaccctcaagcatactggacggggataaacatgcggctgcaagagcgacaagctccaagccgactcaacaattaaccgcaacaaaatctgcgactaacaaaacctcccgaaacacgacggcacccatatcggtggccgaattgcacatggggaacggggaaactggagcgaaccaaaccattcgccttggaaccccaagcatgcataaaccaattgaccctttggaaaaaccaacacggagactcggccccacggttcacccccgataaaacgaatatgacaacatagcaccagttgagcaaccaccgcctgtcatcgaaccgctctagagactatgacttacccataaccacgccactcctatccaaaatagaaaaaagccccgttgggccctgctctctccacgagatagctacacaacattagcgtgctactaggtccacgagcacacgataggcacaaagcacaaattggtagccccacacacccaggcaaaggagcgaacacattaggcaaatacacgaagaacacgagcataaaatcccaacatggcccataacccatacccaccccctcctcaagcaacacaataatccaaatcaccacagaccttacccaaaagacccaaagcacatacccctctccgaccctcaccacacaccccaccccctactacataaccccaccaacaccaaagacctactcaccaccccacaacacaaacctacagctaaacccaaccacaacaatctcatcactctaaccacatcccacacgcaccccaccccccacaaccacn

SEQ ID NO: 661802 - DNA, 3588 bp, Homo sapiens
taaaccaggaagccaggtcttgcctgggtcagggcaggcactgggcccgaaggaggagggccacttcctgccagccctccaccgagcccacctatggcgcctccccaggaagtgctccggccagcccagggtaaacacgctagccctgcccctctgggaccatagcccggggacccagactcttggccacgctcattcccacccctacccaggaccggcagccggagccttgggtccctgcatgggcctggggcgccctgtgccccttcacctcgtcctcgtccagttgactgctgtggcagccggtgctacccgctgtgtccactgcaccctggccctgttctgagcggtcacagcagctggggagaagggccatcctggaagccgggcagatgaggacggaaccagacagtcccactgtggtgggcagaggttcctcctctcccggccccgccccggcccggccccgccgagcgtcccacccgcccgcgggagacctggcgccccggccgaggcgcgaacagacggacgcaccggcgagcgccgaggggacaggccgagcgcggggcgccggaggcagcaggaccctcccgagggcctgaccgtggaggtagcactgcacacccactccctgtgggccggagccaggaggcacttcctgggtgtcggagcccagaaggaaaccagtggccgggaagcaccagctgggtgtgggacaggcactggcctcagaccggggccacactgaggtctgcccttctcccgctggccgccacccaagacaccatgagccagtccggggccgtgagctgctgcccgggtgccaccaatggcagcctgggccggtccgacggtgtggccaagatgagccccaaggacctgtttgagcagaggaagaagtattccaactccaacgtcatcatgcacgagacctcgcagtaccacgtccagcacctggccacattcatcatggacaagagcgaagccatcacgtctgtggacgacgccatccggaagctggtgcagctgagctccaaggagaagatctggacccaggagatgctgctgcaggtgaacgaccagtcgttgcggctgctggacatcgagtcacaggaggagctggaagacttcccgctgcccacggtgcagcgcagccagacggtcctcaaccagctgcgctacccgtctgtgctgctgctcgtgtgccaggactcggagcagagcaagccggatgtccacttcttccactgcgatgaggtggaggcagagctggtgcacgaggacatcgagagcgcgttggccgactgccggctgggcaagaagatgcggccgcagaccctgaagggacaccaggagaagattcggcagcggcagtccatcctgcctcctccccagggcccggcgcccatccccttccagcaccgcggcggggattccccggaggccaagaatcgcgtgggcccgcaggtgccactcagcgagccaggtttccgccgtcgggagtcgcaggaggagccgcgggccgtgctggctcagaagatagagaaggagacgcaaatcctcaactgcgccctggacgacatcgagtggtttgtggcccggctgcagaaggcagccgaggctttcaagcagctgaaccagcggaaaaaggggaagaagaagggcaagaaggcgccagcagagggcgtcctcacactgcgggcacggcccccctctgagggcgagttcatcgactgcttccagaaaatcaagctggcgattaacttgctggcaaagctgcagaagcacatccagaaccccagcgccgcggagctcgtgcacttcctcttcgggcctctggacctgatcgtcaacacctgcagtggcccagacatcgcacgctccgtctcctgcccactgctctcccgagatgccgtggacttcctgcgcggccacctggtccctaaggagatgtcgctgtgggagtcactgggagagagctggatgcggccccgttccgagtggccgcgggagccacaggtgcccctctacgtgcccaagttccacagcggctgggagcctcctgtggatgtgctgcaggaggccccctgggaggtggaggggctggcgtctgcccccatcgaggaggtgagtccagtgagccgacagtccataagaaactcccagaagcacagccccacttcagagcccacccccccgggggatgccctaccaccagtcagctccccacatactcacaggggctaccagccaacaccagccatggccaagtacgtcaagatcctgtatgacttcacagcccgaaatgccaacgagctatcggtgctcaaggatgaggtcctagaggtgctggaggacggccggcagtggtggaagctgcgcagccgcagcggccaggcggggtacgtgccctgcaacatcctaggcgaggcgcgaccggaggacgccggcgccccgttcgagcaggccggtcagaagtactggggccccgccagcccgacccacaagctacccccaagcttcccggggaacaaagacgagctcatgcagcacatggacgaggtcaacgacgagctcatccggaaaatcagcaacatcagggcgcagccacagaggcacttccgcgtggagcgcagccagcccgtgagccagccgctcacctacgagtcgggtccggacgaggtccgcgcctggctggaagccaaggccttcagcccgcggatcgtggagaacctgggcatcctgaccgggccgcagctcttctccctcaacaaggaggagctgaagaaagtgtgcggcgaggagggcgtccgcgtgtacagccagctcaccatgcagaaggccttcctggagaagcagcaaagtgggtcggagctggaagaactcatgaacaagtttcattccatgaatcagaggaggggggaggacagctaggcccagctgccttgggctggggcctgcggaggggaagcccacccacaatgcatggagtattatttttatatgtgtatgtattttgtatcaaggacacggagggggtgtggtgctggctagaggtccctgcccctgtctggaggcacaacgcccatccttaggccaaacagtacccaaggcctcagcccacaccaagactaatctcagccaaacctgctgcttggtggtgccagccccttgtccaccttctcttgaggccacagaactccctggggctggggcctctttctctggcctccaggctggccaggctgaacctcgcacacacgcagagttctgctccctgaggggggcccgggaggggctccagcaggaggccgtgggtgccattcgggggaaagtgggggaacgacacacacttcacctgcaagggccgacaacgcaggggacaccgtgccggcttcagacactcccagcgcccactcttacaggcccaggactggagctttctctggccaagtttcaggccaatgatccccgcatggtgttgggggtgctggtgtgtcttggtgcctggacttgagtctcaccctacagatgagaggtggctgaggcaccagggctaagcaattaaaccagttaagtctcccagga

SEQ ID NO: 661803 - DNA, 722 bp, Homo sapiens
ccacgaggtgttgtttttcgcgccgtcctctttttggcccctttttttcctccgccacgttggttggttgctgggctcgctccgcgggaccccattgtgtggcggcggcggtatcctgccgcggcgcataagtctgtccggtttgggcgcgcgtcttcgtttttcacgagatggtttcctcccgtctgtgcgtgggtgtctccgcgcgcacactattttcgtcccgcgaggattgtctcgcgcccccctatttctcgcgctctctgagggcattgggggcccaacactcgccacgcgcgagtatgttcctcttctccccccggcccacggcggtgccattcacactcccacagcggagatctccctgttcagcaggccgcacaaacacaaaggatggtgctgctcaagaaaacgtagacagcagggacaactcgtgcgtcacaccgctgagacaagacaagacatatcagccacacactggtgggaggtgcacacgcgagggagatactctccgtgcccggcagagagagatcttcacacagcaagacggagcgagagtgaacagagacgttccgctttcacgctgtaccaagagaaccccgaggagattcacgtaagacaaccagtgttgcccccccctgtggaccccggggggggccaccaccgtggagaaaacgcgctacaccaccaggagaggccacgaggcgtcccatcaaaaaaca

SEQ ID NO: 661804 - DNA, 532 bp, Homo sapiens
tagtatacttgaagttgggtggtataatgcctcccactttgttctttttgcttaggaatgctttggctatttgggctcatttttgcttccatgtgaatattagaatagtttttttagttttgttaaaaataatcttggtagtttgataggaatagcactgaatgtataaattgctctggagagtatggccattttaatgctattcattcttccaatgcataagcatgaaatgttttttcattcatttgtttcaactttgatttctttcaacagtgttttgtagttctccttgtagagattttcacgtccttggttaactgtattcataggtatttcatattctttgtggctattgtaaatgggattgtgctcttgatttgactctaagcctgggcgttactggtgtatagaaatgctactggatttttgtacactgattttatatcctgaaaccttgctaaaattgtttaacagttctaggagcttttggcagagtccttagggctttctaggtatagtttgactttttcat

SEQ ID NO: 661805 - DNA, 220 bp, Homo sapiens
taacatgtactcagggaccattcaccactgctctatttagccgccagtctcttcagcaatggtgagggtctggtgtacacattatttcatcacccaggtaataagcatagcacccgacaggtagtttttcggtcctcaccctcctcccatcttaccctcaagtaggccctgctgtttgttgttccctttttttgtgtcaatgtgtagtcactgttaggtc

SEQ ID NO: 661806 - DNA, 681 bp, Homo sapiens
ggcgtctgtgggctccggcttgcctgtgcggagatgagcgggtccctcggccgagctgcggcggctctgctccgctgggggcgcggcgcgggcggcggtggcctttggggtccgggcgtgcgggcggtggttctggcgcgagtgtgggtagctcgggtacgttggacgcgctggtgagaaggacaggtgtgcgtcttcctcaatgggacgccggagcagcccagtgcggcttcagcaacgccgtggtgcagatcctgaggcatgcacggagtccgcggattacgcggcctacaacgtgctggacgacccggagctccgacaaggcattaaagactattccaaattggccaccatcccgaaaatgtgtacccgtcaatggcgagtttgtagggggctgtgacattcttctgcaagatgcaccaagaatggggacttggttggaagaactgaaaaagttgggggatcactcggggccctttaagatgaaaagaaagaccaagactccaagtgagggcggcaagtcctcgctgagcagagagggagccgttcatgtcagagactcactgccagaaaagccttagccatatgggttttcactattgagaccgaattgttgcgcctgatcattttggtttcatgagcagtgggtgatcaagtaggaactggtgttcgggctaaaga

SEQ ID NO: 661807 - DNA, 1017 bp, Homo sapiens
ggcaaggagtgagacgtctaggtccacaggaagacctgcctcactgtcggcttcacacaggtgaagctcggaagacacaaaggcgcggtttggctaagctggctggaagctatcaggaccacttacaatgacagatacgatgagatccggcgctcactggggtggcaatgtcctgggtcctaagtctgtggctcgtactcgcccaagtcgtcgaacataggcttgaaggctacagaacgtggccactacgacgtggggttacagtgtacactgtaggagcttttctggtacgagtaaacacataaattgaagactaagtacagaattttccgtttcaacacataaaagaaaagaagacgagaatttaaagatgagaaagagacaaatacgggggtgcacctgcaccggagaattctcgcccgcagggaggggcgccatgagttccctcggcgcaccacaggttgtctcttgtgcttacaaaggggggcgccatagaaggagtcgtggcgattgcacacatccaaggcgtggcccggctaatggcggtgtatgaaaaaccatatcgagccaacggaggcatagaaccccgaggcccattgcgcgggacattgtgaggcgcaagagaatccaaccactgcccttcgagtgggcggcccatcatgtggaggtgcataacggaactgacgcctggagggacatattcagacagtacccccagacagagggccaatacataacatgaccttggttcaagcgcggtgcagatgaatgaagtgcggttgacaatgactggggaaggcgacatatagggcaaggcgaggggagggaaggcaacatagatattgcgcgccccaggagtgcgcagtcaatgtcacatgtacgaatgacagcacctgttgtatgtattcccccgggggacatagggtgtacactccaccatgtgtccgacgggcgcaagagcaaccggttgaagcgcatcaagaccgcccagaccatgaccccgaaacacaagtggtg

SEQ ID NO: 661808 - DNA, 344 bp, Homo sapiens
cctagaggatccccatcaccctaaattattatggatgatataaaacttaaccacgaaagatgaggccaggtgcagtggctcatgcctgtaatcctagcacttgggaggtcaaggcgcgtggatcacctgaggtcaggagttcaagaccagcctagccaacatggtgaaaccctgtctctactaaaaatacaaagattagccaggcatggtggtgcacgtctgtaatcccagctacttgggaagctgagggagaaaaagcacttgaacccaggagatggaggtttcagggagccgagattgtgccactgcactccagcccaggtaacagagcaagactctgtctt

SEQ ID NO: 661809 - DNA, 432 bp, Homo sapiens
gctcgacttttttttgagacagagtctcgctctgttgcccaggctggagtgcagtggcgggatctcggctcactgcaagctccgcctcctgggttcacgccattctcctgcctcagcctcccaagtagctgggactacaggcgcccgcactacgcccagctaattttttgtatttttagtagagacggggtttcaccgttttagccgggatggtttcgatctgctgacctcgtgatccgcccgcctcggcctcccaaagtgctggtgttttttaattttataatactttctgtacaaaatagaaatgaatttttttcttttttcctttttttttttttttttttgagacagggtctcacccttgcgcaggctggagtgcagtgacaagatctcagctcactgcagcctcaacttccccaggctcaggtgatc

SEQ ID NO: 661810 - DNA, 2261 bp, Homo sapiens
catgtggaccctgagtgcagcaatcagagcacaacgccgacggacacctctgcaaggagacatggcaatacacatccacacgacgtgatccagtgccttaatcctgatgcagggaccagaacgacgctgcgaccgcgccgacgaacggaaccggctacgttgtgctattatcacacgaacagcaacccgattgcacaagcaaaggtaagactcactatacagactctcccaattctgacaatacaagagagagcattgtccgccaaggcagctctactcgacaaccgctagcacacccacgactcagtaaagatcggacccctatcgaccacggtccatgatccacactgctacacccagcgacagcttgaacactgccgcacgatggacccgatgcaattacaacatgacacaacttcacttgttctcacaacacgcaaccaacaccgtacactagccgtctaccagacatacagaacacatcctacatccgccaacacccgcacgaccacaccacccacaagcaaccaactgcagcaaaaccccaacacatagccagcggccaccagcacagaacccaccgcgagcaaaacacgcgacaacacgagggacagacaacacagctcacccacacaacaccaactacacccgcgcagctccacatcaaaacaaatgagacaagagaccacaaccacgctcactaacagcacaacagcccggcggaacacacacaagcacgacgaacagcagaccaccgaatcaaatactgcccgtccacgcagcaatcacacatcaggcaccaacagcaccaacgcgagactcacaccacagcacagcgcaccgcgatacaccataccatttacccacagccagccagtcgtgaaccgatcgacatactcgacacgcacagaaaactgctcatccactacgacgcaccacagcaacagcagacgcaacacacgaccgaccgctcgacgaacacgatacacagcttaggaacatacaaactatgacaacacgagacagacgacatcgagcgactcacatacacatacacacacagatacaacacacataggacacgagaacaagcactgaacatcaccaacgagaccgcgaacgacacgacacagactcggacgagagtatcgagttgcgacagccgaccgagagacagaagtgctagatagcagcacagcgtacgagctacagagcgcagcgcccacagacaactcgaaacgcaaaagccaccagaaccactcaacaccgatacgtacaacgcgagcgcgaagccgagcaaaaggagcgcgtcgagaggagacagaggtcacacagcgagagcccacgcagccctagatcgaacgacagacgagaaacgaaccgagcaagaagtacagcagcgaagcctgacgaacagccagacgcacagtagagagaagctagccacacagccaaagcagaagcacacggcagcatcaaatacactagtaccacaaccacacacaccaagcactccccacaccaacacactcacacctcaacatcacataacagcatgtcacaacacactcaattaacaacaacacacagccaacaaacagcatccaaacatcattacacacactataacaccaccacacactaaatacaaaaaccactcaacaatatacaaactacacacacaatatgattataaaacatacaaacagaacgacacccaacataccccatactacaaacaatcatatatccaacgcagagggaggcgctagaaggacgaagggaagtagaggagaagatagagaagtgaagcagtcacgtgcaaggacaggtgccgagtgagttacaatgaggaacaggcaccgagtagagcaagcgagcgaggaggagacccgaagctggtcgagaagcctgcagtgcgcacagactacagtccgtcggcgagcccaaccccagcgaccagctcagccgcagcagagccgcgagtagcaggcacagacagctgagagcgcgtaccagcacgcctaggcaccgagcacccactgcaggtagcgactaaagtagagagagagagcagacatcacatcgacgtctaatcgtagacaacgacagaggaacatcgaactcgagctcccactaagcagaccagaagcagcgcacagccacccggcgggccaacacgcaagccagccctctgcccagactgcacagcgagcacaactcgacgcaacacaggcccagccagcgagacagcgccacgc

SEQ ID NO: 661811 - DNA, 175 bp, Homo sapiens
acccaaatatttacagcctactgatctttgacaaagcaaacaaaaacataaaaagtggggaaaggacacccttttcaacaaatggtgctgagataactggctagccacgtgtaggataatgaaactggatcctcatctctcactttatacaaaaatcaactcaagaggtcgacgc

SEQ ID NO: 661812 - DNA, 781 bp, Homo sapiens
ggcgctaccgctacctgggacgtagccacagatacccatacagaggcaccccagacacagaaagccatacaccaagtacgggcctaccagcacctggccccccctaccgcccacccctaggggccccgatgcagcgagtacagagcggcagataccggcagtacagataggactaggagcacgcagtcacgcgcacatatagcgcgcgcagccacatactaggtatccgacgcacccaaccgtgtcccgcgtggacttcatagcctaccgctagtgcgactgcccagtaaccatgttgcctacgcccagcagatgcctgccacgcacagctacagctgctactccacaacgcaacacgctgacgccacaaccttgccacagcactcccgctcgcctcgcccccacccagcccacaatgaacatacccgaagacacacacctagccaccgaacaacgcgaccctagaaccccaccaaagaccaccacctcgcacagcgcagcccgacacgcaccgcatccaaccggcaacacaccagaccgcaccacactccaacaacacagcacaacaggacaccaagccatacaacttcccccgatggaccgacccacacattcacaccgtagcacttactaacgactatagaccaatggaaaattaccccaatcgaacatatgcccctaggacaacaccatatgatccccattgccctcctcactttaaagtcttgcgacatttcaaccattctccacacgttcttgccaataagtccctgctacccct

SEQ ID NO: 661813 - DNA, 707 bp, Homo sapiens
  misc_feature (54)..(54): n is a, c, g, or t
  misc_feature (63)..(63): n is a, c, g, or t
  misc_feature (67)..(67): n is a, c, g, or t
  misc_feature (72)..(72): n is a, c, g, or t
  misc_feature (79)..(79): n is a, c, g, or t
  misc_feature (83)..(83): n is a, c, g, or t
  misc_feature (99)..(99): n is a, c, g, or t
  misc_feature (107)..(107): n is a, c, g, or t
  misc_feature (152)..(153): n is a, c, g, or t
  misc_feature (159)..(159): n is a, c, g, or t
  misc_feature (173)..(173): n is a, c, g, or t
  misc_feature (179)..(179): n is a, c, g, or t
  misc_feature (181)..(182): n is a, c, g, or t
  misc_feature (187)..(187): n is a, c, g, or t
  misc_feature (190)..(190): n is a, c, g, or t
  misc_feature (201)..(201): n is a, c, g, or t
  misc_feature (205)..(205): n is a, c, g, or t
  misc_feature (213)..(213): n is a, c, g, or t
  misc_feature (216)..(216): n is a, c, g, or t
  misc_feature (220)..(220): n is a, c, g, or t
  misc_feature (224)..(226): n is a, c, g, or t
  misc_feature (237)..(237): n is a, c, g, or t
  misc_feature (243)..(243): n is a, c, g, or t
  misc_feature (245)..(246): n is a, c, g, or t
  misc_feature (248)..(248): n is a, c, g, or t
  misc_feature (250)..(250): n is a, c, g, or t
  misc_feature (262)..(262): n is a, c, g, or t
  misc_feature (265)..(265): n is a, c, g, or t
  misc_feature (283)..(283): n is a, c, g, or t
  misc_feature (300)..(300): n is a, c, g, or t
  misc_feature (303)..(303): n is a, c, g, or t
  misc_feature (312)..(312): n is a, c, g, or t
  misc_feature (344)..(344): n is a, c, g, or t
  misc_feature (352)..(352): n is a, c, g, or t
  misc_feature (365)..(365): n is a, c, g, or t
  misc_feature (369)..(369): n is a, c, g, or t
  misc_feature (391)..(391): n is a, c, g, or t
  misc_feature (402)..(402): n is a, c, g, or t
  misc_feature (405)..(405): n is a, c, g, or t
  misc_feature (454)..(454): n is a, c, g, or t
  misc_feature (458)..(458): n is a, c, g, or t
  misc_feature (461)..(461): n is a, c, g, or t
  misc_feature (471)..(471): n is a, c, g, or t
  misc_feature (478)..(478): n is a, c, g, or t
  misc_feature (480)..(480): n is a, c, g, or t
  misc_feature (484)..(484): n is a, c, g, or t
  misc_feature (487)..(487): n is a, c, g, or t
  misc_feature (495)..(495): n is a, c, g, or t
  misc_feature (498)..(498): n is a, c, g, or t
  misc_feature (525)..(525): n is a, c, g, or t
  misc_feature (528)..(528): n is a, c, g, or t
  misc_feature (537)..(538): n is a, c, g, or t
  misc_feature (540)..(540): n is a, c, g, or t
  misc_feature (561)..(561): n is a, c, g, or t
  misc_feature (574)..(574): n is a, c, g, or t
  misc_feature (625)..(625): n is a, c, g, or t
  misc_feature (631)..(632): n is a, c, g, or t
  misc_feature (674)..(674): n is a, c, g, or t
aaggacatgatttggagccgtccacatcttatcagacgcctttccactaatccnccccacttncccnatccntgacccnaacngcctggcccgtccggncagaagancagaggccgtaagaccaagctcccacagctgcaaggcgtaaaacnnatctcnccaccaattccccngggtananncaagnctncctttccccanatcngcagacanttnacanaggnnncaacattcccntccagnanncncnatcctgccctcnctnccatgaccaccaataacnccctcatcacgaccaanccncccagaagnccccccacccagtccccccactaccccccccncccatccntcccgcccccgcnactnacagccgacacgatgacgagantcacccgccanccncccacctgccccaatcccccccacccccaccccccccctgccctcccangccnccncccccccccnggccacncnccanccnatcccccnagncgccaaccagactgcacagccaatgcnatnatccaaaanngnatccaatggccgaattaagtnacaaattcgagtncttcttaatttctgcagttcttccatagaaacattaatttcaacaaaattncaaatnngggaagggctaacagcttgtagttcctttagtcccgcccttnctgtgattcgatctggtacactgacatgtttat

SEQ ID NO: 661814 - DNA, 614 bp, Homo sapiens
atggcattaatgcttacttaatgtcctatatgtggtgtgaagtgtagtttcttctaagaagaatgatattacagttacagaagtaatctgtatatgaaatctgagtctgtgtgaaatagaaattcttggattgtatttgaacgtgatttccttggagtaaatgtaatgaaatgtaaagcctaatccagattgttatagaaagttgtatgcagacatctttacttccttaagtgaccaaatgtgatctaactagttcctgtacgtgacttttcaactctaaattgcattcatactcatattaagcggccgggcatggtggttcgcgcctgtaatcccagcactttgggaggccaatggcaggcggatcatgaggtcaggagatccagaccatcctggctaacatggtgaaaccccgtctccactaacaaatacaacaaacaaaagcaatcagccaggcgtggtgggcaggcgcctgtaggcccagctactcgggaggctgcggcaagaggatggcgtgaccccaggaggcagagcttgccgtgagccgagatcggccactgcattcaagcctgtgtgacagagggagactccatctcacacaacaaaaccacaca

SEQ ID NO: 661815 - DNA, 141 bp, Homo sapiens
taactgtcagctttgtggtccactccttatattttcgagaccaactctcagtggcacttagaatgtgtgtctccttgcatggcttttctcagcggatcttatagttagatactgtttcttttggcctttagctcttccaac

SEQ ID NO: 661816 - DNA, 626 bp, Homo sapiens
tcccctttgttgctcagctcccccgtgtttttggaggtcttttttttctactccagtggtttctcatttttttgggggggaaatacctttgagcagaattacagagtgggaaaaaggagttctctcttcaccccttttctgtgttctcaagagtttcttttttatctccctttcctgtgtgtctgtgaacaaaaagcgtgtgtgtggaattcaaccacccaccgaagctctctgtggtgggaaaaaaaaaaacccgtgtctctcccttctggctctctggggtggaaagccgtgggggggtgcttggcgccccgtggtgttagatgggtgctttagaatctctcttacctttctttctcctctctctttttctctgtgtttttgtgggggctctctagaagaatgtctccccccgtggtgtctctttcttgtgtgtgaatattgtgagaacagggtttcagctatttgtcaccacaccgctgtgtgttcttctgtgtctcttacatatctctctttgtgtgtgtaataaaacataatagcagaacaaaaaaaaacattttacacacacaaatgtgcgggggtgtgtctattaaccagaagcgtgtcgccacccacacacagggtgg

SEQ ID NO: 661817 - DNA, 133 bp, Homo sapiens
gaatgagctcgaccgttaccctgtacattgatgtcaggttttgtccaaccctgcgccaagatcactctcgagcctctcgagcgtggttttggccacaccctgggcaacgcgctgcgcctgatcctgttgtcct

SEQ ID NO: 661818 - DNA, 596 bp, Homo sapiens
atcccaacactttgggaggccaaggcaggtggatcacttgaggtcaggagtttgagaccagcctgaccaacatggagaaaccccgtctctaccaaaaatacaaaactagccgggtgtggtggcacatgcctgctatcccagccactcaggaggctgaggcaggagaattgcctgaacccgggagacagaggttgcggtgagccgagatcgtgccattacactccagcctgggcaacaagagcgaaactccatctcaaaacaaacaaacaaacaaacaaagaacatagatcaaataatagaaccttggcagggtgtggtagctcacacctgtaatcccaacactttgggaagccaaggcgagtgggtcacttgaggtcaggagttcaagaccagcctggccaacatggagaaaccacgtctctactaaacaatacaaaaattaggcaggtgtggtggcatgcatctgtggtcccagctactcgggaggctgaggcaggagaaattgccgaacctgggaaggtggcaggttgcagtaagccgatatcaacggccactgtactccaagcctaggcgacacgagaaagactccgcttaaa

SEQ ID NO: 661819 - DNA, 517 bp, Homo sapiens
tcggaccggtcgacagttcctgaggcttgctgaagttgcttaattagcttagaaacaatggggtcttctaaatatacaatgcagtcatctcggagacagagaaaatttagacttgcctgtctctcctgttctgaatacactgtctttctttctcttgcctgactgtcctggccagaacttccagcactatgttgaataggagtggtgagagagggcatccttgccttgtgccagttttccaagggaatgcttccagctatagcccattcagtatgatataggttgtgggtttgtcacaaacagttgcttatttggagatacattccatcaatacctagtttattgagagttgtcagcattaagtgtataatttgatcaaaggtctcttctgcatctattgagataatcatgtggttcttgccattggttctgtttatgtgatggattacgttgactgatttgcgtatgttgaacaaggcttgcatcccagggataaagcccaagttgatagtggtgg

SEQ ID NO: 661820 - DNA, 96 bp, Homo sapiens
ctagaagattcagcaaagtacttttgtgctcttggggaccgtggcctctaccggccttcctcgataggagggattttttcgacagcacaactcttc

SEQ ID NO: 661821 - DNA, 235 bp, Homo sapiens
tgaggatccccggtcatctgtctagaccaaataagagatcaaaggaaagaggaaggagagagctaaggattgatttgtagaaagtccccatgattagaacttggatagaggaagtattttaatagtacttactggaggaataatcaaagtaggggaaagtcacagtaccaaaattatagaagccacagatatgagagcttccagaaggttcaaagcgagcagtttttcaagcatt

SEQ ID NO: 661822 - DNA, 312 bp, Homo sapiens
ccccccttcttttgggaaaaggggttttgggaaacccaaggttttgccctggggggtccccccccgggggggggggggccccccccccaagggttttccccgggggggggggttgggggggggggggcccccccctttccccggtttcccccccccccccccccccccttggggggtggccccttttttcccgggggggcccccccctttgggggggcccggggttttttttccccccccccccccccccccctggggtttttttttttttttggggggggggggggtttttttttgggggtttttttccca

SEQ ID NO: 661823 - DNA, 546 bp, Homo sapiens
atgaatgaatatatgtattcagtgtgtttatatatttcatttcatacatgtgatctatatcatatatatatatatatatatatatatcacaatgaatattgcataaaattaaagcaaatagtaagaagagttaaccaaatgttccctgaatgcagtgggaaaagatgaaaaggagaagacaggcaagcacagtggctcacacatgtaatcccaacatattgagaggccggtgcaagaggatcacttgagcccaggagctcaagaccagcctggacaacatggcaaaaacccatctctacaaaaaagtataaaaattagctgggcattggagcatgtgactgtagtcacagctaggcaggagaatgaagtgggaggatcacctgagcccacgaggctgaggctttagtgagccttgatgggaactctgctctccagcctggatgacagaataagaccctgttttaaaaaagaaatacgctagacgtttgtaccacattttcaggatttaaaattcactgagcagaaattccacaaggtaaatttaat

SEQ ID NO: 661824 - DNA, 572 bp, Homo sapiens
gctttgaaactgcaaaacttgttcggagctcttaattacaatatctgactattttctacagctctgatcttttgacttctacatatagtggaaatctgccaatactacacttgcgctggagatgggaactgtaacacacgatcagggtatgctaattttaagcaaactgtaaagatctcatagaataccatggtataacagtggggtgatttcagtttgtcgcataattcacatataggacgaattttaatctacaaagtattttccttgctatgtattcgtgtgctggctttctctttctgtttgtattgaggccatatgtcactctgtcactcagcgctggagtgcggtggtataatctcagcgtcacgtgcagagtcgtctgacctaccaggttcaaagtcgattcttcgtgcctcagcctctcgagtagctgggactacaggcgtgcacgccagcaccgcccagctaatgtatgttgtattcattacgtagagacatggatttcaccatgttggccaggctggtctcgaactcctgacctcaggtgatccgcctgccttgtgcctccc

SEQ ID NO: 661825 - DNA, 678 bp, Homo sapiens
tggcttgactcaggatttaaaaactggaacggtgaaggtgacatccttcggttggtgcgagcatcccccaaagtttcacaatgtggccgaggatttgattgccatggtgttttttaattatcattccaaattatgagatgcgttgtacaggaagtcccttgccatccataaaaagcgagcccattactctctagaggagaagtggcccagatcctctcccaatttccacacagtggagttgatagcattgcttcgtgtaagattatgttaatgccacatgtgttttacttcttcgccttaaaattttttaattgtggtctagatttcgaagtgattgacccttccgtgcccccccattcaccccttttagtgggccccacaacttgaagatgtatcgaaggctctcgggtcctcccttgggaattggtgtggacggcacgccagggcttaccctgtacacttgacttgacgaccatgtatcaattaaaataggtgccaccccttttaaagaaaaacgacacataacacacaagacaaacaacagtacaccaaaaactagcagaaaacaacacacacaagagggggcacgcgcataaaaaatccaccgaagggacacacacaattagacaccccaaactctagtagagcaaggcggcccataaagacaaataaacacaa

SEQ ID NO: 661826 - DNA, 814 bp, Homo sapiens
agcgggtcgcgagcgctgcgtcgggaggcgctccgaggttcgacgctgtgccccgcgaagcccgccttcggtgctcggctcgtgtggatggatcccgtacccggtgacagactcgtggccgctgggtggtctggcctggctcgttcggcgctctgcacccccggccgcgtgggtgcttcagactggcgactcgtctctgtcacgccgtcgcacgtggtggcagcccgcactatgcctttggctcgatgctttgcgcgcagaacctctggctagctctcctgtgccttgagttcttctggattcagtctagcagaacccgccggacaacgtggtggtcgatatccaggtcgtgtgtggagacaagagacctcctgactgtctgggctgtgcttcgcctcgtaccatgaataccccgaatgtaattccaagatctactggtgctccatggtatgaaacgcatgtgctgtgaaggctgttggcactagtgaatgccacggaccacgcggtgtgctcagatgtccggttgacatgggaaaagaccaagacaggtgcctggataccttcctgtacgtgggaccagtggtgcggctttgccagtcttggtgccagagggccaacggccccgagcgccagtgccccatccccgaggtctcagccgggatcatgcagggctctctctctggatggcaagacagccagacaatgtaagggcggacttcctggagcggatcagtgtcctcgggtgatgctcttcgggtctccacttctgcgtgaaggacattgactccatctgcgaggcctccaagcctctatg

SEQ ID NO: 661827 - DNA, 112 bp, Homo sapiens
ctggtgcatcctcctcattctcctcatccatgtgaccttctctggcattctgggcattggcgtgtacccttccgcttacctgtgcccatgtgcctatgaaggtccaggtatg

SEQ ID NO: 661828 - DNA, 266 bp, Homo sapiens
acagaggctgaatggcgtgaacccgggaggcggggcttgcagtgagccgatatcgcgccactgcactcctgcctgggtgacagaacgagactccgtctcataaaaaaaaataaaaaaaaattctttttttcacaaaaaccctgaaataagttggacaaattttaacctagggggacctcttaaattgggtaacactgcttgggaaaatgtgatttaagcatttatacccttttataaaccttgaacttgtgctttgcccttaaaac

SEQ ID NO: 661829 - DNA, 234 bp, Homo sapiens
aaagggaaaaaaaaatgaaggtcctttccaggagtttcatttcttttcccccattggaccaccccgcagtacttttggcccggctccaaggaccaaaattggtttactctccgacccctaaaaagttccaaacctgtgtcttaaaagaattatttatagttcctataactgaattgcccaatgtccccttaactgataaattaaatttggtaaaataaaaaggccgtttattta

SEQ ID NO: 661830 - DNA, 679 bp, Homo sapiens
  misc_feature (369)..(369): n is a, c, g, or t
  misc_feature (410)..(410): n is a, c, g, or t
ggaagggtagatataaatattgtatatatacacaaatacataaaccagtcaatagcattgaatattcacagtgcccaaattatggtccttgaaataccattttctccatacgcttgtttatattttcaaaaagaaataatgggaggatgaactaaacacgaatgaaaatggttacctataagggaagggaaggaaaaggcagagagatagcaaatagttcctttctgattgtaccttgtttttatagttctgaatttagaaccatataaatatttttttatttttattttttgagacagggtctcactctgtcacccagcctggagtgcagtggcgcgatctcggctcactgcaacctctgcctcctgngttcaagcgattcgtcatgcctcaggctcccgagcagctgntattacaggtgcacgccaccacgcctggctcatttttttcttttctttttttagtaaagacagggtttcacccatgttggcacagcttgtctttgaacccctgacaaatgatcccacccacattggcctcccagagtgctgagattaccggtgtgagccaacacgtccagccgatataaacattttagaaattaatcttaaaacactccccaaccgtcctctcgcaaatgcccctagaccgaacgcctaggtatatatctaggtgtggc

SEQ ID NO: 661831 - DNA, 126 bp, Homo sapiens
  misc_feature (81)..(82): n is a, c, g, or t
gggagttgaaattgtcctacaggagccctggagaattcagcacttctcaaattctatactggcagatgaaggaacccaatnnacctgaggatacctgaaaaaggaccatgggcctctgggtgtgga

SEQ ID NO: 661832 - DNA, 159 bp, Homo sapiens
ccgaccacggctccgtcgcaggccgcacttctcaccccaggttctctctgcccgggtccagtcacacacttgtgtccctcttcatcacattttcaccctgtgttcgtccacaccagtcctcatcccttccagccatgtgcacacactgtgtcgcgcatt

SEQ ID NO: 661833 - DNA, 854 bp, Homo sapiens
  misc_feature (654)..(654): n is a, c, g, or t
  misc_feature (656)..(656): n is a, c, g, or t
agcgggttcagctggctgcggccgagtcatcgcctaccgctggcagggccgttgagcgaggcgactgaggcgccgattggcctgattgtccactgcgcatgaagtgagcatctagttcttcctgggaccccgcacagtttgtcccgcagctgagagaccagagtgtcctggatgtggtccagccgtgtggatagtccgatgggtcttactctggaagaaacccgtgcatggtgtcacttcggaacagcagtatagtgcgcttgaccgaggtatagccttacaatacgcttgaaagtcctccgagcaagcgataatgtttggctcgaagtttcgacagagagaaacgtacttcattcccaagccctaagacgccaggacccgtcgtaagatccagagagttacgtgtcccacggcgtcgtccgtctgattggcctccaagatccatgaggtcttgccctgtgaacctctggggtgcgcactgagctgcatgggacgatccatgaggtgcggattagggctccccttggtcaccgcgtccctgagtcctggtaaccacaagtccttgagcgtgtgaaaagacttgtgcatgtctgttgacgcaatactaaggtgacacttatccactaggcaaattattgacagattatttgcttntnagtgaagaaatctggccatttttccactttagttgccactcttggcgtagtagacgtgtgcactcgcgtgccacgtgtactaactggcgagatactggttttattccgagcgtagataatggggaaatgaaaagctgggccactgtaacaccttttttccattctagatacgctcattcattcctgatttgttgtacc

SEQ ID NO: 661834 - DNA, 250 bp, Homo sapiens
  misc_feature (2)..(2): n is a, c, g, or t
cnggtaagagcggtctcaacacacttggctgtatagcagaaatggacagaacattgtaaatcaactataataaaaaataaaacaacaaatactgctaatgaacctaagaattcatatttgatattttccttgtaaaacttactgtgtatgcatcatttggttagaagtatcttttattactttggtaaactttcattactcaaaggtacataaaaagaaattacaactataggggaaaaaagaaaacacc

SEQ ID NO: 661835 - DNA, 442 bp, Homo sapiens
cgagggcagtgtgacacgacggcccgaggtatcacgatggccagagtgcatctgagggccgggggtagaatgctcgatgcctataatcgcaccagttaagaggctgaggcaagagtatcgctggacactcaggagatcaagaccagcctgaataccaatgcaagatgctatctttatcaaaaatttgaaaatattaggcatggtggtatgtgctcataattccaggtacttgggaggctgacattgctgagaccagctcagtcggggagaccctaacccagtggcgctagagggcataaaagacacacacacagaaatatagaggtatgaaatgggaactcaggggtctcacagccttcagcagctgaaagccctaaagagagatttacccacatatgtattaacagcaaaccagtcattagcattgtttctatagatcttc

SEQ ID NO: 661836 - DNA, 230 bp, Homo sapiens
gtcgacagaagtgctggggaagcaagtcaaggcaaaaggaaaggtatatgcgcaaagggacagacacagaaggggagagcatggctggagttgcagcgtggtgggttagagagtacacagtgtggaggaagagggagaagcctggtgaaggtgagtggacatgttgagaaatgcctaatacccttggcgaaagaaacttgaatctttgttatccatctgtgatagggagc

SEQ ID NO: 661837 - DNA, 897 bp, Homo sapiens
  misc_feature (53)..(53): n is a, c, g, or t
  misc_feature (68)..(68): n is a, c, g, or t
  misc_feature (70)..(70): n is a, c, g, or t
  misc_feature (118)..(118): n is a, c, g, or t
  misc_feature (121)..(121): n is a, c, g, or t
  misc_feature (126)..(126): n is a, c, g, or t
  misc_feature (131)..(131): n is a, c, g, or t
  misc_feature (133)..(133): n is a, c, g, or t
  misc_feature (138)..(138): n is a, c, g, or t
  misc_feature (144)..(144): n is a, c, g, or t
  misc_feature (170)..(170): n is a, c, g, or t
  misc_feature (287)..(287): n is a, c, g, or t
  misc_feature (350)..(350): n is a, c, g, or t
  misc_feature (374)..(374): n is a, c, g, or t
  misc_feature (401)..(401): n is a, c, g, or t
  misc_feature (431)..(431): n is a, c, g, or t
  misc_feature (484)..(484): n is a, c, g, or t
  misc_feature (511)..(511): n is a, c, g, or t
  misc_feature (522)..(522): n is a, c, g, or t
  misc_feature (525)..(525): n is a, c, g, or t
  misc_feature (539)..(539): n is a, c, g, or t
  misc_feature (570)..(570): n is a, c, g, or t
  misc_feature (573)..(573): n is a, c, g, or t
  misc_feature (577)..(577): n is a, c, g, or t
  misc_feature (579)..(579): n is a, c, g, or t
  misc_feature (594)..(594): n is a, c, g, or t
  misc_feature (604)..(604): n is a, c, g, or t
  misc_feature (610)..(610): n is a, c, g, or t
  misc_feature (621)..(621): n is a, c, g, or t
  misc_feature (629)..(629): n is a, c, g, or t
  misc_feature (637)..(638): n is a, c, g, or t
  misc_feature (673)..(673): n is a, c, g, or t
  misc_feature (689)..(689): n is a, c, g, or t
  misc_feature (698)..(698): n is a, c, g, or t
  misc_feature (722)..(722): n is a, c, g, or t
  misc_feature (730)..(733): n is a, c, g, or t
  misc_feature (736)..(737): n is a, c, g, or t
  misc_feature (745)..(745): n is a, c, g, or t
  misc_feature (753)..(753): n is a, c, g, or t
  misc_feature (768)..(768): n is a, c, g, or t
  misc_feature (777)..(778): n is a, c, g, or t
  misc_feature (780)..(782): n is a, c, g, or t
  misc_feature (794)..(794): n is a, c, g, or t
  misc_feature (808)..(808): n is a, c, g, or t
  misc_feature (861)..(861): n is a, c, g, or t
aaatttatttataggcaaggtgcactggaggcacttcccagtggtgcactgcngcgcggggtgtcccnangcagctagatacatgttaactgcatagagtaccataaaggagcccacnggngggcntcacngncaccnggcccngcgggctggggcttccattgtctacngggtctgtccacaccccagattgccttgtggtcctttcccctggccaagaagataacagttttttaaaaatccccttctgatatggatgtgagcgagcggtggggttcagtttgggnccaagcagtgccatttacaaagagcatgggaagcacctccttagggggggggcagggccatcnccacgttgtcaggggccgcgccgntgcctgccaggccctgggcccacttgngcgggcggctgtggggtgggaggccctggntctcacggtacaagtagaagccggtgatggcattccaatgtggccgtggctgngtgccttccaatgggaagttggcaatnagttcctcatnatncttgtggagcgccncaaagccaaagaagcggcgcacattgttggnagngagnanacgagagtgcaactnggacgtgcgntggaanactgtgtactnattggcgnggtaatgnnaacagtaggactactggcggtaactgagtggtgancagtaatgcttgaggnacttggtanaggaacaacaggatggacaacacnacgatgannnnacnnacaaaganctgggacncataactgaaactgnggctgaacnncnnncggaagtctganaggttgtcagggtnctacttgcaggggaactggacaggattacagtggcgtgggctgatgggaagtncactaactggacgtgagttaggtagggtacacgaac

SEQ ID NO: 661838 - DNA, 492 bp, Homo sapiens
  misc_feature (250)..(250): n is a, c, g, or t
  misc_feature (289)..(289): n is a, c, g, or t
  misc_feature (403)..(403): n is a, c, g, or t
  misc_feature (420)..(420): n is a, c, g, or t
  misc_feature (449)..(449): n is a, c, g, or t
  misc_feature (476)..(476): n is a, c, g, or t
atactgctgtggtttgaatgttccctccaacactcatgttgagacttaatccctaatgtggcaatactgaaaggtggggcctttgagatgtgattggatcgtaaggctgtgcttcattcatgggttaatggattaatgggttatcacaggaatgggactggtggctttataagaagaggaaaagagaactgagctagcatgcccagcccacagagagcctccactaagagtgatgctaagtggaaatgtnaggtgcagctgccacagaagggcccccaccaagggaaantgtctagttgtctagtggatccagggccacaggagagagtgccttgtggaagcgctgggagcaggaccttgaccaccaccaggaccccagaactgtggagtcagtgggcagcantgaagcgcccccctttnggaaaagcttttaggcaccagcctgcaancccatttcgagcagccacgtaggctcnaccccagcaaaagcca

SEQ ID NO: 661839 - DNA, 122 bp, Homo sapiens
tatcagcaggatcccctggccaaggttctctcactccagcctcccgcagtcagctggggcattcacaggtgccccacccatcatgcccgggctcaattttttgtggtcatttttcagtcagc

SEQ ID NO: 661840 - DNA, 123 bp, Homo sapiens
gcctagagatccctcgtaacagcgctcgtaacgtcgtacgagcctagagatggcttttgcatgtttcccagctgtcttgaactctggctcatgtgatctcctgttcggctccaaagtgctgga

SEQ ID NO: 661841 - DNA, 167 bp, Homo sapiens
gcttctgctgatagctagaaaaaagttattacataattctgaagatgaacagagacttaagtcagaaattgaagaagaggagctaaaagatgaaaatccacaccattaccagtgtccagttctcacactgcccagagcaatgttgatgatcgtaaaacagagactcg

SEQ ID NO: 661842 - DNA, 120 bp, Homo sapiens
gacgtgaggtcttgttatagtgggagcttctcaagatggactcaaaagttccaaatgtggcttgcaaggactgcaccttctgctcgacgccctgcagggaggctcacaggtgctgggtac

SEQ ID NO: 661843 - DNA, 747 bp, Homo sapiens
gtcaacaccattcttgtgagcgtaactaggcaatggcttgttactggtggaggatcttgaatatgagtgtccaggttcttggcgtttgagcaaagaatggacaaaacatacaaacaaagcagtgaaggaatgaaacaacaaaagcacagatttactgaaacaaaagtaaactccacagaatgggagcagactcaagcaagcgactcaagagcattggttacagaattttctgggtttaaatactctctagaggtttcccattgctatttagtttacaccctatgtgaatgaaggagtggcccacaaccagtctaattcgtctgggaaggctaccaatcagaggctgatgttacaaagttataccgctatgcaaatgaagacgaggtcacaaccaatctgatggtttcaggagaggaccaatcagaggtactttccatttttcatctgcaatgcagaaagggtggaggttacaaagggagtagcctctgatcctttgtgttccttgagcgtggaaagtggggttttccttttgatttagttctagaagtcagcatgaatcagccttaggttccctgcctccagaccctattcttcttcttcacctaagatattctaacctttgtgttaccttccaagaaaacaatgatgtggtactagcaatgggcagcacaggttgttatcttctgtggagtcatgatcaatgaacaagtcctctttattctctaagcaatgctaaaaacactaaga

SEQ ID NO: 661844 - DNA, 499 bp, Homo sapiens
ggattacaatcagtttggtattggtttttccattgcaatgatgccctcccacttttcatatggctatatgtatcataggctggcaatgttagaaatttcttactctccacatggaaatacagtagctacaaatcttacagaacaggtactcaaaaaccagatcctacagtgagttgtaaaagccacagaaatattagcaaatagaattgtgcatcagttaagcttctttatctctattttgacaggagagttgttctgggtttatgggagcctgaaagtctagaaaaagattaaaagccgctgtttacctctgttaatcttcctaatcagcaagtaccaggtaccttatgtaatggaactgagatttctaaggcactgcttctaagtaggaatcacactgcagtgggttagtgacaccctgctcagaaatggtgcctgtgcaaaatgtttcaactagctccaggagagcaaagtcagctagtgttcacaaacaaacaaa

SEQ ID NO: 661845 - DNA, 1145 bp, Homo sapiens
  misc_feature (336)..(336): n is a, c, g, or t
ggagaagtgctgctgccctgggaagaggctcaggacaggcaaaggaggaagggacgagtctacgactctgacacgcctctgctcaccggaacgttcgtctgagcatccgtaagagctcacttcgtccacagagggaagaaacaaacaagacagcaggagactcgtgtgaacccctctcagcccctccctgtactcagcacatcaatgtggaaaggggagctcgtgttcacaagtagtgatgaacttcactcatagctcactcacatcatccaagtcaagacaaggttgaaatcaccccagaggtatggtacattggcaggctagttgaccgctgtnaactcgggttgatgcctcgagagtactcggtatgactaggctaagctaggtgagtttggctgaaggggtggtcatgaaacatttcacgcgtaattcacgtcgacagagcgggtttgcaaagaccttggtccgaagaaaaactcgcaaaggaaggggaccccgtcagtgagtcagtcttgtgaggggtcagagtcagacgtgaaagtaggtataattgtgtcccagtgaaaactccgttgagtgagaagagtggttggaaagagttacttgggcaacacccaccatagtttggaaggatgtgttcgaggcccaggccaaaaggtttgtaaacctcagtgttccagctctacatgggaaagtgcatccgccgtcctcgtagtaggcacatgaaacaggtgaacttggatcgattatgaggcacactttcctaagcggccaattgttttggacgatacccttaggacgaaagtttacggggaataatcttacccaacgccttttaacgattttgggggcctagcggccttaaacaggttagggttccaggataggacacatcccccagtgactacaatgggtaccaggaagggggtattgaaagagacggacaaggcatatgggaaacaccactcggggatactaacataccattatgcctgaggcacccaggtgtgtatacacggggagtaaaaactcgcaaataaccaggggacaccccttattcgagagtgagtgggactaattaacgagggaaacccgtaaatacatgggttgggcttcttcaccggctcggtgtatgacccccagag

SEQ ID NO: 661846 - DNA, 117 bp, Homo sapiens
attatatgcaacgcactgcatgttcgctgttctgtctgtgcggggctggggcaggcggtggcgtggcagcagcgacagccgtggcgcgcttctggcgccggtgggcgcagatcgccg

SEQ ID NO: 661847 - DNA, 237 bp, Homo sapiens
gtcgtgatcaaaagtcgatatgagaagtcaggggaccgtgtgagtcccatgaagcatggagacagtatgcaggcgtagtgaagtgggcaggcagcgtcttgccagaggatgaggatgaaaaggaggaccaggaagaggaagaacaggaggaagaagatgatgatgaagatgatgatgacaccgataattcagatgagcttgacactgcccagttgctggaggcggagttggaggagg

SEQ ID NO: 661848 - DNA, 344 bp, Homo sapiens
  misc_feature (34)..(34): n is a, c, g, or t
  misc_feature (143)..(143): n is a, c, g, or t
atagctctgatagctttaattttccctaagcagntcgtgtctatcagatgtgcacatctggctgtgccaggttgaagtatagtggaacccatcagtagtaatgtgtagtagttatgacttgttgacatttttccattataaanctttacatttgtgacattgggttataatggcaatttaattaactggtggggactttatacttgtcattggcgctgaaaggttgacaggatttcagccaccacttgtgaatttttatttagatttccattatgtatttatcagaattctttgttaatatttggaaaactacacgaaggcatttgggaaaaaaaacacttttc

SEQ ID NO: 661849 - DNA, 443 bp, Homo sapiens
tggctgcccgtactccttcccacggtactgaaacttgatgtccaagtcagtcattggcagacacgctcgatccacagtcctggacagctatataagcgctgtataggtgcctgggcgtacttaccatctccaggggtccagttttgggccacactgcctccgggctggagttcgcccacactgcaattgcccacactggctgtcgctatacaaagaacctaaaacaaaagcatatggtgagcagacaggggtaccacacgtgcacatcacttgctgatgctctgagaactcacaaggtcagtagacaagaaccaaacattgaaccctgacccagtgtgatcttccagcccatccagtgattcccataaactaacgcaataagaaataaggtcccctgctcctgcttcctagtcatattatttctcccaaaaattcatagttta

SEQ ID NO: 661850 - DNA, 695 bp, Homo sapiens
  misc_feature (695)..(695): n is a, c, g, or t
aggtgatggtgaggaagaggatggagatcattaaaaatggctgacccgaaaaaaaaaaaaaaaaaaaaaaaaaaaaaaaaaaaaaaaaaaaaaaaaaaaaaaaaaaaaaaaaaaaagagggggggggggcggggcgcgaaaaaaaagtagttttaaagtggggaggcgggggctataaaaagtcttttctcttagagggggcgcacaattttatggcgcgccgccccttttttgtgtggaaaaagaggggggcccaatatgaggggggaggtgtatatatatatatcaagcaggagggtgggcgggcgctgtttttattaacaaaaagaagagagtgggcgggaacaacggtggagaaaagggaggggagtctttggggaaaaagaggaaacacctcatttatttcgtgtgtgggtgtggaaaaaaacagggggagaaaaattatataatatatatgagtatttatatatacaagagcttataggcagggcaatatatatataaatattcttaaggggggagtaagaaagcgcagagcgaaacaacacaacccggtcacaatatgtctgcggctgtgcagcgtgcggaaaagaaaatgtgtgtggtgcagacgagggtgattttgtaaatatattatagagaatatttatttataaacacaggagggctaccttcataataaaaataaaaaaaan

SEQ ID NO: 661851 - DNA, 815 bp, Homo sapiens
agcgggccggcggcgtctggcaagggccgggagaacggcgagagcagctcctcctggaaaaagcaagctgaagaccgatcaagaagatcttcgagtgcgaagagaccctcgagaaccggggccttttccgacagtggtttgagctgagaagagaaggcgatctggcaaggctctattgctgtgagggtgtatccctaagaaggcgctgaagggcaatggaagaggcaggcatagagcaactgacgatagcccggtcctgacagaaagacttaccgcaatgaagaactagttgttgcgcctggacagacactttagtgacaatgcctcgaaatcgacctagtagctgtgtgtcattgcctgcatggctgtcctgggtggagcagcatgtttgagccggagtacgtgcgagagaggggctttatacgagagagaggattgccagtgatctcttgactccgcctaaagtcttggaaacggccgtgtactgatctccacaagacatgggcatccgtccatcgagacgacctcaatgcccgaaaattcgtcttgtactcacagtcgacagatgaggaggtccaaaactaacttgatcagtgactttggattgtcagaaatggacgggcaaaggagatgtgatgtcctacgtgccttgtgggaagctccaggactatgtcgctcctgaagtcctcgcacagaaaccttacagcaaagaccgttgactggctggtccatcggagtgatttgcctacgatcttggctctgcggcttacctcctttttatgatggagtgactcaagctcctttgagtcagatcc

SEQ ID NO: 661852 - DNA, 656 bp, Homo sapiens
  misc_feature (165)..(165): n is a, c, g, or t
  misc_feature (225)..(225): n is a, c, g, or t
cgtcctccccaaccctccctgggtttcctcttccgaatggcaatgccacaacgggttccatggaggtcagcgccaagcccacaggcttgttggagagcccaagctggataggctgctcctggacttgaagcaccaaaatattggccccttcccgcgttgaattgntgcaggaaatcatgaaacacattgtacccattcttgtgctgcccagggttaacgagaaantacagaaaggcttccctctcccgacgccggccaaagtccagctttacaaagtagtggttcagcccccccaaaacttcctgctgttcggggcaaacgttgtctataaatgaaggccccaggggggccgggggctgtcacccgcccctgttcctgatggggtgtggggccccgggtgcctttccccagggaatcctttccagattttaaccaagagccccctgccaactttttcggcccaggttccaaaaaggatttaaacccgaggaacccttattccttggaaaagggcctgggggggattttagggattatgagcttctttcaaggggtaagggggcaaaaaaatttccccccggaatcgggtttccattggaccccaaaaatttccctttgggcttcatgaaaaaaaacttttggtttttttcatgtga

SEQ ID NO: 661853 - DNA, 231 bp, Homo sapiens
caaagaaacaaaccaaaccaaccagctcttggatggaaagataaaatagcgcttttttgaaatggagaggaaaaacttgggaaggaagaggccggctgtgggggcaacggagccagccatgtaagaatcagagctgctccttcctgtgaatccaagggggccccatgtcttctggcgagcaacagtacaaagcagggagctaattaagagattaaaacttaaaaccaaaaa

SEQ ID NO: 661854 - DNA, 313 bp, Homo sapiens
  misc_feature (6)..(6): n is a, c, g, or t
  misc_feature (8)..(8): n is a, c, g, or t
  misc_feature (26)..(26): n is a, c, g, or t
  misc_feature (33)..(33): n is a, c, g, or t
  misc_feature (38)..(38): n is a, c, g, or t
  misc_feature (63)..(63): n is a, c, g, or t
  misc_feature (98)..(98): n is a, c, g, or t
  misc_feature (139)..(139): n is a, c, g, or t
  misc_feature (142)..(142): n is a, c, g, or t
  misc_feature (144)..(144): n is a, c, g, or t
  misc_feature (148)..(148): n is a, c, g, or t
  misc_feature (157)..(158): n is a, c, g, or t
  misc_feature (172)..(172): n is a, c, g, or t
  misc_feature (217)..(217): n is a, c, g, or t
  misc_feature (259)..(259): n is a, c, g, or t
  misc_feature (261)..(261): n is a, c, g, or t
  misc_feature (285)..(285): n is a, c, g, or t
  misc_feature (295)..(296): n is a, c, g, or t
  misc_feature (299)..(299): n is a, c, g, or t
  misc_feature (304)..(304): n is a, c, g, or t
ttggananaaaaacagcagaattttnataaganaaganaagcaaaaactaataagaagatggntcacataaagaagagaaacacagagaatgcttatnacgcaatcataaattgggaagctaatgtcaccggttcccanctncnaagnagtattttnncaacttcagatgtntcacaacataacattctcacgagtcacagcaaaaccagacaaganaagagaactgagatggaatactatacccatgagaagcaagananaggcactttgaattcaaatgcagnttatgaacanngtnatttnttcaataaa

SEQ ID NO: 661855 - DNA, 175 bp, Homo sapiens
ctgaggttccccctgcagctcgggcttggcccccatgctagctagccctgagcacctgcttagtgtaggggggcatccggctgggacggtcctttgtttcatttccttggactctgaggcctcgagtcaatgggtcctttacgacggtcctcttacgggatgtgttgcagccagg

SEQ ID NO: 661856 - DNA, 406 bp, Homo sapiens
ttaaagtggttcccactggctaaatttaagaccatttgtgcctccaaaataaataatgacaaggccgggcatggtggctcaatgcttgtaatcccagcactttgggaggccaaggggggcagatcacttgaggtcaggagttcaagaccagcctggccaatatggtgaatcccatctctactaaaactacaaaaattatccaggtccatcctggctaacacggtgaaaccccatctctactaaaaatacaaaaaaaattagccaggtgtggtggcaggcactatagtcccagctactcgggaggctgaggcaggagaatggcgtgaacctgggagccagagcttgcagtgagccgagatagcgccagtgcactccagcctgggcgacagagcgagcctctgtctca

SEQ ID NO: 661857 - DNA, 1298 bp, Homo sapiens
catagtgaccctatttctaatcgcaatggcattcctaattgcttaccgtatactgaatatatattctaggctatatacaatctactgctatatagtgccccaacgattgtactgctccctacggtctactacaaaccattacgctgacgccataaaactcttacaccaaagagcccctaaaacccgccacatctaccatcaccctctacatcaccgacccacagaccattagctctcaccatcgctcttactactatagaaccccgccatccaccaataccccaaacacccacctgagatacaaacctcaacactaaagaacatagacctaagtacaactaaccgaggccacacactcacatagccgcctgagaccgatcacaacatccaacagacgcgagactgcggagtaccgaggcatcgagaccatccgaagcagctcacacagaaaagcgagaccacaagcagaccggcacgcacacgagcagacagcacgccaacccccccccaccacaactcaaccactaatgacccatacaccccataccaacacacacatcaaaacgtaattccataacttaacctcaatactctcggctcacctataaaaacatacaacaaacccacacacaaacaacacaccaacacaacaccacaaatcacgaagacgaaccgcccgcgcgcgcaagcacatgagcaccctccgacgcccccccgccccccacaaacacacatcatcacaacagcccacgccagacacaaacaacaccggaacacgacgcacacaccaacccacagaccaaaaaaaggaacgcacaccgccaccaaagccaccacagcgacgaggacagagaaaagaaaataagaccggccaggcaacaatggagccccagccacacaccgctcaaaccgcagacaacagacacacgcacccactccacatacacccgcaccgacagccgcacgcagcgacacaccaacacacacaagacacaccccgtaacccacgccaccacctaccgcgaccacaccccccgaccccaccgcgcacccaaacacacacaaaccacaaccaacacagaataatagagaccagagcaccgccaacagcccagcagcgacagagcacaccaccaccagcagaaccaacacaccaacctagcaccacccaagaaagaagaagagaagaccacaacaacacaaaacccacccaacctaaaaagaaccagaggggacgcgaacaaccgccggagcaagaccacaacaagaacgcgcccaccccacaccagagaacaccc

SEQ ID NO: 661858 - DNA, 482 bp, Homo sapiens
tactgtggtccatgattcctgacctatgatttatgggagtgtgtgtgtgtgtgtgtgtgcgtatgtgtgtgagtgacgatctaaataagttcatgtattgtctagaggcacttgatctttctactcaatctctacttactttggagcccgatactgcttcatcacagttccttacatacgcagaaacttattcaatgtttgctgagctgtgtacgtaggcagaataatggttccccaaagatgtccacattctaatcccaggaccctgtgaccatatcacatggcaaagcggcgttcaggccagcgttggcacttaagatcacccaactcagccaagtttaagcatcagccagcagcatcatggattcatccaggttccttaaaagttggcgcctgtgcaggccagccagcaggtcagcagtgatctgctgtgggaagcacctcaacctgctattgaaggcggaggacgggagcacaagcag

SEQ ID NO: 661859 - DNA, 400 bp, Homo sapiens
aaaatctccatcgcgacccatttaaaaataatttttcatccaggcacagtggctcatgcctgtaattccagaactttgggaggcagcagcatgagaatcatttgaggtaaggagctcgagaccagcctggcctagatggcgaaacccagtctctattaacaatacaaaattggccgggcgtggtcgctcatgcctgtcatcccagcactttgggaggccaaggcgggcagatcacctgaggtcaggagttctagaccagcctgaccaacatggtgaaaccccatctctactaaaaacaaaaaattagctggttgtgctggcatgcacctatagtcccagctacttgggaggctgaggcaggagaaccgcttgaacccagaggcacagcttccagtgagca

SEQ ID NO: 661860 - DNA, 363 bp, Homo sapiens
cctgcccatattcgcactcacatgtatggtggcaagtgtaatgtgtaggtttctttagtcacatcaaaatttgaattaaaattcatatgttacccacaaaaaagttacatagccgggtgtgctcttttacctgctataaggaatctgtagagtttagggggtcgaagcttcgtctctccgaaaaaacaagtctctagaagattcattatacgaagaatataagggttagctctctatatattccgtaggctataatatttattcgtacgctttcggcattatatagagtgggacagggtaccatataggtctgtatataccccatgcgagcaagtggtatgcaagacgatgtttgggagtgcg

SEQ ID NO: 661861 - DNA, 1259 bp, Homo sapiens
  misc_feature (204)..(204): n is a, c, g, or t
agcggagtcgagtgcacgcgaatcgagccggcctgggcgccgactgcagagtccgtgaagagcgctggtgagtctttgccgaggtgttcctgagtttcgcatcgcatccgttcgttgcatgctggttctgctgcttcgtgggcccctacgcgcggtatccgacagcaatgccgcccagaggatgtagtgaaagttgactagtangtccggagatctccattgcactctaggacggagtggccatgtcccaagtttcgcttactagtctcagtgaagcattgcatcgtacttcccccgtgtgcaccgcggatttcttactaggaaggacggcgggcatgcttgaaggacttcgaagactgggcgtgtggacctgtgacagcgctatcctatgacagtatgatgacccattggaaacatttcaattgagcctcttgggcaaggggacatgtactcaagttcgacatggaaggaacgcattgatgtagcgcaattatcttatcctctcagggcttggctccattgatcctcgtggacacgcggcgttatcccttggacgagccactggggctccctacgagtcatgtggcatgatggtggggaaaactggcgcggaggagcatgtacccattgcttggtgtttgacctatgagataacagacgatcctgattattctttctttcacaggcttctcttgccgaacacgcccatgggatttaacctttgggggcagagctggttagcgacgacatgttgggcatggcgcgtgcacgtcccgtttcattgcacacggaaacggattggacatgcgcttccattcccaattcgtgaatcgcaagacaatggggaccggggcccaaggtttgttaaaatcaacgttgccatcgcgttctgggacgcaactcgggccctttttttggggccccggcgtacacttctctgggtcccattggttgacattttgccttgggagtccaaaccgtggcgggtcgttttccctttggccttaggaacaagcaggcgtctattccagtccccaaacgcattgctgggcgagcggcaaatgggcatcgggtacggggtccccaacggttgtttgacccaaggttgggcattgcggggacagccacgaattgtgcgacactcattttccgtgggaaaaacttgtcgtggggcgcccttggagcaggggcggcctctttgaactcacgtacacaggaaagtcgtccttttgggaaaccaaggcaggccacacatacgg

SEQ ID NO: 661862 - DNA, 181 bp, Homo sapiens
ccggtacccagagttggcgtgcccagggtagagtacagttgctatcggggctcacggaaggctgcgccttccggttccaagtgattctcctgcctcagcctcccaagcagctgggactacaggagtgcaccaccacgtctggctaattcctttttcctttttttttttttttttttttttt

SEQ ID NO: 661863 - DNA, 732 bp, Homo sapiens
  misc_feature (166)..(166): n is a, c, g, or t
  misc_feature (360)..(361): n is a, c, g, or t
  misc_feature (382)..(382): n is a, c, g, or t
  misc_feature (425)..(426): n is a, c, g, or t
  misc_feature (442)..(442): n is a, c, g, or t
  misc_feature (473)..(473): n is a, c, g, or t
  misc_feature (490)..(490): n is a, c, g, or t
  misc_feature (498)..(499): n is a, c, g, or t
  misc_feature (522)..(522): n is a, c, g, or t
  misc_feature (527)..(528): n is a, c, g, or t
  misc_feature (535)..(535): n is a, c, g, or t
  misc_feature (537)..(537): n is a, c, g, or t
  misc_feature (539)..(539): n is a, c, g, or t
  misc_feature (546)..(546): n is a, c, g, or t
  misc_feature (574)..(574): n is a, c, g, or t
  misc_feature (582)..(582): n is a, c, g, or t
  misc_feature (587)..(587): n is a, c, g, or t
  misc_feature (594)..(594): n is a, c, g, or t
  misc_feature (600)..(600): n is a, c, g, or t
  misc_feature (604)..(604): n is a, c, g, or t
  misc_feature (619)..(619): n is a, c, g, or t
  misc_feature (624)..(624): n is a, c, g, or t
  misc_feature (643)..(643): n is a, c, g, or t
  misc_feature (646)..(646): n is a, c, g, or t
  misc_feature (672)..(672): n is a, c, g, or t
  misc_feature (691)..(691): n is a, c, g, or t
  misc_feature (700)..(701): n is a, c, g, or t
  misc_feature (705)..(705): n is a, c, g, or t
  misc_feature (710)..(710): n is a, c, g, or t
  misc_feature (713)..(714): n is a, c, g, or t
  misc_feature (717)..(717): n is a, c, g, or t
  misc_feature (722)..(725): n is a, c, g, or t
tcaaagtataatctttttatagccaactgctaatgcaaattaaaacatatttcattttaacatgatttcaaaatcagtttttcatactaccctttgctggaagaaactaaaaatatagcaaatgcagaaccacaaacaattcgaatggggtagaaacattgtaaantcatttgaagtatattcttattggaaatgtacttttggataagtagggctaagccagttggatctctggttgtctagtcattgtcataagtaaacctagtaaaaccttgttctatttttcaatcatcaaaaagtaattataaatacgtattacaaacaagtggatgtttttaatgaccaattgagtaagaacanncctgtcttaactggcctaaanttcttctggtagtgtcagttcaactttcagaagtgccacttanngaaagttgatttttgnttttgtaatgcactgttttaatccctctctnttttttttttttttggnttaaaagnncaatactaaactttatttgtaancattnnaactatnancntttttgncttattgaaaaaaaaatgtgagaagcgntttaaacncgttngtaaagnctatgnttgnattggaatatttganaatgnccgatgtgaagtacatgcntanttattgggggcctgaaccaatgggtnttacttttctgactaaaanaagggttannttgntgggncanngtncctcnnnntttcctt

SEQ ID NO: 661864 - DNA, 426 bp, Homo sapiens
atacatatacgaatcgagctcgttaccggaggagcatccctagctctgaagtacagcgtgagcatgcctgtccctgtagtacatatggggagcctccctacctctataatccatagaagtaccatctccagccctattgtccataggtggtccattcgtctataccgaatatccccagaatgtatgtccctagccctgtaagtccgacggtgatgaatctctgctctggaaatcagaagacgaataatctccccccctgaaatcagtgtccaggtcccttcccctcctcgatagtcaccatgcggtccgtctctagctccagtgagctgaaagaatgctcctctacatttgcaaaaggaggccccgaatgcccctggaaatcgaagggaagtgaatctctgccaggaaagttgccagagtgtctct

SEQ ID NO: 661865 - DNA, 394 bp, Homo sapiens
gcttcaagagcgaaactctgtctaaaaatttacaaacacgaaaagcgaatattccttctacccccctccctcttctccttctaggattcaattcacgtttgtcagactttctcaggcatggagtatatttcctacagtttcttcagattttgttcagccttcccccctcacgcttcattcagagaggtttcttactgttctctcgtgggctcatttttctcttcagcagtatctaatctgctgaatccactgaattctccattttggctactgttttttttagatctagtatattacttgtttttcaggtctgctttgcccccttatattatgtttccagttccttgttgaaatgtatttattctacttttatctccatcaacatgatagacat

SEQ ID NO: 661866 - DNA, 329 bp, Homo sapiens
tgtggtgctctcagaggatccgagaggtgggacacgggcacttggggaaccaccgtcgagggaggccagtacaacaacttctcaggcaacagcctgcctgagtaccccactgtgcccagctacccgggcagtggccagtgtgcttagagggagcctgccctgcccgcaccgcccaccacctcctccccttcattcctgctgctacccctgtgtcccgagggctgggagtacctggggccccatccccccagctgtgatggtggaagccggtggtggccacggactgcccccctcctgccagggccacagaacccgtggtcccacctctc

SEQ ID NO: 661867 - DNA, 210 bp, Homo sapiens
tacttttccagggggaagaaatcggctggttgtctccactctcttcattacccacctgcatgctagaggatgtacatagtccatgaggatcacttatggtaggcatttcactttcattgcgcgaggcgagcggggcagttctttcaggcctagcttgaagtattaggcagtatcgtggcactctagctctagctcccgtaccctccctta

SEQ ID NO: 661868 - DNA, 356 bp, Homo sapiens
  misc_feature (354)..(354): n is a, c, g, or t
ggggatgcagtatttattcacttcctgaacagtccctagataggtggttctgatagcctgttggggcttaaatgacctgaaaccttatttgtatgtgagtcattattgtgatgaaattgtgtacttcagcaagagttttacctgtaattaatttctctcatgcctgaaagttaggaaagttgggaaggcagttgccccaatgtaacaaatgctttgtgatcttggggtgagcctgttccccatcccattgcaggggaaagctttttagtcctcctcattctctgtatttcccagcgtctgggcatgtaaaaacgttggggactgaatcttccgagggcatcatttctcctgcanaa

SEQ ID NO: 661869 - DNA, 1482 bp, Homo sapiens
  misc_feature (291)..(291): n is a, c, g, or t
  misc_feature (309)..(309): n is a, c, g, or t
  misc_feature (401)..(401): n is a, c, g, or t
  misc_feature (621)..(621): n is a, c, g, or t
  misc_feature (1094)..(1094): n is a, c, g, or t
  misc_feature (1106)..(1106): n is a, c, g, or t
  misc_feature (1481)..(1481): n is a, c, g, or t
cttgtaggacagatcttctagcaatgaatacttgaggctgaagtccaagacaccacactcaaatatttcttgtaggacagatcttctagcaatgaattctctttgtttttgtttatctgagaatgttgtaatttttccttctcttctgaagaataattgtgctggatatggctgacttggttggccctctttttctttcagtcctctatagatgtcattccactgcctctggcatctgtggtttccatggcgggagcaccgcaccatgtctcagtctctttttagcttctnactgtttgactgtggtgngtctaattgtggatctttcagtgtgtcctacctgcagttctttgagcttcttggatatagaggttaatatttcttgtagtctgattgttacntcttctcttcacttattgatcttctgcctagttatattgatattgaatgtgggtattgaatccttcggttttgtcagcttcatgttcagccagtgactggacaggggacccctttaagtgctttgcaccagtaactctcatggttctgctgacacacagttgatgtgtggtgagtatgccttcagcgctccattgtggttctgcaaatttgggaaatttnaggttgtcgtttctcgaaatattttatgtccatgttctcttcccccacttggactccagctacgtgtgttgatgtggagctgggcacagccttggaggcctccttgactttcctttattccggaattttttcttcttctcagaatgggtcatctcagttgacctatcttcaaggtcacagatgcttttgccaaacaaaacctgatgtcaagctgctctagtgaatttttcatttcagttattgtacttttctactccaaacttccatttggctctctcctataatttctgtatctttactcatattctttgtttagtgaaacattctcatactttaattctgtagacacagtttcctttagttatttgaacatatgtgtagaagctgatttaaagtacttgtctaagccgggcgtggtggtgtgcacctgtaatcccagctacttgggaggcagaggcaggagaattgcttgnacccgggaggcngaggttgcagtgagccaggatcgagccattgtactccagcctgggccacagagcgagacgctttcaaaactagatagatagatagattagatagatagatagatagatagatagatagatagatagatagataggataagataagatagataggtgacttgtctactaagttcaacatcagggcttattcaggggaagttcctattgatgaccttttttcccatgtcagagccaaggaaataacatactctttctttgtggtctcatatatatgtattttttgaagactggacactttaataatgtggctgtgcaactctggaaatcagataccctctccacgagtttgattgttgttctgttggctggttaccnt

SEQ ID NO: 661870 - DNA, 981 bp, Homo sapiens
  misc_feature (127)..(127): n is a, c, g, or t
  misc_feature (145)..(145): n is a, c, g, or t
  misc_feature (152)..(153): n is a, c, g, or t
  misc_feature (180)..(180): n is a, c, g, or t
  misc_feature (188)..(188): n is a, c, g, or t
  misc_feature (195)..(196): n is a, c, g, or t
  misc_feature (198)..(198): n is a, c, g, or t
  misc_feature (216)..(216): n is a, c, g, or t
  misc_feature (222)..(222): n is a, c, g, or t
  misc_feature (228)..(228): n is a, c, g, or t
  misc_feature (240)..(240): n is a, c, g, or t
  misc_feature (243)..(243): n is a, c, g, or t
  misc_feature (252)..(252): n is a, c, g, or t
  misc_feature (271)..(271): n is a, c, g, or t
  misc_feature (273)..(273): n is a, c, g, or t
  misc_feature (277)..(277): n is a, c, g, or t
  misc_feature (279)..(279): n is a, c, g, or t
  misc_feature (292)..(292): n is a, c, g, or t
  misc_feature (294)..(294): n is a, c, g, or t
  misc_feature (304)..(304): n is a, c, g, or t
  misc_feature (319)..(319): n is a, c, g, or t
  misc_feature (327)..(327): n is a, c, g, or t
  misc_feature (330)..(330): n is a, c, g, or t
  misc_feature (336)..(336): n is a, c, g, or t
  misc_feature (338)..(339): n is a, c, g, or t
  misc_feature (348)..(349): n is a, c, g, or t
  misc_feature (378)..(379): n is a, c, g, or t
  misc_feature (383)..(383): n is a, c, g, or t
  misc_feature (388)..(388): n is a, c, g, or t
  misc_feature (393)..(393): n is a, c, g, or t
  misc_feature (403)..(403): n is a, c, g, or t
  misc_feature (411)..(411): n is a, c, g, or t
  misc_feature (426)..(426): n is a, c, g, or t
  misc_feature (429)..(429): n is a, c, g, or t
  misc_feature (443)..(443): n is a, c, g, or t
  misc_feature (447)..(447): n is a, c, g, or t
  misc_feature (449)..(449): n is a, c, g, or t
  misc_feature (468)..(468): n is a, c, g, or t
  misc_feature (474)..(474): n is a, c, g, or t
  misc_feature (483)..(483): n is a, c, g, or t
  misc_feature (491)..(491): n is a, c, g, or t
  misc_feature (500)..(500): n is a, c, g, or t
  misc_feature (504)..(504): n is a, c, g, or t
  misc_feature (509)..(509): n is a, c, g, or t
  misc_feature (513)..(513): n is a, c, g, or t
  misc_feature (524)..(524): n is a, c, g, or t
  misc_feature (527)..(527): n is a, c, g, or t
  misc_feature (537)..(537): n is a, c, g, or t
  misc_feature (539)..(539): n is a, c, g, or t
  misc_feature (542)..(542): n is a, c, g, or t
  misc_feature (555)..(555): n is a, c, g, or t
  misc_feature (560)..(560): n is a, c, g, or t
  misc_feature (563)..(563): n is a, c, g, or t
  misc_feature (571)..(571): n is a, c, g, or t
  misc_feature (578)..(578): n is a, c, g, or t
  misc_feature (582)..(582): n is a, c, g, or t
caacacaagctcagcaggaccagtgggaggacggatccaggtgtggcacgcggaacagcgagggatgctcaaggacagtgctatgctagaatacctgaagattgcccaggacctggaaatgtatggnatcaactatttcgagatnaaaaacnngaaaggaacagaccttggcttggagtngatgcccntggactnnanatttatgagaaagatganaagttnaccccnaagattggcttnccntggagtganatcaggaacatctctttcnangacnanaagtttgtcattnancccatcgacnagaaggcacctgacnttgtgttntangccccncnnctgagaatnnacaagcggatcctgcagctctgcatgggnnaccntgagntgtanatgcgccgcnggaagccngacaccatcgaggtncancagatgaaggcccnggcncnggaggagaagcaccagaancagctngagcgcagntggaaacngagaagaanaggngaganaccntggagagaganaangagcagatgntncgngagaaggaggagntgatnctncggctgcnggactangagnagaagaccaagagggcggagaaagagctctccgagcagatgagaaggccctccaactggaggaaagagaggaggcgagcccaggagggaggctgaagtctgggaggcgacgatggtccgcctgcgggcaagggagaactcgagagacggcgcggatcgattaagagcaggaagaggtgggtgcgaagctggagaagacacgggcagaatgacatggtggggaagggggagccccaagacaaggtccaaggtggacaccggggaagagccggaactgggagcagaagatgactgggttgagccagccccgccacttattcgaacacgccggaagcgaaaaggatataaaaacaagtgaataacgaacaaagaaacgaaaaacgaaaaaacacaaggaatc

SEQ ID NO: 661871 - DNA, 295 bp, Homo sapiens
tcagggtgttagaacttcttccatgtatgtagttagtctaacctctcatttgtaggtctctaagaacttgttttcctaatctagatgctccaatgttgggtgcatgtatctttaggatagttaagtcttctggatgaattgaaccctttatcattatgtaatgcccttctttgtcctttttgaccattgttatagtctgttgtatctaatataagactagcaacctttgttcttttttgttttccatttgcttgataaatcttgctccttacctttactttgcacctagtatgtt

SEQ ID NO: 661872 - DNA, 634 bp, Homo sapiens
gggacgtattttctttctgcttttaaaaattattcaggccgggtgcggtggctcatgcctgtaatcccagccctttgggaggccaacgtggacagatcacctgaggtcaggagttcgggacaagcctggccaacatggtgaaaccctgtctctactaaaaacgcaaaaattggccaggtgtggtggcaggcgcctgtaatcccaattagtgggttggctgaggcaggagaatcacttgaacccaggaggtggtggttgcagtgagctgagatcgtgccactgcaccccagcctgggtgacagagtgagactccatcccaaaaaaaaaaaaaaaaaaaaaaaaaaaaaattttgtggggggccgcgggcccccgaaaaagttttttcaaaccattcgcgtgggggggcgcgaggggccccagagggtaggtggaacatctgtgcgcaataagcggttcgcccagaaagaaacccgcggcgaccagagaaacaggtcggtcggggttccctccccaaataaaaaaaacgcgcggggggcacacccgatgtgttctggaacacaatcaccgaggggagctcgcgaggacgatgccggcgctctccaaaggggtccaagggaccgaaaaaaataccga

SEQ ID NO: 661873 - DNA, 121 bp, Homo sapiens
  misc_feature (92)..(92): n is a, c, g, or t
  misc_feature (97)..(97): n is a, c, g, or t
gaggcccgagcccaccgcgccgggccccggacgccgcgcggaaaagatgaatttacaaccaattttccggattgggttgatcaggggtgttngctgngtgttggctcaaacagatgattat

SEQ ID NO: 661874 - DNA, 231 bp, Homo sapiens
tcaaaatggggggttttggggggggggcctagtccccccagttttaaacagccaggagggacctgcatttaagcatttggggtgccatgggaatgggatgccccccaggtattgtatgcccccgacccccgcagaggcagaatgaacccataggggggtggtgggaatgtttatcatggtacttccccccccccacattttttgaaataaaataagggattttattttcca

SEQ ID NO: 661875 - DNA, 188 bp, Homo sapiens
ctatagatagcttgtactgcctctagctagttgtcctgctactgtcagcatgtcactgcctacagcctatatgtactgcctctgatactagctatgtatataactatatactatggtcatatcatccactctgtccatcagcaacagtagatactatcccccaatgattgctgctggcaaggctgagc

SEQ ID NO: 661876 - DNA, 199 bp, Homo sapiens
tccaagataggtgtctggcagctcattctcacaaacatctacctgactcctcgggcacctacctgctgtgtggcccacaaccagatgggcagtgcatcctgtgagctgaccctctctgtgactgaaccctcccaaggcctgcagtggcctggcagctctcgcattgggtgtgctccgtgtggtgcatcctctcagcagt

SEQ ID NO: 661877 - DNA, 248 bp, Homo sapiens
agcgagcgacatctagaggatcccgaaaccctaataacgggaccaggtgttttgggtgtagttttgaagttccccaactcatataagtaacttcattatccagtagattacagaagttgcccataaatgcagcctcaaataatgattcaacatcattgctctatacgtgatgccatgattaggcatgatttttgtcactgaaaatctaaactatacaatgtaggtattttgcgtgtatggttctactg

SEQ ID NO: 661878 - DNA, 331 bp, Homo sapiens
  misc_feature (48)..(48): n is a, c, g, or t
  misc_feature (131)..(131): n is a, c, g, or t
ctgaagttggcatcacaaatgttgatatttccaccgtggataaggatnagagcattgcacccaaaattacccgggtgacatacccagccaaagcgaagggcacattcatcgcagacagccaccagaacttngccttgttcttctagctggtagatgtgaccactggtgctgaactcactcctcatcagacatttgtccgcttccataaccagaagactggcccggaagtggtgtttgttgctgcgccagccaacacgcccgtgtacacgtttccactcgctacctttgcacgaccgcttgcatttgcctctgcctttcgcacctacactca

SEQ ID NO: 661879 - DNA, 926 bp, Homo sapiens
cccaactcagcctcccaaagtgctaggattacagacatgagccaccgtgcccagcctgtagtatagtttgaaattgggtaatgtgatgcctctgactttgttctttttgcttagaattgctttggcacttcaggctcctttttggttccatgtgaattttagaatagttttttctgaatctgtgaagaatgatgttgggaatttgataggaatagcattgaatctgtagattgctttagacagtatggacgttttaacaatattgattattccatgagcatgggatgtttttccatttgtgtcatatatgatttctttcagcagtgttttttagttcttctagagatctttcacctctttacatatattcttaggtatttatttcactgtggctgttgtgactacgcgacttgcattcttgaattggtgctcagcttgaacacttattggtttactagaaatgctactgattcccgtaaattgactattgtatctttaccaaaaatacattttctttatatactatgtctatagaattgtccctcttatatctagtaatttctactaacatatcaactattttaactttagtaaccctaattcacagtgaaaaccctaagattccttaatataccatgacttcaccgatctcaccattacttgaagcgcaatctgtgacacttacctccccacaccgaggcatccctcaacttgtgtgccctacacggccttttgaatccgaacaatccatggtctcacctctagatatcaacttcccgtgaatatatccgacacatacactgatcatttgagcgcacttggatttctgcatacatcacccgtactcttccgggaacatgaatacaatcactctccgccttgaccaacttcttctccacttagtacctgttccctcatcccgcaat

SEQ ID NO: 661880 - DNA, 388 bp, Homo sapiens
atagacacgtaccatacgatccccttctatgatgagcatctcggggggagtaatacgtgcacagctattgatgaacactgttaccagacttctcgacattcttgcagtggcacgatcatgactcacggtagtctccaactcctgggctcaagcaatcctccggcctcagcctcccaagtagctggtattagggggtatgcacaaccagtgcccagctaattttttaattctattttaagtagagataggagtctcactatgttgcctatactggtctctaacttgtgggctcaagcactcatcccacctgggcctcccaaagcattggaattataggcgtgagtccccgtacccggcctcaacatttgattaggatacagtagggaga

SEQ ID NO: 661881 - DNA, 196 bp, Homo sapiens
cgctctctgctggaccctcttctcccatccctagctggctatgggtgggatactagggccatgtgcaaactgggcttcttcatgccaaatcagcctactccgcgatggagaaagacgtttggagttggtttcaagctgcggagaccaccagccaagcagcagtgcccacggagccagaggcactccagacccccag

SEQ ID NO: 661882 - DNA, 135 bp, Homo sapiens
gatccacgtcagatcacatgtaccagaagatgattgtcttcttgtcaggattcttcaccttcatagaccttgatttgtcacagttggttgattatcagaagctgtagaacagatctgagacttctatggtaggca

SEQ ID NO: 661883 - DNA, 362 bp, Homo sapiens
ggccaaggcactaatgatgcgggcgtgaacgcggtggtccagggggacgtcctcagaatactagtcgtgctcgcgttcacccacaattctcagtatagcatccgctggcaggttcgtgtgttcgttgtcgtagcccggtgatggtaattcggtccgggggctggtatcgccatcgtcacttcatcaggcaaacgtggaggtacgacgttcatgctcgcgaaccgggatcggggtacattacatgccccactttctcccggataatcttggagatggtatttggggtctacagtgacactcagcttacaactccttaaagcccggtcctccggctcggcctgtagctccttcacacgctccag

SEQ ID NO: 661884 - DNA, 278 bp, Homo sapiens
agagtcgggcagagagtgatctatggagtagtatgtctagatctgacccgctgtgcagtatatcgtcttacagagcgtcgtttaacatgtctgtgactgagtaatctcgtagtgtcaatgaagaagttgccatttctttctttttttttgagacagggccttgctcagtcgcccatgctggagtacaatcaccacttactgcagctttgaccttccgggctcaagcaatcttcccatctcagtctcctgagtagcttggctacggacacgcgccacca

SEQ ID NO: 661885 - DNA, 120 bp, Homo sapiens
gactcggtaccggactgagattctgaggaactgtggtaaatcgagagtggtttcaggacggcagtgggatctgcgggctacagctgccgaggtaggtctggtgcaggcacttgatgtgac

SEQ ID NO: 661886 - DNA, 123 bp, Homo sapiens
agtattggtggacgatgtacctcatttacacttatgggctatgcatttcattccttattgatttgctttacttaatttaacatatcaattattcattttaataggatatagagcaaaataatc

SEQ ID NO: 661887 - DNA, 407 bp, Homo sapiens
  misc_feature (21)..(21): n is a, c, g, or t
  misc_feature (174)..(174): n is a, c, g, or t
cgtgggggggcatcggggctncggggtggggacccaaggctttttggggcagacccttgtcctttgggatgatgggccctgctatccccagtttctgccagttggttttatttggagggttgtgggcttttttttaaaaaaaaaagtcctcaaatcaggaagaaacctccaagnctatgtcctagtggagggggtaatcctaacccccagggtggccgccaggtgggacctgcctttatcccagaatgcccttgtcccagctttttgtccaactgttgattatgtgatttttttgaaaggtccattttcaaaagccagggggtttacattttcgctttggccagcccattttgtatttaaagcttttggggcccaataaaataggaggggctgtttgcagcccttta

SEQ ID NO: 661888 - DNA, 211 bp, Homo sapiens
tgggcggttgagaaaaagacaagatactcagatttaaaagcataaatgttcactcttcaacatagttagctaaatttggggaggtcaagtttcccaaattcaggacaaaaaatccttcagtaggtcatccctgggtgtggcttgtggtggtgaatttgaataggccccaaagaagaaggctctagaaactgttcttggccaggcacagtgg

SEQ ID NO: 661889 - DNA, 119 bp, Homo sapiens
atggatggtgctataaaacgatatggtgaaataaccgaatcacttcaagaacgtaacggatctagaattgctgacaatattcgaattctggatatccaggattacttaactgattgtac

SEQ ID NO: 661890 - DNA, 359 bp, Homo sapiens
cagagtaaatctaggatctcccttgtctgccaacttatattttgttttatacacataaaatataaaatttggccaagtttttcccattgaaagaaatatccctttgaccttgaaatctctctagctcctatcttttctacttgcttttagagcaaaacgtctagaaagaaccacctacttttacgtcttaatttcccatggaactgaatgtattttggtttctttctcctaccactttcctgaaaatgatgttgatgaaacccccattaggttgttgtcaaacgtgattttttaaagtgttttcttcttaagttagtcttacttgacttttccacatgattgggttacttttgattatg

SEQ ID NO: 661891 - DNA, 1054 bp, Homo sapiens
  misc_feature (249)..(249): n is a, c, g, or t
  misc_feature (294)..(294): n is a, c, g, or t
tctgcactctgctttggtgtcgctctttccgtctttcgttccctccggtgccgtgcccccgtgtttgggccctccgtgccgtccctggttctcttgctgcgttgtctgtcttccgggaacccttgtcttcctgggctttttatgaccgtctcgccagcgactgggtgtccgggccgcaattcgagcccagctcttgtcgcaccccgaacccctgggcttacgtgtgcaggtcgcttggagcaggggccncccacttcctccctggcgagtatctgctcccatggatgcccacanccacgacggaacaccccaagtctccgtgtctggcccttcgtggttcgactttccacggctgggttaccagaggagaggcttgccaggactggggtggtcgtgcttcgctcaagtccctcgccattgctgtttcaatggtttgagggtcaccccactgctcctccatgcagagaccccctcatggacgcgttcagctccccttcccatcagacgcaccccacctgcgatggtgtcaccagcgcggcaacgcggtgggccatctcatccacctcgtcgagtcaacgaacacccgcttgagcatcggcttcgtatcaaaaggtccagacctgaaggggaaattttatctcgttcgttcttgtctgtctggttattcttgttgacacagagttttcgctcttcgttggcccaggctggagtgcaatgacacgatctcggttcactgcaacctctcgcctcctgggttcagagcagattctcctgccttcagcctcccgagtagctgggattacaggcgcccgccatcacgcccgggtaatttttttgtatttgttggtagagacgggtgattcactatgttggccaggctagtcacgaactcgctgacctcgtgatccgcccacctcggcctcccaaagtgctgggattacaggtgtgagccaccgttcccggcctctttttagttattccataaaatattaccttgaggcccaattctgcgcttaaggagcaatgtgcaccaataactgcgggtgggggctgt

SEQ ID NO: 661892 - DNA, 181 bp, Homo sapiens
agagtgtttatcgaatagaaggtaggaaacgtacaagtgtgtagagtgtggtcatgtatgagtgtagactgtagaaacacgcccatagcatgtagagcacgcatgtattcaacatgtgagatgtgagaacacactaaatggattcatgcggtggtgttctggtgatgtggatgtgattgga

SEQ ID NO: 661893 - DNA, 448 bp, Homo sapiens
gacatgatcgaatcgagctcggtaccggagagcatcccataagcagctatgctcgtctagtttagggtagagcctaagactgtatttaggtaaccatgtatttgaggtagccattggacagacctaaatggacattatatttctgtaaatacatgggaagtccaatatttgatttttatttggtttaaggtagttaacttgaatctagcaaatacttacaagcccctactatgagcaaacctccctgcttggcactgacccatatcaaggtaagtcagacacaaagcctaccgtttaaaattcagtgtgaacaacaggagatggaggaggtggggggaaggaagacaggcggaatacataaaccaccaccctgacccaagacacactgggagccatgagaaggtcatcggcaagactctagtggcattcaaaggtggggaagtcccat

SEQ ID NO: 661894 - DNA, 521 bp, Homo sapiens
  misc_feature (198)..(198): n is a, c, g, or t
aagcacatgatggctgggcaccgtggctcacgcctgtaatcccagcactttgggaggctgaggcgggtggatcacctgaggtcgggagtttgagaccagcctggccaacatggtgaaaccccatcgctactaaaaatataaaaaattagctgggcatggtggcgcacgcctgtagttccagctactcaggaggctgangcaggagaatcgcttgaacccgggaggtggaggttgcagtgagctgagatcgcaccattgcactccagcctgggcaacaagagcgaaactctgtctcaaaagaaaaacataagaggcgtgtggattacttgaggtcagggttagagatcaggctgaccaacatggtgaaaccctatctctactaaaactctagaattagccaggcatgggagcgcacgcctgtaatcccattctattgggacgctgatgcaggagaatacctttgaacctgtggaagcatgggatcaagtacttcgtgtatagggccccttgcaattcaagct

SEQ ID NO: 661895 - DNA, 960 bp, Homo sapiens
  misc_feature (603)..(603): n is a, c, g, or t
gcgggatgggcgcgggggtgggcatggtactctgctggctcggactattgggagaagggcgggcggctcgaggagagaggggatccgaggccgctgacatttgtgtcatgccgtcggcccaggggttgtgcctgagtggtgtgtgcccggccgctcgttgggtttgattgggactagaatgtgactgtgactggtctgccaatttgttcgtatgtctagttagtcaagggacaattggcacgatcccgtatcgagccggcttgcctagaaccaacgttcagtggcgcaaggccctagggaatctgagatggagtcagtgcgaacccgtttacgtccagatgtggcgagtccgaaaggaggtgctgttacgcctctatcttggcaaacggctagagaacccacatgttgtagcagtactcctcgttaataccagctctgaaatgagactgtcgagagccgttgtcaggcgccaggaaaggttgctcatatgggaagcgcaaatgactacaatagaactaaggtcgatcgtgcgaagagtgagctggaggggtctcgtaggctgcgaagcgacccggcgtagtccgaggcgtagaaatgcatgancattagctcgatgtgagtaatcccaacaccagaaacagtcgcgaggattcaaagttgagccaagacagcattaggcacagagaagatttggcaagcaactgtcgaaaaagccaattcctggacagagccgataagtcaatttcttaacagggcctttacagatgggtaaaaaacttaacccatgcccgagtggaagatgaggttgtccctgcaaatcgaagtaactagcctttctagagaggggaaacccttcatttggaatatccttatgaatggatgggaaccttttgtcagtacaagaaaactcaacttccggataaattcacccaattcagtgcccagatctccatacccctg

SEQ ID NO: 661896 - DNA, 616 bp, Homo sapiens
gcagaggaggtgaggagggaggaagcgtctggagtggggcgggcccggaactccgacccccggggctgcttcgagccccccagctggtcaccgaggcacctgcgcttcagccaggccagtagccgtcccctcgctgcaccctggccacgctcacagcgcgcccgagcgagccccgggctcacctcgtgagccagcgtggcgcagggtgtcaagtggttctctcagggtctcgggacagagtgagcaccctgatgaaggccacggtcctgatgcggcagcctgggcgggtgcaggacgatcgtgggcgcacctccgcaagggacggcaggaagaaccggttacaggctgactatctgaattatagacaatgaaccttgagacagacgataagcaatcataaatggaaaaagcgaatgaccctatcactatcttaaccaaaaatacatggaactcaatacgccaaaagattcatcagaagaagcgaagaggtcggacaacgaagcttcacacagcgactccattacagcaactatttaccacaaattgaacaatcgacccacacaaccgcgaaccgatcaaaggcacaaaacctaacactcaataatggctgcaacaa

SEQ ID NO: 661897 - DNA, 129 bp, Homo sapiens
acatacacacagttgtatagctgcctatagtaggtgccgcctcaggttaggggctctcagccctactctaacctctgacctcgtagctcattggaattgcgcccccaagatgctactctcccttctcca

SEQ ID NO: 661898 - DNA, 102 bp, Homo sapiens
ctacagagaagagacgagatgaagtaaactttaatagtgtaggaagctgaataatttatgaaggagaggggtcaggttgattcgggaggatcctatggtgcg

SEQ ID NO: 661899 - DNA, 740 bp, Homo sapiens
cctggcccccgatggaccctccgtgagctcctggtgcttgatgtgcccacaatggtcccccatgtgtggaatatgtgaaaccctgtgtgcagtgggatgagaatggtgcgatgcctggcgaagcaggtgagcctggtccttcctgggatgaatggcgtgccccccgtggacccaaaggagaaaggggagagaatgggctgagtcagtgcccttcagtgtgctgcctggacccccttgtgacccaaatggccctcccggagatgatggtcccaaaggcagctcctggtcccagtgggttttcctggagatcctggtcccccccggagagcctggccccgcgggtcaagatggtccccctggtgacaataggagatgatggtgaacccgtggcagactaggatcccccggctcctactggtgaaccatggtccatcggggcctccatggaaaaaggggtcccccatgtgccccgtcgatgtgcccctgatgtgcagacagtgggatgaggaagaggggccatagggtagaagccggcttgggaagtgccctcctgggaggacttggccccatcggccccccaggggtgcccctgggtaaggcccggaccggatgggccttcgatggggatcctggtcctgtgggtagacaatggtctcgcaggatcccaggcccggatggtccccctgggccatggtccccaggacttccggcctcaggagatctgtcccatgtcagagggc

SEQ ID NO: 661900 - DNA, 548 bp, Homo sapiens
tggttcattatataagctgatgtctatttgattttcctttagctgtaaaaaaaatgttatgtagttatcaatcatttattatgatcagtctctgaagccattggaccaaaaactctcctggattgagtttgtcatgcaccacaatggagccacctaccaacagtctcacctggttccagtactgctctatggatgtgctggactgaatggcaattgttactctctttgtcataatatgttgcttgattatcaaaagttgttaaggcaagaaagaaagaaaagagagtacatctttttgagatctaaggcaggcaggcatgatacagaaaatcatgccatttaatgtcaccactatgtatcaaggtatggagtaaattctttactacatttttcaagacctgtgccttcttgatttgtttgaaatttttaatctttgttaaacattatgtaaggtacaattttaatttcagaaaacctgtaataattcaattttaatgcttatctacgtatattttttaaactgaaaataaaatgagattcactagaaa

SEQ ID NO: 661901 - DNA, 148 bp, Homo sapiens
acctggtcgttcagacatttataacgggcattactttcatttatgaacggccctacactcagcacctaatcacctcccaaaggtctcacctcctaatatcatcacactggggacatagatttcaacgtatgagattttggagagacac

SEQ ID NO: 661902 - DNA, 425 bp, Homo sapiens
gagtctgaacatttttatgaaagattgttttttcagaaggaaaggctttctttacagccaccaacagtgtcttattgtaccaaagtcatggagcctggccagcattgggtgttatcattcaaatttttccgagtaaatgtaatccctgtcaaatgctctattcttttgatttgtactcctttgattactctagaacttaatatcctcccccacccctggtatttgttttatcttgtgggactatttgtgtccttgcttattgttctctaagactatcagtgtttggccaggcgtggtggcttatacctataatcccagcactttaggaggccaaggtgggaggatcacttgagcccaggagttcaagaccaacctggacaacatggtgagacccccatctctacaaagaaaaaaagaagaagaag

SEQ ID NO: 661903 - DNA, 948 bp, Homo sapiens
gggattcgtgtcgttcgtcgactcggcggatgtaggtgagttagtagggccgggttctgaggccgttgctatctttttactgtatgccacgctaggccatgagtagtgcgcgggttagcagaaccaggtgaggtagttgtgtagcactgatggatggcagtagtaagctattgaagttggctagaccttaaatgatggcgggttttgtgttactccaaaaggatagggcgattctgagtggagagacattgctggtttgttaatgtgacatgagtgatcttaggtgtcgtgtggtgttataaagaatatgaaacaagctcataggatgtttggagaaggattggggaaatgacggggtcgatcgtagtgcgaactaatggtagagcagggagttacgcgctaggtgtttccagtggaacactgacgtgatttggatttgatctgatagactctcgtcgtgtactgtggagagttaaaatatcttcttggggtgagagaaggtcgtgggacgaccgtagctctactgtatggtacagtgggctgtgacggagggtctgaggaggtccgatgggggtgtgactcatgttgaaatgaagttcagaagaggtagggttgtcgggtgtttcctgtacgagcgcgtttgttgacttggggaatgagaacggagacgagtctgtcttaggaaaagtggtggatagtagaggtggggaaaacgcgtactagttgttggaaacgtggatttgtactgtgcgatagagtgaggagaagcatctttaagttgggaccttcttgaagaccttgatgtaactttgcgaccatgagttggggcaaagtttgtgtgggcatgattttagtgttggataccccaagtatgagtgtgggcaataaggcgggaaatgaggatgaaggtggtactaactgaatggaaaggagagtatgtgacgtata

SEQ ID NO: 661904 - DNA, 881 bp, Homo sapiens
  misc_feature (1)..(1): n is a, c, g, or t
  misc_feature (6)..(6): n is a, c, g, or t
  misc_feature (63)..(63): n is a, c, g, or t
  misc_feature (65)..(65): n is a, c, g, or t
  misc_feature (93)..(93): n is a, c, g, or t
  misc_feature (140)..(141): n is a, c, g, or t
  misc_feature (145)..(145): n is a, c, g, or t
  misc_feature (147)..(147): n is a, c, g, or t
  misc_feature (150)..(150): n is a, c, g, or t
  misc_feature (153)..(153): n is a, c, g, or t
  misc_feature (157)..(157): n is a, c, g, or t
  misc_feature (166)..(166): n is a, c, g, or t
  misc_feature (170)..(171): n is a, c, g, or t
  misc_feature (223)..(223): n is a, c, g, or t
  misc_feature (252)..(253): n is a, c, g, or t
  misc_feature (316)..(316): n is a, c, g, or t
  misc_feature (320)..(320): n is a, c, g, or t
  misc_feature (353)..(353): n is a, c, g, or t
  misc_feature (358)..(358): n is a, c, g, or t
  misc_feature (393)..(393): n is a, c, g, or t
  misc_feature (447)..(447): n is a, c, g, or t
  misc_feature (469)..(469): n is a, c, g, or t
  misc_feature (483)..(483): n is a, c, g, or t
  misc_feature (494)..(494): n is a, c, g, or t
  misc_feature (613)..(613): n is a, c, g, or t
  misc_feature (680)..(680): n is a, c, g, or t
  misc_feature (707)..(707): n is a, c, g, or t
  misc_feature (731)..(731): n is a, c, g, or t
  misc_feature (857)..(857): n is a, c, g, or t
nagggngccgcggggaaggaggcggcgaagagcgcggcacttccgctggccgctggctcgctngnacgctcctggaggcggcggcgggagcgnagggggcgcgcggcccggggactcgcattccccggttccccctccannccananggnctngacnatagacgcnaaanngtgggcagtggtggtgctggctgcgttcccctccctaggggcaggtgggganactcccaaagcccctccggagtcatgganncaaatatagttcttccgatttgtggtgaatgctgctggctatgccacaattatggtacctggntacntcctggtgcagtacttcaggcggaagaaataantgganaccggtaggggcctctgctttcccctggtgaaagnttgtatgtttggcaatgagcccaaagcctctaatgaggttcccctggcgccccnaacagaggcggcagaaaccacnccgatatggcaagncctgaagctantcttctgtgccacagggctccaggtgtcttatctgacttggggtgtgctgcaggaaagagtgatgacccgcagctatggggccacagccacatcaccgggtgagcgctttacggactcncagttcctggtgctaatgaaccgagtgctggcactgattgtggctggcctctcctgtgttctctgcnagcagccccggcatggggcaccatgtnccggtactcctttgccagcctgtncaatgtgcttagcagctggtgccaatacgaagctcttaagttcgtcagcttccccacccaggtgctggccaaggcctctaaggtgatccctgtcatgctgatgggaaagcttgtgtctcggcgcanaacgaacactgggagtacctgaca

SEQ ID NO: 661905 - DNA, 223 bp, Homo sapiens
cgtgtcctgcgcgctgcgcgtctgtttctagggcaacgcgggcgtactcttagcaaccgcgcgcgcctaggtgggtcccccggcacccccagacctgccatggcgaccgcgagtcctagacgtctttctactcatggtcaacgggcaggtagagagcgcccagtttccagagtatgatgacctctactgcacgatactgctttgtgtacggccaagactgggc

SEQ ID NO: 661906 - DNA, 403 bp, Homo sapiens
  misc_feature (36)..(36): n is a, c, g, or t
  misc_feature (203)..(203): n is a, c, g, or t
  misc_feature (281)..(281): n is a, c, g, or t
  misc_feature (384)..(384): n is a, c, g, or t
  misc_feature (399)..(399): n is a, c, g, or t
gtctcaaaaaaaaaaaaaaaaaaaaagtctaaaggnaccagggatgacagtttccatatgttggaaaattaacatatggaaaatgctttacacttccaaaatgtattacataaacatgttttcattatgtattctcaatcactttgttaggatttgaactgatgcctctgacttcagaagttatacacattcaactgtactangataactatccagtattacgcctaatgctatatgcatcactgagttcaaattaagcaaaatttatttcaaatatttangtattttcagcatttagaccatcattccaaagtacttccacactggggccattaaaatatggcatgcaccattctctgggctttcaggggcaccatacccctncacaaacttgtggtngaat

SEQ ID NO: 661907 - DNA, 426 bp, Homo sapiens
tcagctgaggcagaggcgagagcgctgtcgatctgagagacttgtaagtagcgtggagtcttgcctggctcggaccctatgaccatgtaatgagaaccttcaagtaaatccaatagtgtcagtgcgtgtcagcagtgcagggtccgtctgattcactctgatgaggttctgccagaggtcagaagatggtctgtttgagatgacccagtgggacataagcacaggagggagtcggggtatggcaggacgaaggtctaataacaggggagcgctttggagctggccctcctgggtggggttcttgatgttcctgtgggaagggtgaagccaggagagggtggtggcccgtcttcctaggctggtctcccttcattcttcaccccaaaagggctagactgtgcgggtggtaggaaaggtccaggagtc

SEQ ID NO: 661908 - DNA, 405 bp, Homo sapiens
aagtcatctgtggacagcagcgttaaaagagcactgaagcctctggggcttcaggagtggcaggcaatcctgcctggatgctgctgtggggcttcatggagtttgcccctgcctgtgctaaagcatctagctggttccagcacccactcacctgtgtgctccctcctgcaaggagtggaacacagcaagtcttgagtgagtggagtttgatcccgctgtcactgaagtggctagccctttccagtgcttgttgactccagttcccgcacctgtttgcttgtgctccctcccttgaggagttgagagtggcgggctaagtaaacaaggcacccctgttgagagtctcatgaaggggtcagggaaattcctgcttcaataccatcatcattcttcacagaagttaga

SEQ ID NO: 661909 - DNA, 565 bp, Homo sapiens
ccaggcgagtcaggcctttctggacctcgcctgactcggatgggctgtgcctgaaattgacccagctccactagggattatgaagaaacaaggagtaagacccaagagccgctgcaatcttcccgccccagcccgtctaagcggccgtacggggcctcccccgcccgggagctggaggtggaaaagtcggccctaggcggcgggaaactgccagggggcgccaggaggtcctccccggggaggatcccaaatctgaaaaagcgaaaaggcttggagctaaaggtggtggccaagacccttctcgaccccttccagttcgtccgtaattccctgtgcgcagctccgggaagaggtgcacgaactgcaggcgcggtggttccccagcagaaccactctcagcatcgccatctttgtggcaaattctacatgggttacatttagtaacactttttgaaaatgatcgtcatttctctcacctctcatctttggaacgggagatgacttttcgcactaaaatgggactttattattcctacttcaagaccatcattgaagcaccttcatt

SEQ ID NO: 661910 - DNA, 849 bp, Homo sapiens
caccatcatccgaccgccgacggcgcatgctaccctctcgcgatggtcgcgtgtccctagcttgcttgaaggcggtgacaacgcgccaccgttggtgcctagcacaagccggttgttcctagcgatgggactcccttggtaatcagtgcttgaagccatttcccagcgagaattggagaccagtccctatccgagctggctgcgggacgatgtctgcacgcgacgcgctcggctgacgctgcttgcccgttggacccgcgacttctgggcctggtgtctccctggcttacgtagacatttgacctctaactcacatagtccatactccctggaatgcagcctaagatcttgaggccctcgttgcatcgcatcgagtggcactcagaggactcctcataatcccccagactcagagcccgagagcccttcccaagccacttggcttggctgcagagtagactgagagctggggccacgtatcccatgtgctggcaccatgctccctgtgctcaagtattatattacgcccccgttaactgtcccagtgatccttgtccagacctccactccaggagaggcgatgggacacagcaactggtgatgccatggacttccccttggccctgtctgggccaaccccttccattgggttgaagacaaagcaagtccccctggaggcgggtggcccagtaagccatctacagggttccctaggccaggcggagtatgaggatgggtaacagtattgggccccagatccctaagcccctccagctgtacaataggctgtgtgccaagtgcctggtcatcagtaagatgggaggattagcccaggggtctgtttatgta

SEQ ID NO: 661911 - DNA, 201 bp, Homo sapiens
ttgccctcggtcgccggctcatggattagggatttcacacaggtgatgctttggaagccctgagagcttcatttatgacctcaatgaaaaccccaacttcctgctgcagcactgatagtcccaggccaacactggggccggaccggcagccgagtgacagtgcgtggtccccaccgtcagatcagcccggggaccgagcat

SEQ ID NO: 661912 - DNA, 129 bp, Homo sapiens
ggtgaatcgcagtcatctataggggtacacaattgctgtgagtctctgtgccgcctgctttttagtcagtgtgtcctccacagagttgtgtacctcttggtgactttggagcaggagtgttgaggaata

SEQ ID NO: 661913 - DNA, 266 bp, Homo sapiens
  misc_feature (1)..(1): n is a, c, g, or t
ntcgatcgtctcccacttggttgcggacggtgagacaattggtcttgggacaacagcgatgccagcagtcatgcaaatggctgaaagacactcaggacagcgcaagggtcaacccccaggatggaccaaacataactcggatagcggaaaatggggtttcagaaagagactcagaagcggcgaagcaaaaccacgtcactgccgacgactttgttgcagacttctgtcatctggcagcacacggatacatctttaaataaagccgg

SEQ ID NO: 661914 - DNA, 447 bp, Homo sapiens
gcagagagtccagagaaaggagcgccatggattactacagaaaatatgcatgtatctttctggtcacgcttgtcggtgtttctgctttttctccattccgctcctgatgtgcaggattggccagaatgcacgctagaggaaaatccattcttcttccatgcgggtgccccaatacttcagtgcatgggctgttgcttctctagagcatattccactccacgtaaggtccaagaagactatgttggtccaaaagaacgtcacctcagactccacttgtctgtgttgctgaatcatataaacagggtcacagtagtggtggggtttcacagtggagaaccacacggagtgccagtgcattacttgttattatcacaaatcttaaatgttttaccaagtgctgtcttgatgactgctgattttctggaatggaaaattccgttgtccagt

SEQ ID NO: 661915 - DNA, 153 bp, Homo sapiens
  misc_feature (128)..(128): n is a, c, g, or t
tgatctaccggatcttatgtagcccgtcagccaagatgggctcgatggcatgtggagaagacttaaggctgttctgggattccaagaatgagctgaaaaagaaacatcgatggactgtacataccaanaccactagccttcaccaggaagcgt

SEQ ID NO: 661916 - DNA, 391 bp, Homo sapiens
ggtaacacaggcaacaactgaaacaaacagaaatacagattgcagcttctacagatggcacacgctgggatacccaacctacaactatatgatgtgaaaactgagacatgttagaaatctttcatccagaaaaaaatgcaaacattggtcaatacactggcttcaaatactaatccattacatacgtattcttactgtcatcactgctataatatttgtcttcctgactattgattctacaaaaatcacttatcagacaaaaactctaccactttttacggatacagtatgtaggaatgtaactagagcaaaaacttgatccttcatttccatttagctattaagtggacaggaacaactgttttcttttccttgtctgtttgaaagggag

SEQ ID NO: 661917 - DNA, 128 bp, Homo sapiens
  misc_feature (79)..(79): n is a, c, g, or t
  misc_feature (88)..(88): n is a, c, g, or t
ggcacggaggacccacgtcaccctacgtccagacaaccctagccaaaccacttaccaaagtaagatatgcgagatggantttaacccntgcgcaaaataaatatggaccccaagggaaagatgtaaaa

SEQ ID NO: 661918 - DNA, 358 bp, Homo sapiens
gagaatgaacaacatatgcaagattgcagactacggatagacccgaattgatagcaagacaatagagatacacagacaagacaaggtgcaaaattccccatcaagtggacggaccccgaggcagacctgtacgggaggtacacaatcaagtctgacgtgtggtcttttggaatcttactcacagagctggtcaccaaaggaagagtgccatacccaggcatgaacaaccgggaggtgctggagcaggtggagcgaggctacaggatgccctgcccgcaggactgacccatctctctgcatgcgctcatgatccactgctggaaaaaggacctgaagaacgcccactttgagtacttgc

SEQ ID NO: 661919 - DNA, 161 bp, Homo sapiens
  misc_feature (25)..(25): n is a, c, g, or t
  misc_feature (32)..(33): n is a, c, g, or t
  misc_feature (57)..(58): n is a, c, g, or t
  misc_feature (76)..(76): n is a, c, g, or t
agatactcagccttagggataacgncctgaannccggtgccctaaggcaaatcgggnncgcttacccagcttaaangagctcccacaattcagggggaaccgccctccaccgtttctgcccccccagaaactcaggaaaacttgtgaatttaactgggccc

SEQ ID NO: 661920 - DNA, 223 bp, Homo sapiens
gggaaaccccctttttttcttaaaattccaaatttgcccgggtttttggggcctgcccgtttttcccccttctccggggggttgggccgggggtttttttttacttgggggggggggggttccgttggcttgggttgggccctttttttcccgcctggggccccccccccggtttttcccccttgcccccccgcctggggccccagggttgaacttttttcca

SEQ ID NO: 661921 - DNA, 397 bp, Homo sapiens
tttttttttgagacgtagctcagctttgttgtccaggcttcagtgcagcagcacaatttcggctcaccgcaacctccacctcccgagttgaacggattctcctgcttcagcctctggagtagttgggattaccagcgcgtgccaccacgcccggctaattttgtatttttagtagagacggtttcactgtgttagccaggatggtctcgatctcctgacctcgtgatctgaccacctcagcctcccaaagtgctgggattatgggcgtgacaccgcacaaccttgtcttctcatctgtgaccaagactttgaaaagtggataaggtctggtattcactcatgtctttgtcttttgtatttttgaggcagggtctgctcagttgccaggctggagtgc

SEQ ID NO: 661922 - DNA, 308 bp, Homo sapiens
gaggttgaaatgacttctgtaagctcagctcattgtagtctgcatcctccacacgtgttaatgagttcttgtgcctcagcctacctacagagaggccagtttacatgtcacctgccagcacgtccagattatttatgtatttatctttagaatttattttatttttaagttcctggatacattttctaggatgtgcaggcgtgttcctttaatctgtgccatggtggtttgctgtacctattacctcttcaccttggtatttggccctgcatacattagctgtttatcctaatgctcttcccaccccc

SEQ ID NO: 661923 - DNA, 80 bp, Homo sapiens
aagaaaggttaaacactgtgagttgacacacacgtaccaaagtagtttctgagaatgattctttctagtttgctacgaag

SEQ ID NO: 661924 - DNA, 286 bp, Homo sapiens
cccgtttaaaaaaaaagagggccccttttttaaagtgggctttaatatgcttttaaataacccaatttgaagccacgtttagtttggttgggtttcccccccaagcaccataacccttgggtttgttccttatttgaaaaatcccaccccgggccttaaagttgaagctttgctttgttttttggggggcccacccccccttgacatggccccagacccttttaaaactttttttttccaaagtcaaaatgaattccttttttaataacccaagttttgtttttta

SEQ ID NO: 661925 - DNA, 472 bp, Homo sapiens
  misc_feature (79)..(79): n is a, c, g, or t
gagacagcccgaaaactgtaagaagtgccttttacctcctgccatgattctgaggcctccccagccatgtgaaactgcnccttccatctgcccatgctgcccccatctcctgatttgtgaaattcatcaggtgtgcacccttctaatggctgctccgatgaaaacagtaaaaacccatcaagccagaccaagaggagtgacctacttatatcagattgtgttaactttctgagaagagacagactcagacccagagaggagaacaccatgtggagatggaggcagaggttggagtgatgcacctacaagccaaggaacactgtggatggcagcagctgccagaagccaggagagaggcatggagcaggtgctccctcagagtcaccagcaggaaccaaccctgctgacactttgatttcaaacctctgtcttccagaacggtgatagaataaatttctgttgttttaagcca

SEQ ID NO: 661926 - DNA, 413 bp, Homo sapiens
ttgagtactagtctcagtacctgggtgacatggatcattcataccccaaacctcagcatcatacaatatgcccaggtaacaaaccttcatgtactctctgaatctaaaataaaatctgaaaaaaaaaaaaaatcatttatgtctctcttacggtaccagtgagccttggtactatttcctcattttatttggctgactccaactgagctccggaaagtgtctcctgtaaatactccttttgcaagtagagaatcttaatacatatttgtgtaatggtaagtatctctcagtgattttcccaagtttagttgtccttgaggtttgaatgggatatttttcactctgcccagtggcccttttaatagttttatgcctgtaatagtttaatgcggagtggggaatccttctagaag

SEQ ID NO: 661927 - DNA, 193 bp, Homo sapiens
tgatgctatcgtgaacctcggcgtcacctgcgcagtggtcttgcggaaactcagatcctcgcgggcccacctccacgagttccttgagttcactggtgtatgggattggggcctgatgaatgtgcatttctcacaagctttctcccagaggtgacgctgactactgtctggtcctggtaaatctctcttttga

SEQ ID NO: 661928 - DNA, 267 bp, Homo sapiens
agtctgtatcaagaacgtaagcataggtctcccactccaaagagcacacgtaaatctaagttacaaaaagcgagagcggtctcgaagtacaacaccagcccccaagagccgccggggccaccgtacaacttctgctgactctgcttcctcctccgatacttacccgcagtcggtctcgaagtgctgcagctaaaactcatacaactgccttggatgggcgaagtccttcccctgcttcagggcgattcggaaagggagatgcgcctt

SEQ ID NO: 661929 - DNA, 941 bp, Homo sapiens
  misc_feature (424)..(424): n is a, c, g, or t
ctaaagtgtgctccaataagcaccctggctgtttgaggcggagaacctggtactggatgccgagcttgggttggattaagccgaacgcacctccaattgtgcgctggtgatgtggcacttccgtggtgttcccgctccctctggtgcgtcctactagctccaaggggcagagcttccccgtggatgtcgcgcccccccctataatagggtgcgtcgttgtctggattcaacccgcgaggttttccgccccccttatttttccgcgtggtagcactcccctagtgtgcaccactcagcacttcttctcgcgccgatatgccctcatttgggtttccatcacggtgcgataattattcttggcaggcgctgaaggagttggctcgaatgcctgttgtttgagcgcccacgaccccacccccttttntggtccgggcgccttatccgcgcgactgtcctcaccgtcgcacgttatggcaaatcacgtgggggttgcgacccctcgcaggggttgtattcagaccgcgcacgctcatgtcgttgagtcacgctcgctcagtttcactcgcactgtgcgggagctcgcactagtcacggttttgcccttgactcaccccacggctgtacacaatttcggataacatagtctttccgcgtgttgtatgaaagcactttcactccttacgagcgctccagagtactcctctcattcatgaatacaaaattccctctccctcttaacaccctgcgagttcgtccacttaggttgcaggctccactcccccctcaagccccgacactcttttccgcacaaaaacaccactataataagactacaactttttttcccaccaataactcaaggtgttctaacaccccacctccactacctgtttatctacccccccccctcggccccccagaaccttttcccaacaaaacaa

SEQ ID NO: 661930 - DNA, 841 bp, Homo sapiens
agatggatcctgaggccgtgcgatgatttggtggcctctcttatagagtagaaagcagctaagcaccatagatatccgagtgacgatgatctatttgacattaccagtgacacaacggacgtgaccaccgtgaagatggcctaggatcttcactgtcttactaaagatactggactatgtggaacgtactgtaccttaaacatgtgctcgctctgtgtgattagtgacaaaaaactcccttccttatgcatactgagatagattagtggcacgaggaaggtgtcaatgtggattaaagtgctgtgcttaccttcccatgcaggataaagtgatcccttcttgctcattccctctgggtgggaaccatccagtaaatgcggacactagacgttacatcctctctagtggcaccatcacccttgaaaactgtgatacagtgtaatgaatgttgcatgacaacaggaggccaataaaaaggatctttctacatgcaaatttggttaacaaatcgaggggtgggccataaatcctctaccatatgaccggagttaacactaaaagtctctgggttctattgataaaaggggtcaaacaaaactgttatttattttggctaaaaaaacatgggctggtatattttaatggctggtctcaaggttagagaaagatactctctagaggcaatagaatgatctttcctaatagaagaaaaacgacaccgggaatgaaaggggcttcctcgtgaggaaacaaattatcctcggggaagagaatggctgattttgacccttgaagagaggttaacaaattcacagatcgccagaaaagtaagcccccaaag

SEQ ID NO: 661931 - DNA, 331 bp, Homo sapiens
gatcgcagtggcatagacgcttgttatacttatcctcatagggataggacaaggcatggtgtatgctatttgtttagtcaggtggtaacagaataagtgtgagcgcgtataataccagagccgcctaataataagagtactgcggcaagtactatagacccagcgatgggggcttcgagcatgggcgtacagggagaccatcaagtagagtcccgtcacaggaggtatctttcactcatccacagctcattgtgtaggctaatcatattcagttgttaggctccaggcagtttgatcagttcttgggctgcacaggttcagcgcaaaaaag

SEQ ID NO: 661932 - DNA, 121 bp, Homo sapiens
catgcgactgcagcgtagacacagctcgaatcacaccagacttaaggagagaggagtgtggagaggcagaaaactgtagagacgccctgctagggaatgcctatgagggaaatgggagcag

SEQ ID NO: 661933 - DNA, 659 bp, Homo sapiens
gcggagtgagtgtggagatgaatggctgggcgctggtgaccgggagcctggacccctgggaggtcggagcttgtcgaggtgatgcgtgctgtgctgcttgccctgtgatgcattggctgaccgcgtggctgagctcttcttgtctgcctgccttgccctgccctgctgctgtgttgctgctgctttgccctggtgcttgggctgcgcaccctggtttggggccccagccccccttgtttgtggtgcccttgtgctgcgttgtgagtgcatgctgggttgcactgtcgcatgaagacttccatggcccaaaaggcaacaacttgggttctttaaaagatgcatggcttggcaagtcaatgaatgcatgcatgcacattgacaacataacccagatacgaagatgccaccgagaagctcaatggctaatgcatgagtcaatgtaaaacctgtgctgaacggggaaattcactgaactcagattactacttgacgaagaggaatgtgctggccaagaaattcatttgataaaaacactgcagcgttaccctccaggtgtacagggaacaagctgactcttgcagagatgcaacttgacatcatgaatgatctctccaacagggtctggagtatcagccagggagccctgatccttgtccaga

SEQ ID NO: 661934 - DNA, 1074 bp, Homo sapiens
agtggggcccctactagtgtgttctattctattcgcggcgcgccgacgtgtgttcccaggttctgcccccaaggggggcccgggggctgccacggtgtggtgtcttctgaaatggaaggacgggggaaaacactagtgcgccgcgtagtggccccctcttgagagtgttattaagtggttataccacccaagcgcccccgccattgtgggtttcacaccccactgcgtccccctactcccaagggggtccttcctctcgcctctttgtggggcttcttctccgggggcacccactgtggcacacggatagctcgcgggggttgttcgtggtgaatatcgcacaaagtagagtttgtaccccaacggtgacgaaggaatgtctaatagcgggttgtgtggaccacccacaggttgtgtgtgtttaacaaaatatagatatacgccctttgtggggtgaagacccacgcccccctctttattttgttttgggtcttcgccaccgcccctgctcccccgcgccccgcacactcctcaaagggcccccatgttgggcccaccgcctctctcgagagttttttcgcgtgttctaaatttgtttgtgttaacgccccccagtgtatccctttcttctttgtctgcactggcgccccgcgatctcccaactcccacagggtttcccgagagccctgagacctcgccaatggccccgggcccccacagggccggggtaaggggaaggcccacggggctgaagcccccggaaccacgcccaagtaccctcgaggggctgtctttatggctgtgtattgccccttctttggcactccgcagacactccctctcttggctggcgccttgtctgcccaggggggaacccccccccgctccccacggtgaaccccagggtctgctccggggcccactttccacgcttggcccccgtctgtgacccttgggccagtcaccttgagcctctgtgtgcctcacacttcctcctctgttaaaccggggacccgtccctgcccctccctacctcacccggcatgtttgtgagaataaatgaggtaacgtgta

SEQ ID NO: 661935 - DNA, 322 bp, Homo sapiens
accaccgcgggggtactccagagatagccactacaggtctcctccatacacattatagccatccccaaatccacgtccactgccatatccatcagatcctcctctaaagttacttcctggtcctggtccgacctttcccgcgccaccacgtgaatcccctaagccacagttgcctcctcttcccctcctacaactctaaacttcctgcattccttgtctctagctaaagccttactctcatctcctgcttctgcatcatgagccatggatggtatggcttgcctgcgatatgatccattgcgatgaatcacgttcatcgtaa

SEQ ID NO: 661936 - DNA, 125 bp, Homo sapiens
acccctgaaagggtcttaataatttgaaagggaaagttgtgttttaaaatttggcgggcgcctttctccttttggggggatttcccttctttttttccccacaaaacgttgaaaaaaaatattcg

SEQ ID NO: 661937 - DNA, 180 bp, Homo sapiens
ttatgatggttgaattgaaaattggtgaagtttatgatggtgtaaaaggaacatgcattttgtggaaatgatattttgagtagtgatataattattttgtttttgagttggagtatagtattgaataaattagatgagataatggaactttattgtaaatagtttgtgttaataattttg

SEQ ID NO: 661938 - DNA, 397 bp, Homo sapiens
gtacggtgtcacggggaacccggtggctgtcctgaactacctcatcattagctatcagggacgcaacacattcaggtggctttgcgaacgagatgccagaggctcgtgaagtcaccaaggggaggagtgaagaaatcctgcatctcagtccctcacaagacagctgtctcaagcttttcaagctagtgagagacacatcagagcccctgggcactgtcgctggacgcggcctgagagtagctaccctcctttttcacctgagctctatcctcctacacatcacagtaacgaacacagctccgataaacacaactgctaagacagccaggccagcaacaatgaccacgatggggatagtggactgggaagataggtcccaactcaaggtgaggggctt

SEQ ID NO: 661939 - DNA, 843 bp, Homo sapiens
caaactgcgatagccgggtgctagcaggcatgaacctgcgggagatctccgactatgccctggaaggggctgtagaacgcctggagagcctctccttctatgacatagccatgctggcccgggtgcccagtgcgggcgactggaacaggtgcccgggctcaagattctctatgagccttcgaacaatgtacccgcgtccatgcgcgggtactgtgggccgagggcgactttgcctaactagtgcttgtcggacctgtacatggagcgtagggaactgtaacacaacatagcgtaggagagctggatctccatgcgacgaacgttatgccctgtgtgaacgctctcgcgcgaagctgaccatagtctggtaccatcgaccacataacactcacggcttggtccttctactacacaccacacactgtgcactttactcacgccatactagcccccagtagttgcgtagacccttccatggcctccaacaagcaaactgctactgcagatgtcctttgccgaccaatggcaagaactggtgtgatgtacccctgccccgaaagccttgcagggcacgagtagcgtcctacacaactgggtaaacgcacccgaagtccgcttgctcgatctgctggtcgattcgccgcctgtggccgaagtggcacgggcgtgggcaaccgctcggttgtccctgcgtttcattcggagccctgcaaagtcccagccccctggtgttgcgggagcccctccgggaacgcgtcccagcagccctccgcggtttcccgttgcagggtttgcccactttcccggggacggacttggcacctggacaccaacttgtttctg

SEQ ID NO: 661940 - DNA, 384 bp, Homo sapiens
acgtgattgtcacgctcattcagactggtactcacagatgtgctgtgccccactccctgctcattcagctgtccctaggcccaatgatatgttttctgcatgcagagttcctacccatcctttatgaacagccctcagactcaaagaagccagtccctgtcaccccagcctcttctgaattgtttctgactccttcagcacttacaatctacaccactcattgtttcatgcatctctgtcttctcccctgaaaccgtaaatccattgaggacagggatcagagagggaccagctctccttttttttttttggggaaacagagtctcactctgtcgcccaggtgggaggagcgggggagcaaccaggggggaccctcaagagctc

SEQ ID NO: 661941 - DNA, 93 bp, Homo sapiens
atttttttcctaagcattcatctctcaaacgaagtttttatattaaaccaaccgaacagtgaccaaaaaccaaaagtgcattcacccttccca

SEQ ID NO: 661942 - DNA, 2300 bp, Homo sapiens
gcatgcgggaagatggcgggccgggcgacttgagatccgcgggtctccctcctctttttccgtctgcgtcgggagctcccgggcacgtgaggccgtgccgcgtttactggcgggcgggacggcctagccgggcggcgcctcggaggaagccgcggaccccttaggtgctgggcccttggaaatcggcgcgtggggggcggtgctcgagctgagcgcgagagggcgggagagctcgtggggtgcgaggggagcaggacgcccggccgggcagcatgagtcagcagcggccggcgaggaagttacccagtctcctcctggacccgacggaggagacggttcgccgtcggtgccgagaccccatcaacgtggagggcctgctgccatcaaaaataaggattaatttagaagataatgtacaatatgtgtccatgagaaaagctctaaaagtgaagagacctcgttttgatgtatcgctggtttatttaactcgaaaatttatggatcttgtcagatctgctcccgggggtattcttgacttaaacaaggttgcaacgaaactgggagtccgaaagcggagagtgtatgacatcaccaatgtcttagatggaatcgacctcgttgaaaagaaatccaagaaccatattagatggataggatctgatcttagcaattttggagcagttccccaacaaaagaagctacaggaggaactttctgacttatcagcaatggaagatgctttggatgagttaattaaggattgtgctcagcagctgtttgagttaacagatgacaaagaaaatgaaagactagcatatgtgacctatcaagacattcatagcattcaggccttccatgaacagatcgtcattgcagttaaagctccagcagaaaccagattggatgttccagctcccagagaagactctatcacagtgcacataaggagcaccaacggacctatcgatgtctatttgtgtgaagtggagcagggtcagaccagtaacaaaaggtctgaaggtgtcgggacctcttcatctgagagcactcatccagaaggccctgaggaagaagaaaatcctcagcaaagtgaagaattgcttgaagtaagcaactgatggcatttgagaatttatgtatcactgagttttttgggaatatcttcgtggagaattacgcatcaaatttgattctcagagcaataaattatccatgaagtgctctcgttctcagtagcggcatcatggccagtagtgtctttgaggagttcaccacttagattactgagtaattgtggtttccacatttgaaaacaactccttttataattattcactgctttttgtcagtgaaatagacatcttgcctcctcaagtagcttcatcacagagtgtcatgaagacagacagtcaggctgaaatggacagttctttgtggactctacccttcccttcaaggagtatgtcatatatcacaaaagaaattgccttacactggttcacgtttgcagttacctgttgtacattgcatagatgtacacacgaatttaaatgtgatgtctttgtatatatctgtataatgttgagattacttacgaaatatgtctgagtgacacttttcacccttgtacagccaaaataatgtatatatggaaagtgacagacaaattctctaatctctttggtatctataacttattagaatcctctggatgagggttagaagagactttttccaaacttctacatgtagaagtatcataaatgtgctacacatttatgtttgtggatttaattaaagtattttaatatggttttcagtgctaaaattggagtcagatacttcttggttttaagctgtctacctaattgctgtctcccagcagactggtggcatgcccagtggctttgggggcaaggatagaaatgccatcaggaaatagctgaattcattgtgaaacatgaattcagtcatggtgataattggaaactcctttcaggtttttgcaagtagattttgtaatgtttgtgtatgcagccttgctgttgagtcagtccaaggggttttacttaggacaagttgtaccttgccctctctccagctctgctcccacattttcacatacctagctgtttctacctcattgggtaactcatttaccactctgtgcctcagtttactctgtagtttaccattagactgtgagctccttgagggactttgtcataatcactgttacatcccagtgcctcacaccatgcctggcccttaagaagtgctcaataaatgtctgaacaaat

SEQ ID NO: 661943 - DNA, 1824 bp, Homo sapiens
gcatgcgggaagatggcgggccgggcgacttgagatccgcgggtctccctcctctttttccgtctgcgtcgggagctcccgggcacgtgaggccgtgccgcgtttactggcgggcgggacggcctagccgggcggcgcctcggaggaagccgcggaccccttaggtgctgggcccttggaaatcggcgcgtggggggcggtgctcgagctgagcgcgagagggcgggagagctcgtggggtgcgaggggagcaggacgcccggccgggcagcatgagtcagcagcggccggcgaggaagttacccagtctcctcctggacccgacggaggagacggttcgccgtcggtgccgagaccccatcaacgtggagggcctgctgccatcaaaaataaggattaatttagaagataatgtacaatatgtgtccatgagaaaagctctaaaagtgaagagacctcgttttgatgtatcgctggtttatttaactcgaaaatttatggatcttgtcagatctgctcccgggggtattcttgacttaaacaaggttgcaacgaaactgggagtccgaaagcggagagtgtatgacatcaccaatgtcttagatggaatcgacctcgttgaaaagaaatccaagaaccatattagatggataggatctgatcttagcaattttggagcagttccccaacaaaagaagctacaggaggaactttctgacttatcagcaatggaagatgctttggatgagttaattaaggattgtgctcagcagctgtttgagttaacagatgacaaagaaaatgaaagactagcatatgtgacctatcaagacattcatagcattcaggccttccatgaacagatcgtcattgcagttaaagctccagcagaaaccagattggatgttccagctcccagagaagactctatcacagtgcacataaggagcaccaacggacctatcgatgtctatttgtgtgaagtggagcagggtcagaccagtaacaaaaggtctgaaggtgtcgggacctcttcatctgagagcactcatccagaaggccctgaggaagaagaaaatcctcagcaaagtgaagaattgcttgaagtaagcaactgatggcatttgagaatttatgtatcactgagttttttgggaatatcttcgtggagaattacgcatcaaatttgattctcagagcaataaattatccatgaagtgctctcgttctcagtagcggcatcatggccagtagtgtctttgaggagttcaccacttagattactgagtaattgtggtttccacatttgaaaacaactccttttataattattcactgctttttgtcagtgaaatagacatcttgcctcctcaagtagcttcatcacagagtgtcatgaagacagacagtcaggctgaaatggacagttctttgtggactctacccttcccttcaaggagtatgtcatatatcacaaaagaaattgccttacactggttcacgtttgcagttacctgttgtacattgcatagatgtacacacgaatttaaatgtgatgtctttgtatatatctgtataatgttgagattacttacgaaatatgtctgagtgacacttttcacccttgtacagccaaaataatgtatatatggaaagtgacagacaaattctctaatctctttggtatctataacttattagaatcctctggatgagggttagaagagactttttccaaacttctacatgtagaagtatcataaatgtgctacacatttatgtttgtggatttaattaaagtattttaatatggttttcagtgct

SEQ ID NO: 661944 - DNA, 323 bp, Homo sapiens
tccacagtcgtgggtgatagagtagcatcagcgagaggaagaaaactgggagagtgaaatgtgtggcagccacggaggtacttcgattgtccatgcaggatgtgaatggacaagcagtgtcatatatgactgacagagtagatacactactcttagttctgaattccagggtacacgtttctggatttaattcatttggcaactggtgtccattgaaggttccagagcagggatctgttaggagctaaacatgtaagaagaacatttgcagcaataggttaagtcataactctcagacagcatcagaaatgaagttgtgttca

SEQ ID NO: 661945 - DNA, 172 bp, Homo sapiens
cacatggaaggaagggaggttaaaggaagtgttgactaaaactatctattgtgtgaactatgctcactgtttgggtgatgggatcaattagaagcccaaaccccagcgctacccaagtattcccttgaaacagtactggccatgtgcttcaagatggttgggtaccgagctc

SEQ ID NO: 661946 - DNA, 2224 bp, Homo sapiens
gcatgcgggaagatggcgggccgggcgacttgagatccgcgggtctccctcctctttttccgtctgcgtcgggagctcccgggcacgtgaggccgtgccgcgtttactggcgggcgggacggcctagccgggcggcgcctcggaggaagccgcggaccccttaggtgctgggcccttggaaatcggcgcgtggggggcggtgctcgagctgagcgcgagagggcgggagagctcgtggggtgcgaggggagcaggacgcccggccgggcagcatgagtcagcagcggccggcgaggaagttacccagtctcctcctggacccgacggaggagacggttcgccgtcggtgccgagaccccatcaacgtggagggcctgctgccatcaaaaataaggattaatttagaagataatgtacaatatgtgtccatgagaaatctgctcccgggggtattcttgacttaaacaaggttgcaacgaaactgggagtccgaaagcggagagtgtatgacatcaccaatgtcttagatggaatcgacctcgttgaaaagaaatccaagaaccatattagatggataggatctgatcttagcaattttggagcagttccccaacaaaagaagctacaggaggaactttctgacttatcagcaatggaagatgctttggatgagttaattaaggattgtgctcagcagctgtttgagttaacagatgacaaagaaaatgaaagactagcatatgtgacctatcaagacattcatagcattcaggccttccatgaacagatcgtcattgcagttaaagctccagcagaaaccagattggatgttccagctcccagagaagactctatcacagtgcacataaggagcaccaacggacctatcgatgtctatttgtgtgaagtggagcagggtcagaccagtaacaaaaggtctgaaggtgtcgggacctcttcatctgagagcactcatccagaaggccctgaggaagaagaaaatcctcagcaaagtgaagaattgcttgaagtaagcaactgatggcatttgagaatttatgtatcactgagttttttgggaatatcttcgtggagaattacgcatcaaatttgattctcagagcaataaattatccatgaagtgctctcgttctcagtagcggcatcatggccagtagtgtctttgaggagttcaccacttagattactgagtaattgtggtttccacatttgaaaacaactccttttataattattcactgctttttgtcagtgaaatagacatcttgcctcctcaagtagcttcatcacagagtgtcatgaagacagacagtcaggctgaaatggacagttctttgtggactctacccttcccttcaaggagtatgtcatatatcacaaaagaaattgccttacactggttcacgtttgcagttacctgttgtacattgcatagatgtacacacgaatttaaatgtgatgtctttgtatatatctgtataatgttgagattacttacgaaatatgtctgagtgacacttttcacccttgtacagccaaaataatgtatatatggaaagtgacagacaaattctctaatctctttggtatctataacttattagaatcctctggatgagggttagaagagactttttccaaacttctacatgtagaagtatcataaatgtgctacacatttatgtttgtggatttaattaaagtattttaatatggttttcagtgctaaaattggagtcagatacttcttggttttaagctgtctacctaattgctgtctcccagcagactggtggcatgcccagtggctttgggggcaaggatagaaatgccatcaggaaatagctgaattcattgtgaaacatgaattcagtcatggtgataattggaaactcctttcaggtttttgcaagtagattttgtaatgtttgtgtatgcagccttgctgttgagtcagtccaaggggttttacttaggacaagttgtaccttgccctctctccagctctgctcccacattttcacatacctagctgtttctacctcattgggtaactcatttaccactctgtgcctcagtttactctgtagtttaccattagactgtgagctccttgagggactttgtcataatcactgttacatcccagtgcctcacaccatgcctggcccttaagaagtgctcaataaatgtctgaacaaat

SEQ ID NO: 661947 - DNA, 2434 bp, Homo sapiens
gcatgcgggaagatggcgggccgggcgacttgagatccgcgggtctccctcctctttttccgtctgcgtcgggagctcccgggcacgtgaggccgtgccgcgtttactggcgggcgggacggcctagccgggcggcgcctcggaggaagccgcggaccccttaggtgctgggcccttggaaatcggcgcgtggggggcggtgctcgagctgagcgcgagagggcgggagagctcgtggggtgcgaggggagcaggacgcccggccgggcagcatgagtcagcagcggccggcgaggaagttacccagtctcctcctggacccgacggaggagacggttcgccgtcggtgccgagaccccatcaacgtggagggcctgctgccatcaaaaataaggattaatttagaagataatgtacaatatgtgtccatgagaatgtaggaatgggctccagagagaagacatttatattatgaaatatgtacctttgttcctgaagtaaccgccagtggtctttaaactaaatgtgacattgtggaggttctgagtaacggacatttctgactgaagaagctctaaaagtgaagagacctcgttttgatgtatcgctggtttatttaactcgaaaatttatggatcttgtcagatctgctcccgggggtattcttgacttaaacaaggttgcaacgaaactgggagtccgaaagcggagagtgtatgacatcaccaatgtcttagatggaatcgacctcgttgaaaagaaatccaagaaccatattagatggataggatctgatcttagcaattttggagcagttccccaacaaaagaagctacaggaggaactttctgacttatcagcaatggaagatgctttggatgagttaattaaggattgtgctcagcagctgtttgagttaacagatgacaaagaaaatgaaagactagcatatgtgacctatcaagacattcatagcattcaggccttccatgaacagatcgtcattgcagttaaagctccagcagaaaccagattggatgttccagctcccagagaagactctatcacagtgcacataaggagcaccaacggacctatcgatgtctatttgtgtgaagtggagcagggtcagaccagtaacaaaaggtctgaaggtgtcgggacctcttcatctgagagcactcatccagaaggccctgaggaagaagaaaatcctcagcaaagtgaagaattgcttgaagtaagcaactgatggcatttgagaatttatgtatcactgagttttttgggaatatcttcgtggagaattacgcatcaaatttgattctcagagcaataaattatccatgaagtgctctcgttctcagtagcggcatcatggccagtagtgtctttgaggagttcaccacttagattactgagtaattgtggtttccacatttgaaaacaactccttttataattattcactgctttttgtcagtgaaatagacatcttgcctcctcaagtagcttcatcacagagtgtcatgaagacagacagtcaggctgaaatggacagttctttgtggactctacccttcccttcaaggagtatgtcatatatcacaaaagaaattgccttacactggttcacgtttgcagttacctgttgtacattgcatagatgtacacacgaatttaaatgtgatgtctttgtatatatctgtataatgttgagattacttacgaaatatgtctgagtgacacttttcacccttgtacagccaaaataatgtatatatggaaagtgacagacaaattctctaatctctttggtatctataacttattagaatcctctggatgagggttagaagagactttttccaaacttctacatgtagaagtatcataaatgtgctacacatttatgtttgtggatttaattaaagtattttaatatggttttcagtgctaaaattggagtcagatacttcttggttttaagctgtctacctaattgctgtctcccagcagactggtggcatgcccagtggctttgggggcaaggatagaaatgccatcaggaaatagctgaattcattgtgaaacatgaattcagtcatggtgataattggaaactcctttcaggtttttgcaagtagattttgtaatgtttgtgtatgcagccttgctgttgagtcagtccaaggggttttacttaggacaagttgtaccttgccctctctccagctctgctcccacattttcacatacctagctgtttctacctcattgggtaactcatttaccactctgtgcctcagtttactctgtagtttaccattagactgtgagctccttgagggactttgtcataatcactgttacatcccagtgcctcacaccatgcctggcccttaagaagtgctcaataaatgtctgaacaaat

SEQ ID NO: 661948 - DNA, 100 bp, Homo sapiens
ggtgctgaataaaatccacactttagattcttgcaactgtatcatatgtaatagtatcactttttctacatttggtcaaataaatttttacataaactac

SEQ ID NO: 661949 - DNA, 2371 bp, Homo sapiens
gcatgcgggaagatggcgggccgggcgacttgagatccgcgggtctccctcctctttttccgtctgcgtcgggagctcccgggcacgtgaggccgtgccgcgtttactggcgggcgggacggcctagccgggcggcgcctcggaggaagccgcggaccccttaggtgctgggcccttggaaatcggcgcgtggggggcggtgctcgagctgagcgcgagagggcgggagagctcgtggggtgcgaggggagcaggacgcccggccgggcagcatgagtcagcagcggccggcgaggaagttacccagtctcctcctggacccgacggaggagacggttcgccgtcggtgccgagaccccatcaacgtggagggcctgctgttgtttattcaggcaaatctggcttgctgggctaggctcagctgagggctgccttcgccatgaatccttctccatcaaaaataaggattaatttagaagataatgtacaatatgtgtccatgagaaaagctctaaaagtgaagagacctcgttttgatgtatcgctggtttatttaactcgaaaatttatggatcttgtcagatctgctcccgggggtattcttgacttaaacaaggttgcaacgaaactgggagtccgaaagcggagagtgtatgacatcaccaatgtcttagatggaatcgacctcgttgaaaagaaatccaagaaccatattagatggataggatctgatcttagcaattttggagcagttccccaacaaaagaagctacaggaggaactttctgacttatcagcaatggaagatgctttggatgagttaattaaggattgtgctcagcagctgtttgagttaacagatgacaaagaaaatgaaagactagcatatgtgacctatcaagacattcatagcattcaggccttccatgaacagatcgtcattgcagttaaagctccagcagaaaccagattggatgttccagctcccagagaagactctatcacagtgcacataaggagcaccaacggacctatcgatgtctatttgtgtgaagtggagcagggtcagaccagtaacaaaaggtctgaaggtgtcgggacctcttcatctgagagcactcatccagaaggccctgaggaagaagaaaatcctcagcaaagtgaagaattgcttgaagtaagcaactgatggcatttgagaatttatgtatcactgagttttttgggaatatcttcgtggagaattacgcatcaaatttgattctcagagcaataaattatccatgaagtgctctcgttctcagtagcggcatcatggccagtagtgtctttgaggagttcaccacttagattactgagtaattgtggtttccacatttgaaaacaactccttttataattattcactgctttttgtcagtgaaatagacatcttgcctcctcaagtagcttcatcacagagtgtcatgaagacagacagtcaggctgaaatggacagttctttgtggactctacccttcccttcaaggagtatgtcatatatcacaaaagaaattgccttacactggttcacgtttgcagttacctgttgtacattgcatagatgtacacacgaatttaaatgtgatgtctttgtatatatctgtataatgttgagattacttacgaaatatgtctgagtgacacttttcacccttgtacagccaaaataatgtatatatggaaagtgacagacaaattctctaatctctttggtatctataacttattagaatcctctggatgagggttagaagagactttttccaaacttctacatgtagaagtatcataaatgtgctacacatttatgtttgtggatttaattaaagtattttaatatggttttcagtgctaaaattggagtcagatacttcttggttttaagctgtctacctaattgctgtctcccagcagactggtggcatgcccagtggctttgggggcaaggatagaaatgccatcaggaaatagctgaattcattgtgaaacatgaattcagtcatggtgataattggaaactcctttcaggtttttgcaagtagattttgtaatgtttgtgtatgcagccttgctgttgagtcagtccaaggggttttacttaggacaagttgtaccttgccctctctccagctctgctcccacattttcacatacctagctgtttctacctcattgggtaactcatttaccactctgtgcctcagtttactctgtagtttaccattagactgtgagctccttgagggactttgtcataatcactgttacatcccagtgcctcacaccatgcctggcccttaagaagtgctcaataaatgtctgaacaaat

SEQ ID NO: 661950 - DNA, 339 bp, Homo sapiens
  misc_feature (29)..(29): n is a, c, g, or t
  misc_feature (34)..(34): n is a, c, g, or t
  misc_feature (41)..(41): n is a, c, g, or t
  misc_feature (69)..(69): n is a, c, g, or t
  misc_feature (108)..(108): n is a, c, g, or t
  misc_feature (220)..(220): n is a, c, g, or t
  misc_feature (336)..(336): n is a, c, g, or t
tttcaaacataacgcaagaaaatcctggnattgntacttgncttgaaaatcatcctcacaaactggggncagggcaattcctaacatttcggggaattaatgggatgncagggttaaatgggtctatataacaaataacgggggtatcggcattttcttttaggattgggggcaccacaggactgggaccatatttacatggggggataggtggccaagntaaggctcctaaaacaggtttttttggatcactggggggggaggtaaaacatccaaaggggcttattgggggttttaggaaccctgggggacctttagagattcacacagctatgnttg

SEQ ID NO: 661951 - DNA, 285 bp, Homo sapiens
ataggatccccgcatcttgggatcttctgttatttaaaaaaaaaaaaaaaaaaactaagattttttgttttaaaaactttgagaggtttagccggctttttcacagcttagaattcaaacgggtaacataataggtaatccaggagcgtgtctaataagtccatacaggggttttgaccatgctaaatactggggaagttagaagcatccagcccttgaagataaaaattgacctgtcttaaattgggtgggacagagaagagagatcccaaaatgccttgggcc

SEQ ID NO: 661952 - DNA, 117 bp, Homo sapiens
ataatagcggacccacggtggtgtactgagggtcactgagcctgggtaggtcatgctggagtaaaccgtgatcgcccactgcactccagtctgggaggcagattgagatcctgtctc

SEQ ID NO: 661953 - DNA, 191 bp, Homo sapiens
gaaaaaaaaaacccctaaaaacaacaacagaaaaaatcaaaccaacaccaaaatatagttaaaacggccttttagtgggaagagagagactcggtctccaaaaaacaacaacaacaacaacaaccaacaacaagccaaaccaaccacagattagttctgtatttattgatttatttggagacagcatatca

SEQ ID NO: 661954 - DNA, 736 bp, Homo sapiens
  misc_feature (512)..(512): n is a, c, g, or t
  misc_feature (550)..(550): n is a, c, g, or t
tcgctctacagacggtgttctggctgttaggcagcctattttcacagaacagagaagcatgttgtggaacaggtatgaccccagcttactaattgtgtacctgtttttttttcatacttatatgaaagactacatacttaaaacactggtgattatatttaggacctgaaatcataagattgtggtcttgctttttacttatttctgtatcttagcgatgtctagagttaataagtgttgcttttctaatcacagcaagtcaaggtgactgctgagggctgtggccagcctgaggggtggccgtggggctccgggggcacccctggaagtacttcctggctgagtggggagtaaggggtgggagttagggtgacctgaggcctggctgaggcagtgagagtgtagcaggccgtcatacggggccggggcctggggcagagaggatgctgacgtgcaggtaccagcggtgttctgtggagatgtctcaaaggctgttgactttggaatctganacttagggctcatccaaatggatgttacatttgcgggngtgtgtttaaggtgcagcgtatgaataaattcatttcctcacagatctatacactgaatttcagcatcactcatctcaagaccttggccctcttccctttcctggcctgcttcctgcagcatgtaatttgctagtgtccagaactagccagtgtgccttttctttccacacgcactgcctggttca

SEQ ID NO: 661955 - DNA, 380 bp, Homo sapiens
ctgcgatctgagtgcccgacgtgacctccacccctagtgcctgtgatctgactctgtccgacgtgaccttcacccctagagcctgtgatctgactgcccgacgagagctagacacctagtgtctgagatctgagtgcccgacgtgacctccacccctagtgcctgtgatctgactgcccgacatgacctccacccctagtgcctgtgatctgactctgcccgacatgacctccacccctagtgcctgcgatctgactctgcccgacgtgacctccacccctagtgcctgcgatctgagtgcccgacgtgacctccacccctagagcctgcgatctgagtgcccgacgtgacctccacccctagtgcctgcgatctgactc

SEQ ID NO: 661956 - DNA, 346 bp, Homo sapiens
  misc_feature (191)..(191): n is a, c, g, or t
tcaaggaggggcaaccaacttccccaaggggatattggtccttttgggcctttgggacccttgggcaagggggctttctcctcagggccaacttcttccctggaggaaaaaaggaaacaagggtggtccccaacccctgccttttgccccagcattttcaaaacaaagccttcaaaaaggcagtgtcttgncaaaggccccaggcaattcaggcctttttttggtccatccccctgcctcccattttgccccacacctgggatggggcaaggaaaaattttccccccttagttgggcaaccaggagggcccccgggaatggataataaaaattctaaagaacttga

SEQ ID NO: 661957 - DNA, 343 bp, Homo sapiens
  misc_feature (11)..(11): n is a, c, g, or t
  misc_feature (52)..(52): n is a, c, g, or t
  misc_feature (54)..(54): n is a, c, g, or t
  misc_feature (60)..(60): n is a, c, g, or t
  misc_feature (68)..(68): n is a, c, g, or t
ctctcacgtgntcaggctggctcgaactccgactcaggtgatctgccgtgtngnctccanagtgctgngattacaggtgtgagccacgtgctggcaaatttgtattttccatggaaattccgtatgttgagaagagtggggggaaaaatggaatggggaggcatttaggagactaattccaggtccaggaagaatattatattagctggggacaatagtaatggaaatggtgagaaacatcttgatttgagagtttaaatctgaggaaacttgtgatagattagagatgaggggtcatctctaattctctggtgcaaaaccaaaagactgtgtggtgccattg

SEQ ID NO: 661958 - DNA, 303 bp, Homo sapiens
  misc_feature (74)..(75): n is a, c, g, or t
gttattcatagaattttagtctttggctaggcgtggtggcccacgccctttatcccagcctttggaggccaaanncgcggatcacctaggtcgggagtttgagaccagcctgaccaacatggagaaaccccgtctctactaaaaatacaaaattagccgggcatggtggttcatgcctgtaatcccagctactcgggaggctgaggcaagagaatcgcttgaacccaggaggtggaggttgtggtgagccaagataatgcctgcctgggcaacaagagcgaaactccgtctccaaaaaaaaaa

SEQ ID NO: 661959 - DNA, 146 bp, Homo sapiens
atcctcctcctcctgtgcgaatcctcctcctcctgtgcgaatcctcctcctcctgggcgaatacctcctcctactgagcgaatacctcctcctcctgcaatgtgattgtatctgtacatagtgcaatgaggacatacgaatgtgat

SEQ ID NO: 661960 - DNA, 297 bp, Homo sapiens
  misc_feature (55)..(55): n is a, c, g, or t
ctgtgttggccagggtgttctccatctcctgacctcgtgatccacccacctcggnctcccaaagtgctgggattacgggcgtgagcaccacgcctggccaaacagtgtgttattgacacataaataggcaatagactaatggaacaaaatagaggatcagaaatacatccaaatacgttcaggaattttggtatatgattaaggcatcatcttaaatggtgttgagacaattagccatgtggaagaaagattaatttagactcatactgttactacttactattattattattttaa

SEQ ID NO: 661961 - DNA, 874 bp, Homo sapiens
ggattgtgaggcctccccagtcatacggaactgtaagtccattaaacctctttcttttgtaaattgcccagtcttgggtatgtctttatcagcagcatgaaaatggactaatacagtaaattggtaccaggagtggggcgttgctgaaaagatacccgaaaatgtggaagctactttggaactgggtaacaggcagaggttggaacagtttggagggctcagaagaagacaggaaaatgtgggaaatttagaacttcctagagacttgttgaatggctttgactaaaatgctgatagtgatatgaacaataaggtccaggctgatgtgttctcaaatggagatgaggaacttgttgagaactgaagtaaaggtgactcttgttatgttaacagagactggcggcattttgcccctgccttagagattctgtgaaactttgaacttgagcagagatgatttagggtatctggtggaagaaatttctaagcagcaaagcattcaacaggtgacttgggtgctgttaacaggcattcagtttcaaaagggaaacactataacaaaatttgaggggtgcattaaagtttggaaaatttgcagcctgacaatgcaatagacaaagaaaatcccattttctgacggtgacttgggtgctgttaaaggcattcagtttcaaaagggcacaatactgtaacaaaatctgaggagtgcattaaagttcggaacaatctgcaacctggcaaatgcaatagacaagacaatcccaggccaggcacggtgactcacacctgtaatcccagcactttgagaagccgaggcaagcggatcacattaggtggaagtccagacaggctgagcagatggagaacccgatta

SEQ ID NO: 661962 - DNA, 1157 bp, Homo sapiens
ggaggggagaggaaaaggaaggggcaggagagagaggccgggaggttgggaaagggaggaggaaagcattgaaaagggtgcgctgggaaaacggggagggctgcagagtgggcactgttgccctcactgccccggccggggcgagagcggtcctgcccctcgagctgcctgggtagtgcctggtggcctgtgctgtggtgccctgtgaaggctgactgtgggaagtgagcctgaggcttgtggttattggctgggcgcctgtgtgctgctgctgcttgggtgatggggcgtgagctggctcgggggaagtaggtccggggagagtgggcgggggtggctgccctgttgacaaggtgtttgcgggcgctggcggaaggcccggacagcggtcgccgtacccctgcccgggtggacgtgggggtctttgagggaacacaagcaggcacttcacgcatttggcaagattgaaagaaaagcggaggggccacagctggattgcacgaggcccctcatcgccactgggccatccatgggcgttggcttcgacggggtggaccgacacgattcgcttgggggaacccggctattcctgaggacttcccggggggatttaccgcggctttcctaagaaagacgagggtgggagagggccttgcgggggatgaagcgggccaaggggcatccagggaacgtggaacaggccaccggcttccccgtgtagaacaagggcacgggaagtagacgggggaggccctgcgcggcgaggtactttccgccacgcccggttggtgtgtagcagaccagctttgacatgtgagacgaattactttgcaggaccttgtggggagagattgaggagaaaagaattaccttgattgacacgtgggccttgcgacttacgatcgttcattcccaaccgccgcgggtggaggtggaaaacaaattcggaacaggggcaagagcattgggcggagacgaacagtggcgacttcacccgcggcgatccgaaagtgggacaccgacggggaacgcggggtgactttcgcaatgggtacctctctgacgagacattcgtgacccgttacgaaccagttcttgattgtactgggaggacttttagagcccgtctacgagtgaacatggacaggtgtctggac

SEQ ID NO: 661963 - DNA, 170 bp, Homo sapiens
  misc_feature (43)..(43): n is a, c, g, or t
gaaaagactgtaacgaaagagaatcagaattcctatttctcanaaattgtcaaaatattagaagtacattcaccgtcttctcttctgctcccttacactattaacagatccattactggaatttctttctagcagtgagggtaaccctaaatttctgtgccctatttcaa

SEQ ID NO: 661964 - DNA, 643 bp, Homo sapiens
tttatcttacttctgaaggcataattactgagtctatgtttgacattcgaaaccttcgagtgcaaatctagtcacatgatgcattgacattaagcatcaagcgcagaactgtaagatccgggacattaaggtagagcccgtttcatgtctatgcaataccaaccatcagttctaaacatgtctattcattgtcatagcagtcaatgcacatcgcaacatactgcaagttggaacacatgatgacattctggcatgtcacatgttgatatcgagaatcatgtgatgtctctagcattcacttggtacacagcttaaagccattgatatgtccgatgctggatgagggctcctaggccacaatttgtctcggtagatggtatcaagtgatctcaactcatcctcagatgtctcgagagcaacacttgtccatgcagacgcatgtaaggctttcactcagttaaacggatcttagaatggacactgttgaagattggtagcaaaggcaatcttcagttaggctttgaaacgtaggtctcaaagatcttttgtaagatatgcaacagagctcatgtgtgcgtctgtgcgattcaacaccagcagataagttaagctaattaggcacatcaagtaaatatgggttaac

SEQ ID NO: 661965 - DNA, 205 bp, Homo sapiens
ttaagtttagattaatgtccatttaaaaaatatgttgcttctatggttaggtaggctacgaaatctgcccttccccaaggttgcaatgattttctcttttgtttccttctgtaagttatagtttttgtgtgagccattctgagttcatatttttagttgtggttttatatgaagtcaggttaaagttattgatctcatgtgtaaa

SEQ ID NO: 661966 - DNA, 421 bp, Homo sapiens
atgtgctggttccgcacttgtaaggcagtacttgcagcaggttcttagctcttgaagctcttccgggaggaggaggtggtggagacaaatttgactgctggagctgctacccgcgccagtgccaaaggccacccccgagccctcgtgccactggcttgcacttgaagccatgagcccccgcacactagagcccatccacgttaggcctgacacccgccactgcatgcatggagtatgtagcttccacttgcgcacctccggcaatgacctccacctgaggccgccgccaagacctccaccgaggccagcgccatagccactgccactgccatatccagaggaaacactgcttgtgacaacagagatgttgactggtccaactccttctccactgagtctgcattcctcgccctccagcagc

SEQ ID NO: 661967 - DNA, 154 bp, Homo sapiens
ccccacatggtgcctgctccccattgccatgagggtatatattctgccatgagtgtatgcttcctgaggcccacaccagatgcagatgttggtaccatccttcttgtacggccttcagaactgtaagccacataaacctctttgcctcgcatcg

SEQ ID NO: 661968 - DNA, 978 bp, Homo sapiens
gctcgagtttcttttttttttttcttaatgggcttgggtaagggaggtagggggtagttggtgttaaatattttaagtggggtgatgaggaatagtgtaaggagtatgggggtaattatggtgggccatacgggtagtattaagtgggggcattccggaataggccgaaaaagtgttgtgggaagaaaagttcaaatttacgcccgatgaatatgatagtgaaagtggatttgggcgtaggtatgggtctagggtgctaccctgagaaataggggaaatcagtgaatagaacgcctccaatgagagggcaaatacaggctccttatggatacggacatacacgtgggaacgtagagctacacacgtgaagacacagtagtacgcggaacgaaaacagaggtacaacgtgagacagacgtaaggcgactaataaacaaggcccagtacaaggggccaacactaacagggaagacacagacgcacacggagtagaaataccataaggcgcctcacaaaaggcacacctgagaagagcaaaactacatacaccacaaatgcgcataacacaggggacaaatagctgggcggacggcaacgcaagaaataacattcggacccgaccgggtcgggagaaataagcagaacgtagaactatacgacggtatcagcgcagaaaagagcgacacaaaccagtgcccacgagaagatgataactaaaggtagagacaacacaacaaaaagagggcgtaacagcaaagataaagagagcggctaggacacacaaacagaaatagaaaagacccacagtagggaagaagagccagcagagggcacaaataatcatatgacacgccaaaaaaaaacacagaaccacgaacatgtggaaggaccaccgaaaaggagagggaaccatagtaaaacacgccagaggaaggaaagaacgaagtagaaaaacaaacacatgggaagaaaacaaaa

SEQ ID NO: 661969 - DNA, 347 bp, Homo sapiens
  misc_feature (12)..(12): n is a, c, g, or t
ggttctctcttnccggacctggtccgagcaggaggcgccatcatgggagtggacatccgccataacaaggaccgaaaggttcggcgcaaggagcccaagagccaggatatctacctgaggctgttggtcaagttatacaggtttctggccagaagaaccaactccacattcaaccaggttgtgttgaagaggttgtttatgagtcgcaccaaccggccgcctctgtccctttcccggatgatccggaagatgaagcttctgccggaacaagaggccgtgttttgggccatactatgatgtcggttcagaggcccaactgaggttttccctcggtacaccgcccagcc

SEQ ID NO: 661970 - DNA, 197 bp, Homo sapiens
  misc_feature (29)..(29): n is a, c, g, or t
gtcaccgaggctggcgtgagtggtggatnccaactttttcagttttcttgataggagagtggtcccaatgaccgtttctaccattactggaaggttgaagtttgatgtgtctcttgatattcccatactcatcattactttagtatgtacttattgccattaaaataaaacaaaaataacttaaatgtattcaacat

SEQ ID NO: 661971 - DNA, 972 bp, Homo sapiens
gaccttcctggattccatgagggcatgatcttagaggaagcggctgccttgttcgttcgattagcattatgagcctacgatggtccggctttgatcttcgggaccctacagtcctggactgagtgtcttggtacatatgggtgctgggggtgtgggtattgctgccgggccgattgtggcgatcagctggagaatgtgcatcagtgatatcggaactcgagcctctcgaggcaggcaaagtcgaactgaggacacctgaaggataattggggtcacactatcccatggactatcacgcgactgactacgtgtgtatgagtatcagtgcaataattgctccttaaatagtgatgtgctcatggtcatgggctcctcagcgtcgtagtcagactatctggccttcggtgactaccaaatctccgtgaggaactccaatggcgtactaacggagtcgatccgtagtggaaatggacaaatactaggctagactagggtccgtatagcgggcaccctgatttggcctctggccccgtgaactcttgggtcgtacactctgttcccaggttgatcaatactcctcgcgagcattgttttgcacgtggcaaaacgagtggacttgtagtttgggaggctttcaggcttgggactatccttgggaattggtagcaggtaggtgccgtggcacaagattgattgttgctgagcatgccgtcagtgtgtctggtcactatgtggggcgcctatcaattctcctttcatggaactccaggctgggtccaatccgagaagggtggcctgtgggcagtgccaagagactgcggggccgccgacacactgttgggcaggggtcctcctggtggccaggggcatagaaaggggcaccaaagggggtgggggggtggcccttaagaccaggaaggagagggtcgggaggcacagtcgttgggacggattggaccagcggtgttaaag

SEQ ID NO: 661972 - DNA, 104 bp, Homo sapiens
acacttattccgaagcctggtaggataagaatataaccttcagtggtgaccgaaaaatcagaatagttgttggtatagaatggggtctcctccccgggatacag

SEQ ID NO: 661973 - DNA, 868 bp, Homo sapiens
  misc_feature (51)..(51): n is a, c, g, or t
tggagacagagttctcacttcgtgtcaccttaggcgtggagtttgcagggngttggactctcggctcacgtgcaaccttccgactccgtgggtttcaagacaattcttctgcctcagcctccgtgagtagcgttgggattacagattgtgcaccagcacacccggcataattttgggtatttttagatagagacggggtttcgccatgtgtttggccaggcgtggtcttgaacctccgtggccttattgtgactccgcccaccttgggtttcccaaaggtgctgggatttacaggcattgagccaccttcgccgtggccagattgctagcatttttagattcaaacaatctcatttcagatgaattggtttggttttcacaatcattttaactcatttttagaagtgtccttcaccatttattagctgggtgtaagggcaataagggtacaaccatttccctataattccatctttaactcacaggcttaagtttaaattatattcttccaatggcctaagttattccctagaattaccggggcactttgggaacgcagcaacggtacacagcagcagcaaacttttcctctcatattgggggtgtctcaacaggttctagactttggacagtaatgattccaggtgcccacttatatttctagggaagagtgtctacttggggccggatatttggggccctattggtaggaacctcaaggaaattacttttggaatacttgataattacgcggttaagcaattttaagggagaattggtgaccacaaaggattttccatcggcttgttgtgaataaaatgggggtttttgagaattagccagattacagtgatggattaaaaacgtt

SEQ ID NO: 661974 - DNA, 1127 bp, Homo sapiens
aaatgcttggccagtgggtgcctctccatctccatgacctcgtgattcacccgcctcggcctcccaaagtgctgggattacaggcgtgagtcacagcccccgtgccataactttagcactttaaacaaataactagccatgtatgggccgtgcgctgtggtggctcatgcctgtaatctgagcacttatgggagaccaaggcgggtggatcccttgtgcccaggagttcaagaccagcctgggcaacatggctgaaaccccatttctactaacaaatacaaaaattagctgtgggcgatgtgtggataggccgagttccgggctgctacacggcggccactcagccgacgacgcagatgctgagcgcacctgactctatccggattgtgtgtggctttccccggcaacgctggaccctcacggagcatgaaacggaacgactgcacgacggattatgattctccataccacgaacttttctcatactacagtggccctgctgcgagtcaactccatattatctactaaagacaacatcgcgaccagcccactatgaaagatcggaccactcacatgtagcaactgcatgactcatgacgagcctggttaccacgtctctacctggaacttctgccaagtcacataggcccaagaaaacggtataccgacagcacctcctctctgaccttggccccatacacgacatactcgcctacgcttacaccgcaaaccaacgctcggacgcttcttgctaacctctgacttctcacactacagctaccctataccaacttattcggcgaacactcttgatcctgagtcttcctgtcccacggtggttccccataactgacttgatgaccacactggccatctgataaaatatacgcggacttaattggtaaactaactgtacaccactcccacaacctacacacagacatccaccatcaccgcgaacgactcgctgcagacacaaacaaaaaacaaaccatcaagtacgccccaccgcagccaccaaagacgcacccacccgcccgtacgcacggcacaggccaacccctccgcccccacatttagcacagcggaacacccaggccccaccggacccaaaaatacaaccgacg

SEQ ID NO: 661975 - DNA, 852 bp, Homo sapiens
  misc_feature (5)..(5): n is a, c, g, or t
  misc_feature (65)..(65): n is a, c, g, or t
  misc_feature (129)..(129): n is a, c, g, or t
  misc_feature (244)..(244): n is a, c, g, or t
  misc_feature (246)..(246): n is a, c, g, or t
  misc_feature (282)..(282): n is a, c, g, or t
  misc_feature (318)..(318): n is a, c, g, or t
  misc_feature (324)..(324): n is a, c, g, or t
  misc_feature (483)..(484): n is a, c, g, or t
  misc_feature (497)..(497): n is a, c, g, or t
  misc_feature (507)..(507): n is a, c, g, or t
  misc_feature (512)..(512): n is a, c, g, or t
  misc_feature (517)..(517): n is a, c, g, or t
  misc_feature (522)..(522): n is a, c, g, or t
  misc_feature (527)..(527): n is a, c, g, or t
  misc_feature (530)..(530): n is a, c, g, or t
  misc_feature (551)..(551): n is a, c, g, or t
  misc_feature (847)..(847): n is a, c, g, or t
aaaanataaataataatggaaaaaataacataaaacccaccaccttcaggcagaacaccgcagtngggggaagatgcatagaggtgggggaagaagtgtgaaaagaaagggcctggatgggtgggggtnccaaaaggacctaagcagcaggagacccccaggagtgggctttaggcccagcagctcccccttctcaaggtgagtccagaggccattctggagtgggcctgggtaccaggccatngnggtactccttttggtaccaggctggcctcctgattnctgaggcgttggctcggcaccccatgggggactgcnctcctncaggcctggcacaaagccagggggctaagagcagtctgcaggacagagggcaggaccacagcagggagggggctcctatgccagctccccctcatgccatatgaggccaggcctgtggctcgaagcccctgagctgggcatgtcctgagagtttgggannatccagggggtgnatttttatcnttagntctgngtagnttttnatntcttttttcagggttttttcntttttttatgtttcagcgcctcctccacacgtccatgccttccaccttgccacatggagcacagccgtgcccccacaagccagagggaacaacgaagctgccttgacctcagcactgaggtggtgggtagcatgaaggaaagatggtgcgcccggtggtttaggacacgagggtcccggtcccgaggctctgcggagcccgcactgtctggatggcctgctggttcttgaacttgaccaggcctagggtgatctgggcgttccagccgggatcttccagggggcagcggaagtcgntcttt

SEQ ID NO: 661976 - DNA, 326 bp, Homo sapiens
aggtgacccaagaggacccccacggggatacgccccttgacaattagggccacaggggctgccacacgcttcagtaggcgcttcagcggcagcagcgccttcagcaccatgttgtgcaccatgtgcgcgaactgctgcacgaagaagcatatagcctccgtctcagactcagccttacagtctggggtcagctttgcccggtagctctgggcgtaggccagcacgtaggtgggcgagccgacgaacaggaagaggctgttctgggtctggtctggcctctgctgggcctgcagctgggagcacatttcaaaggccacgcaggcccc

SEQ ID NO: 661977 - DNA, 1380 bp, Homo sapiens
  misc_feature (376)..(376): n is a, c, g, or t
  misc_feature (587)..(587): n is a, c, g, or t
actcagagatccaggacgggtgctgcaccatgagtgtcgtctgtgctcgagccccgagccagactcctggcgtgcatgtctctggagatcgctccaagcggactccctgctcaattacgtagtttgctgctgggttggtcaaggcaagttcaggtctacctggtgaggcagctggttgctcagggtgctcctagcagttcccgtgcgccatccctaccctactaggactctttcggcgcagccatcgctagggagctccataggagtgaccacggtagctcacatactgcgattacagaaattgcggtcgtgagacattacccaatgtggccgtgtccctcatgtggctatggagggagggcaaaagtccgtggtncaccgtcttcctaatgtacccttgcaactccgtacttggacacggttggactctctgtggggacgcacttccttgggcctcggaatgatttcgcccagtggggtttcccttaccatggatttgccttgggctaccggatcgggccttttggggctatccgggctctggacttcccttggcttggactagtttggggcctaggaaccaaatntggtttgcactaggcgctcactccgcagcgtgcaagggactttggagagtccacccagggcgcactttttccctcggcattaagtaggaatccattgcaccttgtgaacaagtggcgccgcctcaaatcgtttggggagggggcctctcccacatgcgggaaaaggaacatgtgcttctgggtaccaggcacgttggcaaaggggtctttggggcgaaccccacccatggcgggagaatgcgaagcggctatctcgcgttttggggggcccacgcggggatatttcgagcaccgggtcctgtgggaagagggggtgacaccacttagtaacagacggacgaaggtcacatatgcagccttgtggaatgtggcgacccccgggggagaaactacaacaaaacagttgtgagcacagtgttggtgtggcctgttctaaaaggcccaaattaaaggcggacgaaggagcatctccaccaacgaggttgcgcacaggggaggacattttaatcctcacgtaggaccgattcagtgaattaaaccgcggggcgaccaagtctgatatgttgcgaactcgcgtggggaaacaacaaacacccaggggtttttcattaaccccccgggttgtctcgacacggacaattcggagcttatacgaaccggccagataatagtgagatcggcgggttaactcacacaggtggttgggaacattcgcactaggacttgggtgcacagagttggggaacaacaccgcccggggggcactcggcaccacattgttggggccccaaaa

SEQ ID NO: 661978 - DNA, 122 bp, Homo sapiens
gcttcattacagatttaattgactgactaaatgaaaatgcctacccactcacagaacattcagtgtaaggtaaaatagacctgaggtatgttatgtgagtgggtaggcattttcatttagtc

SEQ ID NO: 661979 - DNA, 259 bp, Homo sapiens
gaaggcaaggaccaatgtttgatcgtgaaacagatgtcatgtggatagcattactatgtctgcacgtaattatacagagagatagatttgtgtatacacctaccactagcacatcctcacggagacacatgtgctcattgtctgttcttgtttgtgatggtttcaagctggcacttgcattgtgttatggtttgggaacccaaaagtaatgcatcgtgttgaaataagacagagttgttctcgtcagaaaaaaaaaaaa

SEQ ID NO: 661980 - DNA, 126 bp, Homo sapiens
ctgagctgacatacaaaacgtattcagctttataaacgtgtgataaaagataccgctagagtcacggacattcgacaggatcaaatcataatagaaatgaagatgggggtgggttggggggggggg

SEQ ID NO: 661981 - DNA, 122 bp, Homo sapiens
ggcctatgatttttgaaaccagcccccccttcaatcagatcaaaggaattccattctgttttaaaggcggggattcggcttaagatttcatttgaaaaaaagaattttcggcttaaacccca

SEQ ID NO: 661982 - DNA, 482 bp, Homo sapiens
tgtgtccggaacttccttgtggatattgtctgaccctactgctgctctgggccctgtgccccctgccgtgccacctggagtgtcactccacctatccccacacccaatcactaagttataatgaaaatgatataatagatacttacaacaaccacagaaaacgaaacacaacaaagcaaaacaatactataccactaaacataatatacaaacaacaacatacaaatcatcactacacacataatcaaaaaatacacaacaaaaacacagaaaataaaaaactacacaacaaataaaacaaaacattatataaaaacaaaaaaacaaaaaaaaacacaaaacacataaaaaaaaaaacaaaaaagaaaaacaaaaacaaacacaaaacaaaaatatagtaagaacattaaacataaaaaacatacaaccacacaacacaccacacacaaaaaaacaacaacaaaaaccaaccgaacacacac

SEQ ID NO: 661983 - DNA, 407 bp, Homo sapiens
ggtatctagaggatccgaggactctagcctgggctccagccaccccccatccccacagagctattgagccagtaccaactcagcaactccctggaaagagcctccaatgtcaactgaaagcttctcagccactgcctctgcagtggaactgctcttgccaccctcagactaatgaaggagcaaaggcccttctccacacctccaacaagctgcagttgacccaaggagagaaggccagttatttcccatgggtcccacacacaccccatggctcaccaccagacaggtttctccttgcttgggcccacagcacaaaccctccatcttgggctgactgcactgagtgactgctgacctgcatatctctgaggtggaacccccggagtcaagcaaactagggtaccgag

SEQ ID NO: 661984 - DNA, 686 bp, Homo sapiens
  misc_feature (374)..(374): n is a, c, g, or t
  misc_feature (518)..(518): n is a, c, g, or t
  misc_feature (535)..(535): n is a, c, g, or t
  misc_feature (588)..(588): n is a, c, g, or t
  misc_feature (612)..(612): n is a, c, g, or t
  misc_feature (680)..(681): n is a, c, g, or t
ccctcctggaaataaaggttaaccccgagctatttaccagccccttttttttcaaataaactctccaacctaaacccctgggcgggtggccagaaatccaacaagcttctttcgccctttattcatataaccaaaatccaggcctttatccacaactcgggggcttgaaaagaaaggtattttgaaatcacaccctccggtttatgttgctccagtaaaatctgcctggaaagaggcagtcttcttagcatggtgagctgagttcatggcttttttttgtagccagtcctgtccctggccatccatgtgatggttttggatggagttaaactttatgccagtgggcagtgcatgtggaaagtatcaaagtaagnctctcccctccaaagccctgagttttttggctgcatgaaggttttctttaaaatcagaattgtaaccagtttttttggcccgaaggatgaatacttggatattacttaaaaggaggggtggaaatgggtgtggcagtgtatggngtgtgatttttattttnttctttggtcatgggggccaaggaaaaaggcatgaattttccctgtcaggctnttacaaccccaggccctgtgtttnctgtttggaaaacatgtccccgtggctgtggggcccctgcttctgtttaaataaaagtggcctggaanntggga

SEQ ID NO: 661985 - DNA, 1587 bp, Homo sapiens
gaagtgctacatccagccaataacatggtaccgcacttaggtttggccgcatggagcccaagatccaggactatctacctggaagactgtatggtcaatgttataccggattcttctgtaccagtagaagaatccaatgttcacatcttcaagccaggattgctgttgcatgcggattgtattatgcacgctctcaaccacccgggcgcactcgtggtcccattaattcacgcgcatgaatcctggtaatgctgaacgtcttcctaggccgaggaaatactaacgacggctcgttgcattgctggtggacctactaatcttgactgactctgcgcggttcacgagatggtactccgatagacttgggaacgggctagtgtgccacgttgtctgccgctcacccatgtcgctgggcgccactgctaagccagcgagtcctcatcgaccggcgtcacgcgccggtcgacacgaattcccttgccactctttgcggaccctaggctgggcccctggaaccttcgaccttagagtgagccttgctgtgcaaccttagttcccttgaccttctccccgagctgcccctctggccaaacgtgttgcaccgcaaggcacggtaggtaccccaagggcaggttatctagtagctagattgtgcgctcgcaaaagtgaataaccccgcaggacacgacgtgctagcctatcccagataacgcccctatcgagatcccttgcttcaccgacacggggcgaccccagtgaggacgcgctactccgggaagtcagattggccccaaggaagtgcccctagacccggtgggccccaaagacgcagagacgtgaccttaacgtcaatatgaccacctttacaaacccgcgttgagtagttcccattatcatcctcctttttgagttttaaatagaaaggcagttgtattccggcgttggaacccacatagaacctcggccaaccacgtacagctttcacagacgtaacccatgttccctctatattacacaatgaacagcacgacgtgtggggcaagcatctcccccttgtcatgacgagacacattacacaactccgcccacataaagcagttagaccgccagtctcccacaagacgcttctcaaattcgccacttatgaaatccgctggataggatcttgtgctgtgtgcatcaacataccccggcgtggtggcggcacccccattgataatgatcgagccacagatctgctagccacactcacttagccaatggactccattgagaccgagggatctacccccacccgctaatgtgtattaccaccaataacatactatatatgactcctcgaatctcacagcggtaacattccccatggtgcctctgcagagtatatctgcgaaaattgtccctcaaggtgaagaaacaccgacaccacacattatctattcatctatggacaagtcagatgggatcgtaccacaataatcactgtcccgatgcccaagatacacctacccacaacgcaaaacgtccaccttttcaacggccatcagcagtcataggcgcatacccacattccactaagcaccccac

SEQ ID NO: 661986 - DNA, 235 bp, Homo sapiens
ccacgagcgccccaagctccaggacgcagacctcaccctgtaccagaccaataccatcctgcgcaccgggccgcacccttgggctctatgcgaaggaccagcagcaggcagccctgggggacatggggaatgacggcgtgtagaacctccgctgcagatacatctcactcatctacaccaactatgaggcggtcaaggatgactatgtgaaggcactgcccgggcaactgaagcc

SEQ ID NO: 661987 - DNA, 685 bp, Homo sapiens
  misc_feature (374)..(374): n is a, c, g, or t
  misc_feature (518)..(518): n is a, c, g, or t
ccctcctggaaataaaggttaaccccgagctatttaccagccccttttttttcaaataaactctccaacctaaacccctgggcgggtggccagaaatccaacaagcttctttcgccctttattcatataaccaaaatccaggcctttatccacaactcgggggcttgaaaagaaaggtattttgaaatcacaccctccggtttatgttgctccagtaaaatctgcctggaaagaggcagtcttcttagcatggtgagctgagttcatggcttttttttgtagccagtcctgtccctggccatccatgtgatggttttggatggagttaaactttatgccagtgggcagtgcatgtggaaagtatcaaagtaagnctctcccctccaaagccctgagttttttggctgcatgaaggttttctttaaaatcagaattgtaaccagtttttttggcccgaaggatgaatacttggatattacttaaaaggaggggtggaaatgggtgtggcagtgtatggngtgtgatttttagtctccttccgcgtcgggggcgcccgccagaggcccatgaatcttcccggcccgcctctgccccccgccggcttcctgtaagctgtttgaaagtcctgtccccgcggtggggcggccgctgcttgtgtttaaataaatgtggcgtggacgctgga

SEQ ID NO: 661988 - DNA, 390 bp, Homo sapiens
atggtcaggtgccattccacacccatcaggatggctcttattaaaaaaacagaaaatagcaagtgttggcgagaatgtggagaaattggaacctttgtgtactgctggttggcaagtaaaatggtgcagccaccgtggaaaacagtaaattggtgattcctaaaaaagtaaacttagaattaccatatgacccagaaattccacctctgggaatatatccaaaagaaatgaaagcagggactcaaattgatatatgtacacccacgttcatagtaacattattcagaatagccaaaagggagaggcaacccaagcatctattgatagatagacaaacaaacagataaacaaaatgtggtatatacatagagagaaatgttagtcactcta

SEQ ID NO: 661989 - DNA, 380 bp, Homo sapiens
tggttatcagttgtggtttataataatgaggagaaggaggaaagggttgaaaaaccaaacagaaggcccaagacatattttagacagtgacagccatcccctcaacactgacccccaaaccatgcattttggcttaggtacagttctctgtttcttggaaaaatgcaaataacctaaatgggattttaaaaaaataacagaacttttaaaaagtagttacaatgtattcaaaggaattctttcttaattatctaaaatggcttgaactgttatgcaagtaaggaattgcttttattaaatgccaaatctttttttaaagcaacctcagggagttactcattctcaatgagctgtgtctatgccagcaaaacaaaaagtgg

SEQ ID NO: 661990 - DNA, 679 bp, Homo sapiens
tgccttagacggaatctggctgcatgacgcacgttacctgcctagctgtccgacgatgtcgtcccagctagttgagctgcgagcgaccctgggaatactactaataagacattgcgatgaaaatgagacagctctgcatccgcgcgcggctaggcctcaaatgcgttcctgtgactggagcttacctcatgaatggcgagccatgcaaacgtcgaagtgattaatggcggatggtattgcactgctgggcgctggaagacgtagcatcctcatcattccatccacacatgtgacacgctgagtaataagagtgcttatagcgcttgcacaaggatgacatccaagggaccagagcaagaccatgagtgccagctctctacaatgttgactgtccccgtctctgccagcaatgagaggactgggcgcaatagtcgtgtgtagttgttggtcactgaacaatctgcgtgaggggcctagtctactcacgtgcataacatcagggactggtggtagaagcgttaccatagtgacagtacaacgtgctttgaaacagaaaagtgcgggatctggggtctcatgactagggccagcaccagcctgaggagtattccagacaatggaggttccattaaaaagagccttaatggttcgggagtcctatgctgctgtaaattgaccc

SEQ ID NO: 661991 - DNA, 1087 bp, Homo sapiens
  misc_feature (36)..(36): n is a, c, g, or t
  misc_feature (38)..(38): n is a, c, g, or t
  misc_feature (40)..(40): n is a, c, g, or t
  misc_feature (44)..(46): n is a, c, g, or t
  misc_feature (54)..(54): n is a, c, g, or t
gtcacttacatcttttcgccagattcctttgcactncntnggtnnnaatagttnatctatttttctttgacatcctagtttgcgtcagtgacagaacttactgcttagtctttgtactttttaaaaaatctataaatttaatgcactgtccaagtgaaatgtcctagttgtcattgtgattaaggggccaactttccaggcagctagcagagatactattctcttcctctcccagcaaatttgtattccttcgcccacgcattcctgctatactagatggcagccagtgatggaactataaagatgtctgtggtcatatgttgaatgtggcagcttgaagatgtactgccacgggtgatctagggcaggctgtcttccagtccatgtgttctcggtcgccgtagacagcgctctggctaccaccgtgaggctacttgaactgtcaggggcatctgcctaaaccagaatcttttgtcagaaaccttaacccaacaaaacaaatcttgagtagctcatgcccggctcttaggaattttgtctggttttaataaggaatgaaaagcatactgaaatgccgggggttaccttttgcgggtgccggaaaatgctgtatcgcccggtggtccctgggtcctttagtgggtcccgaaaccccggtttctttgttgcagggggtctttgagaatctggcgagttacgccctataaggggggttgtatgaaattgcgaatccagccgaggctcatcctggaatgatataataggcagaaaaccggtattgggacgacggggtcttgggccagactgagtacctactatcagtgacgccctgagttggactggacatgcgggtacaggcacagttgggaggttgtcggacttaacgttatggagccaagactaaataagtcctgagtgttccacaaccttcaggtgcaatctccctcagtcgaaagtatctcgagcctccttatgcacttatggtacaacctgcgatctggggcaagtctgccacaccaatattcaagttacgctatagccgcacgtctccttagttagctttacacttataacgaacggaggttag

SEQ ID NO: 661992 - DNA, 121 bp, Homo sapiens
ctatctgtgctcaggatcatcgtggacgaacgtttctaccctgtgaccctggatgtgctgcaccagattttctccaagttcggcacagtgttgaagatcatcaccttcacctaagaacaag

SEQ ID NO: 661993 - DNA, 288 bp, Homo sapiens
  misc_feature (138)..(138): n is a, c, g, or t
agcagagtcgatctctcagagagtatccccgctgattagcgaggaactgcttgagatacatttcggctgggtgttttatattaggtaaaatgcttgtgttcatactggttggtggtgaggggactgcaagccgtgtantcttttccagatgcaaccttaaaatcagtgacaagaaacattccaaacaagcaacagtcttcaagaaattaaactggcaagtggaaatgtttaaacagttcagtgatctttagtgcattgtttatgtgtgggtttctctctcccctccct

SEQ ID NO: 661994 - DNA, 987 bp, Homo sapiens
  misc_feature (36)..(36): n is a, c, g, or t
  misc_feature (38)..(38): n is a, c, g, or t
  misc_feature (40)..(40): n is a, c, g, or t
  misc_feature (44)..(46): n is a, c, g, or t
  misc_feature (54)..(54): n is a, c, g, or t
  misc_feature (578)..(578): n is a, c, g, or t
  misc_feature (718)..(718): n is a, c, g, or t
  misc_feature (740)..(740): n is a, c, g, or t
  misc_feature (833)..(833): n is a, c, g, or t
  misc_feature (949)..(949): n is a, c, g, or t
gtcacttacatcttttcgccagattcctttgcactncntnggtnnnaatagttnatctatttttctttgacatcctagtttgcgtcagtgacagaacttactgcttagtctttgtactttttaaaaaatctataaatttaatgcactgtccaagtgaaatgtcctagttgtcattgtgattaaggggccaactttccaggcagctagcagagatactattctcttcctctcccagcaaatttgtattccttcgcccacgcattcctgctatactagatggcagccagtgatggaactataaagatgtctgtggtcatatgttgaatgtggcagcttgaagatgtactgccacgggtgatctagggcaggctgtcttccagtccatgtgttctcggtcgccgtagacagcgctctggctaccaccgtgaggctacttgaactgtcaggggcatctgcctaaaccagaatcttttgtcagaaaccttaacccaacaaaacaaatcttgagtagctcatgcccggctcttaggaatttgtctgtttaaaaaaaaaaaaaaaaaaaaggtccaacttacttntatttaatttttttaaccctagtcacggtttacaatggtttgctaaagccgtgaaatatggtcggtgctgggggtgtatgagcattggccaactttatatttatggcagtgaagaagaaactaaaaattatttggaaatngaggagctatgtccaagctccntaaatccgtgtggggtgcatgtgggagaacgtgagtaagggcctcttgaaaggaggcttttgggaaaggggtcccccaggtttctgggaggtncctgcttggggatcactgctgcatagctgattggacctccccattggaagttggtcgatttggcttgggcaaggtttcattggactagtagaactcattctgttaagtgtatattncactactaattgtaaccctttctgctcaaaaaaaaaga

SEQ ID NO: 661995 - DNA, 596 bp, Homo sapiens
ggcagagtctagttgatatgccacggacactcctttacgagcccggattcggaccacttggggatcccagaatcgctccctgacgatatcctggaaaggactgacggaagggagcgcctggtgggcacggctcggtgcgcgtgggaagatagacacgtgcgcttgccgggagcacttgagtcgtcgcatgaaggttacgggcccgttctcatagcgatgacggccatgcccactacctcgtaacgaacgtattgctcggggaagtgccattccacacgttcccagctccctgttggtgggagtaaacctgtatataatctaattgcgttactagtcaagaagggactggcgcattctactagacctgagtaattatccgtgaatgatgggcgagtggacctgcgtattctcgatggcgcccaaaagccctcgtacggtctgggtagtgtaacggggagggtcctagccctgcggcttgtggtaacgggacgcgcgtctatgctctgggcgttgaggttaccgtgcacgtgggctcgtaccccattggggtctgacggtaccgggcgaggggtccctatgcccttggccggtgcttg

SEQ ID NO: 661996 - DNA, 721 bp, Homo sapiens
gagatcattccgaatgtgttcccaccaccgactagaccatgctcttctcggacaccatgacagacgaggtgatagatctggcttctgtctccttgaggaactccgtgtccggatatttgtgagacaggcaacacatatgtggctcccttctctgacgagacagagagcttcactccgaggatccggcctaatcgtgaaagagaccgggaaagccactcgtggcacctttgttgacgacgaccttcaactgaccatgtgagtgctgttcacgcaaaccaagacatgcaggcccaccgccatgcacactcctcctgggtgcctcactggggctgcagcgctggtgctgaccctccactggtcaactctgctcacagacgcacccggctggcaggccctccggcgcttgttaaggatgaacagattgacatcctcgctggccactgatgtggcagcccgtggacttgacattgagggggtcaaaacgcgctaactcaacttcacaatgcctaataccatcaaacattatgtccaccgggtggggcgaacagcacgtgctggcagggctgggcgctcagctctctctgcgctgggagaacgatgagccggacagcatgctgcaaagcgagattgtacccagctgccaaggccccctgtgacgcgccagatacttccccacgatgtcatcctcaaattccggcgacagattgacaaatgggacgcc

SEQ ID NO: 661997 - DNA, 413 bp, Homo sapiens
gacatactcgtgtttcctctatttatatagctatcccatagagcaatatttttgtgttgctgtctagtgtatcactttaacttgaaagacttcctttagcatttcctgtagggcaggtctagtagtgatcaactcacttggaaaaagtttgtctgggtaggtcttttaaagaattttaatttttatttttgagacagggtctcactctgttgcccagactagagtgcactgcgccgatcatggttcagtgcagactcaacctcctaaggttcaggtgaacttccaagtagctgggactaccggtatgcaccaccacacccagttaaattttgtattttcagtagagatggggttaaccatgttgcccaggctggtctaaactctgggctcaaatatcatcaataaagctccaa

SEQ ID NO: 661998 - DNA, 173 bp, Homo sapiens
  misc_feature (62)..(62): n is a, c, g, or t
ccaggacccttaaaaaaagcatggcccctgcaaaaggatgggctcaaggacagcttgcctgnctgcacccataagggtgaagccttttcaggtaaaaaaggactccaggtggggcctgtgcaaagggtttttacggggccagtaggattggggctataaaatccgtaaatgga

SEQ ID NO: 661999 - DNA, 372 bp, Homo sapiens
  misc_feature (33)..(33): n is a, c, g, or t
  misc_feature (174)..(174): n is a, c, g, or t
  misc_feature (224)..(224): n is a, c, g, or t
  misc_feature (366)..(366): n is a, c, g, or t
cccccaaatatttttgaaaaatatttccttttnaatatcctgccatagttttgtaccccattataatttggctctggaagaagttcaagatatgcccaaatagtccttggcacaatggctcacacctgtaattctgacacttttgggggccgaggtaggaggatcacttgaggnccaggagttcgagaccagcttggtcaacctagcaagagctatttccacanaaaagtgaaaaaactacccgggcgtggtaacactcccatagtcctagctacttaggaggctgaggtcaaaggattgcttgagcccaggagtttgaggctgcagtgagctatggtcgcaccactgcactccagcctgggtganagagca

SEQ ID NO: 662000 - DNA, 311 bp, Homo sapiens
agtgctaggtcccctgtagacatcgtgaagttccagctctccaggttcctgcagggtccatatcataggattggactggctagaggtgaggagattggggctcagagaggcttacttagctgctcatttattagctagaaaaaccagaggttaaacccaggtctggctctcttcaaacctcctccttttccttggtgttggcatgctccttgggtaacatctttcatgcctgcagcgccaatgcccaccaggagtgtgcctgtgcatcccaaatcccatcacgttgctcagaacgccttcttgagcaccag

SEQ ID NO: 662001 - DNA, 782 bp, Homo sapiens
caaatatattatttttttaccataccaacttctctcccatctctaaggtggctcagatccagggccactccctgcccccagcctggttggacagcaatggaatccgacagcccacagctgtgatgctccctcctacacccccaggcggcgaagccccgtcctgccagtcccttgtcccctttcagcccacctagttccctctctgctgccggtgatgggaggcctttctagagctggctcttctctctcccgtctcaggggcgtttctctgcaggtgctgtacacgcgcgtataacctgttcccgttctctatccttccccgtggtactgagctcacgtggactcccagtgcgaaggggcccatgggtcgggctgcaggccctggcctgtagaggctggggagcatgcctgtcactgactcctcactagacctactacttgagtttaggggatggtagggaacatatcaccacgtgcccattgtcctcataatagatgtggtgacttctcccggtagagcctagacaaggcgtcctccatggtggtagacggcgattcacggcacaaagtcgtaggagatcggcggacctcgtgactgcctggcttgagaacagtccaggagtccctttgggagccgagaatgtgaacgtgactccccgtcatttgccctgaaaatgctgttcctcaccagatatgctccgcgtcccctagtcccgatacgagcgactaggcccagccgtgtatgcaaggcatagaccccttcccaacaaggctaaccctca

SEQ ID NO: 662002 - DNA, 205 bp, Homo sapiens
tagagacgtgttgcaatgttgcttaggctgtcaaactcctgggcttaagtgatcctcctacctcggcttccaagtagctgggaccatgagtgtgtaccaccatgccaagctaatttttttgacttttttttttctctttttttggtgaaacagattctcattctgtaaccaaggttgaattgaattggcttaatcttggtccacc

SEQ ID NO: 662003 - DNA, 360 bp, Homo sapiens
gtatggttatcgcccaacactaggaactacccaaatgtctgtaatggtgaatggttaaagaacctatgggacatccataccatggaatacgatccagccataaaatggaacaaacctttcacacaggcaacaacttggaagaacctcaaggaaattatgctgagtgaaaaaaaaaaaaaaggccgttctaaaaatgggggataccgacatagttcctatttagtgtaaccttccacaaaaaaataactatattaaccagagatgaaaaacagataaggggatggccagagggtaagagatatggagagagaatagattggtgctgaagaggagatagctcaaggggagtctgggggaaga

SEQ ID NO: 662004 - DNA, 196 bp, Homo sapiens
cggcagtgtgacgagtctcctgatgctagcaggacccgccgatagtgctacagacatgaagctcatactcttttcgcgcaagcaaatagcaagctgcaactgctcaaagattgagaaatgaaaatatgaagacaatcaaagatacttagaagataaagctcaagaattagcaagactggaaggaggttattggcat

SEQ ID NO: 662005 - DNA, 434 bp, Homo sapiens
  misc_feature (147)..(147): n is a, c, g, or t
  misc_feature (192)..(192): n is a, c, g, or t
  misc_feature (199)..(200): n is a, c, g, or t
  misc_feature (204)..(204): n is a, c, g, or t
  misc_feature (216)..(216): n is a, c, g, or t
  misc_feature (228)..(228): n is a, c, g, or t
  misc_feature (237)..(237): n is a, c, g, or t
  misc_feature (239)..(239): n is a, c, g, or t
  misc_feature (242)..(242): n is a, c, g, or t
  misc_feature (255)..(255): n is a, c, g, or t
  misc_feature (265)..(265): n is a, c, g, or t
  misc_feature (306)..(306): n is a, c, g, or t
  misc_feature (314)..(314): n is a, c, g, or t
  misc_feature (334)..(334): n is a, c, g, or t
  misc_feature (355)..(355): n is a, c, g, or t
  misc_feature (367)..(367): n is a, c, g, or t
  misc_feature (376)..(376): n is a, c, g, or t
  misc_feature (379)..(379): n is a, c, g, or t
  misc_feature (389)..(389): n is a, c, g, or t
  misc_feature (404)..(404): n is a, c, g, or t
  misc_feature (411)..(411): n is a, c, g, or t
  misc_feature (421)..(421): n is a, c, g, or t
  misc_feature (425)..(425): n is a, c, g, or t
  misc_feature (428)..(428): n is a, c, g, or t
tgtgattgccatttctttccaaggccagtttgaacctgagggtgctttatcctaaaagttttaaccccagggtcccaattcagtaaattttgggaacaggcacgctatttttcatccattttctatcatgttgaaggcaaatttggnttttccccccaattttgaatttgtagacaaacttggacggtcccntgccccnnaagnctcctctgtccncatttttttttnccccccaancngtntttttttacgccngtaaggcagntctgttgtgggagcaaatggtccccttattttagggttttnctctttgnatgatgaaaaaaatgtgttntgaatcggggctgtcagcccngctgtcagaccnttttccccngcnaattagatgnatgccccaaaacggnagaattnaaaaaaagtnaaanggntgttta

SEQ ID NO: 662006 - DNA, 1435 bp, Homo sapiens
ctcctcagagggacgaacgccggcggtggcctcagagccgcgggattctggaccatgagtgcaggcgaaaccttcaggaccagcgaggctttctaggctcagcccgaccataggaccctggacctctccagtgaaatgtcctgcaccatgaacaccaacaagctggaagaaaatagtcctgaagaagatacagggaaattcgagtggaaacccaaggtcaaagatgaattcaaagacatttccatatacttctccaaagaagaatgggcagagatgggagagtgggagaaaattcgctatagaaatgtgaaaaggaactataaaatgctgatttcaataggtctcagagcccctagaccagctttcatgtgttaccaaaggcaagcaatgaaaccccaaataaatgacagtgaggattctgatgaagagtggacacctaagcaacaagtcagtcctccttgggtgcctttccgggtgaagcacagtaaacagcagaagatactctacacattaactaaagtcacaggaatcatctagaatgccatttagtggtgaatctaatgtgaaggaagggtctggaatagaaaatttgctgaatacaagtggctcagaacacgtccagaaaccagtgtcctcccttgaagaaggaaatacctctggacagcactctgggaaaaaactgaaacttaggaaaaagaacgttgaagtgaaaatgtacaggctgcgagagagaaagggccttgcctatgaggaggtcagcgagcctcaggatgatgactatctctattgtgagaagtgccagaatttcttcatcgacagttgtcccaaccatgggcctcctttatttgtaaaagacagtatggtggacagggggcatcccaaccactcagtcctcagtctgccccctgggctaagaattagtccatcgggcatccctgaagctggacttggagtatggaatgaagcatctgatctaccagtcggtctgcactttggcccctatgagggtcagatcacagaggatgaagaggcagccaacagtggttactcctggctgattaccaagggaagaaactgctatgagtatgtggatggacaggacgagtcccaagccaactggatgaggtatgtgaactgtgcccgggatgatgaagagcagaacctggtagcctttcaatatcacaggaaaatcttctatcgaacctgccgggttatcagaccaggttgtgagcttctggtctggtatggggatgagtacggccaggaactgggcattaagtggggaagcaagatgaagaaaggattcacagcaggaagaggtgggcactattatgattccttaaaaaagaaagagaagagggaattctccttgagaattttcattttctaactccttttaaaaaatgatttatggtaaataaaaatgtttaaattc

SEQ ID NO: 662007 - DNA, 271 bp, Homo sapiens
acatgagcctcgaggcgacgttgcagtgagctgtgattgtgccactgcactccagcctgggtgacccagggtacacagtgagacccagtctcaaaaaaaaaaaaaaaaaaaagaagggaaagtttgaaaaattgtttccccttttttggtttggtttttaattttttccggttaaaaggaaaggggaattccgtttgttactcggctttgttttatttggagggccctcattgctttttggtttccggaattgttcttgttaacttgaaga

SEQ ID NO: 662008 - DNA, 580 bp, Homo sapiens
  misc_feature (19)..(19): n is a, c, g, or t
  misc_feature (566)..(566): n is a, c, g, or t
acctctgcccaagaaagcntgggtgttgtccaggtttccccccagtgagacggcctgagatatggcctcgtgggaagggaaagacctgatcgtcccccagcccgacacccataaagggtctgtgctgaggaggattagtgaaagagggaggcctctttgcagttgagataagaggaaggcttctgtctccgacatgcccctgggaacggaatgtctccgtgtaaaacccgatcgtacattagttctattctgagacaggagaaaaccgccctgtggctggaggcgagatatgctggcggcaatgctgctctgttactctgctacactgagatgtttgggtggagagaagcatgaatctggcctacgtgcacatccgggcacagcaccttcccttcaagctatttgtgacacagatgcctttgctcacattttcttgctgacctctgctctgctgccgcattcctcatgcaaagatagtgaaaatggtaatgaataaatactgagggaactcagagaccggggccggtgcgggtcctccgtatgctgagcgccgtctcctgggcccnctgccttctctata

SEQ ID NO: 662009 - DNA, 241 bp, Homo sapiens
tgatgacactaagcctgtttttaggggcagatgctagacaatgtttaacaatctttttttttttggatggatggattaatggaaaagatggggcctaactatgtggcccaggagttcgaggctgcagggagctttgatggccccactacactcctgccggggcaacatagggagaccctgtctttaaataaataaatagggaccatttaaaatatgaaaggaaaggtatgttaattatgaa

SEQ ID NO: 662010 - DNA, 1581 bp, Homo sapiens
  misc_feature (548)..(548): n is a, c, g, or t
  misc_feature (564)..(564): n is a, c, g, or t
  misc_feature (569)..(569): n is a, c, g, or t
  misc_feature (578)..(579): n is a, c, g, or t
  misc_feature (620)..(620): n is a, c, g, or t
  misc_feature (774)..(774): n is a, c, g, or t
  misc_feature (792)..(792): n is a, c, g, or t
  misc_feature (801)..(801): n is a, c, g, or t
atgtgtctgctcgtttccgttgttcttttttacactgtttttttgtgttttcgtcttttcttgttctcgtgttcctcttgcggtttccctatggtttttatctccctttttttgtttttttctttttttatttggttctgtaccccggggggccctggcgtttctcaatctgtccccgggtccgttttttctgtctttgccttccggttcctgggttaacggtggcccaacacattggcaatttggaattatagtaaaccgggtttcagcaatgtgcttagccggtctctccggacctcaggggttatcagcccaccttcggcctcacgaagtgctggattacaggcctggacacccttgcccagcccacatcataccggttgaatggaactttgccacaaccacgcctttgctgtagcacacacatatatccctgaacctggtgtgagaataaagttttttttctttttcatgattcgtctttgagtacctcccaggctgaaagactcgttgtgacccagttaaaactttaaggccccaattctccntgaagaccttctcccntttangtggccccnnattttaagttgctttatctttgaaattttgcatgaaaaggnaatgaatggattcgaatgaaattgtcctttagagcatgattacttgttcccctggacaaatatttttctccccttgctcttcctggcctgaaacacgggaaaccagagtcacaaagttatctccctctccctgtgatgccttgagatttttttntggcgttgtttaatgccntgaaatccnagtcttcctccatgggaaaatactgttataccaaataattctagatgagtaacaaagatctttttaggccttcattttatgttttttcttaactgttatattatgattgtgacatagattatactactactaatttttggatgtttcaaaaggtcaagaagtaaaagatgttagaaagcaatgagtgagtcctttgatttttaacttattccccatgtccctatacttcgtgtgcttttccttttttttttggagacggaggctcactccgtcacctaggctagagtacaggggcacgatctgggctcgctgcaacctcggcctcccgtgattcaagtgattctcgtgcttcagcctcccagtgtagctgatattacaggcactgtgccaccatacccggctaattttggtattttatagtagagatggggtttcaccattgtggcccaggctgggtctggaactcctaacctcaggttgatccggcccgcctctgccttccaaagtggctggggattacagggcgtgagccactctgcccgggcttatttttcttatatgttttggcttcgtaagacggttctggtggagcagtggattggcaactctggctggacgtggctgggggaacgctttaaaacaaaaaaagtgtggccccacagagatctggattataatggtgcctggattaaatggggctgggagtagaattcagggcttggatatctttaaaaattccccaagtgttggcgacaccaaatttacagagtgggagacgtg

SEQ ID NO: 662011 - DNA, 1093 bp, Homo sapiens
  misc_feature (75)..(75): n is a, c, g, or t
  misc_feature (132)..(132): n is a, c, g, or t
  misc_feature (286)..(286): n is a, c, g, or t
  misc_feature (304)..(304): n is a, c, g, or t
  misc_feature (313)..(313): n is a, c, g, or t
cgtgatcgctgtggagtcagaccacacagcagttcggcaccacagcgtgccggcatcttctacccgtatttgatngtggcgccccattattcatagtagttgctttatctttgaaattttgcatgaaaaggnaatgaatggattcgaatgaaattgtcctttagagcatgattacttgttcccctggacaaatatttttctccccttgctcttcctggcctgaaacacgggaaaccagagtcacaaagttatctccctctccctgtgatgccttgagatttttttntggcgttgtttaatgccntgaaatccnagtcttcctccatgggaaaatactgttataccaaataattctagatgagtaacaaagatctttttaggccttcattttatgttttttcttaactgttatattatgattgtgacatagattatactactactaatttttggatgtttcaaaaggtcaagaagtaaaagatgttagaaagcaatgagtgagtcctttgatttttaacttattccccatgtccctatacttcgtgtgcttttccttttttttttggagacggaggctcactccgtcacctaggctagagtacaggggcacgatctgggctcgctgcaacctcggcctcccgtgattcaagtgattctcgtgcttcagcctcccagtgtagctgatattacaggcactgtgccaccatacccggctaattttggtattttatagtagagatggggtttcaccattgtggcccaggctgggtctggaactcctaacctcaggttgatccggcccgcctctgccttccaaagtggctggggattacagggcgtgagccactctgcccgggcttatttttcttatatgttttggcttcgtaagacggttctggtggagcagtggattggcaactctggctggacgtggctgggggaacgctttaaaacaaaaaaagtgtggccccacagagatctggattataatggtgcctggattaaatggggctgggagtagaattcagggcttggatatctttaaaaattccccaagtgttggcgacaccaaatttacagagtgggagacgtg

SEQ ID NO: 662012 - DNA, 1618 bp, Homo sapiens
  misc_feature (233)..(233): n is a, c, g, or t
  misc_feature (531)..(531): n is a, c, g, or t
  misc_feature (585)..(585): n is a, c, g, or t
ggatcgagacctgaaggtcctggatcgcatggccctatactgtcgctattattaccacgcctacataagactcgctatcactccttaacttgcacttccgccactcacaattttaccaacttcaaacacaggaacccctcagggactccaacataatagaccatgtcattagcgtaacctttcagccacgtaccacctttgcccacgacatgcataggctatgcgagagactnaccccttgtaggacgccacaacgagaagtgggaacttactgaagcgttgaggtttcccatctaagcagagtaaagtgctatctatcactaaggtacaaagagtacccgtcatgtctcaccgagtatcgtccccaccatctcaattgcacctccacgcctacacaagctcccaatggtcggtacacagctcctctctatcggcttgcgtggtctatactgagatcacttttggcacctgctgacgtacttcttgaaggaatcgcaatagggtccgtgcatatattgcgctcaatagaanatacggctcgtccatcaatcgtgctagtctcgtctagatcacgctcactattgnacaatagatagcaactattaaagcacttgacacctcttttcgccattgtagcgtagtcgcgcatattgatgggcgagtaaaaatttcataagacaagacgcgactcaattcgttgccctagctgatcgatatatctaagaaccgtagagaaagtcggcatccattttggccaaagtacttcctttcgatagtccaagtcctatcagttacgtcacccgtcggataagtgtagagcgattgccaggtttcgttctattccgagataatcccaccactttgaaaaagcctttccaccccggtgctggcaccggtccattaatccctcacatatacttctgctccaaccagggaagcgaatatcgttgcgcgttcaattgtaaccgtagtttcctgggccataatgcaaaaaagtccagaaacttaaactcgaaagctgccagtctttcgaaccatgctacggctaatatccactaaaaatccctcgcttcttcgaatgggaaccttccaaaatttttctaaatttcccccaacataaaattaaaggcttttgtttgcactttggacctttccttaggccaaaagcccttccggcttaaaaccatccgagccttttaaaacccccccaaggtaatattaaaaacctgaacgttggggcgaggaaacccttcttcctggttgccgtcaaggtaaaaaacccacaatttgtttccttggaatcccaacagttatttcacttccttccttaactttatccgggaccttccaccagtgaactacaggtgcacaaggtccctaaataaattcccgcgttatatcatgtatttttcccccccaaaagcccacattgggggggtgtactcctaaccccacccacatttttacacacataattaaaaccggtcgtatttaaaccgaagagagaaaaaaaccctccttgtgttttatatcacccattatattctccacattatccttctgatttacctataaccccgagacaaatataatcggggggttgctcttctacaaaaca

SEQ ID NO: 662013 - DNA, 349 bp, Homo sapiens
ataaggactgaaaatcattagaacgagcctaggttttgcaaatatttaaaaattattaaacagggccaggcatggtggctcacatctgtaactcccagcaccttgggaggctgaaggtgggcggatcatgagagtcttgagtgtgagaccaccctggcgaacatggtgaaacctcttctctactaaaaatacaaaaaattatccaggcatggtggcgggcacctgtagtcccagctactcgggaggctgaggcagtagaagcacttgaacctgggaggcagaggttgcagtgagccgagatcgtgtcactgcactccagcctgggtgtcacagtgagaatctgtctcat

SEQ ID NO: 662014 - DNA, 915 bp, Homo sapiens
  misc_feature (785)..(785): n is a, c, g, or t
ccgtgctgggtttaattcagtcaccgatggcatggtatctgagttcagcagtcgcctcgggaggtcggtagcgtctatgactgtctattgcctgccgcacatcatcctagcagggcgccgtctggcccaccagtgcggacaaaagcggtccgtgaacaccatgcggccgctcggtgtgccgccaggctctgctggtgagcgccgccaccccgctgcccaggtcccgcgatgccctgcctgcctgcgcacctctgcccttgctcccagctctactccatggtgcccctgtcctgccctgggggctggccgccacctgcgcctcggctcggagttcggcaagttgtgctgccatgtggcttgtctggagtattcgcgaggttggcctggagccctgggttgggccctggtggccggagggctgccactcttacgcccccagcttcctaccccttgtaatggcccctgggcagcctccggactggtgctgtcccttgggccctgttcgccctcggggctccccggccgggaacctcctttcgactctcaagaggggctggggtcccttccccctcccgaggggcttgcgtttttgccctgttgcgcgttccttgcgcgccagggaccccttgaagccgccgccggctggccatttgatggttggcgccccggagcaatgcctgctgctttgtatttggcgcaccccctggcctggttctttgagtttggccagggcccccctgattcacacccagccgggtgcgctggacgcacaactatctttggancccggcgagagttggttcgctccaggaggggggggtggggggctttttaaaccccgcggtcgggggacgcgcctttttttagccccggtatgcgcggggggcgtatcttatcgcgtgacgcgccttagtg

SEQ ID NO: 662015 - DNA, 1609 bp, Homo sapiens
  misc_feature (548)..(548): n is a, c, g, or t
  misc_feature (564)..(564): n is a, c, g, or t
  misc_feature (569)..(569): n is a, c, g, or t
  misc_feature (578)..(579): n is a, c, g, or t
  misc_feature (620)..(620): n is a, c, g, or t
  misc_feature (802)..(802): n is a, c, g, or t
  misc_feature (820)..(820): n is a, c, g, or t
  misc_feature (829)..(829): n is a, c, g, or t
atgtgtctgctcgtttccgttgttcttttttacactgtttttttgtgttttcgtcttttcttgttctcgtgttcctcttgcggtttccctatggtttttatctccctttttttgtttttttctttttttatttggttctgtaccccggggggccctggcgtttctcaatctgtccccgggtccgttttttctgtctttgccttccggttcctgggttaacggtggcccaacacattggcaatttggaattatagtaaaccgggtttcagcaatgtgcttagccggtctctccggacctcaggggttatcagcccaccttcggcctcacgaagtgctggattacaggcctggacacccttgcccagcccacatcataccggttgaatggaactttgccacaaccacgcctttgctgtagcacacacatatatccctgaacctggtgtgagaataaagttttttttctttttcatgattcgtctttgagtacctcccaggctgaaagactcgttgtgacccagttaaaactttaaggccccaattctccntgaagaccttctcccntttangtggccccnnattttaagttgctttatctttgaaattttgcatgaaaaggnaatgaatggattcgaatgaaattgtcctttagagcatgattacttgtccatgggaacaagtaatcatgctctaaatcccctggacaaatatttttctccccttgctcttcctggcctgaaacacgggaaaccagagtcacaaagttatctccctctccctgtgatgccttgagatttttttntggcgttgtttaatgccntgaaatccnagtcttcctccatgggaaaatactgttataccaaataattctagatgagtaacaaagatctttttaggccttcattttatgttttttcttaactgttatattatgattgtgacatagattatactactactaatttttggatgtttcaaaaggtcaagaagtaaaagatgttagaaagcaatgagtgagtcctttgatttttaacttattccccatgtccctatacttcgtgtgcttttccttttttttttggagacggaggctcactccgtcacctaggctagagtacaggggcacgatctgggctcgctgcaacctcggcctcccgtgattcaagtgattctcgtgcttcagcctcccagtgtagctgatattacaggcactgtgccaccatacccggctaattttggtattttatagtagagatggggtttcaccattgtggcccaggctgggtctggaactcctaacctcaggttgatccggcccgcctctgccttccaaagtggctggggattacagggcgtgagccactctgcccgggcttatttttcttatatgttttggcttcgtaagacggttctggtggagcagtggattggcaactctggctggacgtggctgggggaacgctttaaaacaaaaaaagtgtggccccacagagatctggattataatggtgcctggattaaatggggctgggagtagaattcagggcttggatatctttaaaaattccccaagtgttggcgacaccaaatttacagagtgggagacgtg

SEQ ID NO: 662016 - DNA, 344 bp, Homo sapiens
  misc_feature (85)..(85): n is a, c, g, or t
caccatgctgctaattttttgaaaaaagtatttttatagaaatagagtatctggggccggacgcagtggctcatgcctgtaatcncagcactttgggaggctgaggcgggcggatcactcgaggcctggagtttgagaccaacgtgggcaacatggtgaaacaccatctctactaaaaatatggaaaaaaaaaagtaactgggcatcttagcgcgtgcctttaattccagcttctcgaaaggctgaggcatgagaagtgcttgaaccctggaggcagaggttgaagtgagcccagatcgcgccattgcactccagcctcggcgacagagcaagactccgtctca

SEQ ID NO: 662017 - DNA, 156 bp, Homo sapiens
acagcacggcagggtgctgtggtgtaggctggcagctactgctccgattcagccatagcctgtagacttccatatccatgggtgaggctcttaaaaaaaaaggaaagagagagttcccgcttgtggctgcagtggtccttctccgagtggcgtggt

SEQ ID NO: 662018 - DNA, 489 bp, Homo sapiens
cctaatgtgtcttataacgatcttcatcaggtccatcagcatgtctcaatgcgttgcaggctacggcttcaggagagtaagatctcatagtaacgactgagaaatttagtgccagacccaagatcgaattgaggtgtgtagggctgcatttctttcttactaatttctaatgcttcctggtaagcctgctgggagttcgacacagtggtttgtttgttgtctccagatgccacttcagaaagatacctaaaataatctcctttcattttcaagtagaacaccttactttctggttgtgtagcattgggaataagatatttgtccaacagctccagaacatcattgcagatgtcctgcagatctgcctctatcttctcacgggactctttgcccatctgctgcttcttctcattcctctctgtattctgctcaaagctggagatgacacgccagacagagcggcggggcctaccacattcttgtaggcat

SEQ ID NO: 662019 - DNA, 154 bp, Homo sapiens
tgctgtgatatttgttgaggagccatggaggaagaagaagcagcaaagaagagaaagaagaatctgatgatgaagctgcagtagaggaagaagaagaagaaaagaaaccaaagactaagaaaggttgaaaataactgtctggggactggggaac

SEQ ID NO: 662020 - DNA, 277 bp, Homo sapiens
aaggcgggggttggagaacagtgcggagggaaggagtaggtgccagaagtacgtatgtcaggggcagattgacttacacgtgggtcctttgaagtgagagctttctttcgttatgttctctttccactcatcgacgggtgaggggctattctcagcagataaatgagatgcttacagtactaggccagaaaacagttgggttgacctatctatctccctaaattccttggggttaaagagaactcatgtagtgtacctcagatagctttctaaagta

SEQ ID NO: 662021 - DNA, 200 bp, Homo sapiens
cacgagggtttcccttgccctgtggatgcccagctcctgtcatccttccgtaggtcctgcagtacagtcttcccctgaatggcaccggggagccagggggactccacccccctaattacgcacacacatactcacagttgattacttgctggtctttgagtcccagctctcttaccctccctttactcgagcagcccgac

SEQ ID NO: 662022 - DNA, 661 bp, Homo sapiens
  misc_feature (240)..(240): n is a, c, g, or t
tctagacatgttagtttgggccgcactttcggatgtggctgagcactgtgtgaaagattcccgatggggtgcccttgacaagagagggggaagagattttgcgaaaatgttcgttgatgtggtggcgcccccttgttgtgagaaagaaagggtgtgaatagtcccccggaggcgcgcctgtagaggaggggtctaagaattgctgttgatagttgaataagtattgggagtgccatagangactgttagagagccgcccgggtgtatttgacaccatcgaaggattcgtgaatatgttcccggggttgtttaatatccccgcgagggaaaaatactcggttctggggggagaagacgttatatatattagcgtgcaaaatagtggtgtgcactcggaagtgacgtcgtgtttcgtcgtacgttgtgtcccagtgccatgtaccccgttaattggatccccacgccaggatgtatgtggctcgtggtcgttctaagatgtgctaggtcaagccgctggtgacatacctgaaacgccttataaggtcgcctggataaattttgtgtgagtagttccattgaagaaacaatttattgttcgccagttgtgtgaaatttttggcctggttaataaaagaatcctgtccaacccataaaaaaaaaa

SEQ ID NO: 662023 - DNA, 141 bp, Homo sapiens
catccccccctataccaaagcagacacttgactactactttggcagtgggtatagttatataacaacagaatcactgttacctataatgaatatactttactattaaaaaccacttgactagcgacggtactagtttccta

SEQ ID NO: 662024 - DNA, 191 bp, Homo sapiens
aacacaggcttccaggtttacctttctcagccaaggacacacgggtagttctccagtgaagatcactttcaaacctgtcaacccacaactggggtcatgatttgacgacgtcgcccgatggagggtgaaccaacttggatgatcaaggctttggccaatgtgggtaaccggggctgctgccgtggaaagga

SEQ ID NO: 662025 - DNA, 638 bp, Homo sapiens
gggctacacgcttgcatccccttccacactttggaagatttgttttttgctctttgcaataaatcttgctgctgctcactctttgggtccacactgcctttatgagctgtaacattcaccgcgaaggtctgcagcttcactcctgaagccagtgagaccacgaacccaccgggaggaacgaacaactccagacgcgccaccgtaagagctgtaacactcactgcgaagggtctgcagctttgctcctgagccagcgagaccacgaacccaccagaaggaagaaactccaaaacatccgaacatcagaaggaacaaactccggacatgctgcctttaagaactgtaacattcaccgtgagggtccgcggcttcatttttgaagtcagtgagaccaagaacccaacaattccagacacaatagcaccatggtgcactatgcagtccttaatacgtatatgtttataaaaacccattgaatatacaacaccaagaatgaactcaatgttaaactatgaactctgggtgatgatgatgtgtccaatgtagactcattgatggtagcaatataacaattcacattccaggtgtggtggcacaatggaagatcttctgtttgattaaatctcatcaaagactcg

SEQ ID NO: 662026 - DNA, 130 bp, Homo sapiens
cacggtatgatcaatgaatatcccctttaaagatgaactcctactaattattttgggctgttgttcattacagcttggcgcttcgatccagggatgtgtgctgggattttagccagtagcactctttaac

SEQ ID NO: 662027 - DNA, 316 bp, Homo sapiens
ctatagatagttctctcctaggttttgctgacagtgcttggtgaatctcacatgcttctgaagcattgaaaagtattgaacctgtgaacctttcagaagtcctcaggttgggaaagaccccacaccttctttaaggatcatttgtctcgccatcacaggatcttggaaatgtttcctagggtgtgtaaaaattaaccaggggggaatgaagcacatttttctggcaatcaaacttgagttcctcagagaacagatgcagagagacctgctcctgcttgcccggctacaggggccactgtggagtcacactgaggct

SEQ ID NO: 662028 - DNA, 178 bp, Homo sapiens
ggcacaaatgcgctgcggaacatggccttggacagtcagaaataagtgagctacatcggcaactacgccatgcgagacctagtccccaggcttccagtgatggaacaacagcaacagcacttgcaagcacggcccatgtcggatgacacagtgacagctgtctgcttgcacactgcac

SEQ ID NO: 662029 - DNA, 1444 bp, Homo sapiens
tgtgagtgtatatttgaaatgcaaatgcttgaatgaacattttaaaaatcaatgaattactgacaatgttaaaatgacaatgatgaatgactatgatgaacatgtgtctgaagatgtcactaacaatgatgatgtgattgataattgatgtttatacttcttgacccaaatgttgtccagatatttatagcacttacaacgtaacttccatgtatgcctaaccacacatgacacacatgtgttgcttacccaacttgtgctatttgcacacacatgcttgcgctatccccatatcacatatatgtaccaaccctaccacttttgtacccgagcgataaaggactcaattgtgtctcaatggaacaagaatcgaaattgtgtgtgatataattgcaaatacctattttgcattggaattgctaccataaggcagacactatggtaatgtacccatgccttccattttcaacataactgcccagcacatcacttctcctctcaatggaccccgaattgcgtcactagagtaattggtattggttgaacaatacatgcccccaggaaagtacatgtgccaatgctatggcttggctattaattgtgccctatggtgcacgtccattgtgtccaacgatggtactgtgttgtgcacgcatcaacatttattctgccccttatatattgtggtacacccatgtgaatgccacatataccccgcctgtcttgggtaaaggacgtttactattcactgctccttggctgtgaattttcctaaattgaaactcagaaatgaaacaaaccttgttcacacttgtcttaccatgaacgaaatctatgcgcaacttccttccactgaccaacggtaaccgtgcggcacacacacctcccactttgcacacgttttcccacaatgtcgccttggaaccttgtttggcttacccacccggtttctgcacaacgcactgtgggttcccctttttctccaatcagcctgtggggtttatggttcctttgggtggcctttttccccgatccttaaccgttgtgacactgcgattcttctcccgcacgtcacccggcccttgggtcttccagcgacgccgttctttcgcacctttcgactcccctgggttgggttgcagacccccctgtgtgatcttttgagcagcacgggtttcagcttcccagtttccccccagcgcttgggtgtccccctatgtgtggtggccctcccacaatgtcgcaaagtatatgtgcgccacatgtctttgttgcgcgcccccagcacagtaactattgactgcgggtgcgacaactaatcttgtgcgcgggtgagcaaacgtgggcgtgcatccacattggcgtcgctgcctgtggcgtgcgacgttattcatccccctgtgcgatgcacgatgcgcttgttgtgtgccgccaacctgctgtg

SEQ ID NO: 662030 - DNA, 394 bp, Homo sapiens
cactagtgtcggcctccagccttagtttctgtggtcaagtgtaaaaggaggctggccagaggaactggcgtctgcgccatccctgcgatagcccttttatgggctctgggagacagctttagggaataaatggtgagtctaccctttgtctacccactcatttgctccctccaagacttagccaactccttccccctcagagaaccaaatagcctgaggaagcaggagagttcatggatatggcagaccttagcagatttgatgctccaagacagcagttgagagatgctgtcaggacgtatcctagtcataccaaagacactgatcgtttctcagcctctctcgtgcttttctcctaatgaccatactcttgccaaaaatcgcgatatgttat

SEQ ID NO: 662031 - DNA, 276 bp, Homo sapiens
tcgacggaaggtggggtaattgcattcgtctgcagtagacacgagttcctccatacagaattgttaggaaatgtccactcctttgggggtgatttttctcctcagtgtagcacattttgtcgtaactgatttagggcaaaattctgaatttctccagccagtctgccatgcttggaatccagtttcctgtcatatgcgagccatccaagttgatgccaagtaagatttgcccagctcaaagtgaaagtgtttgcgtcttgggtcgacgcggccgga

SEQ ID NO: 662032 - DNA, 168 bp, Homo sapiens
gtgccagactgttattgaactcctgggctcaggatctcccagcttggcctcccacagtgctgagagttatgatgtgagcctgtaattatagacagcttggcctatttacctgttggaaactgaagaattatgaattttacatgttcttcaagtaaacaggttatgggt

SEQ ID NO: 662033 - DNA, 233 bp, Homo sapiens
caggaggcttgggcccaagagtgagaccaccgtgggcaacatagcaagacttcatctttacaaaaaaaatctgtaaataaaaaattagccagatgtggtggcgggagcctgcagtcccagctgctcagaagactgacgtgggaggatctcttgagcccagaaattaaatgctgcagtgagctctgactgcgccactgtactccagcctgggcgaaaggggttgaatctgtctt

SEQ ID NO: 662034 - DNA, 268 bp, Homo sapiens
aaagtttttaaaaaaaccttttttttaaggatttatttccccctttaagaatttccccccttggccagggatttggggttttaaaattcccaaagtcccttttttcaaaatcattggaaaccccgttgacccccccccccttgtaaaggatgggggaattagcttggaaccagggtatgatttgctattttttttttccctttttattggaaaaagccccccgttttaattttttttttccccaaaaaaatcccccatttggttccca

SEQ ID NO: 662035 - DNA, 382 bp, Homo sapiens
  misc_feature (17)..(17): n is a, c, g, or t
agccccggaatttgagnccagtctggacaacatagcaagacctgtctcgacaacaataacaacaacagaaattagcccggtgtggtggtgcacgcctgtagtccccagctactggggaggggaggcctcaggtcggaggatcgcttgagcacaggagttggaggttacagtgagctatgattgcatcagtgcactccagccctgggtgacagagcaagaacccgtgtcttaaaagaaaagaaaaacaggaggctgggtgcagtggctcacatctgtagttccagcactttgggaggtgcaggcagaggcggaagcggaaggatcacttgaggccaggagtttgagaccatcatgggtaacatagtgagacacccatctctta

SEQ ID NO: 662036 - DNA, 965 bp, Homo sapiens
  misc_feature (301)..(301): n is a, c, g, or t
ctgaagtggtcacataggctgactttttgtggaggaaaaaagcaaaataataaaaataaggcctacctttctctatgtctgaaacgtgaattgagtaccttctaagtaaagggaaaaatatcagatccatggcctcaaagcacaatccctgttctcatggagttcaattaattgggaagacaagttgaaaatcttagagcagtggtctttaaatatcagtatatattggaataatctgaggaaacatgttagaaatgcaaattccttgatcctgaaaccagagattctgatgtagtagatngggatggagtctgagtttttagcaagctctgccgcaacccctagtaattctgatacagttgatccatggtcatagtgcgaggaatcctgccatagaataggtacaagagtggcagctgtagccattataggtggacaccatgtgcacacatctgccagatgcctcattcacttgggttattccctttagtttgcaaggaatgccaggaccagccagggtggggtcccatgggcctgtgcttgaatccagtgcttgaacctgggcatagggtgtagggataggtcttaccagacacaaacaattctaagttaggttttctgcaacactctcattctgaaatatctctttattggccatttgtcttaactgataaatatataggaccagtttgttattttgtctgattttgtagctatagcagtatcgatcttattttcctaattgtcaccttcttttaagaatccttgctgcggtagggggcggaaatccttgctaagcttctatagctgggggattctccaattaggtctaggattctgtggtctcatatcagttttttgcttctgaggtctttcatggtacagagatggggagagtatcgaggggggatgtgccacatgagcgaagtcaggcagatgagaaaatgcatggatttattcaggaa

SEQ ID NO: 662037 - DNA, 259 bp, Homo sapiens
ccagcactttgggaggctgaggtggcctgatctcaggtggtcctgcggcattggcctcacaaagtgctgggcttacaggcttgacccaccacagccttgccattcctttcaatagcaaaagcctcaattacttttcctccaatttatataatggatagaaatttatcccctcctctggagggtgaggcaagtgatcttgtcgcgtgaacccaacagtttgagaccagcctgggcaacatggggagactttgcctccaga

SEQ ID NO: 662038 - DNA, 219 bp, Homo sapiens
atcctgctgctgtcgctacagccgctaagtacaggtttggctgaatgcttactaggagccaggtgctatcctaaccacgcaaagcactgtactaacgtaccaggcctctaagagccccaggaagcagggctatcatcatccccgcctgatggaggggagaggagagggatgctggacgtgggaccctgcgtgctcaaggtagcaagcccctgcggatga

SEQ ID NO: 662039 - DNA, 166 bp, Homo sapiens
cggcgccggaggagacgcacgcagcgtacttttgtcttcttcgcacgacttgttacaagagggcttcaagaggccttcttttttcctgtgcaaaaatggcaactctttaagggagaaacctatttgcaccagtttgcgggaggaagggggcaacaggttcacacaa

SEQ ID NO: 662040 - DNA, 101 bp, Homo sapiens
cgatctgttggccaaactgcaatgaagtggaaactgccatagtctttttttttttaaggttttattgtaactcttcttactagcattccccaaaccgatcg

SEQ ID NO: 662041 - DNA, 330 bp, Homo sapiens
tcgaacgtttgtctcagctagagcaaacacaatcccactgtagctccacttccaagatggcatatgcacagtagctgcacaggacacaggggctggcgcatagtattggctccttctctgggagggagcacagctgtatggactccaggcagctccttcagctgggcttagtgcctagaggactgtagggaagccagtggtgaagtctgtaggtgtccaaggtgctggtggcagtttctagaattgtcttgcttacttccttgctgtggggagaagttcctccttgttcccagctgatcctagatgggggaagggggatgggggggaggc

SEQ ID NO: 662042 - DNA, 170 bp, Homo sapiens
cgggacgccataggtgcattgtggaagcactttgctgtccacagcagccgcttgtgatgaactgtaacttacaagaaaagggctgggttttgaaaataacacaggctctaaaaaccctaaggagcggtcaacttttggcagaatcgggtttaccggacctcaggctcact

SEQ ID NO: 662043 - DNA, 425 bp, Homo sapiens
gccgagatcgcgccactgcactctagcttgggcaacacagcaagacttccgtcttcaaaaaaaaaaaatttgtttaagacttatttttatccaggttcctacttgttttcagttatggggttggggggtggggtgggagggcaatgacctccacacagtgttaccggatgaggagtctggtcttgctttgttttctctgccttttctgtcttgtcattggctctccgccctcctacacgcacccgcctgttgcttctctcattctcagttccttccaatccccttcacttctctttactccctccccaggtcagtgctcggcgttctcctctttctgttctccatctccggcagctgtctctgtctgtctgtctctgtctcgcctcaggtctctctctttctgggcttttgcgactaaagtgtgt

SEQ ID NO: 662044 - DNA, 111 bp, Homo sapiens
cgcagaatcctaagctaagaaagtgaaaaagacaatgtggccttggggaaacctaccttcctcacacacaactcttagcattagtgatcatcttgctggccgcgggtaccg

SEQ ID NO: 662045 - DNA, 1143 bp, Homo sapiens
  misc_feature (469)..(469): n is a, c, g, or t
gaggtagaggctgcagtgagctgtgatcgtgccactgcactcagcctgggtgacactgagaccctgtctggaaaaaaaaaaaaggtttcactaaatttccatgtcatcatcattacaattttacggattaacagggtaacggcaactctggacatcttttggctctatccagaaatttacaccaaatatgcctgttttaagtcaggccaggtgctcatttactacctcaaccttgtgacttcaagtagctcactgcaagcgctagcctcagctttatatccctaagaaaccaacccaacaatttcaagctggcaccaaatgtgactaaccaccaggaaagaagccaacctaaaggctacacacactgcgggacacgtgctacaaacctaagaaaccttttctccaaaaccacaattaatttactctactctggaccctgacagctcataccgtggcctcttaagcagtnttgaccctctacaacccaaaaggacctttaccacagcaagagctcttggcccaaacgaattcacggtaaacacccatgccttaaaactcctagcgtgttctaacactcgcgctgtaacccccttgtgtacgccaacctgcccctttgcgactctccagagagcccacagttcctcaacttttgcaattgcgccaaaccactgagccacactctggcccgcgcagcaccaaaacgctctttcaaaaccacctctatatcctcaacctttttaccccgttatacaacccacattaccactctgctctaccacctactctctcaccacacaacaccgaaacttcttgctcgccccaattctccaacccaacccctctacatcacccaaaataaacccaaacaaaaccttcttgttcccccggctctgagcacgcacttgaccacagcatccctaaccccacgaacgctcatcggaagtgtacaaacacccggcaagacaccctaaacatacaccagggacaacagttcctatctaaacacgcacttcttacacctaacccccacaacaacgcgccccccacaaccaagcagctcgacctctcttactctaaaccccctcaaactcacgttgcgccccgatactattactctcgtccgtcgtgacctcaacccgagga

SEQ ID NO: 662046 - DNA, 131 bp, Homo sapiens
taccaccaactgactatagacacccctggcaaggtcatccatgacaactttggatatcgtgaaagtgactcatgaccacagtccatgccatcactgcacacccagaagactgtggatagcccctccgggaa

SEQ ID NO: 662047 - DNA, 146 bp, Homo sapiens
cttgaccaacgctgtgcgctgcaggtcctttggccgcatcagcaggtcccagaaagaccccgaccccaaaggcctgtggccacttgcggccaccacagccatgacagggtgccctactactcctgtcccctccagcgttggggtcg

SEQ ID NO: 662048 - DNA, 427 bp, Homo sapiens
agggggctactcgttcatttccagggggagcctcagattccgagataaatgtgcaccatgtgcacggaatcgggtagtaagagccacaaaaagttcctctggaggtcgctcacgtgacaggtgacggtacctacagtaatggctcaaggggtatgagtcatctcactgagcacataaatatggcttcccagtggagaaacacagaccactggagatggcatacgcagggcatcatgcaagcttatagcttgggcacataggttaaggtcggcacccaggtacatggttcaacttaaatctatcacggtcaggcacattggctcacgactgtaatgccaccgcattgggactcaggtggatcacttgatgtgaacagttagatcccatcttgagcaacattgtatacacattctccactggatgtgcg

SEQ ID NO: 662049 - DNA, 342 bp, Homo sapiens
  misc_feature (43)..(43): n is a, c, g, or t
  misc_feature (52)..(52): n is a, c, g, or t
  misc_feature (72)..(72): n is a, c, g, or t
  misc_feature (77)..(77): n is a, c, g, or t
  misc_feature (103)..(103): n is a, c, g, or t
  misc_feature (108)..(108): n is a, c, g, or t
  misc_feature (130)..(130): n is a, c, g, or t
  misc_feature (178)..(178): n is a, c, g, or t
  misc_feature (247)..(247): n is a, c, g, or t
gccctggggccccaagggggttttaaaggggaaaacccttttngatttcccnaccaggaagggaaaaatccnccttnccattttaaccaccaacttttaaggngatantccggaattaaattggacccanggtgaaacgttgtaaaatgttttcatattaagaatgtaattatttccntattgtattttttaaaagctaaagtcatatttaaaattctctttgaaagaaacaggcaaagaaacagcnaagatttttttaaattaaatatgttagtagtgcccacttcaaatgactgtaaatatattttcactgtttctcaatgtatttaattcataaagtaa

SEQ ID NO: 662050 - DNA, 425 bp, Homo sapiens
agcggggggaggcgggaggcgggaggcgggaggtgttggggccgttgaagcggcctccctcccgcggcagcgcccgggtctgggccgaagcgcgtgtgcgaggaccgcggcgcgcatggcaccagtccggactctagacggccgaagggatgccagcgtgtgacacggcaggacggcgtgccgggtaacaagaacacaaggaccatggagagggcgcaacagccacgggacgacacgggctgcatgaagcggaggactgggagacgtccatggacaggcgcagagagagggacgcagaagagagtcaagaagtggcggggaaccatagcaaaatcgtagttcgcaatgagtgcaataaattgaaccaatacgaagcatcacaagaacaatgaggacgagtaaaaaagccaaattggcaaatgaaa

SEQ ID NO: 662051 - DNA, 829 bp, Homo sapiens
acatgtggattgtccccccgactttcttgaggtgttggatgcagccgcccccgtgctgtcaagcggcccttggcgtgccacccccgcactgtggcgttgtcggggaccttttcttcgaccggtggtccccgccccctgtgggggccgcccacggctcactcgttttgcgtgcttatgttcatcccaccccacgcggtttctttcccggcagcgtggcgtcatctccgacgcacgacgccggcggcgcccacactagacagtagcttgctggttcagggcggtctgcgctaaaggcgttgcgctctcgacaacggtgtgagtgccccacggaggagcgtgcatcgctgtacgcggtgaccaaacggctacgcttcatgtctccccctccatttattgcgcctggctcaacgcgcgctcgctctcttccaggatgccacattgccgtggatagggcgccgccgctccgacaaacttagtggttgttgtgcccaccaggccccgctctttgtataaaggtcccaggtattgggttcattgctgccgtcgtgtattgagcgcacatacggtgggatgattaccccccgccctcagaaggtcaaccgagacgatctatccttgcgggcgacaaccccatggggcgatgcttcaatttctatgccgttggagagcgctcgcgtcttgttaattcaattgtaggtttgataaaaagctcctcattgttgtctttagtgggcgaatccactgagagcgctccacaaatagtacgtccgccaagagtcgtctggaggcgcccccaagaaaaattcaaaacgggcacaacataacacaa

SEQ ID NO: 662052 - DNA, 1074 bp, Homo sapiens
  misc_feature (43)..(43): n is a, c, g, or t
aaccacagtggcaaaagcagagattgcctgggggggggaagancgcacaacacaccaaccaatcattggggggtcccaaccggaagaacacagagtttcgtgcgggttcccgacaaggctgatgccgcccaccaacgcggagaaggtagatgaggttgtcctgccacctcccgtccttctccggcatgggtagagcgccttctccaattaacgcccgcccgctccttgcagattgggcgttgtcctccgcaactaatgcaggagcgcccactcctgcctcgggcgagaaacagcttcgttttgcctggcgtcattaaagaatgtgagctccccgctcttgtgtctgacgtacatgtcacgaaggccggacacctcactcgcgctgttactaaccaagttatgctcttgtaagccttcgcccaaagagacttccagtatgtctacaccgatcgcccggtatagatcaatatagatgtgtctcaaatcataaaacaccatacagagagttggtacgtgatctctctgttcaattagatgtttcatatgcgccacaggtgatacatcctttacgcagacctactctcctctaatagtcgcccttgcgatgacagtcaggagcagatcacgcccacagatgcgatgatatataatctgtcggccgaccgctctctacatacatgtatatgtgatctcacggacatgtcctctcttctatgtgatcgcgcgtgcgtacatataataaggcggtgtgagtaaagaagtcagatgtagcacgcctttcatcagtagggcgtcatgtctagtgcctgagtccgttgtgagagacacatacgtttggtcatactggagtctccactcatactggcgtgatggcaacactattcaccaactgccagatcaacatcaaggtggtggattcttttctggatttccatatggggctctctcccctacttacatatgacaagattgcggcttcatgtactctcaagtcatggcaaaagtttgtttgtaacaatacaaatgatgcaggcaccctttttctaaacccaaaaaaaattgttccacaaaaca

SEQ ID NO: 662053 - DNA, 1474 bp, Homo sapiens
  misc_feature (386)..(386): n is a, c, g, or t
ctattgaaagaggggactgatagactcccaaggactatactccggccaggcttgggagtaacatcagtgcctgtccaggtgattgctgaggctgtcaagcaactcaccctggggtccccagtggtgcaatggactaagcttatatgtagatggcaagcaggcacacagcaatacaatattctcaatgcatggggcacacacattctgaggacttcgtcgcatgtcgtccattcctgcagcaaagacttagcgtagtaccattgcacagaatcccacacgatgactcgactgtgtgggtgagtggacatccacgctcatgctgatcgcattggctaggctggcgagagatttctggaacgcagggtggaaactccctacatgctggnagtgcaaggcttttacagaacctccaggaatcgagtcgaatgatcgagactatgtgtccgacagaaagcagcatacgcagtctggaacagaatatgaagcaagaagtcacaaggagacttggctgtggacgcgggaagaaagaaagtatcacaacgatggagcacgacgagacagctgcttggacaccacgtgatgccactgaaacagcatcctgagacatccaaagactgcatcctcccacagcagacacagcataaccatatagcatacagcatggctgcgaggactgcacagcaggatgcatcgctcgcagtgacattgtgcgtgcagagtatttactaatgacttgggaaatcaaatgaaagggtagcaaggcgatgggacgaccacgtacgaagagcataaacacagctgtgttacgcgtggagagatggcactttcaaacgaaaggaattaacggactttacacgtagggagtatgacagaatggaaccaccagaaaaagaggaaacaaacaaggcacgcgcaccggaactggcccaaaaggaagtgaggcacgacaccaacacatgcagaccgacggcgcaacggcacacggcgcgacaccaacagaagcccacaaccagacgacgggactcaacccgaacactggggacaccaccacagtaggcgaacacacccacacgaccacgaggcaagccgaacaacagaacactgagtgagcacaagaacgacgcggcaaacaacatcaccacagtgggggaaggaagacaacacgaagaaagattgctccggaaccggaaccaacgaccaaggcaaaggaggccaaacaagaatggacgaccgtaaaccagagcgagccgaccgcgcacggcacacgaacagaacaggaccagaaacaaaagacacagagacagaaaactaaaaaggagacaacaagcacagacaagacaacaccaaccaagacacacaacacgcacacagacgcgcggacaaagcagaaaacaagaacaacgaacctcgaaaacacacgacagacaaaacaatacaagcgccaccacgcgcgcgcaaacaagacagaaaaaca

SEQ ID NO: 662054 - DNA, 168 bp, Homo sapiens
agataggtaccatgtctatagctattgtaaatagtgctgcaataaacatatgtgtgcatgtatctttatagtagaatgatttatattaccttaagagtatatacccagtcaatggaacaaactggactagccagtatgtagaaaaactagaaattgagacccatatcc

SEQ ID NO: 662055 - DNA, 223 bp, Homo sapiens
cccccccggggggggcccttttttttttaaacccccggggggggggttctgggccccccggtttggttgggggggtccccccccgggcccctttttttttcccaagcggcccgggcttgcccggggcccccaggggggatttttggcccccggttttttttccttttgtggaaaaaaaaaccccggggggtttttttttttcccccggttttggggttgggga

SEQ ID NO: 662056 - DNA, 727 bp, Homo sapiens
tgcttcagctggtctacctcgctagcatgtctgggccgctggcaagactggcggcaatggcccgtgccaatggccaatgtcgcgctcgtctgcgcgcctggcctccagttcccagtgggccgtgtacacctgtgctgctgctgtgaatggtgccactactgcctgatgctgctgttgtgctgcctgtgctgctgccatgttgtacactgtgctgtgcagttgcttggatgtacctcgacctgctgatgatccttggatggctggctgtggcacatgctggcccgctgacagacaatgaaggacgcgagatcatccccactgccagcctgcagcttggccgatcctgcgaactgagcgatgggagctcagacaatgcttgctgtggctggctgttgactgatctgcccagtggaggctgtcctgcccaacatccaggcctgtgctgctgcccaatgaagaccagctgccaccggtgggggccgaaggcgccctcgggctggcaggaaaggccagccaaggcctcccaatggaagtactaagaaggggcccctgtgccctgtggctgtgccggccatgggcttccgccattgccaaccacaaaaggcccttttaagggtgcagcaactggcctcattgacaatatgttgaggcccgtcagactcgtgggagctggccgtgagtccctttcccttagtcgcgacgatggcaacaagtgatgtaagaacag

SEQ ID NO: 662057 - DNA, 248 bp, Homo sapiens
agtcggtatttacaaaggtccatggccacggtgatcttctatgtatgcaaggtaagagtttttaggacccacttcccgtgaaaatccgaaagtgtttctggctgtatgttcggtatttatctgttcttttcagcaggggttcatcaaagcaatattcacagctttggtccctcccaaaccagtagtggtcattcacacattcaagatgggcaaatccatccggaagggcccataatcggggtaccgag

SEQ ID NO: 662058 - DNA, 105 bp, Homo sapiens
aggatacacgctggctgcagtacatcagagagtttgtcacctagtataagcacggctcctcgtgaaggtcccccatccgacactagagggtctatgtaaaggagt

SEQ ID NO: 662059 - DNA, 199 bp, Homo sapiens
  misc_feature (43)..(43): n is a, c, g, or t
tcccaggatgagaaagtgggggaggaataagcaaatttactgngcatgagaaaagaatctttattcttttaaattatcaggcccagagagacatttaaatgagacagcaaacacatactcccccactttggagttatatatttacctcttgaaatggcttgctactggcacaaatagctataaattaacctaacaattc

SEQ ID NO: 662060 - DNA, 389 bp, Homo sapiens
  misc_feature (367)..(367): n is a, c, g, or t
  misc_feature (377)..(377): n is a, c, g, or t
cacgagggccagcacgtaccggttgatccattcggtcaaccagatctgcatgtcggtgcgctccttgaacgagccgatcttgtcgcgcgcaatggccttcaggtagtgcgcgaaacgggacaccgggaaaaggtagggcaggttggcgctgagccgctcgttggactgggcgtccgggtcgacaaggcggccggcgcgcgtctcgtcgtcctgcagcgaatgggcgccgatgaaggccgcgagatcagtgttcttgcggtgcaggatcggcatcaggccgagcttggcgagttccgcctcgcgccggtcgtcgatcgccacctccgtcgggcatttcatcgcgatcgatccgtcgtcggtcgggaangcatgcaccngcaggttgagca

SEQ ID NO: 662061 - DNA, 238 bp, Homo sapiens
cactccagcctgggcgacagagtgaaactctgtctcaaaaaaagaaaaaaaaaaggaccaggtgtcttgccatgtggctcaggctggtcttgaactcctgacctgaagcaatactcctgccttagcctcccagagggctaggattacaggtgtgagccaccccacctgacatgtcactcttcttttggggacttacgtgactcagtggcgcggctaggaccactggcgcggctaggag

SEQ ID NO: 662062 - DNA, 851 bp, Homo sapiens
  misc_feature (712)..(712): n is a, c, g, or t
cattaggaaaagttgctatttgaactttttattgatttttggggggagtaaagaattattttgtgatgcaaataaatatcctttaattgatcgacttgccaaatttagatttgtgtgcatcaggctttcttttttttctttttttagagaagttcaatataagcttttcttttctttgtttctttctttctttattttgagatggagtcttgctctgtcgcccatgctggagtgcagtggcgcgatctcggctcactgcaacctccacctcctgggttcaagcgattctcttgcctcaacctcccaagcagttgggactacaggcgtgagccaccatgcctggctaagttttagtatttgggtgtagacagggtttcacacatgttgctcaggctggtcttgaactcctgagctcaagtgatctgcctgcctcggcttcccaagatgctgggattataggcatgagccaccacccccagccagcatattcttttaaatatttatctaatcattcttctgaaagaaataattaatttattacttcattgtaatgttcaattatcaatggaaatctggcacttatttcccatgcaaagtttttgaacagccatggggaatgctgagctggagagtcaaaatcaaacttggggctggctaagaatactgcagtcaggcaggagcatatgggggctttatctgggatcagctgaangcttgcatttaccacaaaaaaaaaaaaaaaaaaaaaaaattttttgggcgccttgccctcaaaaattttttaaaccattgttgggccccggcccatgtgttgaacactggccaaacgttccccagaaaaccgggcaaag

SEQ ID NO: 662063 - DNA, 600 bp, Homo sapiens
tggatgttttaaaagggcaacccaccaaaacaaaaaaggatgtattcttaattttttttacacaaatcccatggaggatataagttaaaaataggtattgattcaactttatgaaatggttagaaagtaacccccaaaggagaggcttctctctccttcaaatactaaggcttttcattcattagaatgaatgtagtaatgttattttttataacacatcagtctgtaaaagctgtggttctcgcttcgttccattcattaatcatagctccctacagatagtctgcattcatattcacatgtaggtgtcatagccttacctatctgttaggatgatccatcagctgtttcgagacttttcaggatctgtatgcctttgatcaacattcagcgcacacattataatgagttctcgcattatgttgttcctcaagaagcgatttttgttcacctggcgctgcatctaacagccagggcatagagagcatacgtttatgacagagtgtgattcttcgacagatttcaattaatcgcttgccgcagcggtgacttcttgagcgttgccactgtgtggctgtagggctctatgacataatttag

SEQ ID NO: 662064 - DNA, 445 bp, Homo sapiens
ggatcccttatttatcccaacaccacgttccaagtcttaacctgttcagaacgatgggctgcgccactggccgtggtgacgctgtgggagagatcgtggggatcatcacacggcacaacgtcacctatgaatttctgcagggccggctgaggcagcactaccagaccatctgacagcccagcccaccctctcctggtgctgcctgggggaggcaaatcatgctcactccggcgggcacagctggctggggctgttccggggcatggaagattcccagtcacccactcactcagaaagccgggagtcatcggacaccttgctggtcagaggtcctgggggtggtttttgaaccatcagagcttggacttttctgacttccccagcaaggatcttcccacttcctgctccctgtgttcccaccctccagtgttgggcgatcgcggta

SEQ ID NO: 662065 - DNA, 661 bp, Homo sapiens
  misc_feature (24)..(24): n is a, c, g, or t
  misc_feature (244)..(244): n is a, c, g, or t
  misc_feature (298)..(298): n is a, c, g, or t
  misc_feature (303)..(303): n is a, c, g, or t
  misc_feature (307)..(307): n is a, c, g, or t
  misc_feature (332)..(332): n is a, c, g, or t
  misc_feature (360)..(360): n is a, c, g, or t
  misc_feature (406)..(406): n is a, c, g, or t
  misc_feature (417)..(417): n is a, c, g, or t
  misc_feature (421)..(421): n is a, c, g, or t
  misc_feature (463)..(463): n is a, c, g, or t
  misc_feature (467)..(467): n is a, c, g, or t
  misc_feature (471)..(471): n is a, c, g, or t
  misc_feature (484)..(484): n is a, c, g, or t
  misc_feature (486)..(486): n is a, c, g, or t
  misc_feature (493)..(493): n is a, c, g, or t
  misc_feature (509)..(509): n is a, c, g, or t
  misc_feature (522)..(522): n is a, c, g, or t
  misc_feature (546)..(546): n is a, c, g, or t
  misc_feature (554)..(554): n is a, c, g, or t
  misc_feature (594)..(594): n is a, c, g, or t
  misc_feature (600)..(600): n is a, c, g, or t
  misc_feature (660)..(660): n is a, c, g, or t
aggtgggctctggcagcgggtgtnaggtggcagtgagaagccaggccctcaggtgcagctcaggcctctgccgctggtggcctcatagttgagcacgtagtagtcgtggacgtacatgaggacggctattggctgtccgatgatgagcgacagccacacagctgcgttgccatagttgccctggaaaaagcggcccacgaaccaggccagtgggatctgagccatcatgcccgtgaacgcccanaggcggaacattcgcagagggacgctcaccaggtactcgtggaagaaggccgangccangaanacccctgtcctggccatccacttgntgctggccttcttccctgcagaggcagncttggccctggccctgcggcaccatgagttgacgtcgcggtagganaagagctttangaanaggatggtgttcgccatcagccccagcagggagcccactggngtgntagnctccaaccaggtnanaccacanccgctgggaaacacanaattggtggccangttggccacgtgcagcagcagtcncgcctgcnccgtcagggcacccaccgccaggcgcttctcaacctggantgcagncacagcaaagacatttggccgcaataaccaggcatggggcggggcaaacaatagggatcnt

SEQ ID NO: 662066 - DNA, 696 bp, Homo sapiens
cacgaacaaaggtgagggtgcatggtttgatgctgaagtccccggtgaagacgatagaagacttcctgcggaggttcacacccagctgcctgacctcaggctgcagcagcatcgggagcctggccgccaacaagtccagccacaagttgggctccagcttcccgtccaccccgtccagcgacggcatgcttctcaggctggaggagaggctgggccagcccacctcggccatcgccagcaacggctacagcagccaggcggacaactgggcctcggagcttgctcaggagcaggagtcagagcgcgagctgcggtacgaggcggagagcccggatgaggccgcactggtgtatgcggccagagcctacaactgcgtgcttgtggagcggctgcacgaccaagtgtcagtggagctgccccacctgggcaggctcaccttcgagctcctgcacacactgggtttcgattccgtccgcaagaggatgtcagtggtgatccggcacccgcttaccgatgagatcaacgtctacaccaagggggccgactcagtggtcatggatctcctgcagccctgctcttcaggtactcccacccctgcccagctgcaccccagctcgggggaggaggtcctgagaaatatccccacccaattccttctcttgagtaaagtgattttcattaatcctttccaacaaa

SEQ ID NO: 662067 - DNA, 236 bp, Homo sapiens
cgttatcgagagaaatagctgaaccaggcccttatgatcttcatgccctggtgttctagaccgacacggaccccacatctctgtgacttacctggagactacacttcctcagatgaggaagtgaagctatatcaagaagatgggtgaccacctgcaccaaccatccacaggactggagtggccctggaggactgggactgggcgtagtatctctcacgaagaggctcactctccaa

SEQ ID NO: 662068 - DNA, 276 bp, Homo sapiens
  misc_feature (5)..(5): n is a, c, g, or t
  misc_feature (19)..(19): n is a, c, g, or t
  misc_feature (187)..(187): n is a, c, g, or t
  misc_feature (226)..(226): n is a, c, g, or t
ttttntcctcgagacagtntcgttcttgtcgcccagactggagtgcaatggggcgatcttggctcactgcaacctacgcctcgcaggttcaagtgattctcctgcctcagcctctcaagtagctgtgatcacagacagggtctctgtgtcatgcaggctgagtgtagtgcgcaatcacagcttactncagcctcgacctcccgggttcaagtgatcttcccacctnagcctcccaagtagctgcaactataggcacgttaacacacctggctaatt

SEQ ID NO: 662069 - DNA, 98 bp, Homo sapiens
  misc_feature (3)..(3): n is a, c, g, or t
ccncccccccccccccagcaggagagcagcaaaatttatgcaaatttttgacggggttttccttgtcctgccaggattaaaaaccatgagttttttga

SEQ ID NO: 662070 - DNA, 244 bp, Homo sapiens
cacgaagggtgatctgtgctttaaaaagatttggtactactcattcactgattcatgacaccagtttgcagtaacacagaatatgaatagggatgtggcattggtttacattctagtaattcacttcagatttgagctggattattacaaatagttttttcagaagtagactttcagaatctcctaagcagattttcagagtgtggcttcattatgttgtttgaaataatttttcaaaattcca

SEQ ID NO: 662071 - DNA, 264 bp, Homo sapiens
  misc_feature (158)..(158): n is a, c, g, or t
tttctttatagcaatgcaagaatagtgtaaaacaccaccattctactttctgtcagtatgtatttgactaataatctaggcacttcatataagtgcaatcatacaatatttgtccttttgtgtctggcctatttcacttatcattatatcctcagggnttatccatgttgaagcatgtgtcagaatctccttcctattttaggccaaataatatttcattgttatctactattttttttattcattcatccatccgtggacatt

SEQ ID NO: 662072 - DNA, 323 bp, Homo sapiens
taaagttggtgcctgacaggttatatagtgatagctttcttcttatgaacaccagactacaactgacaagtacttaataatataaatattattatattgattagatactgcagtttggcctaataaaatgtgaagtttaaggcaccatttcttgctacactaagaagaccatccacaagtaatgaaatgaatagcacctcccagtagtgtgttttcccaataccactatgcattcatcagcaattcagttcaataaacatctactaagatcctactctttgaccaataaatcactggaatagaggttccagcatattctgaga

SEQ ID NO: 662073 - DNA, 194 bp, Homo sapiens
cttctggtactctaggatcccatgatagcgataggtcgtcacctcaggatatattcagacacttcgagcgtagtaactccttcactagtcactcaggatatatatagaactgcgagcgttgggggcgttcacctcagggatgatatctaagacacctatcgagcgtcaggtcatccccttcgccctcatcgtta

SEQ ID NO: 662074 - DNA, 597 bp, Homo sapiens
agaacctggtagaaagaaagaaaaggtcatgatgtaaccaggatcactctcacgaactctggggtcttcactcactgcctcctgacccattatttaagtacagtttttaaatgcttggtttcctgattcttcaacccaagatatatttgaaacagaaaattagaataggagaagggaaagaggataactagaattaagtgcatggagagctgcaaaaaacagactacaccaccagactacaaaggtagtgaggagagtaagaaacactaagagaaaaaaaagacccagaagctctaaatgtactctagtgtgggagtaatttaggataatggcagtagtcccaatcccattaccagatttcagctgagattagtaatttattttagtagcatagactctatatgtacttatctagaaaactcatttataaggagcagctttcactgatggaaccagataaaacaatggcactgtacttctcatttttccttttctgtgtatgaaattttaaactctgtgtgttgtatatccatatattatacatgtaaaaaaaggataagtctcagacctgaataaacgtcagatctatcagaagta

SEQ ID NO: 662075 - DNA, 970 bp, Homo sapiens
agactcccatagtctctactgatgctcttatctaggtcgcgatctcaccgagctacttatacaggccaaggtcaagtacttatgtcctaataatatcactagtgcactgccacttaagtgactgtatcagctgagatactttgggtcgtgaagctatgaggcagatgagagacatcccatattggagtaggacataccttgactgcaattacgcagttgaccagcatggaggtttgtttggagaaataggaaccatcccctgaaaacacacactaatggtagccactcaactgttgaaacggcactaggaagtccaatgggtgaggccgcctctgagacaagcctctgagttgaggctgggagacggctcccatctcttaggacgagtttgctatatttttagttatcacccctgcctctggagatgggtagaggaacatgagctgaccttctgggaagttaggttggtgaggagttgctgaggcactgcagggccatgcccagtagacgaggaatgtataacattttaagaggctgagagcaccccttgttgggcgcatgcccatggcagcttccttctgccgatcatgggagaaatcaagcactttcacctaaatggctagatgattgattcgggatgaaattctccactcctctcctttaccacatcaccactataccttcctgcaatacatccacgagaactcactgagtggcaaaagggataggaatgaatgttcacccagggccgagtacatgctaaggcactgtacctggaaccatttaaatttgccaccgtcttaatgttccttcacatttaaatctttacaggaagtagggtacagaacatacctatggattattgccagaatcgcagttccaggaccacgagggaataacggcaagttccacatgacattttttggtttcctatagtggctgtacaacgttacaatttccatatatatag

SEQ ID NO: 662076 - DNA, 952 bp, Homo sapiens
  misc_feature (47)..(47): n is a, c, g, or t
gaggccgcttactacggacagaccccaggtcctggcggcccctcagnccggcgaccacgcagcagggacagcagtcaggcaagtggcgaattgccatccctcctcactcctcctgttctccttccaacccaccggcacaccgtccattctcgtgcctttaggtggcgtagcgccgggataaccccttcccctgcggggtgtgcccttgtatgcctgcgagctggtgggccgtgtggccggagggtctcgcgggatgtcccccaccgcgaccgaccagggcaagccattccctggtgctccagagcgttagacgaaggatggtcctcctctgcgccggtctggcctgtgttccttgctgctgcctgtgtgctcgtgatgtgctggggcacccgctgacgactcgcagggcggtgacttctgaagctgctggggagtcggggggcaggcagacatgcgcggacggtgggcacctggcccgtgccgccagcacctcgctcacaatctggccacttgggaagaaaacgtgctatctattgtcccctttctctgcatcacttttgcggattttggtacttttaattcttttcatttctttaaagcccatgatcttttttccctgtgtccaagtgactgtgttgcaggctggcccgtgctctggcagcgactggtggggacgcggggatcggcccaggccccttgcccgccgggctcagcctcccatgcgctcgcccttgccttgtgtcccgggctagcctgtggaagtgggcgtgaacgatcgttgccacctttccaatcctacctcacaggggttgtgtggcggaccctgtgagtctctgggcattgtcaatgtcggttgtgctgcgccgggaagccagcgctcctccggagacctgggcaggttcccgtaagaaccgtacaggggtccggctaccggggctcctcctccaggttc

SEQ ID NO: 662077 - DNA, 225 bp, Homo sapiens
  misc_feature (53)..(53): n is a, c, g, or t
  misc_feature (62)..(62): n is a, c, g, or t
  misc_feature (64)..(65): n is a, c, g, or t
  misc_feature (75)..(75): n is a, c, g, or t
  misc_feature (100)..(100): n is a, c, g, or t
  misc_feature (125)..(125): n is a, c, g, or t
  misc_feature (148)..(148): n is a, c, g, or t
  misc_feature (155)..(155): n is a, c, g, or t
  misc_feature (158)..(158): n is a, c, g, or t
  misc_feature (160)..(161): n is a, c, g, or t
  misc_feature (172)..(172): n is a, c, g, or t
  misc_feature (175)..(175): n is a, c, g, or t
  misc_feature (209)..(209): n is a, c, g, or t
  misc_feature (217)..(217): n is a, c, g, or t
  misc_feature (221)..(221): n is a, c, g, or t
ctctctctctctctctctctctctctctctctctctctctctctctctcgggnaaatcactntnncacaattccnatggattttgtgctctttttgaaanaaaaaattctttagcgtaaacatgnattttttttcaatgtagcccctngggaatnaantnnaattttgagcntcntcaatacggaaaattaacttataccactgagggngagacccntctnaaga

SEQ ID NO: 662078 - DNA, 428 bp, Homo sapiens
cccacgaatatgtagcacttttcacactgtccatatccttgtgtttgcctccctgctatactctgggatcctggggattatgagactgtatagatgctcaaatatgtccttttacttctaggtctctccttcatacctccactcaacttggtgtatgtgatgtccctgtgcccactgaccggcttggcactatcactccagtgtgcgttcaaaccaccggacagatgctgtctgtagcgggtccatgaccaggcgtcatcaggtggcgggcaagatctgctagcaaccgttctgaacgcatggtattccgcttatcttgcatcgcacttgagcctttccatcttccctaaggacccgattccccggcggatacacttcacaggatagtgagtaagcaagcatgctggatgaggtttcatatttcggtt

SEQ ID NO: 662079 - DNA, 648 bp, Homo sapiens
ctgcaggaattcggcattagctacagttgataccctcacaccacgcaggaagagggcatcatcatgtcggacgattacttatggtttgaaggcatagctttccctactatgggtttcagatccgaaaccttaaggtacgtgatgagatcgagatacggtatgaagatgtaatagtattgacttaccccaaattaggaacaaactggttggctgagattctctgcctgatgcactccaagtgggatgccaagtggatccaatctgtgcccatctgcgagcgatcaccctgcgtagagagtgagattgggtatacagcactcagtgaaacggagagtccacgtttattctcctcacacctccccattcagctattccccaagtctgtcttcagttccaaggccaaggtgatttatctcatgagaaatcccagagatgttttggagtctgggtatttttctggatttgtaaaggaactgcgctatatggctcatggtttgaccacattcatgcttggatgcccctgagagaggagacaaactccctggtactgagttatgaggagctgcaggacactggacgaactcttgagaggacctgctcattcctgcgtaagaagttcgaactctaagaactgtccttatatctcgg

SEQ ID NO: 662080 - DNA, 337 bp, Homo sapiens
  misc_feature (67)..(67): n is a, c, g, or t
aaaaggccccccttgggggggggcccccccccggggggtcccttttttttaccaacccggggggttntttggttcccccccccccccaaaaaaaagggccccccccccccccccctcccgccccccccggggggggggggggggggtttttttttcccccccccctccccgggggggcccccccccggggggggggggggggggggttttttttttcccccccccccccgcccccccccccccagtttgggggtttttttggggggggggggaaggggggggggttttttcctttttttttttttttccccccccccccccccctgggggtttggga

SEQ ID NO: 662081 - DNA, 202 bp, Homo sapiens
accgacgctttcttgtgagataataatatgacgtagctttatcaggcacagatgttagattatttcaacacccagttccaaagttgcttccacattttcgggtatcttttcagcaatgccccactctactggtactattagtccattttcatgctgctgataatctaatacctgtgagagctgagatgtgccgcggatcttc

SEQ ID NO: 662082 - DNA, 1250 bp, Homo sapiens
  misc_feature (689)..(689): n is a, c, g, or t
agcggggtagcggacccgagcacagccagtgagcgtccggtcatgagctcagtccgcgaggctgatgcactgtggtcgtggttgcttgagtgctcgagctatctgtgtttggattgctaagtgttcttaagagaatcctccgtcccagtcctttgctcatccttgcaatgatctcgaggcgtcgctgccagcacatcgtactgcggtacgcagtggagtcgtaccgagatagagtagcgtgtgcagatccttaggtacgatagaacgcagggagtctctccacactaagttctaagacatagatttgtgcccgaagtgtattcgccccatgaattattagccctatggtctgtgtgaaaagcgataacatgatacgagacaggatggctttgcacccggacttagactgcttcgaaaagaagcgcgaattggttggtatccaagccattctccgctgcacgacaaggccttctctcagattgttgaatgggccgctataacggaattcaaaaacatagttggccgcggtcggacttgccactcagctctgttcccgtgcgtttaaactttggatccggggtctaattgtggccggaggggccatttggcttcacccttggtgaattgtgaaggtccttcccaagcaatctccacactcttatggggaggactgcgtgatacttctaacnttttaccgtgtaccgttcacaccccattattgcaattggtccgctttttggtggcccacgaatggcgcccaccgacacgtttgacgactaccattcgccgaattttaaagagcgcccacaccccttttcaataagagagaatccccaggggaccctttgttggtggtttaacggccgccattatattatcccacggttgaaacacataacggcggaaacaggactcaaacctgaccaacgcggccggttcaggggataagggttaaaggggcgcaatcaccatttggtaaccccgccttgtggacatattggtgcggcaaatttctttaataatggcaaattcgctgggtgttacaaacgccaagagaaatggtttgttgtgtttcccggccgcaattaaactctatggggttgcgccctgtgtacaccacctttctccggggaattctgcgcacaatgttaccttttgaaaaccaattgcaacaggcggcaaattggcgggcactctgggcgggatcacctttaagcaacaggggaacccccggccctgtaaacaggcgg

SEQ ID NO: 662083 - DNA, 191 bp, Homo sapiens
gggaccatgtaatgaatgaggttgatactaacaagaacagattggtgactctggaggagttttgaaagccacagaaaaagaggaatccttggagccagatagctggaagacattagatcagcaacagtccttcacagaggaggacctaaagatatgaaatatatgcttacaagaaatgacttagagaggca

SEQ ID NO: 662084 - DNA, 521 bp, Homo sapiens
aagtccgtgcatacacttactacctagctcaatacttccattgactctactgaatttcgagggtgtagttattgacttttatcatctaccagaacttattgctataggttctttttataatttctatctctttattgatattctcattttattaatatataattttgctgatttcctttagttctttgtccgagcttttctttaactattcaagcatatttaagatggttttacggtcttagtctagtaagtctgatacctgtgtctcttcaggaataatttctttattttctttttatgagatgcagtcttgctctgtgactcaggctggagtgcagtggcgcaatctcaacccactgcaacctcccgggttcaagtgattctcctgcctcagcctcctgagtagctgggactacaggtatttcagttactaaactgatctgaaagagcagcgtacagaaagtgcacagaataaacacagctctgggcaacagaacttagacactatcacctattaaacg

SEQ ID NO: 662085 - DNA, 151 bp, Homo sapiens
agagcatcagtaggcatgcgaggagtaacggactgatgcttgagactgggggcacaggtacctagaggacgggttgcgtgcccgtgtctggggtctgtcagcaagccgatccctgggctcttggcaagggctggcactgttgaagcgtggg

SEQ ID NO: 662086 - DNA, 1199 bp, Homo sapiens
tggaaatggagtctcgctctgtcccccaggtctaaaccacaggggtgtgatctccctgcaacctccgcctctgtgggtctcaagcgattctctcccaccttcagccctcacaagttagcgtgggacccacaggcacttgccaccacacctgtggcataattttgtgtattttaaatacagacagggtttacaccagtgtgggccaggctagtctcaaacctccgtgaacctctcggggtgtgatctccggcctatacctctctgtgcctctccacaaaggtcgcgtgggatttcacaaggtgtgttgacgccaaccctgttgccgaggcctatagtgtggctccccgtgtgtatattttatcaccatctcatctcgtgtctcttttccgacgccgcggcggaacccattgtgtgtattatacctttataccctgtgtaaacccctcgaggggggctcctatatgtgccctctctcgaaatctcccaaagagaaacgcgtgggggtttcacaaatctccgcggctttctccaccgagtgtatattatacgccgtggtgtgtgcaacattgtgtggagcccaatgtgtgtaatagctttgatcaacacttttctctctcgccgagagcgcccccccttttatcccctctacaatttgtatcatataaacaacaagtgacgagagataatgtgtggtatcacacataataaataacaacatcccccaccaacagtctgtgaggaagagcccgcaggggtggtcgatggaccgaagggttgtctccccgagaaagtctcctgttgttgataaaatcatcccccagaagtccccacaacctctccatgaggggagagcacccccccaaagagtggtgatcaagggagaagaggagtgctcccccctattagtaatgaagggggccccaaagacgaagagggtttttgtgggaaggacaaacctccaaggggcctgccgtttggggggggaccaacaaacctatattacgcgccaatagggaaaccccgctggttggtgttccttttattacccccaaaaaaaacacatcacgagatagaccaaagaacaacataacaacgacgcatacccgcgacaaaccacaagaataaaccacttcgtgatgcacggcgagtactactcatctacttcaacgaagggcgggcgaacgcggcgagaaaaacac

SEQ ID NO: 662087 - DNA, 179 bp, Homo sapiens
cacaggccagtctcgcttggctctcatgactgtggtggtggagatagtgtggggagcctcgcccatggtctcacgtggcaagaagtgcctttagctctggatcccaaccgtttggcacagctttgccactctccaggcccctctggaattgtccttattaaaccagtttccctagaaaa

SEQ ID NO: 662088 - DNA, 82 bp, Homo sapiens
tccccccttttttggggggggtggggcccccccgggggaatttttggttcccccccatggggtttgaaaaaccccccggggg

SEQ ID NO: 662089 - DNA, 1103 bp, Homo sapiens
  misc_feature (1092)..(1092): n is a, c, g, or t
gtctccgcgcccggcgctgggcggcgctcggctgtctccggccgatcgctcggcgctcgggtccgcggccgctgcggcgccgggcatttctccgcagctcggctcgcggccgcgcccgccgccgcccggcccgcgcccatgcaggccatcaagtgcgtggtggtcggcgacggcgccgtggggaagacatgcttgctgatcagctacacgaccaacgccttccccggagagtacatccccaccgtttttgacaactactctgccaacgtgatggtggacgggaaaccagtcaacttggggctgtgggacacagcgggtcaggaggactacgatcggctgcggccactctcctacccccaaactgacgtctttctgatctgcttctctctggtgagcccggcctccttcgagaatgttcgtgccaagtggtacccggaggtgcggcaccactgcccccacacgcccatcctcctggtgggcaccaagctggacctccgcgacgacaaggacaccattgagcggctgcgggacaagaagctggcacccatcacctacccacagggcctggccatggcccgggagattggctctgtgaaatacctggagtgctcagccctgacccagcggggcctgaagacagtgtttgacgaggcgatccgcgcggtgctctgcccgcccccagtgaagaagccggggaagaagtgcaccgtcttctagagccctggcccacccgagcctgagggctggcggggagcagccctggacgtgtccgctgttgtgttgagacgtgtggtgtccctgagtcggctgtggggagcggtgggggtgggccggggggaagcatggggatgaggctgggtggcaggatcctgtcctctctgccgcctcattctggggtgtggctccagccttccctggcccccgccggaggccgggagggagcagggtctccctcagggctgcaggggcaggtgcagggaagccccaggatgggcttccctggagggggagggtgggggggagttctgttccttgtgccccgaggtggggcagccccttctcattttatacaataaacattctccacctacnaaaaaaaacgc

SEQ ID NO: 662090 - DNA, 128 bp, Homo sapiens
ccccagttaaacagctgaaggaatttgaggggaagactttagtgtcagtcaccaaagaaggcctggaacttccagaggatgaatgtgtgtggttttggtggggagagaacaggagctgttgtaactgg

SEQ ID NO: 662091 - DNA, 410 bp, Homo sapiens
ttagtgaggtggttttcctcgatggcaaccagtgaatgacccaagcggacacatggcattctggaactcgcccagtatgagtcgctgctgtacgcagcccgttgggatctcacgggcgtaccacactagtgatgctgggtgctggtgatgtagggcagagtgccatgaacatgcagtacatcagccaccgatacccagaagatcaatgatcccaccatagaagatgcttataagctcaggatccgtctagatgctgagcctgccaatctggacattagggatacaagctggacaggcagaagttcacgccctgcgggcccagtctctgcgggcaggcgccgggtatctcatctgttcctcctctcccggctcgtcgccgttcccatgacgttcgtgcgttccaaccccag

SEQ ID NO: 662092 - DNA, 800 bp, Homo sapiens
ctttcacttctgagtcccagaggttacccgaagggcacccctctgacatccggcctgacttcttctcacagtgagcaagaaactagcgccccgatctcaatcattatacccaaatctctccctctagctaatagcgtaagccttctcctcactctctcaatcttatccatcatagcaggcagttgaggtggattaaaccaaacccaactacagcaaaatcttagcatactcctcaattacccacataggatgaataatagcagtgctaccgtacaaccgctaacataaccattcttaatgttaactagttatattatcctaactagctaccgcattcctactactcaacttaaactccagcgagcacgagcctactactatctcgcacctgaaacaagctaacatgactaacacccttaattccatccagcctcctctccctaggaggcctggccccattaaccggttttttgcgccaaatgggccattatcggaagaattcacaaaaaagcaatagccgtcatcatccccaccatcatagccaccatcagcctcgcttaacgctgctagttctagctacgcctagtctactccacctcaatcacactactccgccatatctagacaacgtagaaataaagatgacagtttggaacattacaagaaccacagcattctccccagatcatcgcccttacagctactcctagctattcgccttaatagtagtaatcttgatacagaggggatgagaagatctgttcgcgccgcaaaaagaggggggtcaaacccgggggccg

SEQ ID NO: 662093 - DNA, 811 bp, Homo sapiens
  misc_feature (800)..(800): n is a, c, g, or t
agcggacgagggagggagcagggccctggggagcccctgaccactccaccaggtcccacctttttcccaaggacgtctttctgatctgcttctctctggtgagcccggcctccttcgagaatgttcgtgccaagtggtacccggaggtgcggcaccactgcccccacacgcccatcctcctggtgggcaccaagctggacctccgcgacgacaaggacaccattgagcggctgcgggacaagaagctggcacccatcacctacccacagggcctggccatggcccgggagattggctctgtgaaatacctggagtgctcagccctgacccagcggggcctgaagacagtgtttgacgaggcgatccgcgcggtgctctgcccgcccccagtgaagaagccggggaagaagtgcaccgtcttctagagccctggcccacccgagcctgagggctggcggggagcagccctggacgtgtccgctgttgtgttgagacgtgtggtgtccctgagtcggctgtggggagcggtgggggtgggccggggggaagcatggggatgaggctgggtggcaggatcctgtcctctctgccgcctcattctggggtgtggctccagccttccctggcccccgccggaggccgggagggagcagggtctccctcagggctgcaggggcaggtgcagggaagccccaggatgggcttccctggagggggagggtgggggggagttctgttccttgtgccccgaggtggggcagccccttctcattttatacaataaacattctccacctacnaaaaaaaacgc

SEQ ID NO: 662094 - DNA, 1098 bp, Homo sapiens
  misc_feature (875)..(875): n is a, c, g, or t
gtctccgcgcccggcgctgggcggcgctcggctgtctccggccgatcgctcggcgctcgggtccgcggccgctgcggcgccgggcatttctccgcagctcggctcgcggccgcgcccgccgccgcccggcccgcgcccatgcaggccatcaagtgcgtggtggtcggcgacggcgccgtggggaagacatgcttgctgatcagctacacgaccaacgccttccccggagagtacatccccaccgtttttgacaactactctgccaacgtgatggtggacgggaaaccagtcaacttggggctgtgggacacagcgggtcaggaggactacgatcggctgcggccactctcctacccccaaactgacgtctttctgatctgcttctctctggtgagcccggcctccttcgagaatgttcgtgccaagtggtacccggaggtgcggcaccactgcccccacacgcccatcctcctggtgggcaccaagctggacctccgcgacgacaaggacaccattgagcggctgcgggacaagaagctggcacccatcacctacccacagggcctggccatggcccgggagattggctctgtgaaatacctggagtgctcagccctgacccagcggggcctgaagacagtgtttgacgaggcgatccgcgcggtgctctgcccgcccccagtgaagaagccggggaagaagtgcaccgtcttctagagccctggcccacccgagcctgagggctggcggggagcagccctggacgtgtccgctgttgtgttgagacgtgtggtgtccctgagtcggctgtggggagcggtgggggtgggccgttgggcaagatgggaattatgatagattgcattcagcatagntgaaaatgtccgggatggatacatatgttaaacaaacacctgttaaattcagcatactccttatgagaatacttgggcatttggttaaggggtgctcacggtctgacatgtgactagacttcaattactactggaagggccctaaagataccaactaggccagccctctctggtgggttaaaatgaaacctttgggaagttttgagcttagcgctttttttgt

SEQ ID NO: 662095 - DNA, 528 bp, Homo sapiens
cgcgtggctcacgctgtaatcccagctctcagggaggctaagaggcgggaggatagcttgagcccaggagttcgagacctgcctgggcaatatagcgagaccccgttctccagaaaaaggaaaaacaaaaaaccaaagggcaaaaacaacaaacacaaaaaaacacaaaaaaaatgtggtggcgggcgcggcttgggagccagagagaagaaggcttctaaacaccactctgctgttgggccgcccgcgcggcccccaaggagtggtaaagtaaacccgtggtgcacagaagccggtgctcccaaaaagaaaacccggcgcacaagacaatcaggtcggtggtgggtccccccccaaaaaaaaaaacggcgcggggggagaaaccgggcggcggtctgtgacaaacactccagaggtaggggctaggagagggcaaccagggggccgctaaccaaccaagaagcaggccccagcagagagcgcagaataacaaaataccgccacgaccgagggaggaagaagacaaaa

SEQ ID NO: 662096 - DNA, 1256 bp, Homo sapiens
  misc_feature (1245)..(1245): n is a, c, g, or t
cctcccagtgggtggggcaggcctctcacctgggcttgaaccctcagccggccccaccctctcctgccgccaccctcggagtcggggcctctgcctggggccccagtgtggggcgccctgcgcccttattcaccaccccagcccccggagcccggcctgcccaggtcgtcctccagccttaggtcgccacggatctggtgggctgggtccccctctcgaccccagacgcccctaactcgcctctggctccgggagagggggctgcccttgctgggcagagggtccgaggccgggcccgggagccacgtggcttgccctgtccgcagcgccgtggggaagacatgcttgctgatcagctacacgaccaacgccttccccggagagtacatccccaccgtttttgacaactactctgccaacgtgatggtggacgggaaaccagtcaacttggggctgtgggacacagcgggtcaggaggactacgatcggctgcggccactctcctacccccaaactgacgtctttctgatctgcttctctctggtgagcccggcctccttcgagaatgttcgtgccaagtggtacccggaggtgcggcaccactgcccccacacgcccatcctcctggtgggcaccaagctggacctccgcgacgacaaggacaccattgagcggctgcgggacaagaagctggcacccatcacctacccacagggcctggccatggcccgggagattggctctgtgaaatacctggagtgctcagccctgacccagcggggcctgaagacagtgtttgacgaggcgatccgcgcggtgctctgcccgcccccagtgaagaagccggggaagaagtgcaccgtcttctagagccctggcccacccgagcctgagggctggcggggagcagccctggacgtgtccgctgttgtgttgagacgtgtggtgtccctgagtcggctgtggggagcggtgggggtgggccggggggaagcatggggatgaggctgggtggcaggatcctgtcctctctgccgcctcattctggggtgtggctccagccttccctggcccccgccggaggccgggagggagcagggtctccctcagggctgcaggggcaggtgcagggaagccccaggatgggcttccctggagggggagggtgggggggagttctgttccttgtgccccgaggtggggcagccccttctcattttatacaataaacattctccacctacnaaaaaaaacgc

SEQ ID NO: 662097 - DNA, 1296 bp, Homo sapiens
  misc_feature (1285)..(1285): n is a, c, g, or t
cctcccagtgggtggggcaggcctctcacctgggcttgaaccctcagccggccccaccctctcctgccgccaccctcggagtcggggcctctgcctggggccccagtgtggggcgccctgcgcccttattcaccaccccagcccccggagcccggcctgcccaggtcgtcctccagccttaggtcgccacggatctggtgggctgggtccccctctcgaccccagacgcccctaactcgcctctggctccgggagagggggctgcccttgctgggcagagggtccgaggccgggcccgggagccacgtggcttgccctgtccgcagcgccgtggggaagacatgcttgctgatcagctacacgaccaacgccttccccggagagtacatccccaccgtgtgagtgtgggggcttcccgggagagcacaggccctccgtttttgacaactactctgccaacgtgatggtggacgggaaaccagtcaacttggggctgtgggacacagcgggtcaggaggactacgatcggctgcggccactctcctacccccaaactgacgtctttctgatctgcttctctctggtgagcccggcctccttcgagaatgttcgtgccaagtggtacccggaggtgcggcaccactgcccccacacgcccatcctcctggtgggcaccaagctggacctccgcgacgacaaggacaccattgagcggctgcgggacaagaagctggcacccatcacctacccacagggcctggccatggcccgggagattggctctgtgaaatacctggagtgctcagccctgacccagcggggcctgaagacagtgtttgacgaggcgatccgcgcggtgctctgcccgcccccagtgaagaagccggggaagaagtgcaccgtcttctagagccctggcccacccgagcctgagggctggcggggagcagccctggacgtgtccgctgttgtgttgagacgtgtggtgtccctgagtcggctgtggggagcggtgggggtgggccggggggaagcatggggatgaggctgggtggcaggatcctgtcctctctgccgcctcattctggggtgtggctccagccttccctggcccccgccggaggccgggagggagcagggtctccctcagggctgcaggggcaggtgcagggaagccccaggatgggcttccctggagggggagggtgggggggagttctgttccttgtgccccgaggtggggcagccccttctcattttatacaataaacattctccacctacnaaaaaaaacgc

SEQ ID NO: 662098 - DNA, 135 bp, Homo sapiens
catcggggttcacagggtggttataattttgtgatatttatgggctgggtgagggaggtaggtggtagttggtgtttaatactgttttagttgggtgatgaggcaatagtgtaacggagtatggagggtaattat

SEQ ID NO: 662099 - DNA, 611 bp, Homo sapiens
gtaacgaagttcttaagctcatagccgcacctgcagcatccagttacttcaagtgccagtggccgtgcctacccagatgtgtgctgcacttgctgatggtctactgggtggtacagacaacagagtgcccattccatggagtgtccggaacctcgagcctctactccagtgtttggggggatcctatccttgatcaatgagcacaggatccttagtagtccgcctccctcttggcttgctcaacccaatggactctaccagcagcatggggcaggactctttgatgtaacccgtggctgccatgagtcctgtctggatgaagaggtagagggccaggctttctgctctggtcatagctgtgatccggtaacaggctggggaacacccaacttcccagctttgctgaagactctactcaacccctgaccctttcctatcaggagagatggcttgtcccctgccctgaagctggcagttcagtcccttattctgccctgttggaagccctgctgaaccctcaactattgactgctgcagacagcttatctccctaaccctgaaatgctgtgagcttgacttgactcccaagcctaccatgctccatcatactc

SEQ ID NO: 662100 - DNA, 1221 bp, Homo sapiens
  misc_feature (1210)..(1210): n is a, c, g, or t
ttgttttgtgggggggaaatgtggtatgtgtctgctctagagccggggagggggcgcgcccccccccgggagccagggatgacacatctctcgtcctccagccttaggtcgccacggatctggtgggctgggtccccctctcgaccccagacgcccctaactcgcctctggctccgggagagggggctgcccttgctgggcagagggtccgaggccgggcccgggagccacgtggcttgccctgtccgcagcgccgtggggaagacatgcttgctgatcagctacacgaccaacgccttccccggagagtacatccccaccgtgtgagtgtgggggcttcccgggagagcacaggccctccgtttttgacaactactctgccaacgtgatggtggacgggaaaccagtcaacttggggctgtgggacacagcgggtcaggaggactacgatcggctgcggccactctcctacccccaaactgacgtctttctgatctgcttctctctggtgagcccggcctccttcgagaatgttcgtgccaagtggtacccggaggtgcggcaccactgcccccacacgcccatcctcctggtgggcaccaagctggacctccgcgacgacaaggacaccattgagcggctgcgggacaagaagctggcacccatcacctacccacagggcctggccatggcccgggagattggctctgtgaaatacctggagtgctcagccctgacccagcggggcctgaagacagtgtttgacgaggcgatccgcgcggtgctctgcccgcccccagtgaagaagccggggaagaagtgcaccgtcttctagagccctggcccacccgagcctgagggctggcggggagcagccctggacgtgtccgctgttgtgttgagacgtgtggtgtccctgagtcggctgtggggagcggtgggggtgggccggggggaagcatggggatgaggctgggtggcaggatcctgtcctctctgccgcctcattctggggtgtggctccagccttccctggcccccgccggaggccgggagggagcagggtctccctcagggctgcaggggcaggtgcagggaagccccaggatgggcttccctggagggggagggtgggggggagttctgttccttgtgccccgaggtggggcagccccttctcattttatacaataaacattctccacctacnaaaaaaaacgc

SEQ ID NO: 662101 - DNA, 849 bp, Homo sapiens
gtagtcagttccagcaacagcttacatgaggaggagcagtgtgttgctccttctgaaaggaatggtcatttgctgagcagcacgataaacaaaggatagccactgagacaagcctgtaaggctaatggtcatgcccattctggtttcttcaccaatgagaaaaactgggacctgggggagtttgcagaagccatccaagggcacctgtcttctcacagcacaggaacttcctgcagccctccctcctgtcttgtttctccgcttaattgagaggagaggacagaaccagatgcaaggcagttccaacagtaatgacattgctctaaggtgtggatccaagaaccggtgacaaggtccaggacaattccatcccgggacacttgacccaactaagagcactgtgcattgatggctaagttcagagctctgaggagatggtcaaactcatttggcaagaaaccaagatattttccaacctctgccagccaggtcctttggaggcggcattcaagaacgcatacattctggacaaatccttcatctcaaaatcatttgcccttcatgaaacccaaaggcattggctccaaagtccatttcccattcacttcagcacattgcatcttgtattgacttgacggcagacatctaagtccaacaaactcttgggtcaacttctcttctttcttgaacattcttgtgtgcatagaggtatcctctgaagggactcttggacttacttctggctctccagtgtgcctatccttcatcgggggatctatagggcccaggacgcaagtgcgaaccggggacgcggcacatctgagggaagcaggcacagtcatttcttgc

SEQ ID NO: 662102 - DNA, 804 bp, Homo sapiens
  misc_feature (793)..(793): n is a, c, g, or t
ttgttttgtgggggggaaatgtggtatgtgtctgctctagagccggggagggggcgcgcccccccccgggagccagggatgacacatctctcgtcctccagccttaggtcgccacggatctggtgggctgggtccccctctcgaccccagacgcccctaactcgcctctggctccgggagagggggctgcccttgctgggcagagggtccgaggccgggcccgggagccacgtggcttgccctgtccgcagcgccgtggggaagacatgcttgctgatcagctacacgaccaacgccttccccggagagtacatccccaccgtgtgagtgtgggggcttcccgggagagcacaggccctccgtttttgacaactactctgccaacgtgatggtggacgggaaaccagtcaacttggggctgtgggacacagcgggtcaggaggactacgatcggctgcggccactctcctacccccaaactgacgtctttctgatctgcttctctctggtgagcccggcctccttcgagaatgttcgtgccaagtggtacccggaggtgcggcaccactgcccccacacgcccatcctcattctggggtgtggctccagccttccctggcccccgccggaggccgggagggagcagggtctccctcagggctgcaggggcaggtgcagggaagccccaggatgggcttccctggagggggagggtgggggggagttctgttccttgtgccccgaggtggggcagccccttctcattttatacaataaacattctccacctacnaaaaaaaacgc

SEQ ID NO: 662103 - DNA, 308 bp, Homo sapiens
  misc_feature (297)..(297): n is a, c, g, or t
cctcccagtgggtggggcaggcctctcacctgggcttgaaccctcagccggccccaccctctcctgccgccaccctcggagtcggggcctctgcctggggccccagtgtggggcgccctgcgcccttattcaccaccccagcccccggagcccggcctgcccaggtcgtcctccagccttaggtcgccacggatctggtgggctgggtccccctctcgaccccagacgcccctaactcgcctctggctccgggagaggccccttctcattttatacaataaacattctccacctacnaaaaaaaacgc

SEQ ID NO: 662104 - DNA, 106 bp, Homo sapiens
tgcttctgcccttcctcttctgctgcttcctgcttctgcccttcttctgctgcttcctgcttctgcagcttcctgcttctgccgcttcctgctgcttcctgcttct

SEQ ID NO: 662105 - DNA, 945 bp, Homo sapiens
ctggttccaagccctgcttccctgtgcactccagcgacatctccagaccccttcttctaccaagccaggcccagagagctcaatgttcctcctgcagggagcccgcccctctccgttttgctggcccctctgtgagatttcccggggcacccacaagttctcggaggcacgctcaagatcggggacggtgtggcttgtgggctgcgtgctaccgggctggtgatgaggaacacaggtgtatgctgtgacacaggctgaaggagaacgctgacgctgagagtggatctgcacgtgaaccgtcagagtctttcctgaccgaggtggagcaactctgtccaggttaacgtcagcccaaacattgtggactttgctggctactgtgctcagaacgtgcttctactgcctggatgtacgtggcttcctgctcccaacggctccctggaggaccgtctccacgtgccagacccaggctgtccaactctctcctggctcagcgactggacatgcttctgtgtacagcccggggcaatgcagtttctacatcgggaacagcccagcgtcatccatggagacatcaagagtccaacgtccttctggatgagaggctgacacccaagctgggatacgtattggctggcccggttcaggcgcttgtggccgggtcagggcccccaggcagaagcaggattggtggccccgggtacctctccccggtgcggtgcccccttgcctacctgcccaaggcttccctccgcccgcgaagggtgctttgggaccgggaccccttttccttgggggggtggggccccacccttctgcgtgaggcctaaccccgtttttgtcgcacttcacactctgctgtagatgtggggctgtttttgcccccctcatcatgtgtggtgattcccccgcggttataagcccgccccctgtgtggctggttcc

SEQ ID NO: 662106 - DNA, 683 bp, Homo sapiens
tcaaagagcaaaggtcattatgaggtgactgggagcgatgatgagacaggcaagttacaggagagtggggtgtacctggctctaagaagtcccagacatgacctcctcgttctagcaatgacagtgggaataaggttggaataacagctacccgaggaggagatgatcagctaaccacaaagaaagagtagcaggacatataagtatgatgatgtacaatatatatatatataacaaaagaatcagaccatagagaatgaaggatgaacactaatataaactccaaagaaacagcacaacagactagacacagggagagaaaaaacgaagaacgacagcgacagcgagagaccaggaagaacaaagaggcgtagagaaaaggacgaaacggagtagaaggaggcacagaaaaaataaataaagaagaagagaaaagcgaggcaagaacacaaacagagagacgaccacagtgaagcgaacagaacagcaacgatacaaaagaacgaagaagaaggccacaagagaagaaaaaaacaaaaaggaaaaggacagaagaagccagaaggaaaacaagagaagaacgaacaacagaaagacgggaaaaaaccgcagcaaacgaaagagaagagaaagaacgaaaaaagaaaacaacacaagaaaaagcacacaaaaaaaacccacaa

SEQ ID NO: 662107 - DNA, 829 bp, Homo sapiens
  misc_feature (620)..(620): n is a, c, g, or t
gaatatatctgcgttataaaactagttttaagaagaaattttttggccctatgaaattgtaaccctgaacatgacattgtactcatataataatgatctaaaatgctgtatggtaataattaaatgggtaaagccatttacataatatagaaagatatgcttatatctagaaggtatgtggcatttattgtggataaaatctctcaattcagagaaatcatctgatgtcctatagtcacttggccagtcaaaagaaaaaataccctaatgtagttgtggaagttatgctaatatggtgtactgatataaaacctaaatgttctggcctaccctgtggtcataaagatatttgtgagcagactgtaaaaccaagaaaaaaaaaatcatggctttcttagccaaaatggcctagtatgtaatttggttcaacaatacaatgttcggatttaatgcacttgtgtcgctataaaacatcccttttttccatgtagattccactaatggagtactctaagaacgcataatttcagggactatattagtggtgaacagtacatattctggtgttcctatgtactttgtaccaatttttcattcccttttggctctgtgtgcgtggnatctaacactaactgtattgttgctgttacctccactaaacctccttcgtgcaaacacacacaccacaacaacaaaaaaaattggggggcgccggcgccggaaatctttaaaaactttgtgggcgcggcccggttaatgaaacggcacgttttccaaggaactgcagcacaggcgggccccaaaaaccggggcggttcaaaacacgttg

SEQ ID NO: 662108 - DNA, 825 bp, Homo sapiens
tacaaagggtgtcagcagatgcgaagtaaagaacgtcactttgaaacccattcatcacacagtatacgctacacatggaacacccaagccatgactgaacacgtgctcagtgcttgaacttctggaaattgttctttgactcatgacatttcgcagtgcagagaaggcagaagccaagaaaaacgtcatcttggagactgggcttggtaccgcagacatcagctttacatcgttcacaggagatgatggcatgcgaggaagatgcaatggagatcatgacactactgtaataaggccaggaaaactgccatttcaagttctgaagaatgtttgagtattggaatggagagaaacaacatggttccaagagggagggtgtaaaacctgtaaaatactgtcgaacatatgtattcattagttacaatctcgatgttgtgttgacttagtactgtctatttacgaacacgtaaaagataccgcaaatatgtttgagtattaaatcatttacctagcgttgtagaagtattaatttacttgaagcagatgtagaatgtggcaaattatgtcaagcatgtgtctccagcgtgatgtacttgtgcgccttgtgagtctatctggcatgtagctttaagggtgtactgtgaaaatcatcagaagtcttactggaagctatggtggggacacattgtccttgcgaaccaccagtgggtggcctaccccaggtctaagtgaaggtgacttgcggataaggggccccaatggcggcacgggactaactacaggggcacacagcgggagcccccagaccgcaaaattaaacccggg

SEQ ID NO: 662109 - DNA, 942 bp, Homo sapiens
gcagaccagtgagagcaccaaccatgcgggtgctgtaggtggtccatgctgccaggaccctcatcctcgtggcatcggtgtctggcagatgcggcaccggtcaagagcttctttgagagccaagaagcttgtgtagctgtcccaggcgtcacaacgcatcctcccaggctgtgggggaggaaaggacctcctggaacgtgacttcttctgtcatggagagactggatttcccgagccatacctgtttctgggaagggagaggggctgggaggcaaccctactaggcacatatgcttgaaggaccagcagcgatgcgtcatagttactgagcaggtatgttggggcaaagttcgctgccctctctctctgcgtacttctgggcactgtgtggtagtaatcacccgaggtgctggtaaagtccctcctcttggcggctcagaatcaggagtgttactggatcagggatgtgaggctgctgttgggggtgggggggaggcggaatggggcacggcaagccacgtgcttctgtacttgcctatgctaaactctaaggtgttttcgcagcacgtgtctgggagtatggtgcctgtccatagtccatcctgagcacccttgggaacctcactgttgctctactttccaggctagagctgctgatccagactgtgtgttagctgagagagagagcgtggacaggtttcgccaggtggcgaatgtgcggcctgcagtggacctgtgcctgctcaccatggcacgtcacttcagggcgctctcacagaaacgggaccatggcaaagccaaagccttggcgcttgcgtgagtgtcgactgtacaacctagtgccgctcatcgtccaacgtcgctcggcccgagtccctgaaccaacacaacggcgcccgctatatatccacggcgcccacccactcccttctttcaaggcct

SEQ ID NO: 662110 - DNA, 419 bp, Homo sapiens
tagttcctgtcagctaaggcccatgctttctgatactgctgataaggttttctatttccagatcaaattaaagcaaaccttactggccctgttactgaagctgtgcatgggggtcgtttgctgtgaggtgtttctatggctttgagccagggtatgaacatctctagtgttcatgttatttcctgagactagcactcacgggaagtagaatttattacaacctgctgtttgagttcatgaagagtaggacaatatgagactctggggcagtgaaagacttaccaggattccttctggaactgactcgtcagctcattcatgtcttacccagtctttaaacagtatttcatgataatggtctgcttttaattgctgggctttaccttaccctttttgtgattgcaggtcctacaggtatg

SEQ ID NO: 662111 - DNA, 624 bp, Homo sapiens
gcacgaggagagagagagagagagagagagagagagagagagagagagagagagagattgagagagagaattgtgatttggtacctatgcgcttccctaggttccgagaatcagtgctttctagttctctatattatccctagattctggcttacgccatattgattctgcttctttatccagtactgactttcatgcttgactgtccatccatggcttgattgctgttggtagtgtgattagagaccacatcttttacactccaatgcttcggtgcattttctttcaaccacacatagtccaacctgcttcctaatgcttccctgaatatccttcaactgatctatctttacctctatctccttcatttcccaatggctctcaagctagttgagtctccactcccatcccttgatgtctaattgcaaggttgcatgattgccccattccttctgtttgttcttcaacttcattcttgtgtatataatctcttaactagtcatgactttaatccttttcctgttttctatctgttagaatttcattctttacctataccatagctatgtggttcctttctttacagttcactatacttgctttttctttgcccggtgttgttct

SEQ ID NO: 662112 - DNA, 158 bp, Homo sapiens
ccaaaaagtcaaatcagaatggataagactcttaaccatcataatcacccagatcaaaaggacaagaatccttcaagaaacagtgaaaaaactccttagaacacccaaaaggacctagcttctgtagcatgacattaaagtcataaatgcaaggctag

SEQ ID NO: 662113 - DNA, 236 bp, Homo sapiens
atagtcttgtaccgctcggtaattctaggccgcttgattaccctgtgttccagccatacaactgtaagccgctcattacactctcattgctctggttggccatgtgatctgtcgtctcttctgtatacatatgtacttcatgttccatagcagcttcagaagccacagtagtagaagcctctcgcgcgtcagtgccagtgtagactcagtgtgtgcgagatcacgcgtcatttacc

SEQ ID NO: 662114 - DNA, 854 bp, Homo sapiens
ggatccgcaaggccgcccggggaactgctgacgcttgatgatgaaggacccacggcgtctgttctgaaggcaacgccctgtctgcggctggctggtccgcattggggtgctggatgatgggcacagatgaagtctggattacatcctgggcctgtaagatagaggatttcttagagagacgcctgtcagacccaggtcttcaatgctgggcttggccaagtccatccaccatcgcttcgcgtgctgatccgtcagcgcctagtatcagggttccgcaaatgcaggtggtgaactatctccgtccttcattgtcgcgcctggtattcctcagaagcacatcgacttctctctgcgctctaccctacgggggtggtccgacccgggaccagcggtgaagatggaatgaattgccaaggaaggggcccacgggtgagggctgaggggctggagatcgatcagacgggacggggaagggacttctaaacggtccagctcatgtgtccccgtccctgtgagccctgctgtgagaccttggtcattcgcgtatctcctcgtgaccacataccttaaacaccatggtaatctaagccgacgtctctaaccttgggccccgaggaagtcttacggaaccagggggaagttccacacgcaagggccatattatgccgaagaaaaaaacgaccgacggaaacagaaccccattccaccaaaggcgcggcagcaccttccaggccaccacagaagcgaaaccacaaaggacgaacacacgcgccaaggctccgatgtcccaacgtcaactactaagcgagggaagtgggtcccggccagggactacccaatcccgcgtcccccaa

SEQ ID NO: 662115 - DNA, 1318 bp, Homo sapiens
gttaggagataaatctcaagacatgtgtgtgagagagagagagagcaaggagagcgagctgtgatctgtgcttgccgcgaccgtgtgcccgtttgatcccgacattagctgttaggggcatcggagacacagagcgcgggcatagacaccgccgacaccggggactcatgtctatttatacctttccatcacacacgcgagcataggacacacacgacagctacacacctatggagatccgtagccagtcgaagaatattacgcgtcggggacaagccaggtgcacgactaaaaagaacaagaaaaaaacagaaagaaaacaagcgagggagaccaggtcacgctcacaagattcctcaaaaccgcatcatacgaggatgaggccgtcctgagagaatcaatgacccactgggcacatcgggatgaccccagggcaccagcgcatgactgcaccgcgcggggacaacctgccgagctcaacggctgcggcgacagccatggtctgcacaagccaggaaggcagcgccggaggagcaaacagggagccacctcaggcacgggcgccacccgtagaccgcaagagtaatgcacccccagggaaaactacggacagatagaacaccagaaacacacaacggcgtcgccagttcccccgaaacggcccaagaagccaagccgagccgactggcaagaggcgaagccgcacccgtagggagtccaaactcaaaggagaacagcgcgcggtccacaggacagacaaacaggcagaactactgagaagacacacacagaaaaacctccgaccacacacaacaacccacaggaacagcaagccaaccccacacagcaccaatagaaccgacggagcaccgaaagcgggcacgagatgggcagagacggcgcggccgggaacccaacgacccgcgcggcagacagcgaagcaataaacagcgcgcgtcgggagcggggagtgcacacccacgagcgccgacaccacagagcgggcgtggccagcccgcaggccacgcccacgcggccggcgcagagccggagagtgggagcgaacacgggataccagggctgggcgggcagcactacaccgaccagacgcacccaccgagacgaaattacattaaattcaagtacaccaaaattctaaaaaccacaacattatcactacatccaaactcataccaacacctaaccaaactaacatataccgaatcgaacatcaatgcattacactacaacctccgagtcacatacagaaccatccctaatattatactcccacaacataacataaactaaaaccaca

SEQ ID NO: 662116 - DNA, 365 bp, Homo sapiens
gaacacggcctctcttaaatgaaagcgcataaggtgctttcacacaaggacccagctatagtcaagaaggtacagctctcaacaacaggtcagaatgtcgtcctcttcttctgccttggccccggggaagcacaggcgttctggccaaagggctcagaaaatgtcgggcacgtatataaccagtgtaggcaccatcaataagtccagccccattgttgtgaatgaaccaccaggacacctgggccccatgccacgggtccttgctgtagtcttttcgcaaacctctgtgtgaccgtgaggcggcgtgttcctcaacaacatcgtggcatctggctgtgtgggctcagagtctgtgtatatgacag

SEQ ID NO: 662117 - DNA, 1267 bp, Homo sapiens
  misc_feature (41)..(41): n is a, c, g, or t
  misc_feature (259)..(259): n is a, c, g, or t
  misc_feature (264)..(264): n is a, c, g, or t
  misc_feature (269)..(269): n is a, c, g, or t
  misc_feature (272)..(272): n is a, c, g, or t
  misc_feature (285)..(287): n is a, c, g, or t
  misc_feature (315)..(315): n is a, c, g, or t
  misc_feature (318)..(318): n is a, c, g, or t
  misc_feature (321)..(321): n is a, c, g, or t
  misc_feature (323)..(323): n is a, c, g, or t
  misc_feature (340)..(340): n is a, c, g, or t
  misc_feature (346)..(346): n is a, c, g, or t
  misc_feature (367)..(368): n is a, c, g, or t
  misc_feature (376)..(376): n is a, c, g, or t
  misc_feature (384)..(385): n is a, c, g, or t
  misc_feature (391)..(391): n is a, c, g, or t
  misc_feature (394)..(394): n is a, c, g, or t
  misc_feature (398)..(398): n is a, c, g, or t
  misc_feature (403)..(405): n is a, c, g, or t
  misc_feature (408)..(408): n is a, c, g, or t
  misc_feature (410)..(410): n is a, c, g, or t
  misc_feature (414)..(414): n is a, c, g, or t
  misc_feature (456)..(456): n is a, c, g, or t
  misc_feature (474)..(474): n is a, c, g, or t
  misc_feature (515)..(515): n is a, c, g, or t
  misc_feature (545)..(545): n is a, c, g, or t
  misc_feature (549)..(549): n is a, c, g, or t
  misc_feature (724)..(724): n is a, c, g, or t
ttctattttgttattcattccatttgagtctttctgatgancttggctatactgaaatctgttattttagtgaggctccaaaatgagcaaagctaggcctgattagagtagagtgactattaaaaaacataactttctaggagctataaatcaaagttttaaaaagatgtttggatatatttgagtattccgatcatgaaaacagaaattgccctgcctactacaaggacagactgatgggaaattatgcacctggtcnacttngctcntangcagacgatgctnnnaacactaacggcctctctgatatctatngtnagncntagtactgatccccttncccagngctgcacacccctggtctggnnccccaatngcgtcgcnnccgaanccnatanccagnnnccngnaatncaattgaagaaaaatacatccaaataaagactttattattanacagaccagatagcatcnagaaatcatgtgactgttatgattatcagaatgtcttaacnttttagggcaaagttaacactgaaagttcnagcntaagtgttggaacttttgtgggaaaaaaaaatcacttttgaaactcagacttcagtgtatacccaataatttaaaattatgtgaaatgttttaaatttgtgaactcgtaattactgttttaatgattcagtttcttcagagtggtaattgtataaaattgctattgcagctttanattcaatatgatgtgcctgtaaaccaaggagttttccccgtttgtaaaaagacattgtagataattgaatgtttgattttagaaaggtcattagtttcttgttacacattttgttagtctggttttgttgcttatcgggtttaatattgttcttgaaaatagttgatgctatgttatgtataacttttctaataaaagttgtgttataagctgtagtatgatccgtctaataaaaggggggtagttctaaaatatctcccaggtgggtagcatggtgtcagtcgatcactacgtatttttcgtgacagaggggtccctaacaggtgagttgataaacagacggagggagggaccgcagtttttataccagtcggctatgtgggaaaagtggggccggggaactttgtagaagggaccctaccgggggggggggaatttcggaagtaacctacagacttgaaaggcgaggcgatgaaacattgagggttaagggtgaaaaacagggttgtgggtgtgaaaattggctggttatttggaaattaa

SEQ ID NO: 662118 - DNA, 574 bp, Homo sapiens
tctaccctacgccatcagtcggtgtgtcatcattggctatgcaacattgccctgtgatgctgtcaagatggtacagtatgagtgagaatggtcggaaagagattgacatagaaaaatatgcaagagtggaaaagatacctggtagtgcatcattggaagactccatgtgtcttgctgtggagtcatgattaacaatggatgtgacccatccactgtatgctggctgctatatcaagaagcctcgcattgtgcttgctggattcttctcttggaatacaatgaaaggagaaagccagactgacattgagattacacagaggaggaggacttcagccgaattctccagatggaggaagactacatccagcagctctgtgaggacataatccaactgaagcccgatgtgtcatcactgaaaagggcatctcagattgagctcagcaataccttatgcgggccaatatcacatgacatccgcagtagtccggaagaaagacaaataatcgcatagctatagcctgtggggcccggatagtaagccgaccagaggaactgagagaagatgatgttggaa

SEQ ID NO: 662119 - DNA, 1268 bp, Homo sapiens
  misc_feature (41)..(41): n is a, c, g, or t
  misc_feature (259)..(259): n is a, c, g, or t
  misc_feature (264)..(264): n is a, c, g, or t
  misc_feature (269)..(269): n is a, c, g, or t
  misc_feature (272)..(272): n is a, c, g, or t
  misc_feature (285)..(287): n is a, c, g, or t
  misc_feature (315)..(315): n is a, c, g, or t
  misc_feature (318)..(318): n is a, c, g, or t
  misc_feature (321)..(321): n is a, c, g, or t
  misc_feature (323)..(323): n is a, c, g, or t
  misc_feature (340)..(340): n is a, c, g, or t
  misc_feature (346)..(346): n is a, c, g, or t
  misc_feature (367)..(368): n is a, c, g, or t
  misc_feature (376)..(376): n is a, c, g, or t
  misc_feature (384)..(385): n is a, c, g, or t
  misc_feature (391)..(391): n is a, c, g, or t
  misc_feature (394)..(394): n is a, c, g, or t
  misc_feature (398)..(398): n is a, c, g, or t
  misc_feature (403)..(405): n is a, c, g, or t
  misc_feature (408)..(408): n is a, c, g, or t
  misc_feature (410)..(410): n is a, c, g, or t
  misc_feature (414)..(414): n is a, c, g, or t
  misc_feature (456)..(456): n is a, c, g, or t
  misc_feature (474)..(474): n is a, c, g, or t
  misc_feature (515)..(515): n is a, c, g, or t
  misc_feature (545)..(545): n is a, c, g, or t
  misc_feature (549)..(549): n is a, c, g, or t
  misc_feature (724)..(724): n is a, c, g, or t
ttctattttgttattcattccatttgagtctttctgatgancttggctatactgaaatctgttattttagtgaggctccaaaatgagcaaagctaggcctgattagagtagagtgactattaaaaaacataactttctaggagctataaatcaaagttttaaaaagatgtttggatatatttgagtattccgatcatgaaaacagaaattgccctgcctactacaaggacagactgatgggaaattatgcacctggtcnacttngctcntangcagacgatgctnnnaacactaacggcctctctgatatctatngtnagncntagtactgatccccttncccagngctgcacacccctggtctggnnccccaatngcgtcgcnnccgaanccnatanccagnnnccngnaatncaattgaagaaaaatacatccaaataaagactttattattanacagaccagatagcatcnagaaatcatgtgactgttatgattatcagaatgtcttaacnttttagggcaaagttaacactgaaagttcnagcntaagtgttggaacttttgtgggaaaaaaaaatcacttttgaaactcagacttcagtgtatacccaataatttaaaattatgtgaaatgttttaaatttgtgaactcgtaattactgttttaatgattcagtttcttcagagtggtaattgtataaaattgctattgcagctttanattcaatatgatgtgcctgtaaaccaaggagttttccccgtttgtaaaaagacattgtagataattgactctttcttttcgcggtcccctctttccctaccccccctttttgccaccccctttctttgttgcttatcgggtttaatattgttcttgaaaatagttgatgctatgttatgtataacttttctaataaaagttgtgttataagctgtagtatgatccgtctaataaaaggggggtagttctaaaatatctcccaggtgggtagcatggtgtcagtcgatcactacgtatttttcgtgacagaggggtccctaacaggtgagttgataaacagacggagggagggaccgcagtttttataccagtcggctatgtgggaaaagtggggccggggaactttgtagaagggaccctaccgggggggggggaatttcggaagtaacctacagacttgaaaggcgaggcgatgaaacattgagggttaagggtgaaaaacagggttgtgggtgtgaaaattggctggttatttggaaattaa

SEQ ID NO: 662120 - DNA, 202 bp, Homo sapiens
gccccggattaaatgtgcgcaggtagaagacgtaggggcctctagctgatcactaggcacgagtaggccaggcatggtggatagctagatggcatacttgagctccgtctctgaaagggccttcccaggcttgtactcctaccttctgcaggtagaggatcatgccctatgaggatcccgtaggaagctctactaccagccc

SEQ ID NO: 662121 - DNA, 838 bp, Homo sapiens
  misc_feature (680)..(680): n is a, c, g, or t
  misc_feature (690)..(690): n is a, c, g, or t
  misc_feature (693)..(693): n is a, c, g, or t
  misc_feature (714)..(716): n is a, c, g, or t
  misc_feature (722)..(722): n is a, c, g, or t
  misc_feature (726)..(726): n is a, c, g, or t
  misc_feature (766)..(767): n is a, c, g, or t
  misc_feature (778)..(778): n is a, c, g, or t
  misc_feature (781)..(782): n is a, c, g, or t
  misc_feature (801)..(802): n is a, c, g, or t
ccagccttcccctggggggggggccagtcgcgccgccccccccccggcgggtcaaggaataaactttcctcttgggggagaacaaaagttaaataaaattaaagaggggccctctctcgtttttgtggttgggggttcaaaaacacaccacccctcctctcccctctggggggggacccgccccaaccaaaaagtagggtagaaagggaagggccctctgcccatttttttattttccataggagggggggaaggagagggggtttatacaccctttttccggccgccgccaaaatcgcttcctcccaacaccacctctttttgaaggagtttttatatattttccttttttagagagacccgccaaaattttttgcgcgggctcttttgtgtatgttccccccccgtccctatataaagaggagggttatccctacactcttgttaagagaagggggtggccgcgccccaattcctacgacccgggttgtgtttagagaggggcgttccttttcccaccccccctttttttttattcccgggccgccccagtccccacaaaaatccccccccagagaccttttggggtggggccgtttgcccccttccccaaggaagcaacgaggtttccttttcttccagagtccctttgcggaaagagtatgcccaaattttctttncattctcttnccnaatttatatgtaccattgttnnnggagtngggnaaatgtaggcctgaagggatcaggtccctcataccactcnnaaggtacatcnatnntgtcccattagacaatcannatcgaagaacttggaataatagaaactacgatgttg

SEQ ID NO: 662122 - DNA, 853 bp, Homo sapiens
ttctgtggcccggagctgatcagtgtctagaacagatcagactttggtaatgatgcctgaaataaaattaccacctcgaaagcaacaggttcactccgtggcagagatgtgtaatccttctggctgacattgccactaaaatgggagctgagaaccagaagatttgtcacctgaacgagaccttgcgaacggatatggcatcgagcttagagtgtctccttatcaacaccgaaaataagcttctgtacagaaagatcagatgctaaggatataccttcccaggtggtttacacgaatacgtgtggtagtcatccatttaggcaatccagccgagctgggaggaaagtgacgcccctttggagtgaggcgagcagcacagaagacgggctgacaggctgagccaaggaattcccttgaaggaggtccctccagaagacattatttattacccacgattcattacaaagctcagccggatggacatctggggtgaccatgacacttgactaacatctgcgtcgcgtgagggaccacttgtaccttttgaatccagatcccacttgagataacaagctaatggtattgtgtccaaggggcagactaaagacttctgaaaaaaggccgccagtgtgaacataagataaccccttgtttaaaatattgcgcgacttctctttaaggggggctacttactccatgaatcactgtgtgcctagcaaattacggacgtgactttgggcactggtaccagaacactttctgtaccacatgcgaggcgttcctaaatgcgctctaatatcacacaggcccatggggcacaacggataaccgcctacccgtgaacaattgtgcc

SEQ ID NO: 662123 - DNA, 81 bp, Homo sapiens
ggaaaaccaggcaaacctgagatggagaactgacagcacgctaaccccggccctatagcacacctctaccccctctagagc

SEQ ID NO: 662124 - DNA, 116 bp, Homo sapiens
gagtcaagtaacctggacatcacaagaagaaattggtccacgagggcccactgactgtggctgggtgactaagtgacaatgcagtggattgtgcatgtgctgctgctggacgacct

SEQ ID NO: 662125 - DNA, 971 bp, Homo sapiens
aactgtgtgtgacaagactctatgttaggaaatgctggcttaggtaaataatttcaagagggcacaatagcctgaagaactttcctgcttgttcgttcattaatcctgaacctagaaaacagtcatgtgatccgcactccagcctgggtgacagaggaagactccgtctcaaaaaaaaaaggaaacagtcatgtgtatttcacctgatccccagaggcaacttaaaatgaagtgttgctgctgctataactaagattccctgaaggcaataaaaatggctgtcaattctggtgtaataacttctgttattgtcaccaaaatattgtatttccattgcttaaattatactgtattgagaaaataaaatgtttatttctgatatctgcttaatagatttatttacacctattcttttttctcagtggagaattctccacaatgaaaacactagaaaattcttagtattgaacactattatcctttcatttcttatgtcataaaatctgtattttgtccctgagttaacgcttataagaataatattttgctactaaatacatatgaaaatatttaaccagggatataattttctctgctgttttatatagtggcttcacatttgcatatattttgcctgttcaagaaaagtgaacaaaccaccaagaaattatctgatttattcattctttcaaatgggaaaataacctatatattgctataaaaaaattggttattaaatttaaataagttgattttgattatccggtgacagccctgcttttgtctatcaggtgaaggactgtcacaaaatattttcttttatatttcccataaatagactttcttttgctactttgataattttatgtttttatctctattactatttatgtaacaaaatatattttgcctattcttatattcagggaaatattgattgttaaaataaactgcagttgtttatcagagca

SEQ ID NO: 662126 - DNA, 302 bp, Homo sapiens
ggcacgccatacgaactgcagaatctcacctctagctttcaagaccaagaattggcaaattagcataagctcctggaaatgagttgctggctttgtatcttatacctgccagggaataccaagagttgtttctacagcacttttttttttttttggtttggaaaaaaattacgtgttgccaaccaacgaaaggaattggaaaaaaacttctcttttctctacagcaaattaattgtgagaaagctccttcacattcctcgtgccaatttgagggtccaaatccctttcgcctggaaaaaatt

SEQ ID NO: 662127 - DNA, 658 bp, Homo sapiens
agatgtcggcacaacctcttgtgctcttgcctcctgccacaagaacatatgtcccagaaaagggccactccatcagcctaggtccagaaatgagaggacacatggactgaacttgaagatggcccacagcagacctgcagtcaactctcagcctttatgtaatgcgggaaagaaggaaatgtgaatattatagactactaaaattctaaagttgtaacatagcaaaatgatcgatacaattagcagtggctatcagtctagcatattgtcatgctatatgcatgctataaaactattgaacaaaaatatcactatcctatcatggacacattggacttttcttttctccttatgactgcatcacgtgtgatgatcagaaatggagtgaagacagaaaaataagaaaattcaagaatgtgctacagagtgatcctctccctcttagagcacccacagaaaccactcatggcttctctgtctgcatcctctccacataaacatattctttaaggtaccagccccatatcacatacctgtatgtcagcccataataggccttaccttagaagccaaagatccataactacacagtattcatgttgtataatgtggaccagcaccaaaaaataaagtggcagacaataatgcctatgactaa

SEQ ID NO: 662128 - DNA, 378 bp, Homo sapiens
aactgtgtgtgacaagactctatgttaggaaatgctggcttaggtaaataatttcaagagggcacaatagcctgaagaactttcctgcttgttcgttcattaatcctgaacctagaaaacagtcatgtgatccgcactccagcctgggtgacagaggaagactccgtctcaaaaaaaaaaggaaacagtcatgtgtatttcacctgatccccagaggcaacttaaaatgaagtgttgctgctgctataactaagattccctgaaggcaataaaaatggctgtcaattctggtgtaataacttctgttattgtcaccaaaatattgtatttccattgcttaaattatactgtattgagaaaataaaatgtttatttctg

SEQ ID NO: 662129 - DNA, 899 bp, Homo sapiens
cctacgcgcaccccaccccagcaaccgcccgcttcagtgcacacccgtgtgcttatgaaccatgacaactttgttgtctgtcatgaatgtggaaatcgatggaagttctgttgagttggaagaattggcaaatatctggaccattaagaaaacggatttttgaactagctttaaactaggccaagcaactaggtttcctgcccaccaaacctttacagcacctcgggctacactttgtttttgacctaacaccccttcctctaatggctgtgtgtggttccaagaccagcgggggaggacccatataataacttttaccgggaccctgtttgcaaacatatttttttctgtttgtctaacccacacgcatgataccacccacccctccgcacattctccccctcccctcacgcgaacaccgcccttcactgtctttcgctttgcccgcgggagccgtacgcgtgggcacatgcctagccctcccttctatttatcgcctaactgcaaacctatccttttcggttaggccatgggcgccgccaatcctgacgcaggacacacggcgcaatccccatcagctgtaaacaatcacgcaactgatacctagtgggtcccgggcggaccgaaaccagctcgacgacgatgcacacggacctccccggccagcttataacctagtcataccccatcgccgtacaaaatcatctcttacgtcgtattacggaccgtttgccgcacagctcgcggttcgtcctcgcacgatggaatagtaaaccttcgcagccttccctgtaatacacatctgacatacgcccacccccttaacgtcccgcaatatattcagttccccccgccaccggacacccggccccacacctcgaggcgtgccggctgcgacc

SEQ ID NO: 662130 - DNA, 152 bp, Homo sapiens
acatccatctctaggacaagctgtcagatctgcaggcttggtctagaggtgggatgttatattaaagccctagctttgaaagcccaaaatgaaaagtgcctgggagaaatgtgtggtggattttttttttccacagccggggggtaggaggg

SEQ ID NO: 662131 - DNA, 425 bp, Homo sapiens
ggttttaccacaatttattcatccattcccttactgatggtcttttaattgatcgcctttctgggccttaccaaaaaatacaatatgcattagtaaacatataatcttaagtgctggcgctttttattccttagggatagattcccaggagattcctaggttgtaagagtatattattgttaaaacagactcacaatgctggccaaggaggctgttacaatcctacatttctaaaagcagctttgaaaataacggtttcccctcctttgtgagtaagtaagatgacaacttagacaaaagcttattgggctatggatgttctggataaatttgttccaaaaggccactcaatatattgtggtgacacgcccatccatggatattccataatattgttttaaaagcccagtttttgggtgcgcatt

SEQ ID NO: 662132 - DNA, 147 bp, Homo sapiens
cacgatagttggcaagggccacaaataaaacacaacacaagaaggaataacttcctgaattattgtcttcatcactatcctaccttctctcaccccacataatggctcaaacagaaacagtttactcacacccctgtcagaaccatt

SEQ ID NO: 662133 - DNA, 1350 bp, Homo sapiens
gctgttggactgtcagttgtgaccatgctggtgcctcccaatagactaacagtgcagtgccatgttggacccaatgagaatgactgcagcagactacacatgtacttcttgtcaaaatgattctccttcaatggttttcaaaacctttagcacaaatgatgatgcaaaaccttccatgccttgcctgcttggtgtccagttaaaactcatgtgtactgccagattctgtctaaatgtcttgtcatgtccatgatttactttgcttctgttacttgccatgatgttactagcagcatcatccatcaatcagtgcatcaagcaagaccctccatattgaccttgcacaagcttccattttcccttcttgcaacagcacacactcactacctcagtgagcacatctcaagctcatagccagtggcatgcatttcattgccaacattcttggcaacctcaggctttctttttgcttcgacaaatatccaatgtctccctttcaccaaaaacccaaaccccagtcctttcaaacattaccacatgcaagtggcctaacacttgcaaacccttcaatggcattacacacattgacagtatagcaagatgaacatttgggcatcatgtgatgccatgtgggcatttgcccacatgtgcacttcggttggcgattcaacccctgtggaacagggtccaaagattaccgatataccaatgaagccccactggacccagttgagcacaacaaccaattggagtctggacaaagagcgccccagaccgtttcttaagcttacaacaacactgttcggtcgttaattaactcccttctattggatagatttggtacctatcccctttgttccaaactcggttgtttggccccaatgggcgaacgcgatacttatttatcccacacacaactggtttccaaaagcatcacagggccactcacacattaaacatcccacgcatgcaattgtgaggccaagaaaccccaaggtttgccacattccaaagggtcttattaatgtgcacacactttgcacacattgctttggccagccaggtgtgaacactgccacgcaatctccctggcgtaatacccttgctggtggctaacaactaaacccccaagccacaagtgacaagcccaccaattttgtgctatactgccagtgtcgccctccgcccagttcttccccaccacacgcagcacaccgtgtcgtcaccaatcccgttgtaccagggcctttctatgtctccccacacaccttgcatcgtgaaccctcacaattcaccggtcacttacacctatagcccccccgtttcacagtggacttcccatagcctccg

SEQ ID NO: 662134 - DNA, 150 bp, Homo sapiens
tgatcagtaacaggctttggtcgatggacctgcaactcagttaggagacaggccatgcctttcaagtgcatgcagctcactgattgcatcctctagtttccgcacagtgcccaccagaagtatgtgcgacaagcctggaagaaggcagac

SEQ ID NO: 662135 - DNA, 131 bp, Homo sapiens
tcctactacagcctacgcggtatgcaggcacggctctactccaccttcacctacattaaccccgctcagcgccccatgtacacccccatcgccgacacctctggggtcccttccatcccgtgccgcagtcg

SEQ ID NO: 662136 - DNA, 110 bp, Homo sapiens
aagatcagtcgtacggaggcatgccactatatagacactgacggtcagcagtggatcaggaacggcatcctaaactcagccttccgctgaagtgcttactcgacgtctgt

SEQ ID NO: 662137 - DNA, 349 bp, Homo sapiens
cccaggagttcgagacctgcctgggcaatatagcgagaccccgttctccaaaaaaaaaaaaaaaaaaaaaaaaaaaaactttttgggccgcttgggccttgaaaaggtttttaaaccctttgtttgggcgcggggcccaattggttatttcacctttggtcaaaggctggtcccaaaggagatccgtgggccaatagattaggggttgggattacctcacaattaaaaacggccggggggcaccgggtgttttgtgaacactccagagggaggttgggggcatacagggttctaccacgggatctcaaggcgaagcaggatactaaattaaacccccgcgtggttggta

SEQ ID NO: 662138 - DNA, 830 bp, Homo sapiens
gggcgagcgccgccattgctcatgctgtcctggaggtgcctgtgacgatggtgccctgccgcctgcctgtctgcctgtgctgggcctgcccaaccctgacctgatgctgttcatgctgatgtctactgtgctgcctatgctctatgatgtgagctgtgtgtgctgtgtgctgtgccctgaatgccttcgctggccttcctgcgactgcgatgctgcctggctcgtttccttgaatcccctgattgaggttgcactgcctattcttgctgctgctgtgctgtgatgatgtgccctggtggtgagatggacgggctgcggctgtgctgtgcgtgcgtgctggcccgatggactcgttcggctccctcgcacgactgctcttcgggcaccttacttccccgagcagtcggacctgtgagccacctgctgttggagcttggcttggcccgccttctatccagtggcgcctaccgcgtgtgccacgcggtgtcggagactgcacttccagccccgcggctgcttgcgaaggtggcccctactggctgcaaggacgctcttgcgccagcagctccgcttcggcgcgagaggtgattgcagtggtcatggaccgtgttcaccagacatcgacatcttcagagaccttgcaagaaatatgcaggaaacagggagttgctgtgtatatccttctggaccaggctctcctctctcaaatttcctggatatgtgcatgatctgaaagttcatccttgaacaggaaacagttactgacagttcggactatcacaggcaaatatctactattgcaaggtcaaggaactaagattattgggaag

SEQ ID NO: 662139 - DNA, 354 bp, Homo sapiens
cgatccccctgttatccggggagctagcattacatggcatcatcgtcctgacatgagtgtgaaccgtaacagtttgctagaggagtcatctgaaacagatactgatgttgcaggtcaatggattgaaataggctgaaaaccctgagagtatggtgttcgcaaaagccaagagaaaaagtatttcattaatgagcgcatatgggacgggcactgtggctctcacctgttatccctgtcactttgggcggctgaggcatgaggatcacgaggtctgatcaacaccatcctggcttacacagtgaaaccctgtctctatctatgaatagcacctcgttcccccggcttggtgaccgg

SEQ ID NO: 662140 - DNA, 117 bp, Homo sapiens
gcaggatcgcaaaagtgactcttctatatctacaatattcaaaaagtttaaaaaataaaacaaccaatgagaacaataaatgttctcttgacccacttccctttcagctacattcca

SEQ ID NO: 662141 - DNA, 138 bp, Homo sapiens
agtccctcttcgtctctaacacgcctattaagcggaggtgttccaggctgccccaaaactccaggcctgccccttcccaatcttgaagaggaggcggctccttcggggctccaggctggcttgccgcgcacatgcatg

SEQ ID NO: 662142 - DNA, 825 bp, Homo sapiens
  misc_feature (509)..(509): n is a, c, g, or t
  misc_feature (554)..(554): n is a, c, g, or t
  misc_feature (596)..(596): n is a, c, g, or t
gagagtctgctcttcttggcaattaacagagtatgtgactggaggcaaatcgcgagggaatcgtctctacttcaaacgcatcgagacacgaccccttccgattcctcgctgcatacacgcatggtgactatcggtcgcgcgagtaactcagtacatgtccttcgggttcatactcgcgtgcatttccttggagacctcgtgcacagtaacgcaagattctgtgactaagggtatccttttggccaatgcatatacaatgatgcatcccagtaatttcgcacagaaatagagtgtccatcgcgaactatgcctgtgaaagcgttatacggtactggctcaagatatccgaatgaacgtgatgtcgtgctacttactacacttagctacatacatactgtgtcattcattattaaaccgtaggcgctgaaggaattgatagtggtgcttgtgaaacgaggagatgaagatctaaatatctttcagggtaagtggggccgagagtaagaagncagggactgattgaaaataagttgttcatgtagagaattgtcaanaagttcaggaaggatggtagtgctcggaagtatactcttttncaatgttgcattcatttgaagtcagagactgataagaggacgcagggagtaagatatgtctaagagagctattgataaagatgagctattaggtctctgtgatggtaaactggtgaacctattggtgcattggagaaatctataatgcaacagtggtttgggggcagaactgggataacgcggtattcaggtgggctaatctttggagaagggcctgtcctataatatg

SEQ ID NO: 662143 - DNA, 707 bp, Homo sapiens
  misc_feature (489)..(490): n is a, c, g, or t
  misc_feature (623)..(623): n is a, c, g, or t
gccacaactttccttggccccggtgtgctgagcaccacgggtggagccccccattagggaccaatgagtgcacggtcctacctagtctgttcctcacctcctggactcaccccgccatgcccgtctccccctggagctgtatcccctccgaggagcccaggagatgtcttcccctgagatgccccccctattaatttccccatatgcttcaaccacccccttgctccaaaaacccataccccacgacttaccgttgataccgacatccccagcgacagcacatggcaaggcccattgctgagggcaccggtgctttattggagaggggatctggcccagggataaggaaggttccccccttcccggaggatgggaaccagtcctggctgcccctgaccagtggggatatgccaggggctcttggcccaggccacaccagtcccaaatgggaagacacccagtccagtccaccaaaagtcgggagcgccnncaccaaacctggctataaggccccggaacccatataggagcctgagaccggtcccctgcacattcatcattaaactataccggatgaggctgtacatgagttaattaccaaagagtcatatttaccaaaatcngtacacacctttgaaaaactccccaaattgtcatctatgtatcaccagttgctagacccaaatattaaaatgggattaaattta

SEQ ID NO: 662144 - DNA, 252 bp, Homo sapiens
tacctactcaagcacttgaatttccctagatgcgctacctcaccctgccagacagacaggtaggcagaaggaggaacacttaacaccttttagactcagtcaagcatcaggttctccacaaagtcctcactcctgggtccccagctggaataccaccttcttccttcgtgctcctgttattccttgtagaggcttctggctcagtacccctaacccacggggtgggaataacaggagcagcagggaaagaca

SEQ ID NO: 662145 - DNA, 604 bp, Homo sapiens
  misc_feature (53)..(53): n is a, c, g, or t
  misc_feature (269)..(269): n is a, c, g, or t
  misc_feature (278)..(278): n is a, c, g, or t
  misc_feature (423)..(423): n is a, c, g, or t
  misc_feature (474)..(474): n is a, c, g, or t
  misc_feature (493)..(493): n is a, c, g, or t
  misc_feature (495)..(495): n is a, c, g, or t
  misc_feature (497)..(497): n is a, c, g, or t
  misc_feature (522)..(522): n is a, c, g, or t
  misc_feature (584)..(584): n is a, c, g, or t
cgatcccaatatatccggcctatccagtccccagtcctatgtgcctaccttcnagtagctctcaagtccattttctgctcccatccctatcaccaccacctacaggtcctcactacctctctctcagactaaagaaacaggtcctaattggtttccctgtttcaaatcttttttcctcctttcctgaagtagaagtatttagttataaaaatcacatgttaatcataaaaatattcaaatgatgcataaatgtaggaagtgaaatcatncataattcnccttcaagagacctctggtaaacaattctaattttgcctccttcttcctcccctcaaaatctttatactgcctccagaacaatcttccaaaacatcagtgcagacttaaaaccctttatggcaatcaatgcagcttcttgataantcaatggtaagaaaaaaggggagaggcctggcctcattaaggaaacttcanaacatcatcggcaatcaangngngggccttgattaatcctgatacaancaatcactgtaaacagattggcaatgaggaaattgattatggctggatagaaatatcctaanaattttgagtttcttaggat

SEQ ID NO: 662146 - DNA, 947 bp, Homo sapiens
  misc_feature (46)..(46): n is a, c, g, or t
  misc_feature (158)..(158): n is a, c, g, or t
  misc_feature (163)..(163): n is a, c, g, or t
  misc_feature (198)..(198): n is a, c, g, or t
  misc_feature (207)..(207): n is a, c, g, or t
  misc_feature (240)..(240): n is a, c, g, or t
  misc_feature (245)..(247): n is a, c, g, or t
  misc_feature (252)..(252): n is a, c, g, or t
  misc_feature (258)..(258): n is a, c, g, or t
  misc_feature (310)..(310): n is a, c, g, or t
  misc_feature (315)..(315): n is a, c, g, or t
  misc_feature (320)..(321): n is a, c, g, or t
  misc_feature (323)..(323): n is a, c, g, or t
  misc_feature (325)..(325): n is a, c, g, or t
  misc_feature (329)..(329): n is a, c, g, or t
  misc_feature (359)..(360): n is a, c, g, or t
  misc_feature (367)..(367): n is a, c, g, or t
  misc_feature (369)..(369): n is a, c, g, or t
  misc_feature (377)..(378): n is a, c, g, or t
  misc_feature (390)..(390): n is a, c, g, or t
  misc_feature (408)..(408): n is a, c, g, or t
  misc_feature (417)..(417): n is a, c, g, or t
  misc_feature (420)..(420): n is a, c, g, or t
  misc_feature (468)..(468): n is a, c, g, or t
  misc_feature (478)..(478): n is a, c, g, or t
  misc_feature (512)..(512): n is a, c, g, or t
  misc_feature (541)..(541): n is a, c, g, or t
  misc_feature (562)..(562): n is a, c, g, or t
  misc_feature (600)..(600): n is a, c, g, or t
  misc_feature (731)..(731): n is a, c, g, or t
aagccagcgctcacccacccggggtctctgtgcattgacctttggntgctgacttggagaaaagcacaaacacgaccagtcccatcctggctcccgtggggcttcttctatctacgcattgtatcgactgcattatttggactaagatgatgactcanttaanggaggagacaaatgctgactgtctaagcaagaatngcccaagcnggcaagaaaaagcacactgcatacataggatanaaaannncagancttctncctgccgatctgcaacatttcattttttttgcctgctaactatcaagaaggnttctnttggnnangntgtntccactgaacaaacaaaatggcagttaatnnttttgtntnttcttttnntgcggcccagtntcctcatccgtcatccangggagagtnttngggggagacatgaggtgcagctcatgcctctgcctatgggtcattttnttcggggatnactgtgatcatgatatcttcgttacccctgcggnccaccatgttcagggtgctttctcttttnatgacgtcgctgacatcattngcggagaccacggactgtccattgatgctgattatgangtcgttttccttgagaccaccagcttctgctggggtatcaggaattacttcaattatatacgctcctgagatcacgtctgggaagtcccggtgccggtccttcagctctttggctttgctggacgtgagtnacatcattcggataccaatatacttcttcttggtgatggcttttcctttggcctgtcggtcatgggactccgtgaggaactttttaatcttatcagatgggattgcaaaggagattccagctgtcactttcaaagtgttaattccaatcacttcaccgtccaggtttactaacgggcctcccgagtttccatagttgatgatggcgtcggtcttgg

SEQ ID NO: 662147 - DNA, 385 bp, Homo sapiens
  misc_feature (123)..(123): n is a, c, g, or t
aggatgagaagcagagagataaggtttcctccaagaactcactggagtcctatgccttcaacatgaaagcaactgtggaagatgagaaacttcaaggcaagatcaatgatgaggacaaacagnaagattcttgacaagtgcaatgaaatcatcagctggctggataagaaccagactgcagagaaggaagaatttgagcatcagcagaaagaactggagaaagtctgcaaccctatcattaccaagctgtaccagagtgcaggtggcatgcctgggggaatgcctggtggcttcccaggtgggaggagctcccccatctggttggttgcttcttcaggccccaccattgaagaggtggattaagtcagtcccaagaaggtgtttg

SEQ ID NO: 662148 - DNA, 1136 bp, Homo sapiens
agcgggcttgcttgggctctgctggcgccggccgcgcaccgctggtctcacaccgagtgctcacaggctcgcagctccgtggcgtccttttcgcttccctggctccctccggccgtgagctgcgccacctgtcccgtggcaagcgacctccgcgactccttcgaaattgaccagggtccttgtggttggtgcgcctgcgggtgcgcatgtcgtggcgttgttctactacctgctgcttcccgatctctggacgtgcaaatgttcatgtcactgcctctcatggcttcacgagctcctgtgtttgacgcgaaaggaccgtcgctggcagagagttcattctagctttgcaatcagatacctaagacagtgatcaatctttggatgacagcaatttgcagtcgaagtgaactgtgccgagttactgaacccacgaccgagaggaagtgctctttttcgataacactgtatcccccgaggaaacggcgaagtttactctttttaaatcctacatagaatacgtttagttggctggatctttccgacgttccttatttccaatatacttgggcttagatggcgacaatgctctcgctgctgtgtctaagtccaaccgtaaaggtgctcttaaatcgctgtgaagccaataagaaagatggcatgtatggtccaaaatggccccaatgtgcccaagaaactaccaggtttgcttaagatcacctcacttgcctccgaattgaagcaaaactgcaacagagaattgggcaattaaatttattcggcaagccattagtccgaaacacgatgagtttgggtacacaaaaagggacattatacatttcttggaacctttcttgcgccaaagcttttcggattaaacacccccccaacgtgcgtataggggtccataccgtggaaaggacataaaaaaggatatgcctagaaaaaggtatacggaaccagaaacaactttgacaaattcgtccacatacacatgtaagtcccctcgattacacagatagagttattatagatagcttgcgacacacgtgtatagtcccttgtttccaaaaaagacttattggcggagttaacatttcactatcccccctttagagcgcacaagttttttacgccgc

SEQ ID NO: 662149 - DNA, 319 bp, Homo sapiens
tttatttgtggtgttggtgggcgggggaaaaaggggagggctggctggagacgactctcttaatttttccccgctacaccagggagataccagggttcgtcatgggcagcaatgactacgatggacaagaagatagaggccctaatcctaattttctgagcaccatggaagccccctggattctagggagaccttgaggagaaagaagactcctgtaaatgcctgacattgaaattcctgcaagtctaggagcatgtgaactcaaaatggaaattaatttgatttaataaaaataaagaagaagaattgttttggcaaa

SEQ ID NO: 662150 - DNA, 388 bp, Homo sapiens
  misc_feature (44)..(44): n is a, c, g, or t
  misc_feature (280)..(280): n is a, c, g, or t
  misc_feature (296)..(296): n is a, c, g, or t
  misc_feature (329)..(329): n is a, c, g, or t
  misc_feature (339)..(339): n is a, c, g, or t
cagtgggaaacaaaactaaaaagacccctttgtgccaagttgantatgccttagacacatcctcctaccgtccccaatgccccctgggcaggaggcagtggagaaccaagccccatggcctcaaaatttccccccagttccccaagtgtttttggggacctaaaaccctggggcttacgtttttttttgcccagggtgggcctggtcctaagggcaggacagggggtttggaaatgtgggccttttataaacccccttgggccttcatcccatggcctgnggatggaaaatgggcngtttttttttatgggtattcagtttgtaaaggnatcctttgtnttcagtaaacagggtgcctttccaggggggggtgcccttttttccccca

SEQ ID NO: 662151 - DNA, 405 bp, Homo sapiens
cccatcgcgagcgggatcaaacagactgatctcggcgtatgcattccggccactactcagctcgcggctcggcgtcatgcactcctacaaaagccctcacccgccgttaaactgcatgcaacccagccgcctctacacattggcgcaactctgcacctacatgtgccaaagtacacagatgctccgctgagcacgtttcgtcgagtccctccctggcgtgagtggaagggcagcctaggtccatgcttgcgaccaacatttcggtcgatgctcggcgcagacgctctgcttgcctgagtggcaggggggcagccgtcttggaggcttcagacttcaatctcacaacctctcaccgcggcatcatctggggcgcagacttcaatctcgaacctctcacagcctcat

SEQ ID NO: 662152 - DNA, 300 bp, Homo sapiens
tggagccatccacccctgacacgcgcacgcgacgccgcggcgcgagccaccccccttcagagggacccaaccagggttcgtcatgggcagcaatgactacgatggacaagaagatagaggccctaatcctaattttctgagcaccatggaagccccctggattctagggagaccttgaggagaaagaagactcctgtaaatgcctgacattgaaattcctgcaagtctaggagcatgtgaactcaaaatggaaattaatttgatttaataaaaataaagaagaagaattgttttggcaaa

SEQ ID NO: 662153 - DNA, 301 bp, Homo sapiens
  misc_feature (26)..(26): n is a, c, g, or t
  misc_feature (31)..(31): n is a, c, g, or t
  misc_feature (62)..(62): n is a, c, g, or t
  misc_feature (69)..(69): n is a, c, g, or t
ttgttcttatcaaatgtagttttatnagaanaatttgacaagaaaacatgacaccttggaangggacanaaccagggttcgtcatgggcagcaatgactacgatggacaagaagatagaggccctaatcctaattttctgagcaccatggaagccccctggattctagggagaccttgaggagaaagaagactcctgtaaatgcctgacattgaaattcctgcaagtctaggagcatgtgaactcaaaatggaaattaatttgatttaataaaaataaagaagaagaattgttttggcaaa

SEQ ID NO: 662154 - DNA, 379 bp, Homo sapiens
ctaggtgctggcctgagcgcggtggcgggcaggcgatgcgcggcggctgctggcgagcgttgacagaagtggcggttgctgacgcctggaaattcccctaaaggtggagcaccacccaacccccctgaggttgacctgcctgaagctctccactcgctcaacccgatgatcatgggcacgtggcgttggtcaacacaactagaaagggcatccgtaccagtggaatgcatattcgagaatatatacagagggagaagaatatagaggcaatcgaggcgatgcgaatgcagagagcgaataacatagagcgaacagtcagaacagggaatgatccttcatcaccaggcgatatacgcaatcgaccaatggaaagaaaaag

SEQ ID NO: 662155 - DNA, 228 bp, Homo sapiens
tgctgagattacaggagtgagccactgtggcaaagcctcaagtggaacctattaataatacataaataacaaaaaaaatcaaggtctcagtcaccctaggtaatctctgcaggtgaggatttgaccaggaaatattgtcagaccacactcttacttgctctgcgacttcacaacgagaactgtgggcgctcaaagaaacccagcggctttattacccctctactatgg

SEQ ID NO: 662156 - DNA, 122 bp, Homo sapiens
gggaacatggaaagttagcagtgatgcctgcagggtctcagcaagttagtgtcaggtaccaggtccatatatgtacacaagcactgatagtgcaatatcatatgcaagtacactggaagacc

SEQ ID NO: 662157 - DNA, 1989 bp, Homo sapiens
  misc_feature (68)..(68): n is a, c, g, or t
  misc_feature (1798)..(1798): n is a, c, g, or t
  misc_feature (1804)..(1804): n is a, c, g, or t
  misc_feature (1817)..(1820): n is a, c, g, or t
  misc_feature (1989)..(1989): n is a, c, g, or t
ggggtcgaagggtcaggggccgaagcaccggccacaacttgaagccggaccggcctcttcgccccagnggctcgcggacgtagatgcatccagcgtgcgactatcccagcgcctaacggcagctggacttcgctcccgggacctccaatgggctaccaccttcgcccgcagaccccagcccccgccacgcccacacgtcgcactaggttggcccgcgcctcactggttacggggtcgacccccctagggggcggagctagagaggccacggccaatgaacgccgggggtaagcgggttagtacgacgagaagagtgacagacaggctccataaccagtagacgtagaaggcagaactgagtggcgggtacggcacccgatggctattcgagctctcgatctcggagactggagcgggccattcagaggcgcggggccgggcccggcggacgcttgttgttgtccggccgggggaggcggaggtcgctcgctcgctcgctcggctcgctgactcgccggagcgctctgtggcggtcggcggcaggtcggtcgcgagagcgggctctgtggaagggggcgaggctatgtcgcggtggcagcccggatgggccggcagggccgggagtaacgggacgtcgccgcggagcttcttcccccggatacagtgcggcccgagcggaggccgcggcgccgccctccgatcttgaagagcccgcgctgcgcggagcccgcccccgcctgcgcaccggcaccgacgcggagcgaccagcccagccagacccggcccggcgcggcctgatctaacccagccaggcaggcaatactagcccctctggagcacggagctccttccccaaagacatgaagctattggagaactcgagctttgaagccatcaactcacagctgactgtggagaccggagatgcccacatcattggcaggattgagagctactcatgtaagatggcaggagacgacaaacacatgttcaagcagttctgccaggagggccagccccacgtgctggaggcactttctccaccccagacttcaggactgagccccagcagactcagcaaaagccaaggcggtgaggaggagggccccctcagtgacaagtgcagccgcaagaccctcttctacctgattgccacgctcaatgagtccttcaggcctgactatgacttcagcacagcccgcagccatgagttcagccgggagcccagccttagctgggtggtgaatgcagtcaactgcagtctgttctcagctgtgcgggaggacttcaaggatctgaaaccacagctgtggaacgcggtggacgaggagatctgcctggctgaatgtgacatctacagctataacccagacttggactcagatcccttcggggaggatggtagcctctggtccttcaactacttcttctacaacaagcggctcaagcgaatcgtcttctttagctgccgttccatcagtggctccacctacacaccctcagaggcaggcaacgagctggacatggagctgggggaggaggaggtggaggaagaaagcagaagcaggggcagtggggccgaggagacctgcacactccagcccaaagggtctgtggccggaggccccacgagcaggccccagcagtcaccggctctggtcttgggccggccccggtgcccacctgtacccccacctcgcccatttggccgcgtgcactgagtgtcactttgctgcagctcgtttctttccaataaaagtttctgtgacttaaaaaaaaaaaaaacaaaaaaaaaaanaaaaancccgggggccctnnnntgcgggggggggaaaaaagggtgattgcacatgggccatcgggtcaaaagggggttcctcgagcccacagttttctgtccacaacgggggaagacttgcgcggggtccccctatataggaggggcggcgataatttgccagaaagcccgggtaacccggattatgaggn

SEQ ID NO: 662158 - DNA, 615 bp, Homo sapiens
ttgtgtgggagtctaagtctctttctaggcctctaaggacttgttttatgaatctgggtgctcctgtattgggtatatgtatatttaggatagttagctcttcttgttgaattgatccctttacctttatgtaatgcccttctttgtcttatttgatctttgttggtttgaagtctgttttgtcagagacttggattccaatccctgccttttatttttgctttccatttgcttggtaaatgttcctatatccgtttattttgtatagtgtgtctttgcatgtgagatgggtctcctgaatacagcccactgatgggtcttgactccttatccagtttgccagtctgtgtcttttaattggagcatttagcccatttacatttaagtttagtattgttatgtgtgaatttgatcctgtcatcatgatgctagctggttattttgcacactagttgatgcagtttcttcatagtgccattggtctttatattttggggtgaattttgcaataacctggtacccagtttttttcccttttccctaattttagaggctttccctttttaggaaccttctttgcccccggccaaggcccctggtgggggtgaccaaaac

SEQ ID NO: 662159 - DNA, 433 bp, Homo sapiens
ccgggatccttgtctgtcccgccatccctcaccccttctaggctgacaaattctgccattatgtttcaaaatagcttgaaatcacacccctagaatttcacatgcataagatgtgtatatattagcaaaatttaatgtcaagtcacaaaatgttaaaaatttatcacttttcaatcttaaaacttgacatgagaggatgctctaggatttagattcaactatttattaaacatctattttattttatttttttgagacggagtcttgctctgtcgttaggctggagtgcagtggcacaatcttggctcactgcagcctccacctcctggattcaagcaattctcctgcttcaacctcttgagtagctgagattgcaggcacctgccaccatgcctgcctaatttttgtattttagtagagacaaagggaaaca

SEQ ID NO: 662160 - DNA, 236 bp, Homo sapiens
  misc_feature (6)..(6): n is a, c, g, or t
gcgtanagtatattgttgaagaggatagctattagaaggattatgcctgcgggtatatgcgtgaggaagtacttgattggccagctatcactggaacgagggttatatcctggggagtactggaataaaagctagcatgtttatttctaggcctactcaggtaaaaaatcagtgcgaagcttagcgctgtgatgagtgtgcctgcaaagatggataagattgaaccgtatagcttg

SEQ ID NO: 662161 - DNA, 905 bp, Homo sapiens
  misc_feature (714)..(714): n is a, c, g, or t
  misc_feature (720)..(720): n is a, c, g, or t
  misc_feature (733)..(736): n is a, c, g, or t
  misc_feature (905)..(905): n is a, c, g, or t
cgagctggacatggagctcgttgcctgcctctgagggtgtgtaggtggagccactgatggaacggcaacgagctggacatggagctgggggaggaggaggtggaggaagaaagcagaagcaggggcagtggggccgaggagaccagcaccatggaggaggacagggtcccagtgatctgtatttgatgaggaggagccgaggccccagcttcatccagcttcaaccaatgcctggacctgtccacctgagaggcccctggggcctccccagctgctggccagaccctggcgctgccacagtcctggcactgcccaaggccatacctgcctagccctttggctccatcctgtggatgcccactcacccctcagactcctgctgcccatgctgtggccggacttgtcagcagggggcctggtgggaggagcgactgccctgcccaaatgaactgccacagcagggacagctggaccgcagagtttatttttgtatttctactgggcctgcacactccagcccaaagggtctgtggccggaggccccacgagcaggccccagcagtcaccggctctggtcttgggccggccccggtgcccacctgtacccccacctcgcccatttggccgcgtgcactgagtgtcactttgctgcagctcgtttctttccaataaaagtttctgtgacttaaaaaaaaaaaaaacaaaaaaaaaaanaaaaancccgggggccctnnnntgcgggggggggaaaaaagggtgattgcacatgggccatcgggtcaaaagggggttcctcgagcccacagttttctgtccacaacgggggaagacttgcgcggggtccccctatataggaggggcggcgataatttgccagaaagcccgggtaacccggattatgaggn

SEQ ID NO: 662162 - DNA, 2339 bp, Homo sapiens
  misc_feature (68)..(68): n is a, c, g, or t
  misc_feature (2148)..(2148): n is a, c, g, or t
  misc_feature (2154)..(2154): n is a, c, g, or t
  misc_feature (2167)..(2170): n is a, c, g, or t
  misc_feature (2339)..(2339): n is a, c, g, or t
ggggtcgaagggtcaggggccgaagcaccggccacaacttgaagccggaccggcctcttcgccccagnggctcgcggacgtagatgcatccagcgtgcgactatcccagcgcctaacggcagctggacttcgctcccgggacctccaatgggctaccaccttcgcccgcagaccccagcccccgccacgcccacacgtcgcactaggttggcccgcgcctcactggttacggggtcgacccccctagggggcggagctagagaggccacggccaatgaacgccgggggtaagcgggttagtacgacgagaagagtgacagacaggctccataaccagtagacgtagaaggcagaactgagtggcgggtacggcacccgatggctattcgagctctcgatctcggagactggagcgggccattcagaggcgcggggccgggcccggcggacgcttgttgttgtccggccgggggaggcggaggtcgctcgctcgctcgctcggctcgctgactcgccggagcgctctgtggcggtcggcggcaggtcggtcgcgagagcgggctctgtggaagggggcgaggctatgtcgcggtggcagcccggatgggccggcagggccgggagtaacgggacgtcgccgcggagcttcttcccccggatacagtgcggcccgagcggaggccgcggcgccgccctccgatcttgaagagcccgcgctgcgcggagcccgcccccgcctgcgcaccggcaccgacgcggagcgaccagcccagccagacccggcccggcgcggcctgatctaacccagccaggcaggcaatactagcccctctggagcacggagctccttccccaaagacatgaagctattggagaactcgagctttgaagccatcaactcacagctgactgtggagaccggagatgcccacatcattggcaggattgagagctactcatgtaagatggcaggagacgacaaacacatgttcaagcagttctgccaggagggccagccccacgtgctggaggcactttctccaccccagacttcaggactgagccccagcagactcagcaaaagccaaggcggtgaggaggagggccccctcagtgacaagtgcagccgcaagaccctcttctacctgattgccacgctcaatgagtccttcaggcctgactatgacttcagcacagcccgcagccatgagttcagccgggagcccagccttagctgggtggtgaatgcagtcaactgcagtctgttctcagctgtgcgggaggacttcaaggatctgaaaccacagctgtggaacgcggtggacgaggagatctgcctggctgaatgtgacatctacagctataacccagacttggactcagatcccttcggggaggatggtagcctctggtccttcaactacttcttctacaacaagcggctcaagcgaatcgtcttctttagctgccgttccatcagtggctccactcacccctcagactcctgctgcccatgctgtggccggacttgtcagcagggggcctggtgggaggagcaacgagctggacatggagctgggggaggaggaggtggaggaagaaagcagaagcaggggcagtggggccgaggagaccagcaccatggaggaggacagggtcccagtgatctgtatttgatgaggaggagccgaggccccagcttcatccagcttcaaccaatgcctggacctgtccacctgagaggcccctggggcctccccagctgctggccagaccctggcgctgccacagtcctggcactgcccaaggccatacctgcctagccctttggctccatcctgtggatgcccactcacccctcagactcctgctgcccaaatgaactgccacagcagggacagctggaccgcagagtttatttttgtatttctactgggcctgcacactccagcccaaagggtctgtggccggaggccccacgagcaggccccagcagtcaccggctctggtcttgggccggccccggtgcccacctgtacccccacctcgcccatttggccgcgtgcactgagtgtcactttgctgcagctcgtttctttccaataaaagtttctgtgacttaaaaaaaaaaaaaacaaaaaaaaaaanaaaaancccgggggccctnnnntgcgggggggggaaaaaagggtgattgcacatgggccatcgggtcaaaagggggttcctcgagcccacagttttctgtccacaacgggggaagacttgcgcggggtccccctatataggaggggcggcgataatttgccagaaagcccgggtaacccggattatgaggn

SEQ ID NO: 662163 - DNA, 1424 bp, Homo sapiens
tccacgcttaatgcgagcttttatttttctggtataaaacccctatgtggtacccacagcgggagcctgagtccgctgcacggagaacctcgtgggtggtgggtctctttgacgaagggtggctcaggtaaacctcctgtgtatagggaaacttggggtgaattacagctcttcctttccagaaggtctcggggggctcaggtataccgtgataggctctataaaaatgtggcatctcaaagggtggccttggggaaagttgtgcccagggtgtggcagtgtgtcagccccgggcttgagggtgttagcagttcactcgattaccagccattcagtgagcgagcttctataggccacaggtgtgcgcggagaacacgaaagtgcccgagtgtgccccccgtgggtgtgccagggaattgaagaggcgtatacacagcgccacagaaagcccgccaggggggcccgtgttcacacctttgccagagggggaaccaggtggtgggcgcttgcgccgagacctcttggtgtccccccccagggatacgcctcctgtgcgcgcaccggggggggcaccagatgtgagacaacgcttgtggcgccccagagggatatgacgggggccccccaaccgaggtatatgcgccggtgtgagcccaaccctatcactttgtgggacgacacctttataagcaccccgagaaccgcgatgcggtggcgccaatgtggtgtacgcttccccccagaagtgagccaaagccaaaatgtgccctgttggaacaccccgttgggtatgccagccgtgggccccgggacaccgggggtctcgatgcaatatcgtgcgccaccgtgggcccaatataatctcctttcagaaaaacaagcccctcagatcccctgcgggaagaaagagaggtgcccccccccaacggggaaacgggaacacacctccacaagtggagcccccaccacgggaaaatgcccccttaacagggcggggccacgcgggcacaacaggaggcacacacagacaccgccccccccgaggggggacacttgggcagcgccgctcacaatggatcctgtggaaccccaaagagcgcggccccaaattcgttggagctgaaccggcggcaaattacgcactacattaaatcccactcgggacattgggcctccccggaaaagcatccgggggggccacggggggcccacggagcccccggctcacaaggtgccgtgaacccccgggccccggggaatgaccacgcggcgcgaacaccctacgggggaaacaacagcggggtgtaccccatcccagggggacaacacgggcaccacgaggacccccgggaccacgggacctcactacaatgagcgacgaggcgtggatcacccgaccgaacagcacaaacgagacgacgcga

SEQ ID NO: 662164 - DNA, 865 bp, Homo sapiens
ggaagtgtccttggcacagattcagttccatttgcaggttgtgttcagtgtgtcctgtcatcatgactgtaccactacgccagtccctgggaagtggacctggcaccttccttcaccctcacatcaacaggaggacagttggagcctgagttcaagtttacctcaaataaaagcatgaatggttagtcaccagtatccaacttcagaccaaagtggccaaatattaaacagttagttttacagttggatttcaaaataatgtaaagtatgtgtcttgctgaaatatgagtcagctaaactcttatagtgatgattgtggaaccattttataacaatttttttgggtttggaaatatttttctagatttggagcttcaagaaatgacaaccaatgaaaacaggacacgaccaactaaccaatcaaattttagcgccccgccccccgcccgccaaggaatgcgtggttatgtggcatctccctggattctgtggcaggattttggtatatactagggcagtacatatgtgtgggagtacactggataggtgggaagtaattatatttagatttaccagaagtttctttcagtggaaataaacaatgcagtaatgttagatgcatgctgtagggacattagcaataaatgggtttggtgcagtacatgagaataggtgcaattagtagtcaatttgaccatcttgtattggatttctttcctcaaaaaaaaaaaagaaaaaaaaaaaaatttgggggcgcgccgagagtttaaaattctgggggggccaggaagaagggacggtcagaacggggggggggtgttccaaaaggggggggaggaacacagtggttgtaagggaacaagga

SEQ ID NO: 662165 - DNA, 1800 bp, Homo sapiens
  misc_feature (68)..(68): n is a, c, g, or t
  misc_feature (1609)..(1609): n is a, c, g, or t
  misc_feature (1615)..(1615): n is a, c, g, or t
  misc_feature (1628)..(1631): n is a, c, g, or t
  misc_feature (1800)..(1800): n is a, c, g, or t
ggggtcgaagggtcaggggccgaagcaccggccacaacttgaagccggaccggcctcttcgccccagnggctcgcggacgtagatgcatccagcgtgcgactatcccagcgcctaacggcagctggacttcgctcccgggacctccaatgggctaccaccttcgcccgcagaccccagcccccgccacgcccacacgtcgcactaggttggcccgcgcctcactggttacggggtcgacccccctagggggcggagctagagaggccacggccaatgaacgccgggggtaagcgggttagtacgacgagaagagtgacagacaggctccataaccagtagacgtagaaggcagaactgagtggcgggtacggcacccgatggctattcgagctctcgatctcggagactggagcgggccattcagaggcgcggggccgggcccggcggacgcttgttgttgtccggccgggggaggcggaggtcgctcgctcgctcgctcggctcgctgactcgccggagcgctctgtggcggtcggcggcaggtcggtcgcgagagcgggctctgtggaagggggcgaggctatgtcgcggtggcagcccggatgggccggcagggccgggagtaacgggacgtcgccgcggagcttcttcccccggatacagtgcggcccgagcggaggccgcggcgccgccctccgatcttgaagagcccgcgctgcgcggagcccgcccccgcctgcgcaccggcaccgacgcggagcgaccagcccagccagacccggcccggcgcggcctgatctaacccagccaggcaggcaatactagcccctctggagcacggagctccttccccaaagacatgaagctattggagaactcgagctttgaagccatcaactcacagctgactgtggagaccggagatgcccacatcattggcaggattgagagctactcatgtaagatggcaggagacgacaaacacatgttcaagcagttctgccaggagggccagccccacgtgctggaggcactttctccaccccagacttcaggactgagccccagcagactcagcaaaagccaaggcggtgaggaggagggccccctcagtgacaagtgcagccgcaagaccctcttctacctgattgccacgctcaatgagtccttcaggcctgactatgacttcagcacagcccgcagccatgagttcagccgggagcccagccttagctgggtggtgaatgcagtcaactgcagtctgttctcagctgtgcgggaggacttcaaggatctgaaaccacagctgtggaacgcggtggacgaggagatctgcctggctgaatgtgacatctacacagctggaccgcagagtttatttttgtatttctactgggcctgcacactccagcccaaagggtctgtggccggaggccccacgagcaggccccagcagtcaccggctctggtcttgggccggccccggtgcccacctgtacccccacctcgcccatttggccgcgtgcactgagtgtcactttgctgcagctcgtttctttccaataaaagtttctgtgacttaaaaaaaaaaaaaacaaaaaaaaaaanaaaaancccgggggccctnnnntgcgggggggggaaaaaagggtgattgcacatgggccatcgggtcaaaagggggttcctcgagcccacagttttctgtccacaacgggggaagacttgcgcggggtccccctatataggaggggcggcgataatttgccagaaagcccgggtaacccggattatgaggn

SEQ ID NO: 662166 - DNA, 690 bp, Homo sapiens
cgagcagcgcgctactgcagctttcttcctgccttaggaaggtggtggccaggtaattgaggatggcccctaagcaagtgcggaatggagccggggggcgtagatgccagcctcactttgcatggtctccagaaccgctcccacggcaagataaagctgcgactagagaatcttctagccttgtacttcaacacccaggagaatagcgccaggcgccgcggggcatcttctctggagaagaactattgtatctgctctctgttctaccaatagcgtttacagaatattaaactggctttgttagctgcagacaagatccttgttccagcatggacatcactggcgagttctctgtgaacgttttcagcatcaccattggtttatcagatgtcattgagttacttgtcgagccattgaggaacatgtgaccgatgagaagaactgcacggagttgtacatctttattctccttgagatcttgtggcaaggcaatgttagcagaggaattcgttgcactcatgtctgtaggggcaagagcatagctgtctcagcttgctgatcttggattcctagacttggccctaagcacttctgtctgctgtagcagatgtgagactttactcattaatgaagcaactagaagaagtcaggaagtggcaagatgggtgttgtttatgccagttgtgctcc

SEQ ID NO: 662167 - DNA, 2000 bp, Homo sapiens
  misc_feature (68)..(68): n is a, c, g, or t
  misc_feature (1239)..(1239): n is a, c, g, or t
ggggtcgaagggtcaggggccgaagcaccggccacaacttgaagccggaccggcctcttcgccccagnggctcgcggacgtagatgcatccagcgtgcgactatcccagcgcctaacggcagctggacttcgctcccgggacctccaatgggctaccaccttcgcccgcagaccccagcccccgccacgcccacacgtcgcactaggttggcccgcgcctcactggttacggggtcgacccccctagggggcggagctagagaggccacggccaatgaacgccgggggtaagcgggttagtacgacgagaagagtgacagacaggctccataaccagtagacgtagaaggcagaactgagtggcgggtacggcacccgatggctattcgagctctcgatctcggagactggagcgggccattcagaggcgcggggccgggcccggcggacgcttgttgttgtccggccgggggaggcggaggtcgctcgctcgctcgctcggctcgctgactcgccggagcgctctgtggcggtcggcggcaggtcggtcgcgagagcgggctctgtggaagggggcgaggctatgtcgcggtggcagcccggatgggccggcagggccgggagtaacgggacgtcgccgcggagcttcttcccccggatacagtgcggcccgagcggaggccgcggcgccgccctccgatcttgaagagcccgcgctgcgcggagcccgcccccgcctgcgcaccggcaccgacgcggagcgaccagcccagccagacccggcccggcgcggcctgatctaacccagccaggcaggcaatactagcccctctggagcacggagctccttccccaaagacatgaagctattggagaactcgagctttgaagccatcaactcacagctgactgtggagaccggagatgcccacatcattggcaggattgagagctactcatgtaagatggcaggagacgacaaacacatgttcaagcagttctgccaggagggccagccccacgtgctggaggcactttctccaccccagacttcaggactgagccccagcagactcagcaaaagccaaggcggtgaggaggagggccccctcagtgacaagtgcagccgcaagaccctcttctacctgattgccacgctcaatgagtccttcaggcctgactatgacttcagcacagcccgcagccatgagttcagccgggagcccagccttagctggntgagggtcaggtggagggaagggacccacagccaccccactgtccttccccactttgggtagccctggctcctgtcaccctgactgtgacctgccctaggtggtgaatgcagtcaactgcagtctgttctcagctgtgcgggaggacttcaaggatctgaaaccacagctgtggaacgcggtggacgaggagatctgcctggctgaatgtgacatctacaggtgggccggcatccctgcagatggcctccaggcctccaggtttgtggggcacttggcgcctcacaccacctgtcaccctatactccccagctataacccagacttggactcagatcccttcggggaggatggtagcctctggtccttcaactacttcttctacaacaagcggctcaagcgaatcgtcttctttagctgccgttccatcagtggctccacccccccgctcctccccaactcccggttgggcgatacaactccccagtgtgcatctcaccagtttgcctcctgaacatctcctggggcagagaggctgggcagggtcctgaactgttcctgctcctcagtgatcactaaaacctcaaaggaggaagacctggattgactggaagccgcgcgccgaaagccaacggctggcagacacctgcaggcagggaagcggaacgaccaaccaggaacgcgccctcgggcggacaacgggaccacgatgttagcagacagaagggagagcaggtccacgatgcacacgaggacccagtt

SEQ ID NO: 662168 - DNA, 1425 bp, Homo sapiens
  misc_feature (68)..(68): n is a, c, g, or t
ggggtcgaagggtcaggggccgaagcaccggccacaacttgaagccggaccggcctcttcgccccagnggctcgcggacgtagatgcatccagcgtgcgactatcccagcgcctaacggcagctggacttcgctcccgggacctccaatgggctaccaccttcgcccgcagaccccagcccccgccacgcccacacgtcgcactaggttggcccgcgcctcactggttacggggtcgacccccctagggggcggagctagagaggccacggccaatgaacgccgggggtaagcgggttagtacgacgagaagagtgacagacaggctccataaccagtagacgtagaaggcagaactgagtggcgggtacggcacccgatggctattcgagctctcgatctcggagactggagcgggccattcagaggcgcggggccgggcccggcggacgcttgttgttgtccggccgggggaggcggaggtcgctcgctcgctcgctcggctcgctgactcgccggagcgctctgtggcggtcggcggcaggtcggtcgcgagagcgggctctgtggaagggggcgaggctatgtcgcggtggcagcccggatgggccggcagggccgggagtaacgggacgtcgccgcggagcttcttcccccggatacagtgcggcccgagcggaggccgcggcgccgccctccgatcttgaagagcccgcgctgcgcggagcccgcccccgcctgcgcaccggcaccgacgcggagcgaccagcccagccagacccggcccggcgcggcctgatctaacccagccaggcaggcaatactagcccctctggagcacggagctccttccccaaagacatgaagctattggagaactcgagctttgaagccatcaactcacagctgactgtggagaccggagatgcccacatcattggcaggattgagagctactcatgtaagatggcaggagacgacaaacacatgttcaagcagttctgccaggagggccagccccacgtgctggaggcactttctccaccccagacttcaggactgagccccagcagactcagcaaaagccaaggcggtgaggaggagggccccctcagtgacaagtgcagccgcaagaccctcttctacctgattgccacgctcaatgagtccttcaggcctgactatgacttcagcacagcccgagcatgagtcagcggagccgcttactggtgggaatgccgcactgcgctgtctcgtgtgcggagggctccggtccaacccgtgtgaccgtggcaagaacgccggggagtgactcagtaaccctggcccacccgggggggaccgggcctcctttacaaggcgaaatttttggccggccccccggaacgatggggggggcaagggccaaacaagctggccacccacc

SEQ ID NO: 662169 - DNA, 663 bp, Homo sapiens
gttgtccaaacgccaacacactttatttcccttgggacgcatttgcaggcttctgccacacctgaacccacggccgggcaccaacgctaccataactcccaagaggtaaatcctgggggctggggagctgcaatttcccttttttcctgaaaattaaaagaactgagactaattgaaaaaacctcactgccattcctaactcagaagtctcagcaggtctgaaatggggctgggggaagttcccattttgggaaggcgtttattctctgcggctacagggattgcctgctttaaaaatccccttacgctgattaactaaaaagtcccttcaaagtcaaaaaccaacctttcatgggccaaaaaagggggatttctggtttccggaacaggaggcttgcaaacctaaaaatgtttttccttccaaaacctaactaacctgaagtttaaaacctcagacgggagaattttatattttggaaaagctggctgcaatttgtttttgggacacaagggaggcaagcccttgtgggagagaaccaatgggcccctccgccttttgtttgtggaagccaccccaccaaccccaggaagaaaaatcccccaagcccttggagaacatctttctttaaaaagagaacccccgcgggtttcgcgaaaaaaaaa

SEQ ID NO: 662170 - DNA, 112 bp, Homo sapiens
ttgaaaaagaaaaaaacaacacagcatgtattatcttactgttgtaggtcagaagtctgatgtaagttccactgggcaataatcaggttgctggcaaagccacattcctttt

SEQ ID NO: 662171 - DNA, 206 bp, Homo sapiens
atctggttttttttgagcacggatcttgcctattgcccaggccgagtgatgtgggattcacgctgtggcccacctatgcctggccggaatatcctatatggtaaaattaaaggctgtattttcactgtcttgaagacgtttagatctaattggattttccattttctcctgcagtcaattgggtcacatcctttcaagccgacaat

SEQ ID NO: 662172 - DNA, 945 bp, Homo sapiens
tagctaaacacaacacaccttatctattactcaccttcttaaaactgtttttgctacttttgaagctgtcttatttataagatcagaggtctgacaccttcttcttgcttagcacagctctctactctcatccattctattctctcttctctagcacttactccatctctcctcactcccgtttccgccctctctgctccactctccctggctcggcacctccccactaccctcccaccccacctacctaccactactcctcccaccctctgctctctcctctctccctcctttcctccctctcgctgcagccacccggcgacacccgctccctgcttcccccggcaccccgccccttgctcccccctctccctcccctccccgcctccgcccctccctgccctcggccctccctccgcacccgccccccccccccgcctccctccccccccccagtctccgccctgccctctctccctgctccccgcgcccgcccctcctcccccccctccccccccatgccgccctcgcccgcctcccccctcccatgctccctgccccccccccctccccctgccgccgccccccccctcccctcccccctccccccaccttactcctgcctcatcctcctcccccccccctgccccctccgccccctccccccccccgctcacttgccatgctgccgcgccactgcctctcctcgcctctcccgccgcccctcctttctcgctcgctccacggctgcgctcagaccttccccgcccgctctgcgcgccatgcggccctctcggccccccctcctctcacctcgccccccccctccccgcacctcctccgctccgctcgccccctcctcctccccccgcgcccccctccgcgtccccccctcaccgccccccccccccccccccccccccccccctccctcccctccccctg

SEQ ID NO: 662173 - DNA, 147 bp, Homo sapiens
ggtgagttcgtaggtgacgggcacgatataactttctgagtgacgtctatgttacttgtcttaagtttagtacggatgtgctgagcttgccgcatgcccggtactcggagtgctctctccctggggacagatacggtaaaaccgcag

SEQ ID NO: 662174 - DNA, 201 bp, Homo sapiens
cccacatgggcagattgctgaaggatggcttcctggccttccaaactagccgttacaaactccattactacgagacgcccactgggatcaatatttgtcatgaatactgagcccacatgggcagattgctcgtattgaattcaagtataatattaagtatgcatggacctctagagctaatagcaagtctgcccatgtggg

SEQ ID NO: 662175 - DNA, 349 bp, Homo sapiens
actgctgcccacgttacgtcacgccgcatccggagcacggcaccgagggagccgccacacggtcacctgcaaggacgttttgtgcccctctaaaggattcgtttttttcatccccaattttcagagaccctttggggttccacacttcacgtggactgaggtagaccctgcatgaagatgaaattatagggagtttttcctttcttccccccttttaggagaggaaagggagtcattaacaactagggggttgggttgtattcctagttatggggtagagttttggatggggaggaatatggcaagtgtattattattgtaaccacatgcaaataaaaagaatgggacc

SEQ ID NO: 662176 - DNA, 366 bp, Homo sapiens
cggcacgagggattggcccccccaaaactcatgtggtagatcaattgccaatgtaatagtgttgggagatgtaagaaatacgaggtaattaggttgccaagatggattaacatatttctcgtgacactgagactgggttctcctcgcgaatggctagttcccaagagagtgagttgttataaaacattgctgcctcatatattttgcgctgtgtgtttgcacaaatgcggtccccttgtgtttctaaacgatgtattgatgcagcatgaggcattaatgagaacccaccagatacagctgcgtgatcttgaatttccctactcaacggaacctaagtgataaatgaaaactatttttaatatgtta

SEQ ID NO: 662177 - DNA, 443 bp, Homo sapiens
gtgatggggcacatattttcttcttggccttgggtgtgtgcaattgcccaaaaaggcaaaaaataattcccccaatggctcgcacgtgttgaaagatttcgcacggggcaattccgtcctcatgatgtggaaaagctaaatctatcccacctgaatgatatccagtggatttccaaatcaccatcatagcgagggcagagcactcgatgtgccagccgggcctccggggtccccgagggaagaggcccagaaacacctcggggggtgagggccgccttccacgagggcgaagtcatgggcatgaggcttgtcaaagtccgcgggctctccgatggcaccaggacaccacgcggaccaatttggccatatttgtctcccttagatttcagatcgaagtagacttggccttgggccgtggaataagcgtgcccaggagaaatgat

SEQ ID NO: 662178 - DNA, 132 bp, Homo sapiens
aaaaaagaatgtaacttgtaatagtagtagaatgtaattgtaatagaaggtggttgtaatagtctctgggaagaaatggagggaagcccattaacaggaattagcatgtttctggtttgtggaggtagcact

SEQ ID NO: 662179 - DNA, 200 bp, Homo sapiens
cgactccaaagccattgaatgactggataaaattaaccggtgtgtttgctcctcgtccatccaccgttccccacaagttgagagagtgtctccccctcatcatttttcctgaggaccagtcttaagtatgccctacaggagattaagtaaagaagttttcattccagcgtttcattaaaatcgattcgcaagctccctct

SEQ ID NO: 662180 - DNA, 362 bp, Homo sapiens
  misc_feature (158)..(158): n is a, c, g, or t
tggaaaaagtcatggaggccatggggttggtttgaaaccagcttgggggggttcgattccttctcctttttggtctagaacttttatgtattacgggtttctctcgaatgtggtggtggtaggggtggggggcactccattattagctcacctccagngtttatggaggggttctctcatactatttaggactttttcgctttcgaagcgaaggacttctcaaactcatgtgaaaatttatttaattattatacgtggcgtgtttagagaaaatgtgaatgtgagccctaacagattgtattagagagtgtttccacgtggtgggtgtattgcattcggggtatagtctccgagttaaccgt

SEQ ID NO: 662181 - DNA, 505 bp, Homo sapiens
  misc_feature (435)..(435): n is a, c, g, or t
  misc_feature (490)..(490): n is a, c, g, or t
agactgcatagggctcgggggtgtccatgggcatggttaagagagagaaggaaaacaagaagaagggaggtcaggggtttggcttatttcagttcttgtcccattgaattctagggaccctgcctcctcccggacatgagccattgcgcgcgtttccctgtcttgtgactcacccacctgtgattcaggctccttgctttacaccaagtttgagcataaaacctgctaatatttctccgtcaaaaattaaccccgagtaacctcttctttcctctctgagtcacccacatccttaaaactgcccaggataaatcacaagttcctgcataggttgttgtgtgaactgaaagtggttaatatgtatggaaagtgcttaaaacacagaactttaaaacacatgatcttgattaagtacgatcattaccctcaatgttngattttaagcaaaccatattaatcctgggccaaactaccatgacctggagccttnggacttgcacagccg

SEQ ID NO: 662182 - DNA, 692 bp, Homo sapiens
tggctgggcggctgcggttcctggtgctgctcggtgcgcggccagctttcggaacggaacgctcgtgcgtcgctgggcccctgcccgtgaaagttttgccgtgtgagtcgctgacctcttgtgccctgctgctggccctgtgcatgaagctggctgtttgatgtgatgcttgcatgcctgcctgctgttgcctgcatgtcctgtctgacctgccttgccttgagtgatgtgatgcttgcaggcactcgctggtcgccactgccggattgacgtacttgcaatacttgtgtgctgcctccactgactgaagctcagacgttcataagctctgtcgttttgttgctgatgtgactgtggtgctgcctgtgctgccagcacagcacacccggtggctacgctaggccttgcaaggcgacaatctatcattatagctctacacagctaacgacgttggccctttataacccatgactcagttagttctggaacaaaattgttgagacattgatagagataacgacatgattgcacacgcgtacaagacatcaattcagtacgatgccccgaattattagaacaacttgagaagtgtacgcccagcatgcgcttgcactgtcacaaacgacgcattacttcagctcgtgcgcgcgaacactcccgttgcttcgtcgacagcgcctcacttggtgacg

SEQ ID NO: 662183 - DNA, 224 bp, Homo sapiens
tgtctgtagtgcgatgtactgggggtgtatacgccacatctggcctgctgtcagacaccgggatggagggcgttgaatgagtccggggccccggcgaagttggggtactggtggatttattcacagacaaccgaggctttgtaggattgaactccttagcattagggttcaacgttgataactttacttgttcagacaacagggccctcatctttgtcttctcc

SEQ ID NO: 662184 - DNA, 348 bp, Homo sapiens
cagataaagtttttattttcctctgaagggaaagggctcttttcctgctgtttcaaaaataaaagaacacattagatgttactgtgtgaagaataatgccttgtatggtgttgatacgtgtgtgaagtattcttattttatttgtctgacaaactcttgtgtacctaaaaggaaagaaggaaagctttgtccgaaaatggtacccccgtatgtggcatggcagaacgaaaaggagacctagcgaagatcggtagatgccataacaacctggaaaataaatcacccggaagagtaacgaaaaaaagcgtgtacaaattaaacacaataaagcgttggaaataataaaaa

SEQ ID NO: 662185 - DNA, 103 bp, Homo sapiens
tcagtccggagtatcccaggacggtttcttttttccattaaattcctcccagtatgaaaggacaaatccataaggccaaacttttaaaagggccttccccgta

SEQ ID NO: 662186 - DNA, 1225 bp, Homo sapiens
gagcgggaccggggcgtaagggcaccgcccaatgggagtgtgtggatagtgaggggtccacacgcttggagccgagggtctgtgtcaagagcggccaggggctgcgggagataagacgaaacgggctgccgtggggtgtgtgtaggcttcgagatgacatggtgatcacggagagactgacagcacgaaacagtggattaacgacttcctgagcgatagctggcacggccttccccaggatggcagaggtggtgtgctgatgtggccgagattgccacacgagaggagtgtcagcatggggcaagtcggaggatgtcaacaccatatgtcgcccacaagatgattggggattgtcaacaggaaggtgactgagattgacacgctggggaggcccctatgcctcaatcccatcatgcgttctcatcattaaacatgttcgatgtagctctgaaggtgtgggccagctcttctattaactaccacggtggaaagaaagtcccgtcctctaccacaccagcgagcaggcaaacattgcatttgcattcgccttgagcgacgtgacgcgacgcgcacatagaccaagagcgaatgaaactgtccgggacttgggaacgccgggagaagcatgcgctggcacaggagggtgtcatgaaaggggcgacccactatccaagggtgatgagctggaacacggcaaatgaacaggacttcaataggagacatcaaccccatggagtggaaagcgtcacatgcggcacaccaacgacaccggcaaagtgatacacaacacgcataccagaacggagggtcgttgccagaaccccagagagcgccataccacacaggtgtgcctggtgagaacatcgcccacggaagacggcgtacaccagcgtccgaaccccgcacgcatggaggcaagacacgagacccatctgacaaacagcaaaaagcaaacacatcgaaccgggcataggaggaaggacaggaagggccaacaagacgaccacacggacccaaatagaacaataccgcacaagggagaaaccacgacaccaaaacgggccgctgacaccccaggagaacagagcgcagaaaatggcaccccaagagcaaaaagaccagaaacaggaggacaaggcaccacacggggcggaccagcgagcggacaaccgaggaacaaacaaagacacaacaacaacgagcagaagaaggcgaaacaaagaaa

SEQ ID NO: 662187 - DNA, 167 bp, Homo sapiens
tgattgtcaatctgcagaaggacattgggattgtcgactgtggctgtgagaatcttgtcctcaggtcctcaatgtcttgaagtagggactgtagtctttgatctcagcagggcgctggctctggtaccagtcacggatcttcacttccagacgagacctggctggcg

SEQ ID NO: 662188 - DNA, 222 bp, Homo sapiens
  misc_feature (154)..(154): n is a, c, g, or t
  misc_feature (159)..(159): n is a, c, g, or t
  misc_feature (163)..(165): n is a, c, g, or t
tgctttgtccctgtgcaccaggcagcctgcaccagccaccagcctccgacccggattcaggcagccccttcaagccactggctcccttcagcagccccacttccacaagctctcaagaaaaagcagacggattactgatgtgaattggacacgntttcntatnnntgctttctccttttttccatccctttccctaccatcaaaagcatacctgctctaatt

SEQ ID NO: 662189 - DNA, 1048 bp, Homo sapiens
agcggcatagcatttgtatgcactttatactttgcagaggtgagttaaattattaatcatttgcacatgaaagctgtggggcatatcttttttctttttttaggtgaggaagttatgctacgactctaattaattccacgattctattgaaagttgaggaatgctgttttacccctgcgcattataaagaaaactagaattactttagtcttcagattttctccctgttaattctgtatcttgagaggtttctttttttttatattttacttccattttctgtgcaaagtgcatcctttggcatttaaaatggtcccaaggtaaagccctgttggcaaaaccgtggtactttaccttaccagaggaaattaccttagaataagatgtgagaccccagttccccttaaagacaaagaccttgaaattcacacttgggagtcagttatacctattcaatcacagtcctgggatataagaaaggcccttagactctctgtgttaaccctgtaggcttttaatataaatagggtggcattggctcatggcattatacccttctgggcctggaattagacggagtctcaatttcaatgcgtatcttgtgaccacttccagccacagggtacataacttcgagacttaatttgcaaccaggtcacatttaaggctgaaatggggctacgctgaaaatctccggtgtgattgaaaaccccgaggggcggtatttccaagtttctcaaatatattggccagggtgctaacttattaagtaatattcgcgatattgtgcctgaaaattttaagacctatgcgcatttttccctttttaaaggggcccgttatagttgctaagtacatacagtggcaaagtttgggaaatacgtagtgtgtgaaaaaattttctctgtgaaaagaccacgccctagatttacaattagagcacaccgtataattattcccccaatttatacgggtgatcataagcatgtatatacatgtcctggaattaacaaaccattgtgtgtgtactggcacatttagaaacgcg

SEQ ID NO: 662190 - DNA, 410 bp, Homo sapiens
ggagcgggaggctgcagtgagccataattgcaacactgcactccagtctgggtgacggagtgagaccttgtctcagaatttttaaaaaaagagttttagggctgggcgcagtggctcaagcctgtaaccccggcactttcggaggccgaggtgggcagatagcgaggtcgagagttcaagaccagcctgggcaacatggtgaatgaaaccccatgtctactaaaaatacaaaaattagccgggcatggtggcgcgcgcctgtggtcccagctactcaggaggctgaggcaggagaatcacttgaacccgggagacagaggttgcagtgagctgagatagtgccactgtactccagcctggatgacagagcgagactccatctcaaaaaaaaaaagtttaaaaaagacgaa

SEQ ID NO: 662191 - DNA, 937 bp, Homo sapiens
agtaaggtcagctaaataagctatcgggcccataccccgaaaatgtgggttagtacccttcccgtactaattaatcccctgggccaacccgtggatctactctacgcatctttgcaggcagcactcgatcacagcgctaagctcgcagtgatgttgttacctgagtaggcctagaaataaagatgctagcgttcatgccaggttctaaccaacagaataaacctcgtgccacagcagagctgccatcaagtattccctcacgcaaggcagacgcatccataatcctgtctagatagctatcctcttcgaacaagtatactctaccggacaatgaaccataaccaatactaccatatcaagtactcagtcattaataatcatacatggctatagccaatacgaactaggaatagccgccctttcacttctgagtcccagaggttacccaaggcagcccctctgacatccgggcttgcttctttcctccaccattgacaacacacctacgccccccatctccacatcatataccaacatctctcacatcactcaagggtcaagccttctcgctcactctctcaaccttagtccatcacacgcacggcatgtttgaccgcggatgtaacccacacccaagcctaacgcacaactcttacacatactccgtcagtctacacacataggaccgactcatagcacgcctaccgtacacaacctaacatacagcattctacacttaactaaccacactcgttcctaacctagctacgacattctaccaaggcaaccacagacaccagcaacacacacctgacgactaatccccaccgccaagcagctaacacgcataccagcccacatccatcgacaccaacacccaggaagccacgccccggcgtgacgccccagcgcccaggcccacaccacagcaccacaa

SEQ ID NO: 662192 - DNA, 107 bp, Homo sapiens
  misc_feature (20)..(20): n is a, c, g, or t
gtgtgtacgagataagcagncagagatgataggtactaccccacaaccaccgttatcattatcatcaccatcattattatcatcttcattttcatcaccttcattat

SEQ ID NO: 662193 - DNA, 876 bp, Homo sapiens
tgagcggagaagaagatctcaccgtctagccaccttacccatgactgatgattctgtagaacaggtttcttctccctctccaaccactgatggggaacagtatctccatcaggtcctcaaaatcagcaagaatcttcagtatcagaggtgccggtgtggtcgcacagtttgcccgcttgagaagctgggacccggtctccctcttgacttaagtcagtggtgtcagaagttacacgcgaccggtgagcctcagattccgtcttgaccagtaatgaatgtcccgaggcagaaaaagaggatacacagatgcgtttccaagatccttcttccaaaagcgaatgagctgatggaagaggagctccagcaggagcaggattgtatcgagaaaacggaataagcaagagtgtggatggaagacgaaaagctcgacagcagttgggttacgagaaaggccggggaatccggaagagaagaggagaagagacgacgacagatcactacagagcaatgacagaagaagaggagaaaggggagatcagaaggtcgtaaggcagcatgactattcagactatgaagacaggtcccctcgaagttttgcggaaaggtgctcttctccacgtaaaatcgaatctgctggggagttctcgtgggttcacgaaagcatgtttacggagaagactacaacctatcagtacccagggcattctatcccgttgatcttagtgggtggaagttgtgtaccatgtgtggctcaacacgactttcattccaaatgtgtaaatggaataaagcactgtagagctgccgcaaaaaaaaaaaatgtggggcggccaaattaaccaccgccgccaaaaaaagcaaacggaaggttcaccc

SEQ ID NO: 662194 - DNA, 121 bp, Homo sapiens
caaaatcaagtgggtcgatgctggcgctgagtacgtcgtgagtccactggcgtcctcaccaccatggagaaggctggggctcattatgcagaggggagccaaaacgggtcatcactctctg

SEQ ID NO: 662195 - DNA, 2188 bp, Homo sapiens
  misc_feature (583)..(583): n is a, c, g, or t
gtggtgagttacaggtggtttacggtcatctgacctttgatttgtagtttgttggttttgatgtgttggtggtgcattaagctctctgctcgatatgtgattagtttggtgtctgtcagtctgttgtttgtccatgctagtgatgagtggatgctatgtcgatagtggacctctcattcattcgctctacttgtaggtgtagatgaacggcttgttccgtctgtgtattgatactgtctctcgagtggttttgctctattgattgatactgctatgtatgaagttgattgtggtcgactcattgtggattgacatgtagctctggatgatagggataatgtgtggtatgatgaagtgttagaggatgtgtgtagatagatgtagtaatgttatgttgttagtgataggtattttttgggtgttatgatgtatagataatataatgtttgtgtggtagttttatattagtagtggtgtagtaggtaagtggaaataaggttgatatagtatgttgtgagtatgagagagagagaggggggagggtattgtgatgagtgtaagtagtgtttagtgagatatagtnattttattacattacacaaaatgtattagtagtattagaagtggtaggattagtgtgtgttggttagaagtagagagttgggtgggtgggtctgttagtgagttagagagagaaaagggatgtatagttagtcgagtgaggtgttggtagaaagataaaacagagttgttgtgtgatagagtaattaggaattgtcgagtgggttggctttatagtatggtttgagttaggttaccggaggcgggggtggttgtgtatttgagtctagatgtgtctgtttcttcacctgtggcgggtgggtgagcattaagtgtagtagtatcgctaggggggagcgctcacttactgagagtgtgataggtgtggtgtcggtcgccacaccccttgcatgtttggcgtttgagctaggagtgaggacactagagtgtattcttactggatgattgtggttgtttgtttagtggtggttagtgtgtttggtgtgtgttcaacgagggcttctgtgttgttgtatgatgatgatggagtattgtggggatgtgtgtcttctgcacgctcttgcgtcgtactgtcgtcttctcgtgggatcgaggatgagatgatgagtaggagcgccgtctcctcgttggtgggtgatgtatattattttctcatcttcggctctatctcctctcttcgtgtggttgatagtagtgggaggtgcgcgtctcattcgtattgagtatagttatgaggattactacgacggcaacggggggtggattctttttgtgtagcgctgccctacgacccacgagtagatggttgttgagtatctgcattcgtctgtgggagagaagatatattatatagatagtagatagtgatgatattgcaccacctcaccctcatctcatcgtcgtctcgtgggatcatcgtattgtttttgtattttttgcggtctctgatcagcttctcatcgtatcgtgggcagagagcacatccaacatgatgagagtggagagaatataagatggcagcatggaatatgatgatagacattagtatagtgtgtcgttggtatacaacacgcactgctgcgagcaggagagtagtagtgtgtgtagtagtgtgtgtgagacgactgtgtgagataaagaagtcatatatagtgaggtgcgtccctgcgatgtagtgtgtgtgtgtgtggtgtcatatatatatatatagtgtgtgtgtttgtgtgtcacacacactctgtgtgtgtgtacacacagcttgtgtgtagagagagtgtgtcgacacacagcatatatatgtcgatcgatagccagcgatcgcacagagtgtgtgtgtccgcgtgtgtgcattcatatagtagtctagttgtcttatataaataacacacacacaatcatattagtctgttctgattatgtgtgcccacacaaaagaatcaggataatagagagatagtcctcacataagactagtagcagagatgagtggggtagtatagacccgcgcacccgatattgggtgtatacaccccagggtgtacgtccctcgcgatttttatctcacccccgatgttgtataaaagagggcgcccaaacctcctgcaga

SEQ ID NO: 662196 - DNA, 805 bp, Homo sapiens
  misc_feature (34)..(34): n is a, c, g, or t
  misc_feature (156)..(156): n is a, c, g, or t
  misc_feature (388)..(388): n is a, c, g, or t
  misc_feature (400)..(400): n is a, c, g, or t
  misc_feature (407)..(407): n is a, c, g, or t
  misc_feature (424)..(424): n is a, c, g, or t
  misc_feature (426)..(426): n is a, c, g, or t
  misc_feature (428)..(429): n is a, c, g, or t
  misc_feature (447)..(447): n is a, c, g, or t
  misc_feature (449)..(449): n is a, c, g, or t
  misc_feature (497)..(497): n is a, c, g, or t
  misc_feature (513)..(513): n is a, c, g, or t
  misc_feature (517)..(517): n is a, c, g, or t
  misc_feature (521)..(522): n is a, c, g, or t
  misc_feature (533)..(533): n is a, c, g, or t
  misc_feature (536)..(536): n is a, c, g, or t
  misc_feature (545)..(545): n is a, c, g, or t
  misc_feature (547)..(547): n is a, c, g, or t
  misc_feature (551)..(552): n is a, c, g, or t
  misc_feature (558)..(558): n is a, c, g, or t
  misc_feature (602)..(602): n is a, c, g, or t
  misc_feature (622)..(622): n is a, c, g, or t
  misc_feature (670)..(670): n is a, c, g, or t
  misc_feature (704)..(704): n is a, c, g, or t
  misc_feature (717)..(717): n is a, c, g, or t
  misc_feature (721)..(721): n is a, c, g, or t
  misc_feature (740)..(740): n is a, c, g, or t
  misc_feature (744)..(744): n is a, c, g, or t
  misc_feature (758)..(758): n is a, c, g, or t
tcttgagtcacattcatatcttataatacacgantattccttttccgtctagtctcagttataggcagctacttcccagactctactttcacttctctctactttttcagacctggttcccatggcactagtgtagaaggttttagggtataagangagggggcaataaggctaccctatcactatgacaaccaagaaggaggctggagcgtgaatccccaacgctgagggtggggagccatccctctctaccaagcgtggcaatgatggagggaacttgcatgctaagcatccaggatgccatgcagcagacaccagggagcactgagccactgctggagcatttcctgcctctgccaggcggcctgcggcaaagtgtttcacatanctaaaaaaagtnaacacantctcatgtatgcaattnanannaagctgtcaaaatataancncaccaagacactggaagctgaaagacaaggtgagtagtgagagccaanctccaggcacacaatngagngctnnttctcagaagntcnttgctttanancacnncagtcntgagtcaagcacggcagggcatgtgaggctgagaaaacctgctnttgaagaacacaagcttctnagtgatgttgctaatgtcccccacaaatgggagcagtgtctccggcgnatgaaaaatttaaagacaaaatttaaaaaactgnttttgattcaggngttncactttcctccccgccagncctntaacatggatgctncacctgaagttctttaaaaggctggactggccgccactccatcatgg

SEQ ID NO: 662197 - DNA, 929 bp, Homo sapiens
  misc_feature (496)..(496): n is a, c, g, or t
ggttcgctgaagaggtcctccatgcgcagtcatgagtcgctgcagagtgtatcgatatgggtatcaactggactgatcctatgtacagagtgaatctataggggggttcacaagcgatcaatgtgttatgatatacaggtgggaatctacaagacagtagagatgcattgatttggcacaagacagatggtatcctcatatttctgttagcaagaaaaaaaaggatttgaagtaatttcgaaggaagtctttgtgaaacacgggtttaggtatgtgacaaggagagttggatgtcatcttacaagatgtggtgatttggaaaagaataaccatgatcttgagtaaaaaggagtggggaaaagtctgtgttgaaaagacaataaggggaaggttgttgggcgcctagggagaatgcgggatctgggatagtatgatccgaatggagtttgtgtactccaaagatgataagtcaatgtcaaatgattttgacaccaancagtgtggaatctgtcagaagggaacaagaattacccaagtgtgtcttcattgtcgaaaagtcacatgctgaatttttgggacgttactgaaagaatgagagatcgggggtgtagggggagtggcgccttccatttggttggtcccatgaagcagcagctgcttgggggactggatgttatataggattacgggtgctcagggaaagcagtagtggaggtgtgagacagtccatgaaaaattatgagtgtgacaagttgcgttgggtgggtcagataccggtggggaaatatttgacggtgttctccaaagaggggggggttaaaaaatggctaataaaagggagagcgggaggacgcaagacaaaaataagtgttgggagaaatccgcgattatgaagtgaattaaaaaaagcgcttggtatttttgtaggg

SEQ ID NO: 662198 - DNA, 197 bp, Homo sapiens
ggatgatgtgggatgtgctggatcttcgctgactcctgagcttgttgtggttgcaggtgagagtgtcgcatctggtgatctggggctagtgtagaaggtggttgatttctcactgtggcccgaagttgtggagctggcagggaagtgtgttgttggagtcgagcctgaactgatgggtgaggtcgtagattctccaa

SEQ ID NO: 662199 - DNA, 208 bp, Homo sapiens
ctgcagctgtactctaggtatttggaggcgagacgggtggatcacctgaggtcaggagttcaggaccagcctggtcaacatggtgaaaccccgtctctactaaaaatgcaagaattggctgggcgtggatggcacacgccctgtacgtcccagactacttgggagcgctgagcgcgggagaaattgctttgaactctgggcaggcaga

SEQ ID NO: 662200 - DNA, 773 bp, Homo sapiens
taccggaggcaggctagtagtggcgacgtactgcatcgacgagtagcgcacggtgtatactctgtcagtatatgacattcggcatcgcactgtgatgggaagaattgccacactatgcttctgggctggaaggaggtcagacccccattgctgcagaaattgaaacattttatccacatcatcacgggtgtggcatgtgttcctgggtgtgtctttacttcatacctttctactcatccttgagtacacctggcttgaggctgtcaatcttcctacatcggtatcatcgtagccaattgtgccggaaggtttgctaggccactagtcacggtactgtactgaccactatactgccaaacgcatggcaaggaaaaactgcttagtgaagaacttagacagctgtggagacctatggggtccacgtccaccatctgctctgatacaactggaactctgactcacaaccggatgacagttcgcccaccatgtggtttcgacaatcaaatccatgaagctgatacgacagagaatcagacgtggtagtctctctagacaagacttcagctacctggcttgctctgtccagaaattgcaggtctttgtaacagggacgctgtttcacggctaaccaggaaaagctacctattacttacgcgggcagttagcaggagatgcctctgagtcagcactccttacagtgcaatagagctgtgctgtggttccgtgaaccgagatgagacgacagataggccacaaaccagacgcaacatccc

SEQ ID NO: 662201 - DNA, 318 bp, Homo sapiens
cgtctcgtctttgtatgcggttagtcgagaactctttagtgattcaaatgacccactcctgtgaaggtttttataactgcgtgatcttcgagacaatactttcagagttcaagacacagattggaaataactgtacaggaagaggcacatacaaagaaaggaatccccgaaagggcggtatgtgatggtcctgccatcgtcaactcacaccattacattctatcccaaacccttgcaacctaggccatatcctagctcccgccttcctccaggaattatcgggggtgaatatgaccaaagaacaacacttccctatgt

SEQ ID NO: 662202 - DNA, 176 bp, Homo sapiens
  misc_feature (34)..(34): n is a, c, g, or t
agcatttgcaggacataactctagaatctgaaanaaaacgaatatttaaagattttatgcatgtgcttgagcatgaatgtcagcatcatcattcaaagaccaagaaacattctaagaaatctaaaaaacatcatagggaacgttcccgctctcgatcggggtcagattcagatgat

SEQ ID NO: 662203 - DNA, 670 bp, Homo sapiens
  misc_feature (94)..(94): n is a, c, g, or t
  misc_feature (193)..(193): n is a, c, g, or t
ttgggtacttagtgctgccagcttcctgaagccagacgcatgggctggttctgaggggtatctgaagcattgtgattcatgatacgtgcagganacaggagaccacacctataaatgacaacgtttcacaatgctgcagcagctcctatgctaacagaagaccatgtttcactgctatgggagtagataccanatatgttcctccaccatttaatcctgatatgttcagctttgatgaaaaattgtgcagtgctcctgctgaagaacgagaagtaggccagatgaaattgctaatcaacctcattaaacgcaagccccagatgacagaagaacaaataaagacaattgctgatggtttcactgccatggttgacaagtgctgcaagcagtcggacatcaatacatgctttggagaagagggtgccaacctaatagtccaaagcagagccacattaggaattggtgcttaagacacggttgccagtgagaaaaatacaaagataaaatgcttctcctgcccattaccttttttcccttgttattgaatcgtggtttcataaatcttcagtgttttgtcaaacaatatgcttttccagaaacttttcaattctattacttgcaaaaaataaaaaataaaaatagaataataaataaaagcctttaaaatctg

SEQ ID NO: 662204 - DNA, 710 bp, Homo sapiens
agagcgctgctgcgccgctttcgcccggctgcagtgagcctattctccgtgttggtgagtggtgatctggggacttgatgcagagaatccagagtgtgtaccccagttcccagtgcaagctgctcctgtgtgctgcaatgcatgttgactggtgccagtgctcctgggtgagcagctggaccaccagaccctcctccagggctgtggttggtgctggagtgagttcttgcaaggagctggactgccattgccttacgtcaagtttcccccacatgatcctctgccagaactgtctcccacagacccctggaatgtgtgcatgtgtcttgatgccaggcaccatgtggctgtgttgtggatgactccgtgtccagcacctcatgacaccccagatgcttgccctcctgcacgtgtgacaactgcctgacacagctcccactcctgtggatggtgtgcttcttgctccctggtgctcactcagttgagacttgcggcattgtttgaccaccaccagactggtgttatcagggaatgtggcattgccagtgttgccaatggagcccaagacagatggctattccagttgcatgcaagtgtccttggggtgccttacttgaggagtgagcttggggttgacagacaggttgatgcacccgagagcgcagaccctccatgtgcttgtgtgctggcccctttcttgtactggccat

SEQ ID NO: 662205 - DNA, 139 bp, Homo sapiens
catctggatctgatcatgccggctgaggatcggcagcagtacgcctctcacgactttgtgaactactacgccgagcaccccaacagctccttcgccgctcaggtctggacgaacaacgcctggatcgccgcgcagatgg

SEQ ID NO: 662206 - DNA, 565 bp, Homo sapiens
tagcccagaacaacttaaaaacttcttcaaacttccacatttgagtcatattatttggaagacccattaaaagaaacataattgaaggaatttgtattaaggtaattaagtgacatggctgtccctcttcgtacctcccctattcaggtacaagcattggctatgcgaaatagaagagaaagcatacgttacaagcacatcctctaataaccaggcttgtgaaaaaatatgtccttagaaggaaaactcggagagccacagatgtaagtaatcagaacagtgtgtcttacatacctgaacatatgacctcaagtggctctccaatccttcctcatggcactgggcaaccacttgaattatgacccttcacaccacaggagtgaatcacagccaagaatatgtaataatggaaacctttcattattatcacagcagtagtagaacaatgatgatgctatcagcacttaggacacaaggagacaaggaattagatggggtgcttacacgtgggatccaagacctttcttaaatattatgttcagcacacagtagcatcccagctaat

SEQ ID NO: 662207 - DNA, 110 bp, Homo sapiens
gaagttcaaggttgcattaagccctggttgcaccactgcactccagcctgggtgacagagtgagactccgtctcaaaaaaaaaaaatcatggatattaataaagtttcag

SEQ ID NO: 662208 - DNA, 914 bp, Homo sapiens
ctcagctacaagattggcaaagaaatgcagaatgcttaaaggctgaatgtaggattcttcagtatgtggaaagacaaggattcaacgtgtggtcatatgataaataagtgatttataaacaagagtgatattttgctagggctttcaaagttaaccggttttctagcctcatggaatactgttgaacctatagcgttgtcttgattcttttgtgttctctgccttgtaattttctgttactgctatatctacgtgtaaatctttttttctttttttttttttttttttggggttaatctctggccacttttacttggtgggtcgacgagagtgatctatcctaagtgacttttcaccggtttacaaacaaaagttcccctagccttgaagccctgctacggttttcacacaccggttttcttggggctttacttggtacccctatccttccaagcacttcgggtacttcagccgcttttatactggttccaccaacacctaaagaggctatgctacagtctctagctaaagggaagacacatttatccttctccctctgagtgtggactcatcattgatggcatctcataactaaatttcctaacagttgggactgggacttcgaggccctttgggagggcacggaacgtgcagttcctccgtgggcaacttggtttttaatccaaagacttgaaccaatttccctgcagtttaaacattgttggtttaacccttccctaatggtccctccatattagtaccttggagtattaacactgtgctttttacaaagtcttaaccccttattttttaacttcacactgtgccgaggggatgacacatacactgaagcctgtaggaaaaaattatcggcaacacgcggaggcataagacatatcactcgttcatcacca

SEQ ID NO: 662209 - DNA, 796 bp, Homo sapiens
cggaggaccagcgtccttcacaagtgcgccgcgcctgggggccaggggccaaaaactcatggccaaaaaactggccgggttgtcaagctaacaaataagccttggttctacgaactgaaagtcccaaatggcttagcatagctcccccctcgcccatatgctctattacaacatgggttttgatttgacattccaaaaccctcaatatcgtcaaactggctgcaagaggttcccagtagctaggcttgctgtgtgcctcgtcaggttccaggcttgtcaagctctagatagcaagatgtctgcccatgggccagggtgtgcccttgagctccttacatcgtagatagtatgtgctgtctcaccgccatagctgtctatggcagcatgggctaagtcctcaggtacgggttctgacccagtctaaaatgtgtcctggctaacagtcaactcctcgcacttgtgtcacatcgagcactgagcacatgtgcgccacagcaagatgggctgtgatgaaacgttcccccctgtgagggactgtgagggtgatttctgagccagaagcgcgtgcctatcctacaacaggtgggtctcgcaagtaatcatattaagcaccggagtatgttttagatcgcgctggccaccagtcattatgagtgtcggtgagtgtatgtcctcggtacgcaagctcatgagcctcggttcgccccagccttcacggcataagccttcggtagaaccaatctcgtcagtgcgctcgagcccctgtcttgaatcaaagctttacgtttagtaaact

SEQ ID NO: 662210 - DNA, 102 bp, Homo sapiens
ccccagacagagtcttgctcttgtcaacccagctgggatgtagtgagctgaggtggtgccactgcccttcaacctgggcaacaagagcaaaattctgtttca

SEQ ID NO: 662211 - DNA, 189 bp, Homo sapiens
gagacaggggccactgagggggagttttcccccatgctttcaccccaagtgagacaggggctactgagggggagttttcccccatgctttcaccccaagtgagacaggggccaccgagggggagttttcccccatgctttcaccccaagtgatacaggggccacttgggcgctcgtgccgggtaccgag

SEQ ID NO: 662212 - DNA, 527 bp, Homo sapiens
ttcagctgccaccggcactgtccatttgcctgtctgtcaagctcagagcatggataagccacaacagcacgggcagattgctaccacttgtgacaacgcatattgctaacgggcacaaggcgaaacggaaattctacagggccccgtcaggaaattgctaacggagggggcctttactggatccaagggggggaacacagggttcacgcagcggacatttccccgttgggcaaagcaaaacccttccgattcccttttaaaatgtggggcacatttaaacttatgagcgagattgattggcgtggcttctctctttgtggcgacgcacggctcaaaggctatttgatcgcgctctagtgataatctccattggggttatttaaccaaggacttggggccttggcgaccttggtaaacgaccaccaccccattgtgactaatacgcaacacacggccaatttatccccatggcgcgtgcaaaatggctccattctccactggtaggggagtcccaaaaaacaacttgg

SEQ ID NO: 662213 - DNA, 395 bp, Homo sapiens
tggatgtgcactgactctagctgggcatggagcgagactcatctcaaaaaaaaaaaaatggtctttatgaaatacaaccaattagtatgacatttacaaaattataatagcttaatcgtactaggccagaagaaagacaattccctccttggggtctaggaaattacggaaaccaggtgtggcccagtaagagtatatgcgtacgtgaatatccggagttaaagttggcagggcgggcagggctgatccttaaaatagtattataaaaatgattaaaagcctcataaaggctcatcccaaggtggtacatcattaggctatttggggctcaagtgggttcacattgggaatacgttttaaccatttatatggggtggcttggtcccaactttgga

SEQ ID NO: 662214 - DNA, 746 bp, Homo sapiens
acagcctgcctagcgtcaccaacgtgacacagcatcatcgaggaggtggaggagaagcggaagcggaagaagaacgcccctcccgagcccgtgccgacaaaaagaaacaaaaaaaaaagaaaaaacgaaaagaacagaaacaagaaacacactaaacaacaaaagacaacaaaacacaacatacacaacgaacaaaaaaaaacagaacaacacaaaaacaaagacaaaacagcaacgacaaaacagacagacacaacaagcacccagcacgcgcagacaccaacaacgagcaacaaagcaacacacaagaaaaaagaaaagacaaaaaacacaagaaacaaaacaatagaaaccaaagaaaaaaagatcgaaaaaaaacaaccagcaaaacaaaacaaacaacaacgaaaaagaaaaaaaccaacacaaaaacacaaacaaacaaaagaaaaaacaacacagaaaaagaaaaaccagacaaacacacgaaaagaaaaaagaagaaaagaaaaatcacacagaaagaaacaaacaaaaaaccagacaagagaacagaagaaagccagaacaaacaacagacccaagaaaagaagaagacgcacaaaagagaagcgaaaacaagaagagaaagaaaaggaaacaacaacagcagacaaacaaaacaacaaacaacccacaacaacaaaaaaaaacgagaaacaaacaaaacaaaccaaaaaccacgcaaccacaacccaaaaccaaaa

SEQ ID NO: 662215 - DNA, 235 bp, Homo sapiens
ccccccccccccccccccccccccttttttttagaatcccctataggggacacccccccaaggctttgttttggggtttgggacccccccgtttttttatttggttagcccggcccctagggccccggggggaaatttttttggggggggggtgaatttttgggggaactttgttttaaggggaccttccccccccccggcccgtttttgtttttataaaacttttgttttttta

SEQ ID NO: 662216 - DNA, 985 bp, Homo sapiens
ccacgcgtgttctgtgccgccgctgtatgcgtgtgcagagaggaccggagccggctgagcctgcggaacgtcttcgcgtaggttcctggaggagttccagtgcggtgccgatgctcccatcttcagtggtgcatgctcaaataatctagtcgcacgactcgagcggctgggtcccgtttgcggtgacaagctggtgtgctcgtgtgtcagcctgtatgctgctggcgccaggcacgaaggggggcagcccgtggtaccatcgcgggaacggtgcgggtgcgtcccgttactgtaagcctgcgccctgcatgtcttgtctgcttgggacctcgctccgacggaggtgttgcgttgaccgtggtacctggttggtctcccagtggttgtggcaagctcaggaggatggccggtgcaacggggagggaggtgtgcttagtggggacaagtgagggggaacccccaggctattctgttcggcgaagaaggccaaggctcgacaaggtaatcgggcacgaacgggcagacaggacgagggaggcatgtgtggtgctactgactgtgatgttcctggtacatcatctcgatgtgtgatgctgaaaagagcacatgggtaagcatccgagcgtgatgaagacaggtgccctgtgtgggagctagtcttgcccggggagaggtgctgtcctgtcgtgtcgctggtggaccggtttatttccgccctgtgggcgactccaaggctggtaagcttttgccaggattgtgggctcccccagctgcgtggtgaatgagagccattcggggattgcatgcacgggaccgcccttggtgtgttgctttgtgggtgacaatctgtggccctgggtgggctgttcctcttacttgggtgcaggcccctacgccgagtcgtaacggtgccgcgttggctgcacgagggtggcaattgcgtctcgattcccatggaggggccttttggcggggtctccggggt

SEQ ID NO: 662217 - DNA, 192 bp, Homo sapiens
agtgaaagactgggaaggggtacaaattatgctatcaaggtgtcagagatgaaggtgcggcccgcctagcacgggccaggactccctccacatgtcacctgctaggtggaggaggccactacccacaacgcgctgacgtcctggaaggtcactcccactttccccatgaccagactacacttctccatgagc

SEQ ID NO: 662218 - DNA, 203 bp, Homo sapiens
cccgtttaggctgcagtgcagtcttcactctgtcattgacaggctgagagcccctggtaaaccactggtgtaagtccaagagtccaaaagctgaagaacttggagtctgatgtttgagggcaggaagcatccagtatgcgagaaagataaaggctggaagaatcagcaagtctgtcctttctatcttcttcttgcctgcttta

SEQ ID NO: 662219 - DNA, 148 bp, Homo sapiens
  misc_feature (93)..(93): n is a, c, g, or t
tcccgagtgctgggattaaaggggtgcaccaccacttctcggctctggttatttctaatttctaaaatttgttagctgcatattatatattgnaagtgattttgttattatctttgtggctaggtttatttcctctataaagaatatt

SEQ ID NO: 662220 - DNA, 591 bp, Homo sapiens
  misc_feature (117)..(117): n is a, c, g, or t
agaagctcgctagacctatgctggttgtgcagcgcggtgtgctgtcccggtaaggtgaggcactgtgtcttagcgtgttgccataggtccatcctgtccgatgactaggtgtctgantgtccgaatctacgtaaaaaacgcttggcggcaagagaattcgtcctgagaacagtgtccgcactggatgatcctgatggtcataatgtgaagtctataaatccggagtccaggcgagcatctgatactcagaattagcgacgcacggctcctgctttgcaggcaagcagctggaagatggccgtactctttctgactacaacatccagaaggagtcgaccctgcaacctggtccctgcgtctgagaggtggtatgcagatcttcgtgaagaccctgaccggcaagaccatcaccctggaaagtggaagcccagtgacaccatcgaaacatgtgaatggccaaagatccagcgatcaacagaaggcaatccctcccggaccaagcaagaggcttcatcttttgcaggccaggctagctggaaagatggccgcaactcttttctgactacaaacatccagaaggagtcgaccctg

SEQ ID NO: 662221 - DNA, 179 bp, Homo sapiens
ggaaacaccccgctacgtggcaggtgggttagaggctgcgtggaagagaggtcagattttcccctggacggtaattggcctttgagggggaactggtggggcatctgtgccatagaggacattcagggtgactgggtcaatgcggttggaactcgctgggtactgtacttcacattcat

SEQ ID NO: 662222 - DNA, 207 bp, Homo sapiens
aactatacatccctatgtacaaaataatagcttcagcatatttaaagcaaagattgataggagtataggaaaatacagatccacacttagtgagagatttaaacataccacttgtgtatgataggacaagcagactgaaaattagtgcagatatgggagacttgaagaaaacaagcaacagccttggccttgtgagtgtagaaattg

SEQ ID NO: 662223 - DNA, 311 bp, Homo sapiens
  misc_feature (12)..(12): n is a, c, g, or t
  misc_feature (45)..(45): n is a, c, g, or t
  misc_feature (62)..(62): n is a, c, g, or t
  misc_feature (66)..(66): n is a, c, g, or t
  misc_feature (72)..(72): n is a, c, g, or t
  misc_feature (100)..(100): n is a, c, g, or t
  misc_feature (130)..(130): n is a, c, g, or t
  misc_feature (145)..(145): n is a, c, g, or t
  misc_feature (155)..(155): n is a, c, g, or t
  misc_feature (166)..(166): n is a, c, g, or t
  misc_feature (183)..(183): n is a, c, g, or t
  misc_feature (194)..(194): n is a, c, g, or t
  misc_feature (197)..(198): n is a, c, g, or t
  misc_feature (214)..(215): n is a, c, g, or t
  misc_feature (225)..(225): n is a, c, g, or t
  misc_feature (229)..(229): n is a, c, g, or t
  misc_feature (236)..(236): n is a, c, g, or t
  misc_feature (250)..(250): n is a, c, g, or t
  misc_feature (268)..(268): n is a, c, g, or t
  misc_feature (299)..(299): n is a, c, g, or t
cacacccatgcncttttttaggttaccatgtacagagattacttngagagcctcatgccgtntttnccttcncacactggtcaagtatcttctgagcttntttgccgcaaggttgcagaaataggctganggtccattggaaganagacacaatnaggcagtaggnggttgggaagataagangacagactttnaanntggaattaggcactgnngagagatcantttncccacanatggagaagaaggnatagttttggaagggggnggccaggagcagaaggaagaagacccaaganggaaagggagcc

SEQ ID NO: 662224 - DNA, 519 bp, Homo sapiens
ggaccgagagacacgctgggtcctgttcggctgctgctcacgcagcccacgcagtgcctggccagcgtgccacccttccctggacagggctgatggagatggctcacaggcggcatgtggggaaagccaaatctgcctaaaactcaagtcacctcagtaccatccaggaggctgggtattgctcctggcatccgccgtgtgttgctgtctcagcgggcagtggacccagagcccacacccccccaagagccctcgatggacagcctcacccaccccactgggctcagcaccaggagccccgcctggcaatcagtatttattgcatccgtcagtgcagtcctgggcaactggcctggcgcctgttcccccaggctctaagtgccaccacccccggcaggccttccctgacccagccaggaactaaaagggaccaagtgcacacagttgatgagagccgtctcctgtgcctcccccgcccaatccccggtcttcgtgtatatctgccagttcaaagcaagg

SEQ ID NO: 662225 - DNA, 182 bp, Homo sapiens
tcgtctcagtctcaactctgtctcactaactttttaattttctgagatagggtctcactctgttgccccagactagaatgcagccagtgtgatgtcaggtcactgcagcctcccatcttcccaggacccaccagtcccaaatacaccatgcctgggcttttttttttggagacagcattatt

SEQ ID NO: 662226 - DNA, 714 bp, Homo sapiens
  misc_feature (50)..(50): n is a, c, g, or t
  misc_feature (89)..(89): n is a, c, g, or t
  misc_feature (91)..(91): n is a, c, g, or t
  misc_feature (103)..(103): n is a, c, g, or t
  misc_feature (156)..(156): n is a, c, g, or t
  misc_feature (201)..(201): n is a, c, g, or t
  misc_feature (239)..(239): n is a, c, g, or t
  misc_feature (282)..(282): n is a, c, g, or t
  misc_feature (343)..(343): n is a, c, g, or t
  misc_feature (468)..(468): n is a, c, g, or t
  misc_feature (547)..(547): n is a, c, g, or t
aagagcatgcgaagagccatagcatcaactgtcatattccctctacttantgaagcaagatatatgactgtacatacgatggataggancnaggtctcattanagcttcttcagagtgtatcagataagaagattatctagagatttctagtcatnttacagatgataacagatgtcagagactatcttgtctgtctctantcaggcccctttctactattactacagataaagtgctnaattactgagtcaattaatacgtactccatactcacttcatcntacttgaagagtcacacacttctttatacagaattccctgagactgggtatcttataaccnaaagaggttcaactgactcacagttctgcatgggtgggaaggcctcaggaaacttacaatcatggcagaaggcaaatgggaagcaaggcacatcttacacggtggcagaagaagagggtgggganaatggccaaacacttttaaagcatcagatattatgagaactcactcactatcacaaggacagcctggggaaaactgtcnccattatccaatcacctcccatcaggtccctccctttacatgtggggattacaattcaagatgagatgcgggtgggtacacagagccaagccatattacttagattttcagttacgcataacggatgttcatagttgtatgtgcctaaatatagctttagagattca

SEQ ID NO: 662227 - DNA, 704 bp, Homo sapiens
tggggaaagggagtctggctctatcgccaggcgggatggcgggggcattgattctcggctcactggcaacattccgcctccggggttcaaggcgattctccgtgcctcagcctccgttgagatagcggggactacgggcgcattgccaccacgcccagcataattttggtattttaggtagagacggggtttcaccatggttgggccaggaggggtctgtgactctctggacctcgtgatcctccggcgctgggtttcccaaggttgctggggattcacgggtggtggagccaccggttcccgggcccagaatcataaatcttaaagatgcgaatggggtcttagagagatcactgtaccctaacctcccagattgggaatctttcttggtgcattctgggcaagataatcatccagcttctggctcagtagttcccaggcagaagaacctcacggtggtggtcgagggggatgctccacatttctaatttccaccttttggaagaaaattcctccgtggtctccctaagtttcgtgtgagcgcaaaacattcgtggtcctccacgtgtagttaagtgacactggaggccctaattgggggcatctcaaggtaccgactgaacccattttcggacaattggatcccctttagcgaccacaatcctggtgtactggcgaaggggggcttaatataaacgcaacgt

SEQ ID NO: 662228 - DNA, 118 bp, Homo sapiens
caggtcgaagtggtcatcaagtacaactttaaacccgtcacttgctggctcagaagatcgaggtgaggatccaaccccactgaacacaatgcggggtgcaggtgatctgcatgaaggg

SEQ ID NO: 662229 - DNA, 876 bp, Homo sapiens
tttttctcaaataatcaattgtcctagaaccatgtgtttctcatttatttgaaaggccatctagtgagagatttctccaaatgtggggtagggaagggaggggaagcactttaaagtctgagcctttagaggtgattcctcaagaccctgcttaatcctaacaattttcctcattagtaaaagtcagcccaaactggggcttgttaagaaccttaacagagcacatactcactactgtagataatgaagtaatcaacagtatcttataactatgtgtgcgctagcactacattctatcttaagtaccgttgggtaggtagggtgatagggaagacagagtctcgcttcggtacacccaggctgggaattgcagtggcgccgatcttcagtccactggaagctccgcctcctgggttcacaccattctcttgcctcagcctcccaagtatctgggactacagtcgcccgccaccacgcccggctaatttttttgtatttttaatagagacggggtttcactttgttagccaggatggtctcaatctcctgacctcatgatccacctgcctcggctcccaaagtgctgggattacaggcaggagccaccgcgcctgggccttttttttaagttttaagtacctataaagaacactgaaaggtgatgtgtgtggatgagctaggaagactgaaataggctctctctaaattatcaaattaatctgaagccattctgcaatactggtcttaatgtatactcactgtatagaagccaggtttttcccctactttggtcactggcactatgtgtatcgtccaactacactggttacattgtgtcaatttatatgtcttagaccggggggggacctgaactgg

SEQ ID NO: 662230 - DNA, 436 bp, Homo sapiens
ggtacctgcgagacggtcagtgaagagtcgaacgtgctctgctccagtccacagcacacggtgtacatgaggcgcggcttccccgaggctggcgaggacatcgatcaaggcgaggtgtccgccctgtcagagcagctcaaagcatgcgggctgcgctactgtgccgagaagtacgagtgggacgtggctgaggcccgcaagatctggtgctttgggcccgacggaccggcccaacatcctcaccgacatcaccaagggtgtgcagtacctcaacgagatcaaaggacagtgtggtggccggattccagttgtggccaccaaggagtggcgcactgtgtgcgtgagaacatgcggggtgtgcgcttcgacgtccacgacgtcaccctgcacgccgacgccatccacctgtggagtggtggccagatcatccccacag

SEQ ID NO: 662231 - DNA, 669 bp, Homo sapiens
  misc_feature (82)..(82): n is a, c, g, or t
  misc_feature (84)..(84): n is a, c, g, or t
  misc_feature (86)..(86): n is a, c, g, or t
  misc_feature (88)..(91): n is a, c, g, or t
  misc_feature (93)..(93): n is a, c, g, or t
  misc_feature (104)..(104): n is a, c, g, or t
  misc_feature (106)..(107): n is a, c, g, or t
  misc_feature (138)..(138): n is a, c, g, or t
  misc_feature (163)..(163): n is a, c, g, or t
  misc_feature (232)..(232): n is a, c, g, or t
  misc_feature (255)..(255): n is a, c, g, or t
  misc_feature (286)..(286): n is a, c, g, or t
  misc_feature (288)..(288): n is a, c, g, or t
  misc_feature (291)..(291): n is a, c, g, or t
  misc_feature (293)..(293): n is a, c, g, or t
  misc_feature (431)..(431): n is a, c, g, or t
gcgggctcagtatgtggcgccttcctcgcgcgctgtgtgtgcacgctgcaaagaccagcaagctctctggaccttggagcangncngnnnncntctgtccactntnntcatcaatcagccccagtatgcgtggctganagagctggggctccgcgaggaaaangagggcgtgtataatggaagctggggaggccggggagaggttattacgacctattgccctgctaacagngagccactagcaagagtccgacnggccagtgtggcagactatgaagaaactgtnanaangnagatgcatagcacgaaagcatgggaagaatcgtgggtcagatcattccatggcatccgaagcacgggaggagaaagatagtagacgacaggaattgggcggatggccttgcaggcgagaaggatcccatacgtcactnagggatagcttgggtgttcttcgcgtagatgggtgggaaagatctttagtgtggaaggtgtagggtgaagtacaggagatacgatgggatatctcggtgcacgtatggctggttggagttgatcagggaatgcatgggcatggaacctgatcttgtccatgtctgaagggatctggtccactgactactcgatagtaggcagtgggcagatccacgaacgcctggatgggcgatcgtc

SEQ ID NO: 662232 - DNA, 684 bp, Homo sapiens
cgatgaaactcgtgacgccgttagctgacacagggtttaccaaagcaccagtcatgtatcagaacatgcttctgagtgcctactgtgtgcacggcatcattctcagtgctgggaacataacgatgagcaagccatgttcctcgcccgagacggagagaacgaatggtctgaaggatagagaggagagccacatttacctcgaaatgtgccagtttagggctagccatgaacgctgctcacatgcatgcatgtgtgatattgagcgcgtgtgtgtgctggttagctgagaatgctctagcgagcgagagcatcctgtgctattgatagaatccagacgacatgtgagaacatgagaggaaccaaggccctgcgaaggacacgtcagacgttttctctttagctacaggcatgtatcactctttcaccttattcaccttgcgtcatttgctcagctgatatagacagatatctcacgaagtgatatagttgcatgtgcgacatttgtgatgttagtgatctccggcagcctagatcagcatcttactgactacgaagccacctaattgctaagctttccactgcccaattaactggaggacactacttactatactgggacctgttccagccacaagttttgcaccttaatccatgcacctaatgccctatggagcttacccttcc

SEQ ID NO: 662233 - DNA, 587 bp, Homo sapiens
  misc_feature (94)..(94): n is a, c, g, or t
  misc_feature (109)..(109): n is a, c, g, or t
  misc_feature (154)..(154): n is a, c, g, or t
  misc_feature (335)..(335): n is a, c, g, or t
  misc_feature (345)..(345): n is a, c, g, or t
  misc_feature (396)..(396): n is a, c, g, or t
  misc_feature (400)..(400): n is a, c, g, or t
  misc_feature (402)..(402): n is a, c, g, or t
  misc_feature (413)..(413): n is a, c, g, or t
  misc_feature (451)..(451): n is a, c, g, or t
  misc_feature (545)..(545): n is a, c, g, or t
  misc_feature (552)..(552): n is a, c, g, or t
gcgggcaattttcccaggtcatttgccgaaatagtgcggcttttcccacaacccttgctggcggttatagaagttctgcgcatagtcaataagngcgttgcgcctgttntcaacctgcggcggcctgagcgatttcttcattgcgatacccggnaagcatcaggtcatactgcgcctgtgccaccgaaacacccgctttcgcctgcatcagggcaatctcatacggcttgtgatccagttcgcccagcacctggcccgctttgatagcatcaccttcgtccaccgccagcgattcaacgggccccccaacacggaaactaagatttaccgtacgnatatccacgntgccatacagcgtcaggccgttatcctggcggctttgataccaccagtagnctcngnaaccacggggnaagtaccactaccgcaatccgtcacgacaggttttttnatcactacaaactcctttgcgataatccttgcaaaatcaggtcgatatgacaggtcaccgtctggttgacagttcggtctttcttcatcgacgnggtccanccggtacgtaacagaattgtttctttgcaaggcgg

SEQ ID NO: 662234 - DNA, 495 bp, Homo sapiens
aaaatttgccaacctttggttgcctatttttttggggtgccggatattgtaaataatgtcctaaatggattggggcctttgtaaaagggcccgggggaagggggccccctccgtcttttgtttttttaaataatttgaaatttgcccctttttttttgggttgtggggggccccttaggaaccttttggttttttggaacaagttgtcctttttaccatcattttgttgaatttaccaaaatttttctccttgaaccggccccggtggtgccttttccttctggtggttttccgtgctctctttcccaaatagatgttggcctttttgacctttaccgaatttttatcctaccggggaaccctggtgggaatttatatttgtggtttacctttggattttcccaaagggaataacttttaaaattttttccaggggaaattttccaagccttgaatttttttctttttcccggataccaacccttttctccttga

SEQ ID NO: 662235 - DNA, 110 bp, Homo sapiens
ttaaggtgattcttccaccttgggctcttaaaatgctgggattgcaaatgtaaggctttatgtctggctttacaattattgtttgtcattcttccataaggaagatttat

SEQ ID NO: 662236 - DNA, 461 bp, Homo sapiens
ttgctgggtctgtacttcgggtgcagtgtgacaggggaaggctgaaataccctaagtgtactccaagagacaggaggctgtcctttcaggaagcattacggacccgaagacaaatggaaaaaagataaagaatattctaacatatgaatctcgcataaaacaattttaggaagactccactaagttcagtgttctgagcctttacattttgcataaaattgtactcaatactttccattatttatccaatcaaagcacaaatgtatcttattttagtttgcttaattttacatttaatctaatctttattgttgtctttcacctgtttaatttgatttattcatcaaatcacccctgttttcaatcgatcgctgtcagactatattgtttccttgagtatgtatggaaaacacatttgtgtttattatattcattaaaattaagattttctgttaatttta

SEQ ID NO: 662237 - DNA, 1679 bp, Homo sapiens
cttgtggtcgttggttctccgcttgtggtggttgctgtgttgtttgtcgttgcgcagcttttcgtttgtttctgttgtttttcctctctctgttttgttgtcttttgttggttgtgcgtttctggtgttcggtcgtttgttttcgtgtcttcgttctcctcctctgtcgtggtggttgtctcgtctctgtgcgttctgctttctgtgcgtcttgtcgttgttttttcttttctagtagttgtgtttggttgtgtctgcctttgcttcgttttcctgtccttcgtcgtgtgtcctcttcttgttgtttagttgtgtcttgtgtgaggttttgttggtttctgtttctttcgctgttctcgtctctgcgtttgttgtgttgttggtgctttttcgcgttgttttgtttctggttggtggtgtttggttgtttgtctgtctttcgtgctgttgggttggtgttttgtgtgttttgtgcttgtttggtctctgtgtgtcgttcttgtttgttcttgttttgtttcggtttgttgttgcttgttctgtgtttctggctgggtgtgcttttttgtgtttgtctttggtgtggtgcggttcgtgtcgctgtgctctagtgtttctgctctttggttgtcgtgctgtttcgttgtgctttcgttgtggtggtgtcggtcgggttttgtgttgcttttggtctgtggtggtgtttgtttttttgtcgtgtttttgtgttcgtgctgcgtgttcgttgttttgtgttgtgtggtttctttgctcgttgtccgctcccgctcgcttgtctggttgtggtgttgttgttgttgttgtgtgtttgggggtcttggtgtggtgtgttttggttcttgctcgttcctccgtctgccgttcttttttctctctatctttctgttttgtgtgtttttgctctctctctctcctcgctctcgctcgtttgttggttgtgttggtgtggctgcgttgctcttgtctctgctcttcttgctttgtcttttttttttgctgtgttttttttttgtctgcgcgttcctttgtgtgcgttctctctctgtgttcctctcctcctctcctctctctgtttgtttcttttctttgttgtttgttttgttgtgtcttttctttgtgttgtgttgttttcttgtgttttttcttctttctttctcttcgtcttggtgttgcgccctggtctggtggtgtgtgtgtgtttgtctttctctgtctgtctgtccccgctccgcgtctcgtctgtgtttgttttcgggtctctctcctctcttcgggttgccgccctcccctccctcctccccgccgctctttttggcgcggcgcgcgcgcgccgccgctctccgcctcgcgcgctagagtagatcacttcctctctcctccttctcgtctgctggttcgttgtgtcgatagagagaaatacattatctatatatattatatatatattatattattattatttgtctctctttctctctcctctcctcctctaatcaatatataataaaataataatacaataatataataacaaacaataatataaattatacataaaatatatataaataaaaaaataataaataaaacaatataaataaaaataaataataattataattatatcaataatataaataatataaaataataaaata

SEQ ID NO: 662238 - DNA, 114 bp, Homo sapiens
ttcgaacaaattatcccaccttggcatcatcacctcaacccaaaaaggcataattaaacttgacttcctctctttcttcttcccactcatcctaaccctacccctaagccgggg

SEQ ID NO: 662239 - DNA, 310 bp, Homo sapiens
  misc_feature (27)..(27): n is a, c, g, or t
  misc_feature (125)..(125): n is a, c, g, or t
  misc_feature (135)..(135): n is a, c, g, or t
ttaaaaattgcttgtgtacgatgctcncgatctggctgacaggatcattcataccccaaacctcagcatcacacaatatacccatatagcaagcctgcacatataccccattaatctaaagtaanagttaaaaanactttttcaaaataacaaaataaataaataaaattgctaaaagagtggtgcatgcctgtaatcccagctactcaggaggctgaggcaacagaatcacttgaacccagcaggttgtggtgagccaagatcatccattgcactccagcctgggcaacagagtgagacgccatctcac

SEQ ID NO: 662240 - DNA, 180 bp, Homo sapiens
gttaggtgactctagcaggatcttttcgaccgaagctggagctgctgaaggataagggctgctcagttgccctgtagccatgaagatatcgtgaacaaggatgccaagagcacactgcgggtgctctatggtctgttctgcaaggcacacgcaggaaggcacacatgggacagagacgcc

SEQ ID NO: 662241 - DNA, 524 bp, Homo sapiens
cgtattgggctgtcgtgctaacagttgttggtaacaagaaaggctgtgaaaccgtttcaaacttgaaaagtatctggtggtcttaggatgatggacgtctcacctgtcgccgtccacatggtcagagtgattgtcatgcctcatactcgtgaatagctgagattacaggcacgtgctaccatgcgcagttaattattgtagttcgagtaaagacggatgatatggttcgtgctgtgatccccaaccagatctcaacttgaattgtatctccgagaatgtaccatgtgttgtggcagggacccgagggggaggcaattgagtcatcgggctggtcttttctgtgctattctcgtggatagatgagctacagtctcatgcgatctgataggattattcggggtgtctgcttttgcgtcctcgtcatttgttctcttgccgctggcatgtaaaaagtggcttgcaccacccggcatgattctgaggcttccccagccatgtggaactgtaagtccaattaaacctct

SEQ ID NO: 662242 - DNA, 305 bp, Homo sapiens
gcccccccccttttttttttggggggggggcccccccttttccccggcccccccggggggggggtgcccctgtttttggggttattttggaaaggccaaatttttttattttccccccccaaccttttttttttgttttttttttgaagaggaggggctgtgggcccccccctccccctttttttttcccccccctttgagggtttgggggtttttgtttcccccggggggggggggggggccccggggtttccctttccctctttttggcccccctttttttagggggccccccttttatttta

SEQ ID NO: 662243 - DNA, 396 bp, Homo sapiens
acgtcgggcagacgctggtcttgatcgagaacgaggggctgggcacccagaaggagcagtacatccgggccacctcggtgtccgcggtcgagcgcaccttcacctacaacaacgaccaggactacaaggccagcgtggtcacggtcgagatcagcgatgccttgcgctacgacttcaccggctcgcccgcaacgcggacgttcacccgcgcgacgaacagcaccaaggtgcgcgacacggtcgtggccgacgctggaacctacgtcggagtggtaccgctgacgcaggctgcctccgtcggcgacttcacgatcaaaggcacctcgatctacacgcagttggtgccgagcgcgcagaccgaaacgccgatctccttcgtccctccctacgcggccg

SEQ ID NO: 662244 - DNA, 292 bp, Homo sapiens
gcaatggctcaatctcagctcactgcatcctccacctcccaggttcaagtgattctcatgtctcagcctcccaagtaactgggattacaggtgcacaccaccccacccagctaatttttgtatttttagtagagatggggtttcaacttgttggccaggctggtcttgaactcctggccccaggtgatccacccactttagcctctcaaagtgttgggattacaggcatgagccactgcgcccagcctggaagttaatttttatggttgtgtatgtgttgcttgtcactaga

SEQ ID NO: 662245 - DNA, 332 bp, Homo sapiens
  misc_feature (52)..(52): n is a, c, g, or t
  misc_feature (74)..(74): n is a, c, g, or t
  misc_feature (214)..(214): n is a, c, g, or t
taaagaaaacccccgaaacccaataattcaagcccgggttattcaatttttntggggtttttttttaccccccnccaagcctcagaggatttggggtctcccttccccatttccgggggcatttagggctcaccattttttgtagccccgggcttccccggactcccgtccattatgggggcaccttccctcaatttttgtttcatccgccaantaatatttccctttacatccaaacatccctttggttttgaaccccccccctgatactggcattttgtaaatgtggtttgactatttttgtatgtccccctctattgatgggggtttta

SEQ ID NO: 662246 - DNA, 453 bp, Homo sapiens
  misc_feature (1)..(1): n is a, c, g, or t
  misc_feature (68)..(68): n is a, c, g, or t
  misc_feature (138)..(138): n is a, c, g, or t
  misc_feature (452)..(452): n is a, c, g, or t
ntcttttttaaggggagtaagaatagtagagataacttttttttcataactttttttttgttggttcngttttgttttgagatggagtctcgctctgttcgcccaggctgggaatgcagtggcacgatctcaggtcanatgcaacctctgcctcccgggttcaagctattctcctgcctcaacctcctgagtagcagggattacaagcacctgccaccgacgcccggctaatttttttatttttagtacagcctggccaacgcagtgagaacctatctctacaaaaaaaatttaaaatttagccaggtgcagtatcacatgcctgtggtcacagctacttgggagctgcttgagaggatcatttgagcccaggagttgaaggctggaatgagctgtggccataccactgtactcgtagtggcgcaatagagactctgcctctttaaaaaaana

SEQ ID NO: 662247 - DNA, 420 bp, Homo sapiens
agggaagcaataggtccatcatgtgtccggcaggaagcgtgcccagcgactgctggccggagtagggcttggccctaagccaggaaagggatgcctggtaccaccttttagacacatgcagcgggagcgacgacacttcaggagtggacacagggtttgagcttagagcaggcctagggcaaagtcaaggctccggaacaaggagatcagtaactagtgggcagacgacttgtacagctcactgcgcagcaccttctgggactctagtcacaactccccataccgggtctcaatggtcttgatcagaaccgtcttccggctgtggctgtcctggggaggctccacctcaggcacagtcgtcttactattaagggaggcaaaagaatggacaggcacggagatccggctctcctcgccctc

SEQ ID NO: 662248 - DNA, 363 bp, Homo sapiens
ctcatcaacacccccccccccaaaatcacaccagtttactagcaatggatccaaacctagaagaaatctctgatttacccaaaaaagaattcaggaagttagttattaagctaatcagggagggaccagcgaaggcaaagcccaattcaataataataaaaaaaaaattcaggaagtgaaggaagaaatagtcaaggaaattggtagcttaaaggtaaaacaattaaaaaatcaggaaattttcaacacactttttgaaatgcaaaatgctctggaaagtctcagcaatggaattgaacaagtagaagaaagaaaaacagacctcaaagacaagttcttcgaattaaccaatccaacaaagta

SEQ ID NO: 662249 - DNA, 460 bp, Homo sapiens
cagaagcagacggcctacgttcaaacgaatcctgctcgggcctcctatgtccatgggtggcatgtcaatgatggggaggcgtgaggtcttctgtgaacggtactcgataacagtcttgcccacttaccggtatgtttcgtgcagccatccttcagggcagtgtacgtgaacctgctattgccctctgcccggatctccacgtcataggagccctggatgagcagggccttcttgaggttgccagctgcttcgtccagataggcaatgctgttctagcagaggtaggtgatgttctgggagccttccgtggacagcaggcgtaggaaggtcatctggacgttggcagtgttgggagccagattgtcatctccatagctgaaatggaagccaccattgatggtttctccaaaccagatgtgtttcttctccttgctcttgaaactccaacaggctctgagga

SEQ ID NO: 662250 - DNA, 496 bp, Homo sapiens
ctacctttcgagactcagaaaccagagtgtgtttaacttctgtgctattccacaggtgatggccgtggccactttggccgcccgttatttacacggcaggtggctttctccctagttttgattctgtaatgtctgttcgtcatgttttgctgtgatgtcacataggtagatttgtatgtagttttaatgtcacctataacaaaatgtgtttggtagcagattgtccagaaagcattttaaatgaagaggtataaacccttaagggccaaaattctgtatattatattactcttaagcgaaaaaccagctgccgcttttatgtacccatattacattcgagtaggcagcagtctttaaacataaaaaggccctaggcatgctcttgttcccaggtgctgtataaagttggttcctgttcgttcacgccccatcgcagttttgtccataggtttggacaaccataacggggttttacttttttttttaaaaaaaaaaa

SEQ ID NO: 662251 - DNA, 773 bp, Homo sapiens
aaagccgagtttacctcttttccatgttcattattgaggcaaaaacaaaaggccccaaggaaaaaaaaggagtggacggggtaaaaaaaaaggatgccaaaaaaaaactcctggaaaattcctccttgaaaatcaggttcaatcaagagaagagacagggatcttgctggtactggcccagcctgggagtgcaatggcccacaatcatgggcttacagcagcctcaaactactggggctcaagtgatccttccaccaccgtcttccaaggagctgggtactataggtacatgccaccatgtccagctaatttttcaattttttgggtagagacagggcctgggtatattggcctaggctagtcttgaactactgggcctcaaccgatcctcccacctcagcctcccaaagtgctaagattacaagcatgagccattggacctgggcttcttttactttttaatggcagttaaaacattacatattttgttttacatctgtggcccacattataattccatggaaagaggtgtgagatataatatggactattattctccatcatagaaactgtggaccattttctcttactgtagaaactgctattttatcatacctgtgatctatacttccaagatagtaagtacgtactccataagaggcatttgtcacagtttctataatgggctgcaactggggcattattgatctctacggctgcaggggcctgttccctcctaggttcacctctcttgtaccccggttgtttggcgt

SEQ ID NO: 662252 - DNA, 584 bp, Homo sapiens
caggctgatgcataggaggaaagaaggcaccgtaaaggaacatatgggaaagaaatcccctcggaaaccaaagcccagccatcggagattttaagatttttcaggctttccttataatcttccttacatttgtctctttaaacacatttaagtcgacctttgagaagttgctgataagcagttatcaaacaagagttagagtaacaaaccctcccacctcgctgtgttggttggtagcttccaaggccactgtaaatgtgtatcagtgtgaacctgatccagaaacagccaggaagggagcaaagtttagtttagtctgtgaggaaactggcggctgctggtagttccatgctgtctgtccagacttcagcttggtgtaagtagttttttttaaaaaaaactattatgacattttcatataaaaaggatggtaagattaattcccatcaaagattaaatcaagtttctacctggctctaaatcttagggataagaactactgaaaagaaagtttcagcactcagcagtagttttatttttttttaatggaaaagaaagccgtgaggtgcatcagcctgttcggg

SEQ ID NO: 662253 - DNA, 273 bp, Homo sapiens
atgaatttcagctgtcgtcccaccccacttcttccaccccactttgttccttcaccaacttgcattttcttcccttccctgccagccagatagattgactgatgggaaaggcaggcgcggccttcgttgtcggtatttctttgatgtgaaaggggcagcacagtcttttaaacttaatccaccctctttgcatcttacaaagttgaccagctaaaagaagtaaaataagacggcaatgcttgtgaaatgtacagtgcatttgggctgcaccct

SEQ ID NO: 662254 - DNA, 1371 bp, Homo sapiens
gattgccatcctgaagctgagagacatgcgggccagagtatgtcgtcgctaccggtggcctgtaagctcgtgctctgcgcgtactctcttcattatctgggcccgtaggaggctgatccgaagtcgtgactcgctaaagaattcagtgttatgactctaccgtacatccaaggcaacatcaatggaatagtcgaaatttaccttggaattgctaatggcgtcggggtccccatccattccgacgattgggaagttgtgacgttactcggagaaaatcgtgccgcacgagcaatcggcataacctggtgggcggccatctcgaggacattcgtgctttaagcagctactgggactctgctcttatctatatccacttggtacctcagacttgtactttcagtcccctcaattggccaccgcgatggagtaattgccttgacctggggttgcaaccccattggtggagcataggtcctagccagcccaatagatgagtttagaaattggaggaatcgtagcatattgttaaagcaagctattcaattgggactggtctgagaagtaattgcacgcataatggggctttggactgaaaggttaaccagggatggactcggctatcacgttcgcctttcaaaagtaattggattattggcttacttagccatctaaaggactgacactgtcagccaacatagtgttaggggttaaataagatcacgtggtattaggccaatggggaccctggatgtcctaccgtgtgagtaagttgcctaccttcatggagcattgctgcgagtccccagcgattcttgaacaggtactcctgagagacaacgattgagtgcccaatcacggggtaggacctcctacggaaggggactgaggacatctcccacgacggctagagaagaagcttggaggaaataggctgtctgagtcccagtgatctcacaacgtgctttggtttccaaaatgatggacaggctactgtccagagagcacctgtggccacgttgcacaaaggcgtcgggagcaaagcaataggggtaaaaaggacgattggcaattaggtttggaaatccttttcacaagatgttacgaggtggcttctggaacgtgagccaaattatgtggggcgcaaacacatttgtgctgaaacagttgcttcaagtctggcaataacggacagttatcttcgtgggaaccaacttgttgtcttacatagcgtggtccgtgcagaaaaccgcgatcatagagacccgatataacacagacatccgaaagtcgagcagtcacgacgaaccacattgggaagtcgccacgctcacggacatgcgcggaagggcgcacactctcgggcctacaagg

SEQ ID NO: 662255 - DNA, 174 bp, Homo sapiens
ggaggctggggacgctgagagcgggtcttctacctgaagatgaagggtgacgtactacacgctacctggccgaggtggacaccggtgacgaccagaagcgcctccttgactcagcccggtcagactaccagtgaaggccatggacatcagcaagaaggagaaaccacggacaaa

SEQ ID NO: 662256 - DNA, 132 bp, Homo sapiens
ttcattttctacacacaccaatgtcccattccaaaatattgcacaacattctgaatacaaaaaccttgattgtacaaggagtgagagtgaatgagtgaagatgtcaatggaacagagtgtagaaacttgaat

SEQ ID NO: 662257 - DNA, 159 bp, Homo sapiens
cacgaggagaactgctttgaaaagatgtcatgtacaacaccctcatccttgcccttcacccgttcagtgtaaaggaagaaatagaatctctttccagattgactgattgaaaccaagttgatcaatactctcccagcaccttttaaattttccttgtca

SEQ ID NO: 662258 - DNA, 813 bp, Homo sapiens
  misc_feature (136)..(136): n is a, c, g, or t
  misc_feature (147)..(147): n is a, c, g, or t
  misc_feature (153)..(153): n is a, c, g, or t
  misc_feature (277)..(277): n is a, c, g, or t
  misc_feature (359)..(359): n is a, c, g, or t
  misc_feature (373)..(373): n is a, c, g, or t
aagctagtacgagctgtgcttaaatcgagacgagggagagaactagtctcgagtaatttttttttttaacaaatgaggcaattaattaacccagcatggtttgttctaatgcttctatgtgggacagatgccaccntgtccgggatntgtcanatctctttgtcctgaggtgtagttgcggccgccatcttggtccttttccaccattttcagcccctccagggcttggaggacccggcgggccacactcttggagcctcggctgaagtgctgggcntgacccgtttctgacgtcccccatagatcttggtcatggaccaaccccagcgccacccggaggtacagtccgcgctgtggancagctcgcgtgtanaaccagttctcatcgtagggagcaagctcttgtgtgcttgtgccagcttgacggtatccacccattctggtggacttacagattccccggactattaagaggaaggctgccaaaactctgacaaactcctgctgggtcacacgtctttaacagtaaccccaggcatcagtgcggctaggactagagcattggcttttctgtgatcaacctgatgattaacactgtgttttaacaagggacgccgggtgaaactctgaagatcccaaggaaacaaagagacgacgagaaaaaaacgagagaaaagaaaaataagtaaaggcaggaagaaaagaaagaagagaggtggaatcaacaaaaaaaaggggaaagaaaagagagaagagcaaaggaaaagaacacgcaacaccagagcacgaaagaaaaataaaagccgagccatt

SEQ ID NO: 662259 - DNA, 188 bp, Homo sapiens
  misc_feature (40)..(40): n is a, c, g, or t
ccgtcatactctaaatttagcatactacgatgtagataanggggatttgccacctctgtagaattcattctctgtaactaaactgctagaagaaatctatttaaaaactcattaacattccagtatcttatccgctagtgctagaaaatattgtcacacgtttctctttgttccttttccccaggggc

SEQ ID NO: 662260 - DNA, 592 bp, Homo sapiens
  misc_feature (136)..(136): n is a, c, g, or t
  misc_feature (147)..(147): n is a, c, g, or t
  misc_feature (153)..(153): n is a, c, g, or t
  misc_feature (277)..(277): n is a, c, g, or t
  misc_feature (359)..(359): n is a, c, g, or t
  misc_feature (373)..(373): n is a, c, g, or t
  misc_feature (541)..(543): n is a, c, g, or t
  misc_feature (560)..(560): n is a, c, g, or t
  misc_feature (566)..(566): n is a, c, g, or t
  misc_feature (568)..(569): n is a, c, g, or t
aagctagtacgagctgtgcttaaatcgagacgagggagagaactagtctcgagtaatttttttttttaacaaatgaggcaattaattaacccagcatggtttgttctaatgcttctatgtgggacagatgccaccntgtccgggatntgtcanatctctttgtcctgaggtgtagttgcggccgccatcttggtccttttccaccattttcagcccctccagggcttggaggacccggcgggccacactcttggagcctcggctgaagtgctgggcntgacccgtttctgacgtcccccatagatcttggtcatggaccaaccccagcgccacccggaggtacagtccgcgctgtggancagctcgcgtgtanaaccagttctcatcgtagggagcaagctcttgtgctgccagctgacggatcaccattcgggacttcagctcccgacttttgagagctgccagagctctgacgactctgtgttcactcttacagactcagcatcgcgctcgcgctgcatccgatcgacgacactctttnnntaaaccacagcgtgggnttcatnanngtgtcacctcataaaagggcttt

SEQ ID NO: 662261 - DNA, 1062 bp, Homo sapiens
acgctccaactccctgcggagagacagtccgtccgccgcccgaccgtgcccgcctaggtaaaatgggatgccagtaggagaccgggccaccacggaccagaggggggcccagggtaaggcaggcatgccgagtgccggttcgtccggatcatcagcgaggctgggtggcggcgagttggtgacacggcgacgggcggggccagagaaagaggcccaaggtcgttccagggcatgggctcagggtggtcccctaggagtcctcgcctgggacgcatatctgcgcgccctcttcgcgggtcgctgcatgtcgtgcacccccgcatggcctgtcgtggtcttggtccatgttggggtcgggaatacctgtgcaagcttgggtcctggcacacgtttaaacaagctcgtagcaccgaagtgggcttgatcgacggtgaacctagctccattcgctcgagggttgccccatgggtggatgcctccatgtacagttggcgcctcatatatcgggaccgattgcagctggtgggtggcccttgtgccattctcctcgccatggtccttgcgctctcttccctcccttctactggtacttcctctatccccgtaagcccctggaggggtgactcaccaaggtcatgcgtgggtgctgcgagagaccctctatcagcactttcatagaacggtactgaaggttaggtgaaccgggatttgtcgcaattgcaccaggtcctgggcacacacccaagggggatcccctctattggaccaccgtggctccgtatacaacgcccccttccttccttggccagcttcaccgaccctttgacaacaacacagtggccgccctaagcttcccaccggggacactttccgtttaacgccttttctttggtccttgcgttatcctaggaaacacgactgcacaaccacgcctggggctacacgttctccggtgaaacttaagcggctgggttagacatacactgttcattacgccctcataccaagtggtccctgggccccacattacaacccggcctcaccgcactgtgccggggtccg

SEQ ID NO: 662262 - DNA, 126 bp, Homo sapiens
ggccatttggggttctggcatgaagtgggcaggggggagctggcatgtgtccccactgtggttattgaggaggtgctccctggaggctggtatctgacgttgtggggtggctgcaggaagcccatg

SEQ ID NO: 662263 - DNA, 96 bp, Homo sapiens
tcaagcttctaacgatgtacggggacatgtaccccaccctccaccccttccttttgcgcggaccccattacaataaatttttaataaaaaaaaaaa

SEQ ID NO: 662264 - DNA, 160 bp, Homo sapiens
cggttgagagaggcgcagccccttctcgcctctagaggaggtcctccccctcctggtgctccctctgggtccccctgagttgtagtagcagcttaactgtaatctaggagccaggacctgaactcgcacctcctaacctcttcatgtatacatacatacc

SEQ ID NO: 662265 - DNA, 1057 bp, Homo sapiens
  misc_feature (1003)..(1003): n is a, c, g, or t
ctctacaaagcagcaaagacagttggattagcactatagcctataattcggcgcatgagctggagtcctaggcacagctctaaggcctccttattcgagccgagctgggccagccaggcaaccttcgtaggtaactgaccacatctaccaacgttatcgtgcacagcccatgcatttgtaataatcttcttcgatagtaatagcccatcactaactcggagcgctttgcgcaatcctgaactaggtatccccgtaactaagtccggtgcccccccgatattggcgatttccccggcgataccaacgaaccagtaaagctatctgacgtctataccatgccgctcgtcatccattaacatcgctggctccgccattctagcataataggctggagagaccgggaaacaaggaaccacggattagaagcaggtctaactccatcgcacctattaaggcaacggggacagcgtaacttgcgcccaacgcgcagtgcgaatgacgcaatcccgtgtagaaaacgataaagccaattcgtttactctctattaagcaggcgcgtaagtccaagggatggttcgtcgcatgcggtaactacccttataaagcgggagacccaaaggtcgagatggtactgtcgaggtgtcaaacgagaactgcaaaaaaggtcgatacttccacaatgttaacttacgcacaacagaacccgccacacattgagccgccaaagtaagaggcacgcccagaaaagttacaccaccgaggaatgaggcgggcgacagcgacccatataccaggatgattacagggcgtaccatttgaggacaacatccccctggggggtaaccgccagttaaaaaagcttcgggaaagccagagtggaatatacaggcctattcacacgatgctaacacacgctgtggtaatttcgatgttgaccacgtgtatgaaaattatcgattatccctatagcggcgcctaaagaggggtggcacccaataataanggaccacgtatagtgggccgatgggggagacccgcacaatgttccgaacacggt

SEQ ID NO: 662266 - DNA, 444 bp, Homo sapiens
aatcgaggttctctgtattattatatatttctagttattccatgtagtctgaaaggacttgatattatcttaattttaaaatttgtgggatttatttgggggcaaaatatgggctatcctggagaaggttctgtgctgacagaaaatgtattctgcagtgttggttctaatgttctcttgtatagcactgaactttgtttaatacacatttatttaaaaattctttttttggggcctttcatggtattagctttttcattcaaaccctgttcctagagaattactgtgtaccttcagaggcattctgtttccttgctttttcatgtttcttatatccttacactcatatttgtgcatctggtgtaactgtctcttctttcaattttatggattggctttcataggaaaagacttttcctgatagatgtatctaattgtatcggt

SEQ ID NO: 662267 - DNA, 230 bp, Homo sapiens
agacagtgtagacaatctgctctttctctccatagacatacccttatctcagagagctggaaataagaggacaaagcctccacctggtcggacatactctgagggtaagacggatctctgagttctctcctggtccctgtagtccaaattggttgcagggaaagcccagaatgaccagaccgaatggtgcacgctcatcgtgtagtgcattacagttaatgtactagtcc

SEQ ID NO: 662268 - DNA, 101 bp, Homo sapiens
ggatccctgtggcagtacaatgaagcagagagtgtttggtggatgacaaggaggctgatgtagaccgcaggtgggtctcagaggtgatcggcgatcagagg

SEQ ID NO: 662269 - DNA, 375 bp, Homo sapiens
catcctcctggacttcaaagtagcagcgtctatcatatttggtgttgatgattcatcaggatcataagtgagttggattgctttgatcagctgtttgacttctgatgttccggtttcaacttgatgtgacatgtcttccaaagactgtagatccttgtctactgtggtttgataagtagacaggaaatctgcaatgccacaggtagttgggcaataacagccagatctttcatgtaagatgcagcagttgtctctggtatcaacatatgctacacatgttgaagagagagatcacagagcatacaagtagagtatcatactccgggggcgcaaggaccaacacatgatgtctgagtgaccgaagctccgagccat

SEQ ID NO: 662270 - DNA, 310 bp, Homo sapiens
tatgtaaaaacagcagttctgttcagaaggacggagatctaatagtcactaggtgtgatgagcacaagccaaattctagcagaaagatgtgaaatggccatctacgtgtaaagaatataagatctttcttacactgctgttatattagaactaccactacaatacattatactttggatgacacactcttagaaaacgcaagacaccagcagctatttgcataaacctcagcccaggtgtggtctccagccccaggaaacttctccaccacccctcccatcctcccaccagtggttcctccctcggtggc

SEQ ID NO: 662271 - DNA, 244 bp, Homo sapiens
  misc_feature (11)..(11): n is a, c, g, or t
  misc_feature (13)..(13): n is a, c, g, or t
cggcacgagtnanccacggcgcccggcaaaaaaacagctataattattgttgagcataattcctccccttgcctccttcatatgcctcccaaaattctgaagtgccccctgggcggttcccagtgtcgcctgaccttggcctcctggactgcaggttcatcttgctctaaccgcccgctgcccggtgtcccgtcccttcccagcttccttctcccaccactagatggcagtatgagtccagcat

SEQ ID NO: 662272 - DNA, 357 bp, Homo sapiens
cctaaaagctacctacatggcctacaggagtcacaccgacaggaagaggcagcaggagagagaggggcccgagagagattgagaagagcctggagaccctaccgaccagcgtggtgtccccatgtccccagaatgcagaagacccaggactggggtatggcggggatgtgtggagtctgagatgcctgtggggtgactggccctggatggtccagtgtgcaggtcctgccctggggcaactgtaaacagccgccccctccgttctcccaggggaacatactgttgctttttttttttcttttggccccggcttctcgctctgtcccccaagctgaattgcagcggcgtgaccctggc

SEQ ID NO: 662273 - DNA, 430 bp, Homo sapiens
  misc_feature (26)..(26): n is a, c, g, or t
  misc_feature (36)..(36): n is a, c, g, or t
  misc_feature (48)..(48): n is a, c, g, or t
  misc_feature (96)..(96): n is a, c, g, or t
  misc_feature (103)..(103): n is a, c, g, or t
  misc_feature (123)..(123): n is a, c, g, or t
  misc_feature (133)..(133): n is a, c, g, or t
  misc_feature (152)..(152): n is a, c, g, or t
  misc_feature (167)..(167): n is a, c, g, or t
  misc_feature (169)..(169): n is a, c, g, or t
  misc_feature (197)..(197): n is a, c, g, or t
  misc_feature (232)..(232): n is a, c, g, or t
  misc_feature (297)..(297): n is a, c, g, or t
  misc_feature (312)..(312): n is a, c, g, or t
  misc_feature (361)..(361): n is a, c, g, or t
  misc_feature (364)..(364): n is a, c, g, or t
  misc_feature (368)..(368): n is a, c, g, or t
  misc_feature (397)..(397): n is a, c, g, or t
cagagagaacccaccatggtggtgtntcctgccganaagaccaacgtnaaggccgactggggtaaggtcggcgcgcacgctgggcgagtatggtgnggaggcnctggagaggatgttcctgtncttccccagnaccaagacctacttcccgnacttcgacctgagcnangggtctgccgcaggttaagggccagggnaagaaggtggccgaggcgctgaccaacgccgtggngtcacgtggacgagcatagcccaacgcgctgtccgccctgagcgacctgcacgcgcacaagcttngggtaggacccggtnaacttcaagctcctaagccactggctgctggtgaccctggccgcccacntgnccgncgagttcacccctgcggtgcacgcctccntggaaaagttgctggcttgctgtgagcaccgtg

SEQ ID NO: 662274 - DNA, 346 bp, Homo sapiens
  misc_feature (42)..(42): n is a, c, g, or t
  misc_feature (147)..(147): n is a, c, g, or t
  misc_feature (164)..(164): n is a, c, g, or t
  misc_feature (187)..(187): n is a, c, g, or t
  misc_feature (218)..(218): n is a, c, g, or t
  misc_feature (264)..(264): n is a, c, g, or t
  misc_feature (267)..(267): n is a, c, g, or t
  misc_feature (330)..(330): n is a, c, g, or t
  misc_feature (341)..(341): n is a, c, g, or t
gatcttattttttaattttgagtgccactattaatgtaaaanggggggggctctacagcagtcgtgatgaaacttaaatatatatcctttgtcctcgagattttaggaagggtgtagggtgagtagggccatttttaatttcctgangtgctaagtgttttttntacagcaacaaaaagtcaatttncccttttccaccagtgcgagagagggatgtntacttttcagggtgttgcctattttcccgtttgcagggcccgtagntgngccatgggggcctggtccaggggctaaatttgggttgattatggccctgttaccggtttggcncaggttccctngtaaa

SEQ ID NO: 662275 - DNA, 790 bp, Homo sapiens
tggcctaagggacaatctcaagaggtcctgagaccacgtacccatgatttttttctgtgctcgggtgatacccaataactccttcacctaagcccggttggtgtgactttggaaggtgcttcctagggccagtgtgatttgtagctttcgtgccagcgtgctttggccagtagaatttaacggtgttttatttttttcaaacctccggtgttttccataacggtgggaggtgtagtgggctctaagagaagccgtgttggtcctcccgggctcttccactctgtggagaggaggtctgggacgctatcagcaggggccagggcaggtcgcaaaatctcccagtctagaagaccacacctgaaacggttgaagccagtttgcacaagggtctgctgtccctcgtggggcaggcaaagctggggggggcaggggtcacagagcagtcatagaccaccagggcaccagtgcaggaaaagggcagatgggcacaggggcacaacagggcctggtccttaaagcacgggggggtcatggctgggaggggcatggcaggggctggaatccctgtaaagccagaggggccacccaggggcagtgacattccagatttgtggggctcacctcatccttgctgtgaaactgggagtcccagggggcacatgaagtcagtaccaccgaaagctgtctcacgtgtctacctctcgctgacttttgggtggccatatacatttctttcaattagcatttattccagtttaattaaagcttttgggccgtactgtgacccttt

SEQ ID NO: 662276 - DNA, 390 bp, Homo sapiens
  misc_feature (111)..(112): n is a, c, g, or t
  misc_feature (114)..(114): n is a, c, g, or t
  misc_feature (140)..(140): n is a, c, g, or t
  misc_feature (151)..(152): n is a, c, g, or t
gatagaatcgagctcgctaccgttatctcctagcacggcgtcgtctaaaggcaggacgggctgattactggtttcatcactacttgattcatcgtcactaggctgagatgnnantactattaagaaaaaagttgacattnagctattcaannatcttggagaaagctttcccacgtaaaaattatttagaactaatcaatcgccatcccgttacatcgcctttctcacataagatagccacaaaacacaaaaccacaacacacataaacacaaaacacgcggttttcaagctcatctaacataaaagccaaacacataaacgcatttcacaatgtgatacacaacgaatctgtgtaatcactactatttaggtgctaggacgagccaggg

SEQ ID NO: 662277 - DNA, 142 bp, Homo sapiens
caacgcaccttccattatgccatgatggaaactccaatagaaacaatttctatttgtctcctaagaggaacaaagcagagaagggcaagaagagagggagagcttaacaaggacacaagcggatacggggtgcgttgctgat

SEQ ID NO: 662278 - DNA, 109 bp, Homo sapiens
ggtacctgtgctgattctgatcttggaggtgtgtgatagcgaatgtgccccttcctttaatcttccgtccagactttgatacagatggtttctgatcacttacaatggg

SEQ ID NO: 662279 - DNA, 253 bp, Homo sapiens
tctaaaaagaaagcctggctcaagtggccatccagcctcagccttcctgagtagctgggattgcaggcatgcgcaccatgcccagctaatttttgtatttttagtggagatggggttcactatgttggtgaggctggtgtcgaactcctgacctcatgatccacccgcctcggcctcccaaagtgctgggatgacaggcatgagccaccgtgtctggcctctctgcctgttttttaagacttttgtctttgga

SEQ ID NO: 662280 - DNA, 320 bp, Homo sapiens
ttggtcctactaaaagcatttttttggacatgaatacaaagatgtcagggtacccaatcatttgctagctagatcctaacaatatcacctataggacaactgaacgtagcccttaaacattaagctgatgataatcggatttggccgggcgcggttgcccgtaatccccacactgagaggctgaggtgggtggatcacttgaggccaggacaggacccgcatggcccacatggtgaaaccccgtctctacaacaaggaaaaaatacacaaaattagctgggtgttgtggtgtatgcctgtaatcccagctatttgggtgg

SEQ ID NO: 662281 - DNA, 95 bp, Homo sapiens
ccggcattgcccctctgcccctgcaccattccagaactgcccaccttccacactgaggtagccgagcctctcaagacctacaagatggggtacta

SEQ ID NO: 662282 - DNA, 399 bp, Homo sapiens
aatctcagaagcagtagaatggaattataaagtaattttattatgaaccaaaatgctgggattgcaggtgtgagccacctcgaccagactcaaaaatgttttaaaaaatccggaaaaatctgcaactggacattttgatagattaattgactttttaaaaatagttacttcttttcctagtaattgactttcttaatggtgaactttcacatggtggtcctggaagagaattcactcatttactctatatgttaagccaaaggctttaatttcatttgttaggctgggtgcagtagcttatgctataatctcaacagttcgggaggctgaggagggaggatcacttgaggccaggagtttgaaatcaacctaggcaacagagtgagaccctgtctttac

SEQ ID NO: 662283 - DNA, 264 bp, Homo sapiens
  misc_feature (16)..(16): n is a, c, g, or t
  misc_feature (25)..(25): n is a, c, g, or t
tgtggggattacaggngtgagccantgcacccagccatttcctagtaattgactttcttaatggtgaactttcacatggtggtcctggaagagaattcactcatttactctatatgttaagccaaaggctttaatttcatttgttaggctgggtgcagtagcttatgctataatctcaacagttcgggaggctgaggagggaggatcacttgaggccaggagtttgaaatcaacctaggcaacagagtgagaccctgtctttac

SEQ ID NO: 662284 - DNA, 444 bp, Homo sapiens
  misc_feature (10)..(10): n is a, c, g, or t
  misc_feature (66)..(66): n is a, c, g, or t
  misc_feature (130)..(130): n is a, c, g, or t
cccccccccntttttttgaatccctgtttttttaaaacccgagagagagaaaaaataaaaaaaaanccccccggccccagccccggggggtggtgtctttagttttaaggaaaggggggggacccccccnccccatctctttcaggtgggctgggtgccctgcccaccaaaggaaacagggggagtgtgtcttcccgaaaggcccagccggggggtagatttggggcagattttattcccaacccaaccctgggtctatacattgggatatgtgcaggttcccattcgtttcctggggagccatgtgtccctgaggccagagagtctcctcacccagctcagactgaatgcttttgtttttgtttcagggcatttgcacgccaaaggcaaagaagaaaaaatgtccaaatcattaaagaactacattactattaaaaaaaaaaa

SEQ ID NO: 662285 - DNA, 904 bp, Homo sapiens
aatacgcataggtacgatgcctgatgttactcgagtttttgactgttttttcctagttgtttatggttttttaattgggggtgggggaggaaaaaggaaggaaataccaggtaagaaaaaagggctggagaaacaggtgaccttttggttttatattttttctcaaacagcaagtacgtgggggtctgataccaggttcacctgaagggtacatcttaacagcactccagaaaggctttcttttgacaaatcacacgcaccaccgcatcagggtgggaggggctctggccatgcggtctcaaggtgtccagggtggagatgaatgtgatggactcccgcaggcctgaacctccacccaggaaagtggcttggcaaggatgggccggtgtggggacagaggagggctcatcccaggccccacaagcagccgcttgcagtggggagaaggaaaagcagacaagaaagctcaggtagggaatgcctggaactgtcgggtgggcagccccgtggggaagggactcaagcataaaggctgtgggataaagagggaaaagaccaggtgagggcaggaggggagctgctgaaagatgcggtgaacagtaaagcacctttcagtaaaattgccctttcccaggcagtctggggtgggcgctgttggtaaggaggccgtatctccccgcttccttaaaattggtgagactgtcagaaagtttccttcaggcagttccctaaatgctccttcccgatggtctactttaacacagagtttaaagccaagctgaaagatctctgacccgtgaaactaaggcactctgtggggggtatccccggccctctaggtttaacacccttggggaggagaacgcacgaccaaacaggaagaagtgccctgtaaaaggagcat

SEQ ID NO: 662286 - DNA, 910 bp, Homo sapiens
  misc_feature (707)..(707): n is a, c, g, or t
catcctgcgtctgacctggtgccgggactgaccgatacctcatgaagatcctcatgagcgaggtacagttcaccaccacggcgagggaaaatcgtgcgcgaatcaaggagaaagctgtgcaagtcgcccgtggattccgagcaggagatgccaccgcagaatccttcctcttctctgaagaagagctagagtggcccgattgcccaggtcatcaccatgtgccaatgagcggtcgggtgtccggagccgctgtacccagctttccttccgtgctatggaatctgggcgggcatccaggagaccacctttcaattccaatcatgaagtgttgccgttggaccactcgcgaaaaaggaccgttgtaacggcccaaacagcggtgtggcttgtccgggggggcacccaacacaatgttatccgggccatttgttgaccaggattgcaaaagcggagatcacgcgccttgggcccaagcacccaattggaaggcatcaggatcattgggaccccaagaggcgcaaggaactcgcgggtgactcgggtggctccatccggtgctcattgtccaccctcccagcaagatgtggattacccacgcaggattacgagagtcgggccctcattcgtccagcggaaagtgttcttaaagggactcagcaggatggtagatgtggctggtggtaatggaaatttaggatttgggccgntggaagtgaaaacctatgtggctaaagaatggaataccttgaaaagaatggctgaagtggttgatatcagctggtgaaactgtgtgttgccttttagataaggcctggaaacggcagggggggggttctaagggagacagttgtcggggtagggaagacgcgagcagctttttttgcaccgcggtgtggggggcgacaaaatg

SEQ ID NO: 662287 - DNA, 1162 bp, Homo sapiens
taacagttggtacccccgggctttatggatatcgtcgacccaggcgctacgagtgacttctgtgccggaagaaagctgagcgaacgctgctactggcggcgagtgagccggactccccaactccggacgatcagcccaggactgagagccccgaagtccccaaccacaagtaagcggccccagaaggacaagtctaggtacgcacgtccagaagacgaccataggcacgacgaccacgacacctaacgaaatagtagcacaacatacgaccattaccaacggtagccacgaccgggaaacaaaaaaccctaagaccacaggaaaaccaagaacagacagaccatactatacgagcataacccaagacacaccctgagaatatacagacagagagcaagagtaggcaacagagaataggagaaggacaagcctaagacacacaatgaacgagcaaaagcagagacggcaaacaaccagagaatccataataaccaagagcaagcaacaccgtaaagagacgcaagccaagagggcactcaatgagaagcaaggcaccaggacatgcaaacacggagaaacaaaggagacaaatccccatggaccggacatcaacctgagcaccagaaaagaaacacccaaaagaaacggacacgaacgcaaaacaaaccccgaaggcatagcgcacatcatcaaggaaaccggcaaggcagtgcacgagagaacaccgggaccacagtggtatcagcccaaggcccgcaaaaagccccaagagggggaaaaagcacccaaggagaccacaagaatcagaaccacagagggagacacgttaggacgacgaaaacggataatgacacgcacaagtgacatccaccacagattacacacgccggacaatgagacgaacaatgagcatgccccacgtcgatgacaaacaggaccaggcccaatgcgagggcaaatggcacccaagacacacacgaacgtgattaaaacccgaaccaacgagaatgcagaacaaaccaaaaggacaacactaccagtgaccaccactcgaaccccaaagtagaccccaaaattacaccaataactaaagaaaacagaagcacaaacacggaaagtggcaccaatagagacaacgactcggccggtaaccagtagagga

SEQ ID NO: 662288 - DNA, 457 bp, Homo sapiens
tgaaacatactcctggaggtagagccaccatggacgtgaacacagctccagcaaccacaaagatatgcaacagctgatgagagtgaacccagatgtcatcttatgccaggaacaaagcgtacggggctccgggccgcatacagggcagctcctgtgatgtagcggctggccatcagcatcaaccagcctatctgccctatggtggcggacttaaggcacccctccgagatggcatagtgcaaggtcggaatgattccactcaggcctagagcccaaacacactcctgctcttactccccgctactgcggggtggcaaacatgtccccctgggagactctaatggctgcaatgcccagcacacagatgccaatcacgtagatgtcgtcagttatgtctcacatgccacgcaacaacggctacagaatcttgtagagaaaatatcagaaacagctcagc

SEQ ID NO: 662289 - DNA, 690 bp, Homo sapiens
  misc_feature (2)..(2): n is a, c, g, or t
  misc_feature (85)..(85): n is a, c, g, or t
  misc_feature (327)..(327): n is a, c, g, or t
  misc_feature (335)..(335): n is a, c, g, or t
  misc_feature (349)..(349): n is a, c, g, or t
  misc_feature (386)..(387): n is a, c, g, or t
  misc_feature (483)..(483): n is a, c, g, or t
  misc_feature (487)..(487): n is a, c, g, or t
  misc_feature (530)..(530): n is a, c, g, or t
  misc_feature (541)..(541): n is a, c, g, or t
  misc_feature (598)..(599): n is a, c, g, or t
  misc_feature (667)..(667): n is a, c, g, or t
gntagaaaaatacagtccacagggtaaattgtcaataaataatggtgtttaatcattaaacataaaaatcccactctttggcatntgacaggattctatttcttgtcaaactaatgactgtatagatatagctaatcttagtgatcattcgtcaatacaatatgttacaaaggtgcaatttactttaaaatatacaacagcgaaacatttccagcccaacgagaaatctgatcaacttagtaagatatgggccaacttccccaaggctctttcacgtagtttgccttaatgaaagtgtaataaacgttgattaagagttcctagggntttctaanacttactttgatanaaatagagtttgccaatacatctggaaaaagaccacnnaaacatgaccacgagaatgccccaatccttcattcacaggagttcttatattatccgacagcttgatactcactaagcccctcccacgaccccacnacanccacgccgttatgtgctagcccgacacactacccacttcagtnctaccacttgnaccctttcagcgtgccacatgcgggccccccgccctggcccgaatacacccggtccnntaactccctatattatattccccatctacatcccgcctagttgcgcagtcaatattcctcaccccagngccttctatatatagaaacaact

SEQ ID NO: 662290 - DNA, 177 bp, Homo sapiens
tatagacaaattccagaagtcatattatccagcctcgaatatcatcctcatatccatcccagccatgccccggtggcatcctcactctccaaatatcaggccatcctttcaggatgacaggtcgcattgtaaagcatcggtcagtgcagataacagccattttgattatttccacga

SEQ ID NO: 662291 - DNA, 470 bp, Homo sapiens
gccaagatcaggaaagtggcgaacaccaaaggctggtgaagcggtgaagcacacagaaacttttatgcactgctgaaggggtaaaaaaatggtacaaccactcttgaagacagtttggaagttgcaaaaataaactctcagaaaactaaaaatactcttaccacaggttccagctatcgcattcctggatatttatcaaaaggaatagaaaacttatatccacaaaaaacttgcacacagatgttcccagaagctttattcacagtcttcataacttggaagcaaccaagatgtccttcagtaggttaatgggtaaactgaggtaggtccagacaatggaatattattctgtgctaaaaggaaataagctatcaagttatgagaaggcatggaggaatattaaatgcatactactacatgaaagaagccaatctggaaaagctacatattgcattattccaactacagga

SEQ ID NO: 662292 - DNA, 255 bp, Homo sapiens
atgctgcggtatctagaggacccggtcgctcggacaacaccacttcttcgacccgctcggacgaggagaccccattctataccaacacctattctgatttttcggtcacccgtgaagtttatattctttattctaccaggcttcgggaataattcttcccattattggtaacttactacttcgggaaaaaaagaaccatttggatacataggtatgggccgagcggaaccttgaataggaggctcctaatttcag

SEQ ID NO: 662293 - DNA, 1122 bp, Homo sapiens
aagccccacattccgggcgagcgtgagcacgagcgggaagggatgctgacccgtggacctgatggtcgcctgcgcgatgcggccctgcagaccaagcgtgatgcgccgcacaggccgagtgcggaccgtggcgccggccaggcctgttggcggcgggagcgtgcgtgcgtgcagtcctctcctctgctctcgtgcgtcctgggaagcatgttggcctgcggacggctccctccggggtgcaaacccagtcgtccgccagcagatcggccgagcgttgcggaggggagcaaggggtcctttctcgggctgccaggccccgtcccccgggtcttccggggggaagcacgcggcttcatgcaacgatttggaccccgggggcaccgggtgggcactgaagccctctggcccttcggcccaaggggggcccggtcggggagaggacggcagctcgtagggggggtcccagggagaggaagagaccagcccctttctgagcttccaatgcagcagccaactccgggggaggggggccaatgagggccaaccgggcaggcccacccaacgggcaccctcggtcgcccttcccctcgggccggggaagcttccagcacaaggtctgcagcaccaaggacggaaggcgcctgaagctccccttcgaggacggagtcaaaccggcagtaaggagggtggaggggcagaaagaagagggctggaccccgaccgatgcccggggcagtaggaggaccccaatgagggaggcgactggcaccggccgggtgagaagaaccgagagattacacagtcaagggaccccactggggggacaagaaagtatcaccgtgcaccacacacgcataagaggaaagggagcccaacacgctcaggaaaacgaagcatctggagagaaagcaaagcacaaagagaggcagcaagaggagggaacagggaagcccacggggaggaggaaagagacccccccagaaaggagaacgagaccacacgacgagaggggggtagaagaataagggagcaagcggaacgagaccaatactaggacgacgaagacgcagagggccagcggacagaggacgaaccacagagaaagaagagggaacagaagag

SEQ ID NO: 662294 - DNA, 361 bp, Homo sapiens
  misc_feature (40)..(40): n is a, c, g, or t
  misc_feature (162)..(162): n is a, c, g, or t
  misc_feature (263)..(263): n is a, c, g, or t
  misc_feature (297)..(297): n is a, c, g, or t
  misc_feature (315)..(315): n is a, c, g, or t
ctttataaatgaccaaaaacaggtaaaattttgttcagtntaacttcagtgaagaagttttttgacacagaactacatatatttttaaattggtaatccacataagatatacacaaaaccttcaagtgactacattgttcaataaataaaactctacattgntttggttttacagcctagtgagcttataattcagtaacacccttttaagaaattctaggctacagaaaggccatggtcccaaaatggttgggcctaattanatttctttaggcaaaaaccttccaatttcctttnataattaaattccttccncataatcaatcttttggaaggggcctggacttaataaaattaccaa

SEQ ID NO: 662295 - DNA, 244 bp, Homo sapiens
ccgcgcatcgccgtgccagctgtgtgtcccggtcgcagtaatactaccatgtgtgtcttcagtgtagttagcaacttcttggtctcaaacagcaggggatatccagaatcacgtagcggtaatccccggagacaagtacttaaacgtctccttcatcatctccttgcgaatctcgagggtgggtaatggtgtagagcagctagcgacggtcatgggtggttaaaagatcaggtccccccaggac

SEQ ID NO: 662296 - DNA, 915 bp, Homo sapiens
  misc_feature (6)..(6): n is a, c, g, or t
  misc_feature (73)..(73): n is a, c, g, or t
  misc_feature (86)..(86): n is a, c, g, or t
  misc_feature (123)..(123): n is a, c, g, or t
  misc_feature (126)..(126): n is a, c, g, or t
  misc_feature (135)..(135): n is a, c, g, or t
  misc_feature (145)..(145): n is a, c, g, or t
  misc_feature (216)..(216): n is a, c, g, or t
  misc_feature (260)..(260): n is a, c, g, or t
  misc_feature (284)..(284): n is a, c, g, or t
  misc_feature (326)..(326): n is a, c, g, or t
  misc_feature (352)..(352): n is a, c, g, or t
  misc_feature (360)..(360): n is a, c, g, or t
  misc_feature (377)..(377): n is a, c, g, or t
  misc_feature (391)..(391): n is a, c, g, or t
  misc_feature (393)..(393): n is a, c, g, or t
  misc_feature (416)..(416): n is a, c, g, or t
  misc_feature (428)..(428): n is a, c, g, or t
  misc_feature (444)..(444): n is a, c, g, or t
  misc_feature (448)..(448): n is a, c, g, or t
  misc_feature (519)..(519): n is a, c, g, or t
  misc_feature (536)..(536): n is a, c, g, or t
  misc_feature (539)..(539): n is a, c, g, or t
  misc_feature (542)..(542): n is a, c, g, or t
  misc_feature (603)..(603): n is a, c, g, or t
  misc_feature (621)..(621): n is a, c, g, or t
  misc_feature (637)..(637): n is a, c, g, or t
  misc_feature (714)..(714): n is a, c, g, or t
  misc_feature (728)..(728): n is a, c, g, or t
  misc_feature (731)..(731): n is a, c, g, or t
  misc_feature (733)..(733): n is a, c, g, or t
  misc_feature (740)..(740): n is a, c, g, or t
  misc_feature (796)..(796): n is a, c, g, or t
  misc_feature (877)..(877): n is a, c, g, or t
cggganggcgggtgaaaggacacggaggcaggtcaacctggagattgagaaggcacagattcaccgtccacanctcacaacaagangcaccagcaggagtccacatcagaaagacatcatcanggnactaccacnaaaaatgacnaggagttaaactattggagatgtgcccgtgatgttggaccacaaggacatatagaggccaaaatccacccnttgaaaaatagaagaaaagaaaatcgcaggaaaatctgggaaancaataaaaaaatgaggataacgtnaaaagcgcgcctccacagtcccggctctcccggtgccgaacngaggcgttttttctttaattgtttanatgccttnttgtggtgttcgtcgtntcattcgtcatacngngtccagaccggcaggcagtacanaaagaatgtggnagagaatagaacatanagtnccgctgttatctatgactttctggatgtggatgatataaacggggaaaggatccaagatgttcttttcttnataaaaacaccaacagnagnaanaatttcagccgatcctgtggacgaaggcttttcctctccctgcacctttgcagctgctgtntcgggggccaacggcagnacgctctgggagaganctgtggcccaagacgtggccctcgtggagtgtgctgtgccccagccaagaggcagtgaggcaccttctgcctgcatnctggtgggcagacncantnctttcantgcagtcaacttgttcacaggggaaacctgtggaaccacagcagcagcttcagcgngaatgcgtccatcctgagccctctgctgcaggtgcctgatgtggacggcgatggggcccagacctgctggttctcacccangagcgggaggaggttagtggcacctctactcgggagcc

SEQ ID NO: 662297 - DNA, 670 bp, Homo sapiens
  misc_feature (321)..(321): n is a, c, g, or t
gggctgaggaattcgcacgaggtgagcttagctcttggttttggtaattttcatatgattgcaatgtctgaacgtggtcatgtggaaagtgaacctaatggcatggggaattatccaattggaaagagtgttgtatggtcaaactcaatgacttttcggtgggttaaacatagccataggttgactttccggccagtaatgacattcaacaaattttattgattatgaatatcggagtgcaagattcatcaatgattattgttatggaacaaaagattattttaaaaataaggataaataatgtttggtactggatagagntatatattttgaggaaatacatactgtagcagaaaatatgtgtaattacccaaaagtgggtttatataaaagattttattttacaagaattttaactattagtgataagcgccgtggaactgcaattcactttgggtgaaattggcgctggggtcaaatttggttataatctctttaacaacatttttaaaaaaaatatggcgggtaaaaaaaaataggaatatttttttttttttccggggggcaactcctcccacttttgggaaggttgaaaaaaaaatgtgtttttaaagggggggaaacaaaaaacaccttttttaaaaaattgtgttcccccgaaagggtgcgg

SEQ ID NO: 662298 - DNA, 216 bp, Homo sapiens
acacttaggcgttcgaaatcagccgacgatgtcttcggtgatcagggcgatcttgtagtagccgccgtcctgaagcttgttcacgacgttcatgaaggcgaggtacttcacttccgtatcggcgcggatgaagacgatctcttccttcgggtcggggcggccgatcacggccggcaggtcgttggtgaggttgtcgagcggctcggggtgcgtgtt

SEQ ID NO: 662299 - DNA, 243 bp, Homo sapiens
tcctgctaacttttccccaacagcaccgtaatcctctcccaaatcatcacaatcctccactatacaatccctctcctgctttcgttctctttctctctccaaccacccagcttctgattctgattcctccccatctccacctcatacccgctctcagactcagcatgctctacactctctctcccttacttctccacttttcagttgccatgtagaccctttgaagaggtgaggggcctaggg

SEQ ID NO: 662300 - DNA, 845 bp, Homo sapiens
  misc_feature (28)..(28): n is a, c, g, or t
  misc_feature (31)..(31): n is a, c, g, or t
  misc_feature (33)..(33): n is a, c, g, or t
  misc_feature (36)..(36): n is a, c, g, or t
  misc_feature (40)..(41): n is a, c, g, or t
  misc_feature (44)..(44): n is a, c, g, or t
  misc_feature (47)..(48): n is a, c, g, or t
  misc_feature (65)..(65): n is a, c, g, or t
  misc_feature (82)..(82): n is a, c, g, or t
  misc_feature (85)..(85): n is a, c, g, or t
  misc_feature (430)..(430): n is a, c, g, or t
  misc_feature (511)..(511): n is a, c, g, or t
  misc_feature (622)..(622): n is a, c, g, or t
  misc_feature (625)..(625): n is a, c, g, or t
  misc_feature (631)..(631): n is a, c, g, or t
  misc_feature (641)..(641): n is a, c, g, or t
  misc_feature (664)..(664): n is a, c, g, or t
  misc_feature (672)..(672): n is a, c, g, or t
  misc_feature (747)..(747): n is a, c, g, or t
  misc_feature (759)..(759): n is a, c, g, or t
  misc_feature (771)..(771): n is a, c, g, or t
  misc_feature (780)..(780): n is a, c, g, or t
  misc_feature (822)..(822): n is a, c, g, or t
tggaacaccctggagttgaaatatttantancnaangggnntgnggnngggctcctgcccccaanggggatgcaggtggatnccnggtggggagggctgcagggttggctcctggcctctgtcctggcttcatggtcctgacagctctgggccagcctcaggcgctgggagcgtactgtagcaccagcctgtcaaagtcgttctccttggcctggtactccttgatgaagggatgggacctgtgggcatccttcagctgggacaggtatcggtttgtcacctcagggggcttgcccaggtgctgggacaggacgatgaggttgaccagcgtctccgggtagccactatccttgtctagcgcctcctgcagcaggccctcagcggcctcccagcggccctgggccatgtggcaggccgcctgcccattgancagcagcagggtgggcgagcacttgtcagccatctcctggaagatgtagtaggcatcctgcagcttctcaccacccgtggncaggctgacccaggcagtggcgagctgggtgagggtggatcctcgtccaggtcctgcattctctttagctccttccgggcgatgtttcaggcggtccagtttagcaggatntgnatgttntggctgtgcnctccaggctgtccccctggtgcngcgccgcngggcggcctccgggttctggtcgtggcgctcgctggcggcggccctgcgccggcccgtggtgttggtcccgtccncgctcctgctcntctctcggtccngctcggccncgatgctgtccctccgactctcgtgggcgaggtagtcagcanacatgcgcacgggcctggagctc

SEQ ID NO: 662301 - DNA, 516 bp, Homo sapiens
  misc_feature (83)..(83): n is a, c, g, or t
  misc_feature (105)..(106): n is a, c, g, or t
  misc_feature (111)..(112): n is a, c, g, or t
  misc_feature (130)..(130): n is a, c, g, or t
  misc_feature (295)..(295): n is a, c, g, or t
  misc_feature (325)..(325): n is a, c, g, or t
  misc_feature (351)..(351): n is a, c, g, or t
  misc_feature (365)..(365): n is a, c, g, or t
  misc_feature (433)..(433): n is a, c, g, or t
  misc_feature (479)..(479): n is a, c, g, or t
tggtggtggttcgagccccacctcattcttttaaaaagtgcaaggtaacgggtgggggggcgcacctcttttcgccttcctgngggaggccctgccagctcccanngaagnncccccgcggttatgaccnccccaagctcatcacctggtttccggtgtgtcgcaacaatgttgcctggaacttttaaaagttcctggtgggccctgacggtgtgcccctacgcaggtacaacccccgcttccagaccattgacattgagcctgacattaaagccctgctgtttcaagggcccanttgtgcctagggggcccctcctaccccggntgcttggcagttgcagtgctgctgtntcgggggggttttnatttataagggtgtttcctttaaacctacgagggaggaacccctgtttttacaaaaaatacccccccnaaatgggggctggtcctgttgatcccagtttttgccagaccaaggngagtttcccccctaataaagggccgggggtcagcaga

SEQ ID NO: 662302 - DNA, 618 bp, Homo sapiens
  misc_feature (31)..(31): n is a, c, g, or t
  misc_feature (62)..(62): n is a, c, g, or t
  misc_feature (65)..(65): n is a, c, g, or t
  misc_feature (69)..(69): n is a, c, g, or t
  misc_feature (99)..(99): n is a, c, g, or t
  misc_feature (104)..(105): n is a, c, g, or t
  misc_feature (111)..(113): n is a, c, g, or t
  misc_feature (124)..(124): n is a, c, g, or t
  misc_feature (132)..(132): n is a, c, g, or t
  misc_feature (142)..(142): n is a, c, g, or t
  misc_feature (165)..(165): n is a, c, g, or t
  misc_feature (167)..(167): n is a, c, g, or t
  misc_feature (174)..(174): n is a, c, g, or t
  misc_feature (184)..(184): n is a, c, g, or t
  misc_feature (191)..(191): n is a, c, g, or t
  misc_feature (210)..(210): n is a, c, g, or t
  misc_feature (214)..(214): n is a, c, g, or t
  misc_feature (229)..(229): n is a, c, g, or t
  misc_feature (234)..(234): n is a, c, g, or t
  misc_feature (242)..(242): n is a, c, g, or t
  misc_feature (271)..(272): n is a, c, g, or t
  misc_feature (274)..(274): n is a, c, g, or t
  misc_feature (283)..(283): n is a, c, g, or t
  misc_feature (301)..(301): n is a, c, g, or t
  misc_feature (308)..(308): n is a, c, g, or t
  misc_feature (326)..(326): n is a, c, g, or t
  misc_feature (332)..(332): n is a, c, g, or t
  misc_feature (337)..(337): n is a, c, g, or t
  misc_feature (377)..(377): n is a, c, g, or t
  misc_feature (402)..(402): n is a, c, g, or t
  misc_feature (416)..(416): n is a, c, g, or t
  misc_feature (447)..(447): n is a, c, g, or t
  misc_feature (455)..(455): n is a, c, g, or t
  misc_feature (463)..(463): n is a, c, g, or t
  misc_feature (477)..(477): n is a, c, g, or t
  misc_feature (488)..(488): n is a, c, g, or t
  misc_feature (514)..(514): n is a, c, g, or t
  misc_feature (519)..(519): n is a, c, g, or t
  misc_feature (545)..(545): n is a, c, g, or t
  misc_feature (589)..(589): n is a, c, g, or t
tccaatgaataataaattaacaacgaaagangagcaaaaattattccatttgcttgaaaatngtnaaanatctttctataataaatcatgagtaaagtnaaaannaaaaannnaatgtataaanaaattggngctgaaaganaaggggaacaagatttataggangnggtcaangcaatgaaanggaaggnttccctgattccccttggngggngtgggaaaggggtgngggtnaccgtgtncagtagccccctctgcagaaaccccttgnnanaaggggagnacgcagatgggcaagtgnagaggcnggggtgagggctttgggntctggntctgnggtagcgtctagaggtgggtgcctgaaaccccagtgttanaaagctctttcagcttggccaccanagaaagctggagtnttaaccagctcaatggaccttctgctttttnaaaagggnaaaggacnaggggaaagctttntgtattccganctcttttccagaatccaggaaaaatngggtnaaaaaaggaattgaaggatgaatganaggatttattgagtggtggaaatagatttaagcaggatggaagnggagctggaagggtggggatggatgaagt

SEQ ID NO: 662303 - DNA, 252 bp, Homo sapiens
gtgttcgtgtgtatgtgtgagatggggtctcgctctgtcacccaggactggcgtgcaggagcacaatcatggactcgctgcgagcctcaaacttactgggctcaagcggtcctcccaccatcagacctcccacagtagactggtaccacagaccacacaccacatatgtcagctaacttaaccacaaaaactttacagagatgcagccgtgggcaccctagtgagtgagacctcaaatctctgccaaaaaca

SEQ ID NO: 662304 - DNA, 694 bp, Homo sapiens
cagaaagaagcaagggccttcaggttcctcacactcagtcctggagtgatcttttccattcagcctcgcctagcctcgcatagtgcatcctgtgtacgcaaacatctagcagatcttcatgtacccactagcaggtcagcttggaattcaaatcctgtcccagagctcccgaagcacctgggtgcgctcgtacatcaccgtagagtttgcccccgagagtgactggacatggtcaggcagaagcggctctatgcactcaccacgtctgggaacatcaggcataatcatgtgcggagcaggtggctttggctgtttagttcttatcagagtgctccacaaagtgcatgggacttacaatgactgctgatgcgcatccgctgcgcatagtacaaaggtagtgaagaactgttcatacaagttactggttctaaaaggtttctggtgctctagatggattcaggaacgaacagtaggttacggacaggctatgtgaaagaaggtcactggaggagatccgaagggtgcacttcgactggccatcttggtccaacttggcacgctgcacactggatccacttgaattgtcctaggccccacgtctttgaacgcaaagtattgagctcagcttagttgaccatgcactaggaactcactacattctactaccccctaccaatcggaccctttctgaaat

SEQ ID NO: 662305 - DNA, 244 bp, Homo sapiens
ccggctctgaacttaggccctaatatacaaagttatcacattaagatatcaatggtctaaatacaccaactgttatacagagattcgcataagtcgattgtacaatacaatgactcatagtacgtgctagtctacagagcaactcacttcaaactataccacgatcggcaaggttgcacacagtaaaacgcatggacaaagcatcgtcatccatgtgaacagttaatcaacaggaaagcaggga

SEQ ID NO: 662306 - DNA, 403 bp, Homo sapiens
tgtgcctgatcttgagcacacagtgcgctctgcccctagagagcactgtgtcctgatctactctgccactggtgccacccactggctggagacatgggtactctgccaggagtgcccaaccctcccttatcaactcatcctccagctctgctacaaaccggaggggtgaccgcctatgcctaaggtcgtgactactgtgatctgtgcgcctggcctggctgcatggactgtagtgtgtgcaccatgtggccctggccatggctgcatcccagaccttcctgtggatcctgctcccaggctgtgtcactgggcagacgctcaccctctctgagcaaggacacagggagaggctgtgtgtggtgtgagaagtcttcctacactgggtgcctcgtcctgtagagac

SEQ ID NO: 662307 - DNA, 491 bp, Homo sapiens
tcgcggggcgctcagaggatccgatatgcgtctcatagttatatttattttaggaaaacaggggtcactggatacattctcactagttaaatcaccattcaccttatagttaattaacttatgttccaaggatagtcctttcctggtatataatttcattttcttaaaaaggcaaacactttccggaggaaaaatttacctatggaaggccaaaaccattatttccggcaaaatgggaatccaccaccggatcttttctcgagttcttcggaagaactattccttcaatcctgacttgtctatgtgattaaataatgcacggtgcaactggttggatgccagaaccattctaagcgctttccatgtgtaacttagcagacagtgggaaccccatcaagacagtactataggtcagccagtctgaagagcccacctgcattctccgggaaacctggaacttatcacattagagtaacagtgaattccttcct

SEQ ID NO: 662308 - DNA, 438 bp, Homo sapiens
  misc_feature (8)..(8): n is a, c, g, or t
  misc_feature (209)..(209): n is a, c, g, or t
  misc_feature (318)..(318): n is a, c, g, or t
gtttggantggtatcttttacttgcttattagcttgataataattagtaattatgtagctatgatttttgtattatgaatcaattagggtgagagttacttttagtatgggggtgagggctagggtgttgtggaagagggggatgcagtctatgaagagggtgtggtgggtgctggggcttgctcagggggaggtgctccttatgtggnttttgttttttggccatcaggagtctgttgatggtgcagtgtgggtatttggtgctgtgtagcaccattttgcagtaggcttgggtggtcagtttcaccccgggcatgntgacccgggagggccccggaggcccctgggcgcgcggctgaggcctggacccgctgcctggccgcgcggcgcctcagccgagaagcgggacgaggcggcggcgattgatggcgcggccgc

SEQ ID NO: 662309 - DNA, 361 bp, Homo sapiens
taatgatgagggacaaacactcagaacaaagcagcagtgttctggaatcctctgattaaaagacaaacactcagatcccagcatcagtgttctgacaccctatgttagggacaaacactcagaacccagccactgtgttctgaaatcctatctgaaggacaaacaattcggagccgtcgtagaacttgatccttggaatccctactctgtgggacaaacacatcagaaatcctatagcagtgttctggaatcctttgtgactggacaaacgaacagagcccagcagccgtgtatcggaatcccctctggcggacaaacactcagaactcagaagcagtgttctggaatcctttgtgatgga

SEQ ID NO: 662310 - DNA, 549 bp, Homo sapiens
ggtcatttaactcactgagtcactaagacataattctcctaagccagaggttaaagaaagtgcttactcttcttgtgagggcagcactgcctccgtggccaaggcaggactccaagaatcagtggttgagttgtctcctaccaccagccgcctccccaggtactgggtccatgccccctgtgcccaccctccccagtgtgggtccatgctgttgaaccaacttatttaaaggtggtcctgagattgctctcagcaaactcacatattgggaataggatctcccgtgtgcctaacgcagtagctattggtttgaacaatgtccagacaagactgtacctttgagaatataactgtgtttggcacctgcatagcaccatgaagaagaccagccaccaatggaagcggggtcactgcccacagactggatgcaatgaggggctcacaggagggccagcagccgattgtgggctgaggggtctgcattcaagcacgatgttctagaataggagtttaacgtgtctacgtaacctagaatgtggttattaggaa

SEQ ID NO: 662311 - DNA, 959 bp, Homo sapiens
ggaagaacaaaggtgtctaataggaagagatgttagagaagtagctaatttgagaaaaacaaaatttgaatctggacaagctgaagttcacataccatcagaattactgaagtacaggtaaacagagatctcaagttctgaataaaaaaaaaaaaaatagaatccagggtctaaattaccctgttttaggaagtcagttctctctctctctctctcacaattctctcctcccaaaaaattactcaaaagattataaagggtcttcttaaattgaaaaccaacttttttagacagacattactcagcatttattatccgggggtgatattcccatttacggagttattaagataacaaaccgttctgaaatacattacaagccgtaccctaggggttaaaacaaaattttttcatcaggactctagtcccaaattgttcaaactgttcacactttcgggtgaaccagaaccttatttatggaagggttccttggctagagattacccagaaaaatcctaatactcattaatccttctttaatcaaaaccacattggtgcactgaattcctacagaaattgccattagccaaaagattctttcccatccttggcttgtaatatccccaaggcttactcgtggctaagtccttccctatggtcccgtggatttacaaatccagtgtgtgttgtgtgctgtgtgatgtgtgtcgtgtgtgtcttcaaactcaggcacttattacaaagtggttgcggagtcaagaataacctgcgggcaaagaaaaactacaagtggttacacaaggattccacccgactctgttattaataatgttgcgtggcccaaatacactgctggcgccaggagtaaataagccccttctctataataaacggaccaactccatgatgtcggtgacataacacgcgtgtgtaccacaccacatggattggggtgcacc

SEQ ID NO: 662312 - DNA, 129 bp, Homo sapiens
ggtttgccgccagaacacaggagtcgtgaaaactacccctaaagagccaaaatggggaagggaaaggctctcatatcgtccattgtcggtcattggacaggtggattcgggcaaggtccacacttctag

SEQ ID NO: 662313 - DNA, 704 bp, Homo sapiens
agcgggctgagagacagtagcctagagagagagagacagttaaaaaaacaacaacaacactggaatgaggccaggcgcagtggctcgcgcctgtagtcccagcactctgggaggccgaggtgggcagataacctgaggtcagaagtttgagaccagcctggtcaacatggtgaaaccccatctctactaaaaatacaaaaaaaaaaaaaaaaatttagcgggttctggtgcgggggtggcccacttggtgtgaatcccagtttactcgaggagaacggtgaggcaggagaaattcctggaacccaggaaacgggaggttgggcgggtgagctgagaatcatactactgcactccagccgggcggcaacagaagcaagaagttcccgctctcaagaaaaaacaacaaacaaacggaaggggttggggcaggggggctctccaaggctgtggagtaaatcccaccagggcatttgggagagaggagtcaaaggagcaggcgcaaagattaggcctagagggtcaggagagtgtccgaaagacccaggccgtgggtccaacctgtggggtagaacccccggtgtctcttacaaaaagattacgcaactctcaggcggggagtgggggggggtggtgagggcttggagagccatagtaaccgcagaagggtggaggcgggaaactttggttgagccctggaaggggag

SEQ ID NO: 662314 - DNA, 323 bp, Homo sapiens
gggttttgggcaaattccccttttttgcaaccccaaagtgggggcggaacttgggggcaggtcctgggaatgggaaaccttttccttgtgtttttcgccccccttttagctcatcgccccaaaattgcagacttggaaggaagcataagcttccccttttccaaaagggaaaattaggggcgggggggcgggcctgggggcggccgtcccatgggttccattttaacccccccggggccccaggggtcctggggccctttttttattgcttggcctaaaacaggtccccgggggttaattttttcccaaaaagtgttgcccca

SEQ ID NO: 662315 - DNA, 163 bp, Homo sapiens
ccctgctgtcttctatcatgtgcctcagcctgtttttttccttgccaggctgcaggccgtgatatcagactaacaggagcacaacatggcacggtctaaagacactacatatagggtgaaatttggttcttctatcttccccccttgcatggagaggaccctc

SEQ ID NO: 662316 - DNA, 778 bp, Homo sapiens
taactattaaacaccttgtttacagacagatgaaataggatttattccaaccaaaaaaaaaaaaaaaaaaaaaaaaaaaaaaaaaaaaaaaaaaaaaaaaaaaaaaaaaaaaaaaaaaaaaaaaaaaaaaaaaaaaaaaaaaaaaaaaaaaaaaaaaaaaaaaaaaaaaaacaaaaaaaaaaaaaaaaaaaagaaagaaaaagagaagagggagcgcgcgcgcgagcgcccacgataacatccacaaggagttgagacagacagaacaccaccagccccagcgacacttaacaagggcgagggcgcaccgcacgaccctgcggagcacatataacaacaagcacaccacagagagagcgcgcccacgcggccccatccaccccgaaccacacgcgcactaccaggagcacaggaagcacgcagcaccacagaaccaccagccagcagacaccacaaaacaacactgagcacgacacgaggacgcggcccaaacaccagccactcaagtgtgagagcgccgagcgagaaagcagaaccgcaacgagacgcagagcagacgcgcaggagccgaaccgacgcacagcatacgcaacgaacaagaaagagatgaaccagacgacgagaagcgcgcgcgaggtcagagagaggataaaaaaaaataaacttaaaagagtagcacacaggagagacaaggagaacgaggtcgagtcgacagcagagacgacaagagacgaaacagccgaataagcgagcgatatgggcgcagggggcgggccaa

SEQ ID NO: 662317 - DNA, 301 bp, Homo sapiens
gtttatgatctatttgtagattaggattaaaatggatttaacccctttttaaggcggggtgaatttttttaaacaaaaaccatttgcaatatggattttttaaagattaaaccaattataacttattaccagtcgcgagcccatgttcaaatagtcaatgtaaaaatcccctaatgagtttttggtaaatcccagtaggcttttccccttagcaaaattttgtgttggccaattaagttacaattacatctctaattttggataaaattcattggttaccaataaagtgccaaaagcccca

SEQ ID NO: 662318 - DNA, 432 bp, Homo sapiens
ttcaaaaaaatttgcgataccccagaggaagaatttggaatttttccaaataaatttaacaaagagtttgaaatcttgaaaaaaaatcaagcaacaattgtggccatataaagtagaaggatggtttccaaagcctgggaagggtagtaggggactgtggcaaaggtagggtggttaatgggtgcagaaaaaatagaaagaatgaattcaccttactttttgccagcacatcagggttgactatagtcaataaaaacttagttataaacctttaaacaactcgaaaaggggaactagattgtttggaactcaaagaataaatgcttgaggggatggaaatcccattccccataatgtggttatttcatatcacagggctgggtcaaaacatttcatggcccccttaaatatatgccccccctatgtccccct

SEQ ID NO: 662319 - DNA, 320 bp, Homo sapiens
ttaataaaaaaaaatcccgttaaaaaagttttggggaatttaaaataaaaggcggtgaggtaaaggctggggatggggggtcccatttttaaaaccagctttttctggcaaccctggcccagggggggctggagccccccccctaaggggccctgttttttcccctgctggccctggggctttgcccctgctgaaaacttttttggaaaggggttttttggaagtgaaatctccccgtccgggggcccagggtggggcaaaaactcccccagggcccccttttgcccccctttggggaaaaaaacaagggccggttttca

SEQ ID NO: 662320 - DNA, 537 bp, Homo sapiens
gaaatatacaaagacatgtggataggccagatcacagccattgagaagacttttgattgatgcccagaaatcaatctcacagcattacagcaaaccccgagatcacaccggtggaggtcatgcactgtcttcccagactttaatgatgtggatcaatccatgtgctcatggtgatctttgactcagacccagcccctcaaggacactgagtggtgcagcatgcgttggagatgatgtcatcatggccatgatcaggggcatgatggatgaggaagggaaccaagattgtggccttatttcctgacctgattgcaagacgactgtatgaacgaccatgacaaggcgggacccaggagcgaggaacgactggcctcatgcaccagactgcactgctgtctgacctaccaaacactcggcccgtggagctacaaactggaacgtgaacgaacaaagcttacacaaggcgactcctgaggaaaaccaacggccatcaatcctcaccgaagagcggtcacggggtcaactaacaactcagaa

SEQ ID NO: 662321 - DNA, 933 bp, Homo sapiens
  misc_feature (143)..(143): n is a, c, g, or t
  misc_feature (145)..(145): n is a, c, g, or t
  misc_feature (156)..(156): n is a, c, g, or t
  misc_feature (166)..(166): n is a, c, g, or t
  misc_feature (170)..(170): n is a, c, g, or t
  misc_feature (174)..(174): n is a, c, g, or t
  misc_feature (191)..(191): n is a, c, g, or t
  misc_feature (195)..(195): n is a, c, g, or t
  misc_feature (198)..(198): n is a, c, g, or t
  misc_feature (203)..(203): n is a, c, g, or t
  misc_feature (210)..(210): n is a, c, g, or t
  misc_feature (213)..(213): n is a, c, g, or t
  misc_feature (229)..(229): n is a, c, g, or t
  misc_feature (252)..(252): n is a, c, g, or t
  misc_feature (258)..(258): n is a, c, g, or t
  misc_feature (262)..(262): n is a, c, g, or t
  misc_feature (264)..(264): n is a, c, g, or t
  misc_feature (267)..(267): n is a, c, g, or t
  misc_feature (269)..(269): n is a, c, g, or t
  misc_feature (273)..(274): n is a, c, g, or t
  misc_feature (278)..(278): n is a, c, g, or t
  misc_feature (289)..(289): n is a, c, g, or t
  misc_feature (293)..(293): n is a, c, g, or t
  misc_feature (295)..(297): n is a, c, g, or t
  misc_feature (330)..(330): n is a, c, g, or t
  misc_feature (382)..(382): n is a, c, g, or t
  misc_feature (440)..(440): n is a, c, g, or t
  misc_feature (511)..(511): n is a, c, g, or t
  misc_feature (869)..(869): n is a, c, g, or t
  misc_feature (927)..(927): n is a, c, g, or t
tgggcgccacagcccgcgcgtcccgctgcgccccgcgcgccccggggtctatggagctgcccctccgcgccgcccggccggccccacgccgcgcccggagcctgctctgcggccaagtaatcggactggcggtcctgcggganantcggggctcgnagcccgcctnaacnaacnccccggaaatggcggcncccnatnccggnagtgganagnaaaaacaaaaaaaaanacgtggaaggccgcggcgccacntaaaanaaananttnanaaannggangaagaaaaaanagcngnnngaaaaatgcataaaggagaaaaaaaaaaaaaanaaaaaaaaacaaaaaaaaacaaaaaaaagaaaaaaaaaaaaaaaaaataaanaaaaataaaaaaacttataccaataaaaaaaaaaaaaaaaaaaaaaaaaaaaaaagantacataaaaaacctcagcgtcacctacctccgcctgcgccggttcgccgcgctgggtggcgccgccctggngggctgagagccgcggggccgccagctggcctcgccccaggccgccgcggccccgcagcgctggtctccgaagtcttcgagcagcacctgggaggtcacatcttgcagtccctggatggctttgtgttcgccttgaaccaggaaggaaaattcctctacatctcagagacagtctccatctatctgggtctctcacaggtggagatgacgggcagcagcgtcttcgactacattcaccctggggaccactcagaggtgctggagcaactgggggctgcggacgccgacgcccggccccccaaccccgccctccgtctcctcttcctcctcctcttcctcttcgcttgcagataccccngagatcgaggccagcctcaccaaggtgcccccctcctccctggtcaagagcgctcttntttgtc

SEQ ID NO: 662322 - DNA, 593 bp, Homo sapiens
aaaagacaggcaaatcgtgattgggggaaaaatgtccccagacaaaatgaagggtggatgataaattatgccaggtaaatgaacctgactgcgtccaaagatgcatcaatccatactgcgtggcaacactgaaaatgcttgctcgactattgccaaagacgcagtcttatacctatacctgtgaataaaagcttacaaccctggcaatagctacggcgatacgttgtggattcaaacaaggttgatatcagagcttgtcgtaacccaggcactaagctatcgctaggttattagaagtctcctatgtaccctgttatttgcagctgtgtgtaaacagagctcttgatgtgcatacctaaggaaacattttacgtaaggaaggagtcatggggtgatatttgcatataaaacagtgcttaaagcgctaggcggtggggacctcaaacacattatttaaaggccagtgccttctatctctggatgagactgtcatgactgatggtcttagaacacgaaagacgctcgactctcttagcttatgtaatatgcatactatgctgtatggacgctagaaagtcatctctttcagaaga

SEQ ID NO: 662323 - DNA, 424 bp, Homo sapiens
  misc_feature (118)..(118): n is a, c, g, or t
gcgggcaaagcccctttttgggggcaccccttttttttttaaccgccaccggggggggggccgccccccccaaaagccccgggggcccccccagggggggcccccgggggaatccccngcccccgccccccgttccgcagttcgcagggcccttgcctgccgaacccgctgctgtccttccaccctggatttggggccctcccatgctggacccggtgctgggcgtcatggacccggcgcgcccggaggcggcttcccccaagcccgacgcggaaccccgccccgggacgcagccccccagggccgcttccgccccaacgcggacctcgagctgaacgacgtcatcggcctttaggttccctcattccccgcgccctttccgcccggccccccccttttgtatacataaacggccaaggtgtga

SEQ ID NO: 662324 - DNA, 1624 bp, Homo sapiens
  misc_feature (12)..(12): n is a, c, g, or t
  misc_feature (729)..(729): n is a, c, g, or t
  misc_feature (916)..(916): n is a, c, g, or t
  misc_feature (983)..(983): n is a, c, g, or t
  misc_feature (1003)..(1003): n is a, c, g, or t
  misc_feature (1008)..(1008): n is a, c, g, or t
  misc_feature (1109)..(1109): n is a, c, g, or t
  misc_feature (1214)..(1214): n is a, c, g, or t
  misc_feature (1279)..(1279): n is a, c, g, or t
ggcaaaaagccnttgcttcggcccctaaccctaaaatgccctcccagcccctcccatctttggacgaggcctccttcctcaggttcctcctgctcctgacctcccagtgtgatgtccgggtcctttatcatcctattcatcctggagaggaaaagtgtcgggcaaagggggatctggggggagctcagcagtgactggggagctggtctgcctcagagacagagtagggggtgggagcagagcctcggtgagggtcttggccacagggcagtgccttcctgaacgtggcaggctttactaccaggaacgcactcggtggtggaggccccatgttcccaggagccaagattcgtagcatccttgaggccatcctgataaaattcggcgctattgcccccgtagctctggagctctaaaccgtctatctgcttctgtgctgaacgcctttcccatctgctgacgtaggcccagggctgccctgcccctgctgccagtgtaccgtgagcggggctccagccagttcaagctcagagccagagctggacgggccagaactgcgctgcacacttcctggactgaggcggggactttgggtcccacccggtttctcctgattatggctgctgtggggtgaggggagggaggggcagccccgaggcagtctcttccctttgagaagatattttcccacaaaggggtgggaagccaggagtgagaaggaattcaggnagagcaaaggagccagtgctgagatgctgctgtgttggttgaggaaaacctcgggcctgagggccaggccggagcccaggtctctgctgacaatgggggttcaaggaagacgtcgttatctcccctccccacttactcgaggagagaggtgagggggggatgacttgcgggttctgatcaggccccngggccaggctgggccccccggagtcccatcaagcgacgctcgggggctcttcccccgcctgcacacngggctcagaaggccagggcnacacngggcacgatgtgacagcacatccagcacacccaagaccccagatggtggacactcctctcaggagataaagtctgagacctcatccaatcccagctctccngaaatctgccccaacaaggagaagcccttcatgaagttgaaggaaaacggccgtgccatctcccgctcctcctccagcaccagcagcgtcagcagcactgcaggngagggcgaggccatggaggagggcgacagtgggggcagccagccgtccacgacctcacccttcangcaggaggtgtttgtctacagcccgtccccgagcagcgagagccccagcctgggggcagctgccaccccgatcatcatgagccggagtcccacagatgccaaaagcagaaactccccgagatcgaacctgaaattccgctttgacaagctcagccatgccagctctggtgcgggtcactacctgtgcaccggtggagtcccttccgccttgtcccaagggaacttcccgctcattcgtgtccctgtcacacatgtgctcctggtaccaggcaggtccgcgccagttgctgtccaccgacgcctggatcatgtcccaagccctgttgccccattggccccgtgccg

SEQ ID NO: 662325 - DNA, 111 bp, Homo sapiens
acatactgagtcatctttgtctgcaaccagtttcactggttgccacctcatttcacctttatttcagcaacacaaatggcctgcccaactggaagtgcaactttatttttt

SEQ ID NO: 662326 - DNA, 200 bp, Homo sapiens
tgaagaaaagatccacccaagcaagtcagcatgtttaataattttgagggggatctcaaatgtggaaggattgttatataagacacccacatgatgacatgagacattaaatgctataggattatggaggattattagctatctatttctcggttagggaagagatataattagttgtagaggtatcactatctcctaca

SEQ ID NO: 662327 - DNA, 1302 bp, Homo sapiens
  misc_feature (12)..(12): n is a, c, g, or t
  misc_feature (729)..(729): n is a, c, g, or t
  misc_feature (916)..(916): n is a, c, g, or t
  misc_feature (1106)..(1106): n is a, c, g, or t
ggcaaaaagccnttgcttcggcccctaaccctaaaatgccctcccagcccctcccatctttggacgaggcctccttcctcaggttcctcctgctcctgacctcccagtgtgatgtccgggtcctttatcatcctattcatcctggagaggaaaagtgtcgggcaaagggggatctggggggagctcagcagtgactggggagctggtctgcctcagagacagagtagggggtgggagcagagcctcggtgagggtcttggccacagggcagtgccttcctgaacgtggcaggctttactaccaggaacgcactcggtggtggaggccccatgttcccaggagccaagattcgtagcatccttgaggccatcctgataaaattcggcgctattgcccccgtagctctggagctctaaaccgtctatctgcttctgtgctgaacgcctttcccatctgctgacgtaggcccagggctgccctgcccctgctgccagtgtaccgtgagcggggctccagccagttcaagctcagagccagagctggacgggccagaactgcgctgcacacttcctggactgaggcggggactttgggtcccacccggtttctcctgattatggctgctgtggggtgaggggagggaggggcagccccgaggcagtctcttccctttgagaagatattttcccacaaaggggtgggaagccaggagtgagaaggaattcaggnagagcaaaggagccagtgctgagatgctgctgtgttggttgaggaaaacctcgggcctgagggccaggccggagcccaggtctctgctgacaatgggggttcaaggaagacgtcgttatctcccctccccacttactcgaggagagaggtgagggggggatgacttgcgggttctgatcaggccccngggtggggaaggggcacagtgtccctcagcagcttacgcccctggagtcttggggggcccagcctggccctggggccttttccagctactgtgcccttgggcagctgcgtctggggctcaacccccaatcctgttcccctctccagctgcgggtctgtaggcagctgtcacatctgaagggtttctgcanactggaccccatctgggtagtgggtcagacccatgtgcaccacatagccagcacccagcctacgacagagcccgcattgctgggacagacaagtcaactccgaaggacatatccccatcctgagatttctacaccacttacaagagtcatgccagccgccgtgggcttctctgccagatggggaccagagaatagg

SEQ ID NO: 662328 - DNA, 248 bp, Homo sapiens
aaagccccttttttgcctttcccctgggggttttttgtcccccaaggaaaagccttttatgagggctgggaactttttaagggccttcccggttgttttccttgttttcagcgggtccctgggccccaaaaattccttgcccttttgaacaagggacctttttttccatttttggggaatttgccaggggggccaatggggggtgaggcaaccccttttccggtccaaaaaaaaaatgttttccaata

SEQ ID NO: 662329 - DNA, 1781 bp, Homo sapiens
tctattcctcccctccccgaccccctgatctgttttaaccacggggtgagaggctctctgcctttctcagaatcggacttcttgagaagtccactcccagacatattaacgcgactagtgaactgcggtccccaccccccaactccaaccccggaccgagaacagtggaggagtcgtccaccatcactcctacagcgagacctacaaacacaccgcgcagagaccgaaagccgacaggcccagaacaacggcacgcactgaccacaggatatacatactcaacagaggatccacaattggcgcgcgcactgctacgcaccagcacgaggaaacggagacatagccgcaccactaagacctacagagcaaccggaacacacccgcaacgcgccacagactgcacagctgccgcataaacccactagacaccccaccaagaaggctacccaccagacaaaccacgccaggcacggacccgagaaacacgcgctgcacggccgccagcggccggacacttacacagaggcggaacaagggaacagatacaaccaacacacacaaacaaacaaccagagcaagcatataccacgccaaaacaacagcagagcaccaacccgggacaacagccacaagctagagcacagcaccgcgatacgcgcggacagccacaccactaaaccaacaacaggatactcgccccacaccatgcggcatcagcactaaacatacaggacacaaaaggcaggaccgacacgcggaacgagacgacataagaacacccccacaagacaccacgcaatcaggaccaacacacagacccccacacaaaagaccagggagctcaacacacatcggccaccgcccccacgcaggcgcaccgcgcacaatatagacgaccacagcgggaacacacgcacccacaccactgcgtcacacaccgcaccccacgacacatcgtcgatagccacgagaatcgacgagaggacaaacaattcgacgagcacactagacacgccagcaggaacgcggttgcataacccgcacccagacgccacacgcaccacaccggcgtcccgcacacaccagctaccagcatcccacatctaccagaagggagagcacaccccgcaacgagggacaaagacatacacacaagaggcgcaacagcaagataacgaggcggaaacctgcccacagaggcaacaacgccgacaacgaagcccaaagtataacataggaacgacagacaacaggacacgagcacagtccccagcagagcagtacaacgaccgaccccgaggcaaaatagagaaacaacaaccaggaggaacgaacagaagacggacaaccgacgaacacaaacaacaggagcagagagaaacaacaagaacggggaacacacacacagagcccccacgacaacaccaaacagaagcacacacacacgcgaccagcaacctgggcgacgcggccgcaccagtcgcacacagagcgccgcaaagatgcaccgcagaaccatcgcacaagcacgacacacagaacagagacgcagcacagaccgacaggacagcacagaagaacgaacaaacgcagcagcacacacctgacgaagagcaggccggacacaagacgcgacagagcgcgcagagccacacagaacgacagcagaaaaacggtacagcacaaaccatcaccaagcatgacacgcaggaggagaaagagagaacgctaacgacacacgagaggcgccacacaacgacaccgacgcgaaccaaagcccg

SEQ ID NO: 662330 - DNA, 300 bp, Homo sapiens
ctactggagaatcttcccagtaggcggcgcgggagggaaaagaggattgaggggctaggccgggcggatcccgtcctcccccgatgtgagcagttctccgaaaccccgtcaggcgaaggctgcccatagaggtggagtcggtcgcggggccgtgatcatgaggtagtttctcctattcctgaggtgagtgactcctttcgtgctggctccgcgacctccggttgacccgggcttcggcccccaccagagacgtgctttctttttttacttttacatgttactgtcttctactcttttgga

SEQ ID NO: 662331 - DNA, 140 bp, Homo sapiens
  misc_feature (140)..(140): n is a, c, g, or t
tggaggaaaaaaggatgtttacgcctgggcacttacggtagccccactgcctcttcacagagctttgccacaaacatggttatccaccggtcccagtcatggtttcccacaaaatttctaaaatgaggctcagcgattgn

SEQ ID NO: 662332 - DNA, 664 bp, Homo sapiens
ctgctttttgtgtgtggtcaaaaaattgcccccccccccgcttggtgggggccaagggggggaacctctctttgtgaaaccccagaaagcgccacaagtttgggagggtgtgaatactagccttctgcctctggggaatatgggtgtgtgtgtggaaataggaaccatctgtgtgtgtgcgcccatctgtctgtgtggggggcactcttgtgacagaccccacgccacgcaccacgaggcctcgtacaacagtgggttgagagagagagtggtctttcacaagcgtgagaatgagaagccccacagcctaggcacccactgtggcgcacgccacgcacattcgggaagatttcccctcacgttgagcacgccttcaccctgaggtcacccttcccaagttgttcacatgggctccatggctctggactgtggccaacacttctccacattccgccccatctgtaccggatgctggcagggaggtggcagagagctcactgggactgaggggctgggcacccaacaccttttcacacctgtgcttatcccctggatttatcattccgcaaaaacctggttttttgtgctggctggcaggccctgtggctctggctgagggttttctgtcctgggccaccccctttaagtcccgttccctccggga

SEQ ID NO: 662333 - DNA, 180 bp, Homo sapiens
aaacttgacccaaaattccttttttaaaaaaaaagggggggtttttggaaaaaaaatttaaaaaggttaaaattttgggaggggtaccagtttttttcccaacccggaatttggggggttttcccgaaaaaatttttccaggaattttttgttgggaaaaatttgggggcctttttttta

SEQ ID NO: 662334 - DNA, 410 bp, Homo sapiens
catcccatgcatgatcggtacacgtgtgctgtgggctttctggtatctccagtgattctcacagatgcttcgatagtgagttttttttaattgtggtaagataaacattagatttaccattttaacaatttttaagtgcacagttcggtggcaataagtacattgcaattgttatgcagccatcaccaccgtccatctccagagctttaccatcatcccaaacagagctctggcaccattaaacactaacttcccatttcccctctccccagcctcccattctccgttctgtctctctgaatgtgactactctaggttccttaggtaagtggaatcatacagtgcttgtccttttgtacctagctcatttcacttagtatagtgtcttcgaggtccatccatgttgtagc

SEQ ID NO: 662335 - DNA, 439 bp, Homo sapiens
tcgtactaagagtaactaaagttgaccttgacctatgcaataggggaccacaggcatttccataacctgtacacttcagtacagtgatatagtttctctctgagtcagctactatatttctgtacagctaaaagtctacttatttgctttgtagaaggagtacttaattactggctctgctgacatctaacaaactgtatttcttcttatttagaagatagtatccttctgtgcactctaaaatgttacaatttactgaaagctacgtgccaggcactatgcttttctaacactataccactcactttatatgttatgtagctacattcaatcgtgactctaaagccggcatcattgtacgcattttatcgaacaggaaatgggagggttggagatatccgataccacgtatacttaaaacgcgatttatattccatcc

SEQ ID NO: 662336 - DNA, 555 bp, Homo sapiens
  misc_feature (261)..(261): n is a, c, g, or t
tcgagctcggacccactcatctgccagtagagagtagaataattcctcaaagcgacgagagcacgtatgttttattatagaatcgtgttatcaaataaattttgcaagaaaaatggcaaggttttatgtttctgagaatgttaggctaggttagactaccttctactcccccaccctccaccccagaaaaacagccacaattgttagatgaaaaaacataaataaaagaactgacaaaaaagcaggaaacttttggatcanaatctaactgaaaataacgcagaaaggtaatttaaacaccatagaatggggtctgcttttgtcctgagggcatttgctcatgtggacaaagtggggctttgagtttagaggatttgtgaaaagaacagtagttaagctcgattcctctcaaggtaaatagcctaaaggagaccctccccacaccgatggaactctgaagggctctatcctcaaggtgtgagggcagactagaggcacatgtgcctcacaccgttccttgccctcatctggttgtctttttactaaatgtagcac

SEQ ID NO: 662337 - DNA, 247 bp, Homo sapiens
gtgcggcctgcaagaagccttttgggaacagcctctttacacatggaagacgggggagccctactgcgagaaagactacatcaatctgttcagcaccaagtgccattgctgccatttgccccctgaggctggcgacaaggttatcgaagccctggccacacttggcacgacacccctcttatttgcgcagtcttgccatgtgaatctgtgaggggcagccgttcttcttccaggagggcaaacccct

SEQ ID NO: 662338 - DNA, 157 bp, Homo sapiens
cgggacgtatcagtcggagagcagcgcgtacgggccagcagtgatgcccacgatggggatggtgggctgggaagacggctcccatctcagggtgagggtgacagcagtcggttggagcgagcatcccccaaagttcacaatgttgccgaagcttgat

SEQ ID NO: 662339 - DNA, 289 bp, Homo sapiens
acagaaactcagaaaacaaatcttcttatcctcattcatttccttttactcaaagacatcggcgaggtaatatgtgccctattagtcacaggcactaaggaagtagggaagttctccttcatcatcgtcagcaggcttggcttgtctagtcttgtcatcacgtctggcgtatttgtgaaacatgtcgatcatgcctattatggacctctctttttgagtgttgctcatctttgctttcaaaaagccagagctgggaagcgtcacgagtagaaggatgagtgagatgtgt

SEQ ID NO: 662340 - DNA, 430 bp, Homo sapiens
  misc_feature (238)..(238): n is a, c, g, or t
  misc_feature (403)..(403): n is a, c, g, or t
gggacaaatggcctacctgatactcaagccaagttccatattatgtttttattctttgctgcagctatgttttctgtcagcttgtcttctctgtttggctatcattttggctagtcagcaaaaataaatctacattagaggcattcagaagtccagtatttcgacatggaacagataagaatggattcagcttgggtttcagtaaaaacatgcgacaagtttttgggtgatgagaagnaagtactggttgctacccattttttcaagtctagggtgatgggctgctcctttccaacttgccttgttaaccagggtcctggaacaagcatctactcctggcaggggctgaattccacaggttaaaaatcttcggaaaacccttcagttttcctggcaaagcccnttgaggaggagttcccagaggccacct

SEQ ID NO: 662341 - DNA, 315 bp, Homo sapiens
  misc_feature (235)..(235): n is a, c, g, or t
actctacaggatccccatcatgagggttcctgacctcatggggttccaaagtttctcatcaaatggtagagggtgccccatccctgctgcgtgtgacccatgcacgcttcttcctgtccgctcgtacacgctctttgcccttcttctgagatacacgctgcgtaaatgaagttccgtggctgttgttttcactgtcagctctcactttctgacgcacaagggcctctctggtatngtggttccttcattttcgtccggtcagagtgctccacgcttggacctgcagtatccctggactctcgaagcggctccttc

SEQ ID NO: 662342 - DNA, 536 bp, Homo sapiens
  misc_feature (3)..(3): n is a, c, g, or t
  misc_feature (73)..(73): n is a, c, g, or t
  misc_feature (104)..(104): n is a, c, g, or t
  misc_feature (114)..(114): n is a, c, g, or t
  misc_feature (133)..(133): n is a, c, g, or t
  misc_feature (135)..(135): n is a, c, g, or t
  misc_feature (139)..(139): n is a, c, g, or t
  misc_feature (148)..(148): n is a, c, g, or t
  misc_feature (157)..(157): n is a, c, g, or t
  misc_feature (179)..(179): n is a, c, g, or t
  misc_feature (266)..(266): n is a, c, g, or t
  misc_feature (327)..(327): n is a, c, g, or t
  misc_feature (337)..(338): n is a, c, g, or t
  misc_feature (341)..(341): n is a, c, g, or t
  misc_feature (411)..(411): n is a, c, g, or t
  misc_feature (440)..(440): n is a, c, g, or t
  misc_feature (452)..(452): n is a, c, g, or t
  misc_feature (458)..(458): n is a, c, g, or t
  misc_feature (466)..(466): n is a, c, g, or t
  misc_feature (468)..(468): n is a, c, g, or t
  misc_feature (476)..(476): n is a, c, g, or t
ttnttgtgtaatgttaaggtgtggctcctaggcccctcccctcttcaaggggtctacatggcaactgtgaggnggggagatttagtgtggtgggggattgagtntggcagggantcccctagcagtgagggtntntttnttcctcttntgctcttgntggggctggtggtccaggggtnttactccttggaggccatgtgggccatgaggtccaccaccctgttgctgtagccaaattcgttgtcataccaggaaatgagcttganaaagtggtcgttgagggcaatgccagccccagcgtcaaaggtggaggagtgggtgtcgctnttgaagtgannggngaccacctggtgctcagtttagcccaggatgccctttagggggccctccgacgcctgcttcaccaccttnttgatgtcatcatatttggcaggtttttntagacggcaggncaggtncaccattnanacgttggnagtggggaaaaggaaggccatgccagtaagcttcccgttcagctcagggatgaccttgcc

SEQ ID NO: 662343 - DNA, 688 bp, Homo sapiens
  misc_feature (38)..(38): n is a, c, g, or t
agtgccatgcctttatttttggtgtaaacaatctgggnagacactttggcaaataacctttccccactatttagtgtgtaagggatgatccaacctggtgccttttcccttgctcatacactgcctgcaggatagcaaagcagcctgtctggacttcattcattaagcccaaatagagagtattcagtcctagagaattcctaactttgttcagatctcatagatgacccccaggtattgtcttttggcatccggcagtcaacggtcttcacacctatactgcacagtaaagtctctctctataattcagaccgtcagctttgcagaatgagcatctatctcaagagcgtggtagtttccactagaatacttcttatgtaagggtcatcaagcaaatgtcttgaagtagacatggggtttatgaatggttcttcatcatagctccacagcctttttggtctcctggcttccttccagtcggaggtcctggagtaacattctgtgaacccccaggccacctcgtaagtgggctctttaccgcatgtacactccaagtaagatccatcatccgctgtctaataatacacattacatacgtacatgccttaggcaatttatccgccgcagtgaagctgctataagtagctgtggcatgacatttacagcaagccaccctctattaaggagc

SEQ ID NO: 662344 - DNA, 450 bp, Homo sapiens
  misc_feature (67)..(67): n is a, c, g, or t
  misc_feature (121)..(121): n is a, c, g, or t
  misc_feature (287)..(287): n is a, c, g, or t
  misc_feature (322)..(322): n is a, c, g, or t
gtatcccctcttgtatgctgcagaaacacaaactcttctcattaaaaaaaatgcttagctggctttnggaacataattctttcattagtggtagtgatcctttgaaggttttagctatgtntaatttttctaatttcttttgcagataaattactttttagtaaaatcatttgtagccattcgtgttgatacgattactcgtggctattaccatttttttttctgggaaatgagggtatcctctctagttcataaaatttactctccttcagaaaaagaagaagtanatggagaaggatgagaggatcaaagagaccccaanccattcattaatttcattcattcttttataaagctgcataatactccactcagacaccatctgatatagctactcctctattgatggctacttatttcatttccaatcttttttattatttgagacaa

SEQ ID NO: 662345 - DNA, 123 bp, Homo sapiens
  misc_feature (76)..(76): n is a, c, g, or t
  misc_feature (92)..(92): n is a, c, g, or t
  misc_feature (104)..(104): n is a, c, g, or t
agcctgggaaacacagtagggctccacctctacaaaaaacacaaaaattagccaggcatgtggcgtcatagtaganttaatcaaaagcaagnaaatggctggangagctgtcttgttggcagg

SEQ ID NO: 662346 - DNA, 207 bp, Homo sapiens
aatcctggagttctatggtgattacatagctcggctgaagctggcccagaaagtaaagatgtccacccatgccaggcccatctgcctaccctgcacgatggaggccaatctggctctgcggagaacctccaagcagcacctgtagggaccatgagaatgaactgctgaacaaacagaagtgtacctgctcatttaggccgcatgaat

SEQ ID NO: 662347 - DNA, 880 bp, Homo sapiens
tggaaacaaaaatctcactctgtcaacccaggttgggagtgcaggggcgccatctcggctcattgcaacctccccctcccaggttcaggcaattctaatgcctcagcctccctagtacctgggactacaggcgcccgccaccaaacccggctcattatttggggtattttaaatagagatggggtgttccaccattgttgggccaggctgggtcttgaactcctgacctcaaggttgatccacccacctcgacctcccaaagtggctggggatatacagggcgtagagccatttggtgcccagaccaagttgttatgtatactgtaaaaggggtcttatggtaaaatcctaaatatttaggtgaaagctttttaaacgtgataaacctctgcgtggttattcgagggacgcgtaaatacacacaaaatgaagactctcagtaggcctccattggatacgggggcgcaggaaaaaccagtagtgttcaactaagtacaacagggtccacatgcagattctcgcgacccaacgtttttggtcagcataagtgggtcatgcgtctgccggggcccctattccgggcgtcgaatgaaaatattttgtcgacaaacgccatgtttaaccccaggggataattacgtggggcacgcaaccagtggtagggcacattactatatgtacatcacattatatattttacaacaaggggtccatgcagttgcttcccccaggatttgagccagacaggtagtgaatattacgcctaactacagacctaaaccaccgtggctaaaattaccccgggacccagcctatgaaatgctggcacaaatgtggccaccaccacatttggtaatttgcaattctgaacacagtgtcc

SEQ ID NO: 662348 - DNA, 326 bp, Homo sapiens
tgccagagaaaatggtcatctgctgtatgatcaattgatatgaacacattttttatgtgtcttcccatagagggacactggagtaaccaatgggatcaggggacatgggtggcaactgctaaggggcatgggatttttcctcttggtgtgatgaaaatgtgtggaggtggttaccagtaacagttgcagaaatctgaaaatattctgaatcccctactgctgttataacccaagttatctaacaccccggaccccttagcctagaagagatttgaatgatgtgaatgcatgttctacctcatgactttgggaagcttccgtcgacg

SEQ ID NO: 662349 - DNA, 755 bp, Homo sapiens
aaaactaaggctagatacgagcccgcggttaactcggccgagggcttgccagcaaagatcagtctctgctgatcaggaggaagatggacgtactttgtctgactataatatttcaggacagccagcttaaccttcttactcttgtgcttattcttcttgggagtggaaaacaccaaatggcggatgactgccgagtgcatgcggggtgggccctggtgggccctgtgtgtgccctgggcatgggtgaacctgcggtgtgcttccgctgtgagtgtttctggcagtgtgcatcctgggtgcctggtggtcgctggcctgtgtgactggggcctggtggcctgagtgcctgcagtgagctcgcagtgaggtgcaaagtgcacgatggaataatggatgttggatttgccctgatcaccaacgtttgggccgcatatgtgtcaaatggaacattgaaagatacaatgtcccatgtgatgtggatgaatctatactctattctcccctgccccaattaaccggaaatcaagcagatacatttgaattttctatacctgtgagaggaccatcatactctaactggcatcgacgtgtcttcatgacagcattatcgaccatgtagcatgaacgcaagaaccctgttgaccgagcacatgctgacacgcagagtctcacagagacattatgattagcatcatcaggaggcactaacacataggaccaccgtcagcgtcatgggcgtgctaaatgttagctca

SEQ ID NO: 662350 - DNA, 206 bp, Homo sapiens
gcacagatgagcaggtgcctgttattccatgctaggagggaggctgaggtaggctgattgcttgagcccaggagttctcgacaagcgtgggtaacacggtgaaactgtctctacaaaaaatacaaaatttcgccagttctattggcgcgtacctgtagtcccagctacttgggaggctgaggcagtagaatcacttgaactctgga

SEQ ID NO: 662351 - DNA, 329 bp, Homo sapiens
agagagtgtgtgaggggagggagggagaggataataaaaaaaaaaagaaaaagttggtagggttggaaaacaaaaaaggaccacctcaagttcagggaaaagagaagggagggtatgaaaccgcgactaaagattagtgttgacatggggatcaagaaggcattatgtataatacgtggcccagtaaaaaatcagccgcacagatcactgctggtgaatgggccatcgggacaacacaacaaaagcatgatgaaaacaaggccttgtgttgtgtcactcaaacatccactccagaaccctgatgctccatggggttactgttaatgccc

SEQ ID NO: 662352 - DNA, 946 bp, Homo sapiens
gtagatgccgtggtaatcggcgagggcgcgacctgcaggattcgtaagagcgctgggactagagtgcagagctccgggaccgtggatcggagccggctgcgatgtggcggagagcagtgaggaggagcggttcgacggcatgttgctggccatggctcagacagcacgagggcggtgtgcaggagcttgtgaacaccttcttcagacttccttcgacgcaaaacagactttttcattggaggagaagaagggatggcgaggagaagcttatcacacatgactttcatgccaccacaatcagcttgtgcacatgaaagaccctggctgtggagaatgagagcccggcttggatggcctgagctgggtgggagaaagtgctggagctgtggctgtgacaagaactggccaaggaagccaatgtcaagagacctcatgtggcccccagatcaaggagctaactgatgaagaggcagagaggtgcagctaagagatttgacagaaacatgtgatgcaagaagacatcatgagtgcccagctcaagaacgtgcagccttgatccccagtggcaagcagtgatacttgaaggaaggactgagtgaggaacgctgagaagtgacaatggaaaaacttgaagcccaaactagtgcaatggtgtgcagaactgcccaattacctgtgtgaccagacccttgtacggaagcttggaagcttggatgggacccttttcttgtagtgaaactatcctggttgaaagggaaaggcaattggtaggttggacatccaaaggagggaacctcacgagttagggctcaaaggaggagcagcagatcatttgattgggaaactctaacaattgaagtacagtggtggcagagaactcgtgagtcattaagacggaaagtggtgatgtcatcttggaaaaaaaataaataatagaaacaattga

SEQ ID NO: 662353 - DNA, 138 bp, Homo sapiens
attgtcccagacgcttgtatcggtggactgaggtgtgtcaaccactatggaggatacctctgacttccgaaaacagcccagattattgtcaataatgaacagactcagcaggaaacaaaaccagcagaaggaacctca

SEQ ID NO: 662354 - DNA, 434 bp, Homo sapiens
cccccttggggccccccgggttttccctttttttttccggggcggtttttggggggaaatttgaacggaaaacaattttcccccgggaaaagttttggccctggtttcccccagcccgaaattaaccccccccaaaggggacaaaaaaggggggtcccccccgggggggggccctttaaaaaaagggggtccccccgggggccggaatttgggcccagggggaaccttttttacccccccaaaattggtgggttttgggggggttttttaaaaaaaaattcaaagggggtttcccctttttgaaacccttcctttaaaacggggttttagggggaaaaaaaaaattttttttccattttttcccccctaagggcaacggtcccccccccttttttttttggggtaaaaatcctttaaaaaaagggggtttttta

SEQ ID NO: 662355 - DNA, 618 bp, Homo sapiens
cgcagtggcccacacctgtaatcccagcactttaggaggccaaggtacatggatcacctgaggtcaggagttcacgaccagcctggccaacatgatgaaaccccgtctctactaaaaatacaaaaaattagctgggcttgccagctactctggaggctgaggcaggagaatcgcttgaaccagggaggtggaggctgaagtgagccaagatcacaccattacactccagcctgggcaacaaaagcagaactccgtctcaaaaaaaaaagaaacattttataattgaattagaatttctacccgttatgggatcaaggacaaacctacgtgcctgaattcctaggcaccaaaaaggaatttacttataccgggcaagcaacatttatattgctcatagctctgcacagctgctcattttacctttataggctttaattattctattaacgcccaatttttccactttgggaccacaacacttttaattaggccaggaaaacaaatttttcgaaattacttctttcactcctttattcaaatgggatatctccttaacattacaggttactgaacaaatttcacccttggttcccacatattgggaacctggtggtcatg

SEQ ID NO: 662356 - DNA, 146 bp, Homo sapiens
tcctggtttcgggccgtgaattgaatggacaggtggcgcagatcgtcctccgagagtcagtcgaagcagaagttatggtcaaaggagaccctgcggctgcgccccgccacagtggtgcattaccgaagcgcggtgccctgcggccg

SEQ ID NO: 662357 - DNA, 329 bp, Homo sapiens
accccgggcagtagagccagactccatctcaaaaaaaaaaaaagggaaatccattggccacctttaaatgcctaccgtttttgaaaagggatcattgccttgggggccaggattggtttttagacttgccctggggggttggttttaggaatccggggccaaaaaaagggtggaattttttcccccaaaggcaaaggggattttttggtttcccacctttaaaaaggtgttaaaatttggggtcccttttaggtttttaaatttgggcccaagatttttttaaattttttccctaagtttttggattcccccggggaccccggcctaaa

SEQ ID NO: 662358 - DNA, 229 bp, Homo sapiens
aagtatagtagacaaaagctcaactttgtaacacattctgtacttgtatgatgtatgtaacatcctatctttctgaggatatcaatcattaattaaaagttatctgttccctgcctagtctctacctccaagttgttttttccctatttatctttttcttttcttcttcttctttttaatgtatgttttagtctctctctttcaggcttttctacagatgtccactaat

SEQ ID NO: 662359 - DNA, 196 bp, Homo sapiens
  misc_feature (57)..(57): n is a, c, g, or t
  misc_feature (64)..(64): n is a, c, g, or t
  misc_feature (94)..(94): n is a, c, g, or t
  misc_feature (136)..(136): n is a, c, g, or t
  misc_feature (157)..(157): n is a, c, g, or t
ggttggcggcttgtgcagcaatggccaagatcaaggctcggatcttcgcgggagaangaaggangagctgctgaaacagctggacgacctgaangtggagctgtcccagctgcgctcgccttgacaggcgtgcggncttccaagctctctaagatcngagttcgtccggtccattgccctggttctccacagtttt

SEQ ID NO: 662360 - DNA, 1019 bp, Homo sapiens
ttacacaatgggaagaccccagaagtcaaggtcaattaaatgaaaagcccttacctgcaaggcttgggaaatgagattcacagctggactggaattccatacttttgtggaccacaatagaagaactaccacctactatagatccccgcacaggaaaactctgccctagacaatggacctcagatagcctatgctcgggcacttcaaagcaaacgcgcttcagtatttccggcttctggtgtcagccaactggccatgccacagccacatacaagcattacagctgcacaagaaaacacatcgctccgcaggcacttccttatcaacagataatgagccttcagctccccaagcatctgcgcaagcaccctacggctggcgctgcaccttcctaccagcgcaccaccgcaacgcgtcccaccacctcactgcgacgcgctgctacccaccgacgcaactgcgcccccctcccctctcccgccacaccactgaaccctgcttccacaccccaaacttggtactatgcacctggttaatgacactaacttgcatagcgcgcacacgcgcactcacccctaacacttgccacttctcgcccacaattaaacaccccccccgcatactcccttaaccaatccaaatccccaacgaattccaaccctggacaacaagtaaataactataccagctaacatacattctcgtcgcaacgaacttttcaacttttcgcaccctaccatgagcacacatccttcgcgtatccccacatacggagccaaacgcactctctccactcacagcaacccacccgcacgccaccatatccacctccactctctcagcccaacctttccccctaccttaaccgacccgacttaatccaccatgggcaaacaccaaacacatcccccacgccatcgtcgaaacccttcccaaagcagcacacatccatacaaccaaccttccacaactccgtccactccccaaccaccacttccttactacacacacacacttcc

SEQ ID NO: 662361 - DNA, 187 bp, Homo sapiens
acaaatatatgatctaagagggccatacaagttaccacttacttgaaaggacactacttactaggacccatatttgattccaacactttatcaccatacttggctcagcagcagcacgtcatataggtagttactcatggaggcagaagcaggggggaagaaggagggtgtctctctaaaacgcctc

SEQ ID NO: 662362 - DNA, 1459 bp, Homo sapiens
ggggaaataatagggaaggggagagatgggatgaagggggcctacagcgggtcgtctacctgtgtatagcagggtcgttctagcagcgtactctagggagataggcgtaccctagggagccctacaggtacgcccctacccgctgcggggtagctttcctaggcgtcacggccttgacctatttcccgaaggaggagaaggaagtgaaactctacctacttacccccacccggctaggaatagcgagtacaggaagcctaggggctccagcctgctaccggctagcccgggtcggggatggggaggggcgtaggccggagcgcaaagcccaaaaaaaacgacgaaccatgacgacgggaagtggaacacgcgagtgacaaggacacaacaacaaacaacaaaagcggacagaaaaaagcacaacagcacaagaaacaataggaggacaacaaacacacgacaacaccgaggggtacacagacgacagcgacatagaagacaagagaagccagaaggagcaggccaccacacaccggcagcccaggaaacacgacagaaagagaagaaaacaacagcaccagtacacaaagagaggagaaaggagcagggaggagaaagagaaaggagaaggggacacagaaacgccacaccagaagaaagaacaacacgacaggaagcacaacataaagagaagagaaacagacgcaagaaaaacgacagaaggacagagaaggacaagaataagagaagacggtcgacgagcacacgagcacaaacaagacaacaacaaaaggaggaggagagagaagaacgaggaacgaacaaaaaacaaaaaaggaacaacaaacagagagagcagaaaaagagaaagacacagcaacgagcaaaagtaagcaaaggcacagaaaagaaccacaggagaggagagggaagcagacgagacaggaaagcagaacacacagaaccaaggacgggagcaacaagcagaggaagacggggtgaacgagagaataagaaacaacacagcgaggacagaaagaagacaaaggcaagagcaggagagcaagcagaagaagaagtagcagacagcgcgcagagaacagaggagagggagagcaggaaagactacaacggcaagacgaacagacaagaaaaagcaaacgaaaaaacagacgaagacgccgaatgatgaatgacgaagcagacaaaggacagacaaagagcgaaagcgaaaacaacgaagaagagagagaacacaagaaaacagagaacaaagagagacgactacagaaaggaagacgaagagaccgaacaacagggaagaagagagtacgagacacgacacaagaagacgaagagatgaaggaaacgaagagaagaaaagtgaaaagaagcaaaagaagagaggaacaagaccgggggagcggcgagattgataaaacaggacaagcagctgaaa

SEQ ID NO: 662363 - DNA, 87 bp, Homo sapiens
tctctccggtttcggggcgcgtgcgggcggtcgctttcttattcatggattcatagacaaacacacaacaaaactcgctcgcggctc

SEQ ID NO: 662364 - DNA, 1102 bp, Homo sapiens
tttaaaagcaaaaaaaaaaaaaatgcatttatattaacagttttcctctatgaaagtccttacttatatgatacaagcactgtgtttggtgcttaaactcttcagcggggttagcatcaaagttctgggggaaggatcgtatatgtgggtcccttccctagaaagaatggtggctgatatggctacggcttctacatcttgagttttttaaatttactttttttacactgttagcatttgagaacgtgctggactccaagttcgtgggtgcttgtgccagaagtgtattcaattcccattaaatgtgcttgtgtgacgttgggcttaacaattgacagattccacttgggcaaaaacactggcagcttacagtcctggtggttcactaatctggtaatggagtaatgtacacacgtaaaaatggctatgtgaatttatccataatttggcactaatgaagggtatagggtcaaaatacaaagactttcacagatttaagggccctttcttccaacagctttcatagttagcagccattcttaatttcctggatagccaggtttaatcacgcttctagtcaggatgctcgtattccttctaaacaataacggctgactagtgagcacagtctgaattctctccaaaagtcctaaatacttctctagggtaagacactgtggagaatgaagacgggaaggccttgtcaagaacgatttcctgcaaaggggcgatgtcgcaaaagcggtaacaacaacaggaggtctcagacacagaattcagcgccaaccggtacagaaacccgtgaggtagagggaccaggaaacagtgaaaagagcacccactggacacgaacgctcacaaaaacacactgagcgacggcgcacaggaaaaaagagggggataaacctgaacaacctacggacgacacgggacagggaggccgagagcagctaatcgagacatacagatcacgcagggcaacacaacgtggataacgtatgaacgaagaagaaaaacaagacgatagctgtcgagatcacaaacatgagagaaaacagatagacaagagaataacgtctcggcgccgtccctcgtcaacgga

SEQ ID NO: 662365 - DNA, 507 bp, Homo sapiens
tacggcgcagtatgctaggaattcggcttctgcagtccacgcatagaggaggtcagccctaagctggtgtgcagcatgctgcacctctaggtctggaacgcggatagctgcactagaccgttcacgtgactcagccaaaggacggtggcttctgcgaagtgtgcaagaagctggtgggttattaggatcgcaacctggagaaaaacagcaccaagcaggagatcctggctgctcttgagaaaggctgcagcttcctgccagatccttaccagaagcagtgtgatacagttagtggcagagtacgagcccgtgcttgatcgagatcctggtggcggtgatggatccttccttcgtgtgcttcaaatttggagcctgcccctcggcccataagccctatttgggaactgagaagtgtatatggggcccaagctactggtgccagaacacagagacagcagcccagtgcaatgctgtcgagcattgcaaacgccatgcgtggattgccag

SEQ ID NO: 662366 - DNA, 515 bp, Homo sapiens
  misc_feature (19)..(19): n is a, c, g, or t
aaaaagcacaaaggagaangtgaaagacatctgcaacaccctttgaaggccgtggaaaaaccccggcgatattgagcaggtacccgggaacacgaccattatgaccgttggcaagaactgacctacagtgcctcaggtccagcgccatggcgccctccaggaagctcttcgctgggggaaaccggaagatgaacggccggaaagcagaagactgcgggagctcatcgcgactctgaacgcggtcaaggggccggccgacaccgaggcggctcgagctccccctactgcctatatcgactccgaccgcgagaagctagatcccaagaccgccgaggctgggcagaaacgctacaaagcgactaaaggggcctctactggggagaccagccctggcatgaacagactgcggagccacgcgggcggtcctggggcaccaagagagaaggcaagtcgtcggggagtcagaagagccgatggggcaggcggcccatgcactggaagagggacccgggtcc

SEQ ID NO: 662367 - DNA, 384 bp, Homo sapiens
tcaattttattaatttttttaattggatcattctggggtgttcctcgcaaagggggattgggcagtgaagggacctcaatcttgggaggagtcactaaagctctcttcaggccccaagatagggttgggaacaaaacatacccacctcctgctttctgtcttctgtcttcctccagcctttaagtcccagaaaaaaatacccttccaaaaagcttttcccaattccctcaggcccagcttagaagcacttaagcttgggtgtctgggtggtacagaataaaggtggcacatcagctgagcaacacaaggagggtagatgttgtgatcagcccctttttctaggtgcaaaacctgaggtccagagagtttgcggggcctcaccaa

SEQ ID NO: 662368 - DNA, 679 bp, Homo sapiens
ggtgtgctgatgctctcccatctgcgccgggaaaagcccttgggccctgactggcttgtcgcgtctggtgagcgactccctgttcgtcatctgcgctgctgtctcttgctgccgaggcctctgtactcgatcgccaggcgggcgccctccactagcaatctacctggaggccaaggggagcagtgtgtgccaggcggcgagatgggtggcgccatggtcctgctctatgccagccgggtctgctagaatctgacagactggcttgggcccccagagccggttggacaccttcgattacgactggtacaatgtgtctgaccaggcggacctgttgaatgacctggggaacaaaggctacctggtattcggctcatacctcttcgtgtgagggagctactggcccaccaccctgttaggtgtgagcttcttccgggtgcaccggtcccgcacagtgacactgagcaaccacggacacatcctcaatgtggcaaggtctattgccatcattcggtcctacttcttgtgaccgggctgggcgactgtgaagatgagggctgctcctgggagcacagcgcggggtgagagcaccagtatgtacgggcagtctaggctctgggagctggtatggttgccatcgggcgtgatgccgggctggtatggggggcaagcaggagaagac

SEQ ID NO: 662369 - DNA, 121 bp, Homo sapiens
agtactagttctcgtggtctgtagtgacgaatatatatctctaaagagcgcgataatataaaggctcttatttgccccgggtatcttcacagacgactccatgatatgatgcctaaatacc

SEQ ID NO: 662370 - DNA, 172 bp, Homo sapiens
gccggtggtcgcagcatggccggttggccatgtcaccacggtccagttgccactgccatcagtggtttggtcagcatctgcacttgtcaagccagttccatcagcacagctgcgtccaatcactccaagcacatcttgccaagcaccagttcattcaacaccattccatcag

SEQ ID NO: 662371 - DNA, 104 bp, Homo sapiens
atgtgataaagctgcttgtcctctatcatggctgtgtaatattcccactgtgtaggatggacattatataactccctatcatctacagatacggggtatagagg

SEQ ID NO: 662372 - DNA, 908 bp, Homo sapiens
  misc_feature (908)..(908): n is a, c, g, or t
tttccggtatctgccctcttggactgaagtgcccgctgccgggcgcgggcctcagataatacaatggtgggtgaagagaagatgtctctaagaacaaccggctgtcagagtccagggaaaatcctgaggaagatgaagaccagagaaaagccgtgtcaggagggagtcccgtagagacgacctagtaatggtcgaaattgagaggtaaaacaggttgagtagcaaagaagataagagttgacgagcagaggcatgaggaattgaagccagttttgttatgagatggaaggttgggagtcacttgtgatgattttagtgaccgaatctcattgacaaagtcagcatcattagcataattggtgggtgcagctctcacaagcttattctgttcttgaaaggacgagaaaaacaacccatagagcgaaggatttgagagcacctccagaagcaagggaaagatttgtatatgcgaagggaggaatctcgtcgtttagaatgatactggcgttgaaaagtaggagccacaatcaaggaaccaaagtagtaatcacagtggttagagtaggcaccgtaccatcaaatatacatcgtatatagtccgtacaagcagcacctgtgataagtacggacttaagcatttggattaggcaagagggaatggaggtttagggtaggatattagaaagattatcaaggcacattcctttggatacatataagtagacttatatttggggaaaaaagattattcccataaaagcgggttagagtatatagaggaagccatgggttggagaattcaatagtaatcacattagatcgtaaaggaatttaattcagggttatcccctaaatttatatatgggtgatacagagtaaatgtggggaggcgacgttggggttatatn

SEQ ID NO: 662373 - DNA, 550 bp, Homo sapiens
acgtcacctcacctccgtaagactgacggtgaccaacacaagtcaacccgtcatgaccaacacctccatgggacaatgacggaccgaccgccaaagacacatctgacggacacacctaccgcatgacacagaccgcgtgacgcccggacgacccacggacgacggcaggtgtcagacggcgcgacggacacggggaaactgggactctgacaagaaatacccacctacatggcaatgtttcaccgtgcgcaagcgtagcggaggcgggcagaggactactacagatgcaaaatcaccccttctgcacgaaagcctcttagcaaccgggtcagactggtggcagtggagcatcgtcatacttcaggcttgccctactggccctacctcacagctgacaactttcgaaaaggggatggggcaccagccagcatcctccaactcaacaacattctctaatggcgcactccctgagcctcaagaccccttccgagcgtcggctctatccccttccaccctcagcggctgctactctcccgagacctcccgagtg

SEQ ID NO: 662374 - DNA, 320 bp, Homo sapiens
  misc_feature (37)..(37): n is a, c, g, or t
  misc_feature (91)..(91): n is a, c, g, or t
  misc_feature (287)..(287): n is a, c, g, or t
acacactctaaaagtgaccagacaattggaaataaancaatctccaaacaaacacttaaaaacttgaaatcatactaaccacactcttggntcacagtgcaataaaaataggaatcagtactaagaaagtccctgaaaacctataattacacagaaattaaacaacttgacccagaataactttttggtaaataatgaaatcaaggcagaaatcaagaaattctttgaaactaatgagaacaaagatataacataccagaatctgggacacagctaaggtgacaagngggaaatttatagcacttaaacatcaacattaa

SEQ ID NO: 662375 - DNA, 617 bp, Homo sapiens
cagagtgtcggttcatgcacaagagcccctcaccccagtgtcctgatgaaaacgggcattcctcggtgtgggattctggggtgcacagtgctctagaattgctccttcggtggccctggaagcactgtctttatgtgcgtgccttttgctggtgtgtcctctgcctgcccagtgagtgcatgcacacatgatgtgctcgggcccagccccagtatgaatgaacatgcatgagcctctgcacttacaatgggacagacgtgatgtgatgtgccccatgtggattccacgtcccgttcgtctgcccctgaggtgtagcttgtgtcccactccatagctggatgtactgtgcactggtggcccaatttggctctgcggagtgccagttttgtctcccctgtccttccgttgttcctccgcacaaccacaggcccagccttgttgcacccagtttgttctccagtacctatgcacccttgagacccaagcagtccccagcgataggcccacgccagtggactggccgcgggcatcaacgggcctatccgctcactacttcacccttggttccccagttcctccagactttccatgccccatctggtcggtcccctgggcgg

SEQ ID NO: 662376 - DNA, 121 bp, Homo sapiens
ggggcccccccccccctttttttttccccctttaaaaacccggggggggttccccccccgggttttttttttggggggggggggggggtaattttttcccccggaaaccctttttcccttt

SEQ ID NO: 662377 - DNA, 981 bp, Homo sapiens
  misc_feature (2)..(3): n is a, c, g, or t
  misc_feature (7)..(7): n is a, c, g, or t
  misc_feature (25)..(26): n is a, c, g, or t
  misc_feature (31)..(31): n is a, c, g, or t
  misc_feature (36)..(36): n is a, c, g, or t
  misc_feature (38)..(38): n is a, c, g, or t
  misc_feature (42)..(44): n is a, c, g, or t
  misc_feature (57)..(57): n is a, c, g, or t
  misc_feature (109)..(109): n is a, c, g, or t
  misc_feature (115)..(115): n is a, c, g, or t
  misc_feature (131)..(131): n is a, c, g, or t
  misc_feature (134)..(134): n is a, c, g, or t
  misc_feature (180)..(180): n is a, c, g, or t
  misc_feature (182)..(183): n is a, c, g, or t
  misc_feature (194)..(194): n is a, c, g, or t
  misc_feature (198)..(198): n is a, c, g, or t
  misc_feature (279)..(279): n is a, c, g, or t
  misc_feature (298)..(298): n is a, c, g, or t
  misc_feature (339)..(339): n is a, c, g, or t
  misc_feature (355)..(355): n is a, c, g, or t
gnnaaangatttaaatttgaggaanntttgntacangnaatnnnaggagaatttatntactgagcaatatttccctttagaacttcaagatttctacattgaaaatgtnaatatnatttatggacctctgnccnaatggaacatgtactggaagtggataaccagtatcactaacacacncnnaaataactttntcanatttgtggagttaggtggaagccagattttaaaagttgccaacaggagatttaacaggtacagttacccgtttcaatgtanttaagaagggagatgtggnacctttgaattctacatcctgtttctccagaatgagaattngtgtacaaagatattngtattcactttctttaaaaaatccaagtaaaagtgccaaaactacacttctgtaaatctctggcattattcatatgtgtatctatatctgcataatgtcggttaactgtctactaaaatggctactttttcacttgggattgttttggcaacaattttagtctaaacagacatctaaatttccgagacttagaataacattcactaaagttctgataatgtcttttttacatattttcttagtgctttatagtgacttcgattggttctgtgtgttttggcctaaatactagtaacatatcagtgaaaacccctaatttttttctcttcaatgtcactagtcagagaggggctaatttttacactctgaaattgcatctggtacacgggtgtccagctctgtgagctgcgttccctcatcaacaaatcacatgcatctgtctctctcaaactctatacccttgcattcttggacttcccccccaagtgcattaatttggcattgtcagtatccaggtgacatggtcacaccttgtactcgccgtgaagtgcccttatgttgccaatggtaatccctaaataagaacggaggtgcttgccccaccggctcggatttacccacgacaa

SEQ ID NO: 662378 - DNA, 362 bp, Homo sapiens
ccaggagactccaggaagagcatcccaactgccacgcagataaaggccatcaagctacaaatggccttacaaatggaacctcaaatgaatttaactcaagcttctaccgaggaccccaggatcagcccactggtctcttaactggcctagaaagttcccctctggaggacaatacaacagcagggccccatcgtcgcccctaaccagcaggaagtagctagagcagtcatcgcccagttcccaacagcagttggggtgtcctgtttgggggggggactgagaggtgatgccagctgagcttcctgggttgagtaggggcttggaaagctgtaaaactcactcatttcctgcatcaggactta

SEQ ID NO: 662379 - DNA, 487 bp, Homo sapiens
aaaacacgtaacgccatcttctggtgctagccagagactgtccctgttggagacagaccccacccagagctgcactcagacggtgctgatgggccagtgaccagcagagcttaatcaggaagcttcagaagagaggaaggcccagtgacggggttacacctatagtgacacagcattctaaagtgaatgactccaacgaattaggtggactgactaccagtggctctgcagaggtccacaaggcgattacaatttgcagtcccctaaccacagacctgactgcagagctgtctggtggtccaaagaatgtatcagtgcaacctgaaatatcagagggtcttgctactacgcccagcactcaacaagtaaaaagttctgagaaaacccagattgctgtcccccagccagtggttccctcctacagttatgctacccctaccccccaggcctttttccagagcacctcagcaccatacccagttataaa

SEQ ID NO: 662380 - DNA, 681 bp, Homo sapiens
  misc_feature (2)..(2): n is a, c, g, or t
  misc_feature (336)..(336): n is a, c, g, or t
  misc_feature (468)..(468): n is a, c, g, or t
  misc_feature (479)..(479): n is a, c, g, or t
  misc_feature (484)..(484): n is a, c, g, or t
  misc_feature (486)..(486): n is a, c, g, or t
  misc_feature (490)..(490): n is a, c, g, or t
  misc_feature (495)..(495): n is a, c, g, or t
  misc_feature (497)..(497): n is a, c, g, or t
  misc_feature (500)..(502): n is a, c, g, or t
  misc_feature (506)..(508): n is a, c, g, or t
  misc_feature (513)..(513): n is a, c, g, or t
  misc_feature (516)..(519): n is a, c, g, or t
  misc_feature (522)..(522): n is a, c, g, or t
  misc_feature (527)..(527): n is a, c, g, or t
  misc_feature (530)..(530): n is a, c, g, or t
  misc_feature (532)..(532): n is a, c, g, or t
  misc_feature (537)..(537): n is a, c, g, or t
  misc_feature (540)..(540): n is a, c, g, or t
  misc_feature (543)..(543): n is a, c, g, or t
  misc_feature (547)..(548): n is a, c, g, or t
  misc_feature (551)..(551): n is a, c, g, or t
  misc_feature (586)..(586): n is a, c, g, or t
  misc_feature (591)..(591): n is a, c, g, or t
  misc_feature (594)..(594): n is a, c, g, or t
  misc_feature (599)..(599): n is a, c, g, or t
  misc_feature (607)..(607): n is a, c, g, or t
  misc_feature (612)..(612): n is a, c, g, or t
  misc_feature (618)..(618): n is a, c, g, or t
  misc_feature (677)..(677): n is a, c, g, or t
ancccgctggtcttgctgtcgcctttgctctttgggggcttgagaggaaaggcagagggaggaccaacttatctgggagagagaaggcccatctttggggctaagaccaggtggtgcggaagcagatttagggaggggagggcctacttaggggctggaaggggatggggctgcctcctggagtgtggtggtcacagagtgttggctttgtgggagggaaaggaaagggaggcacacaagaagtcaggaagagtggatgggcggtgcttcctgggcactgaacatgtgcactgcccagggcacgagggccaggactaggcatggccagagggtgtncttgagggaattgaaaatgtagaagaggctgatctgaggggggtggcccagccagtcccgggggcccagcagccccatggccagcccaaggcaggctatcttctggccatttcccagctgtgcccgacgcanctgggcatagnagggngngtgncaggncntgnnnaggnnncgggncgnnnntgngtaanggntnagggnggnaangggnnggntataaaagtgtataaaataaggaagataaaaaaanttggnggntaggntggtgggnaaagnaagatnaaggaaaagtgttaagagggtaaaatagatgaggatggtgaatagaatgagggaaagtnaagt

SEQ ID NO: 662381 - DNA, 177 bp, Homo sapiens
acgcgcgtgcatgggaacatggtcgagcttaatagctgtcctcacttggcagtggtcaatacgcgacatgggacctggctgtagtacagctaggacttagtagcaagtgagcacgtcatttccactttcaaaaaaattttttttgggcaaaaaaggaaatccattggatgaacagcg

SEQ ID NO: 662382 - DNA, 158 bp, Homo sapiens
cggaaacacgggatttggttcgtttgctctttgattttcctccctttctatacacacaagaggatccaggcaaatccggtgatcacactgtaaatcctcgccgccgtggaaccttgggcatagtcagccccgtcgccgccgtgatcacagccggtgca

SEQ ID NO: 662383 - DNA, 256 bp, Homo sapiens
  misc_feature (111)..(111): n is a, c, g, or t
  misc_feature (117)..(117): n is a, c, g, or t
  misc_feature (127)..(127): n is a, c, g, or t
ctgaatctgaaccctggtgctggatacacaggcagcggccagctctgagcatctgagagcccggtcatggaagggatagtctcctgctgtgctgtgcctggcagctagagncccagntgtgctaggnagggtgagcagggctcagtgcatttgttctgcagagcaatgcgggagtagtcagtgaagctgaagatgcatatgtgccctgtgatctaggaattccgcttacggaaagacagacttttgatccatgcaa

SEQ ID NO: 662384 - DNA, 439 bp, Homo sapiens
atttaggtgtgctgccagaagaaggcagtgattacaggcccatacaatcagataggacagtgggttttttcttgtgatacaaagtggcccatttctgctgtactcatctcagacttagaaaaataaatttccaaaccttctaataaaaaacacttgtcggccgggcgcggtggctcacgcctgtaatcctagcactttgggaggccgagacgggcggatcacgaggtcaggagatcgagaccatcttggctaacatggtgaaaccccgtttctactaaaaatacaaaaaattagccgggcgtgttggcgggcgcctgtagtcccagctacttgggaggctgaggcaggagaatggcatgaacctgggaggcggagcttgcagtgagccgagatcgcgccactgcactccaacctgggagacacagcgagactccgtctc

SEQ ID NO: 662385 - DNA, 282 bp, Homo sapiens
cgacgagtatcgcggggcagagtatgtgcaaacatggaacatagctgacgggattgacttgtccatgatcgtgttcaaacgttcaaacggcgagccgattcatccgaccacggttcgaccttgatggaaagtagtagcgattcccgcccatgtggcgggaaaggcgctgttttctttttcattcgtcaaaaatggaccttccccaaaaggtgtacgtgacttttagaaaaacaaacatgatagaagtttcgctcaatcgatttgaatgatctcccacctacg

SEQ ID NO: 662386 - DNA, 194 bp, Homo sapiens
tgctgtcctgaggattccacggtgggaggacagtggggaatggggtgacgagaagctactcactaccccaagtaaccattgcgtatttatggtagggccaggtgcatgcccatattgatatgacagggtctcactgtgttgcccaagctggacgtgaactcctgggctccagccatcctactgtcccagccata

SEQ ID NO: 662387 - DNA, 665 bp, Homo sapiens
ggccgcgggatgtctccagagggaagatgggggatctgtaggaatagaatgtctgatgaagataaggtgtgtatagacaccgaaagtactatcattcaatgcgcctctctggtagcagattaattatgaggattagctagtgactgtacggtgtgtactgggtccaagtaatgacgaatccttcatcgagggaatcgagcaggccgcatgcgatttctcgcacagttactcaccttggcaccagtttcacatctcacggttgaaacattgaaggggtttattcgatatagatcaatggtagttcgactgaccaggacacgcatgtggttgacttttggcggaagagtgagaacaaggtattggagggaatctcaagagaaaggagatggatgcggtgtgttacacattgttgactacatctataggcgaaagagtagtgcttgactgactctgaagaagccatgtgtaagctagtagaaaagtggcagggctggagagtccgatgtgaagaaaactctccagttaggatgagctgagtgcaggaagtagctgtacgtaagaaagaaagcgttttagaccgaatattggtaagatctgacatgtgttgatactgtgcgatagacaatagtatgggacagacgaaatgagtattgcgtgcgatagag

SEQ ID NO: 662388 - DNA, 861 bp, Homo sapiens
ggcacccggccgaaagccgctgtcgggagccggcgtggggctgacgcaggtgcactgacatgggtgaaccccaggatcatgcggattctagtgacagggggctctgggctgtaggcaaacgccatccagaaggtgtgtagcagatggagctgacttcctggagaggactggtgtggtctcctctaaagaggccgatctcacggatacagcaagaccggcgcctgtttgagaggtcaacccaacacgtcatcatcttgctgcatggtggggggcctgttccgggatatcaacatacacttgtgacttctggaggaaacacaggtgcacatgaacgacaaggtcttgcactcggcctttggaggtgggcgcccgcagggtggtgtctgcctgtccactgtatcttccctgacaagatgacctacccgatagatgagaccatgatcaacatggctcccaaaaaagccattggggtactcgtatgcaagaggattgctcgaggtgcaagacacgggcctactttccagcaagtacggtggcaccttcacccgcgtgtattcccaaacaaatgtcttcgcggcccccacgaagcactttcaccatcagaggattggccagtggtggctgggctcatcacaggtggcaccttggcaagacaaagcgggtcggccttgggggtggggacagggaatccggggaggaggcaaatactcgtggactggccaggcttatcagggcgccggaggaaacagaggggaggcaccatcttccggggaagaaaagaggctccacaaggagaccacggagagagggcagagcacagggagccttgtgaaacacgcgtgggtagaaaaccacacagag

SEQ ID NO: 662389 - DNA, 848 bp, Homo sapiens
agcgtgtacacatgtgcggaagaacgattcaaggacgccgttgagtttcttaagaaatcacatgcggacaccgatagagtggcatagatcggtgggccagaagcaaagactgctagcctacaggctatggcagcaggtagtccaacgacggagtcaacggagggtcgtccaggtgcacgcgggccgcagagcatcatgccatcgtccgttacgaagagagtcatgcagtggcttatgtggcgttccgtatttcggcagaataatagaaagtgctaatttgagcgacctgacaaaggtgcgaaaaccaacatgaaactgctttctgagtcaccagcagcgcgcagacaggactctctcgacaaggagggaactgccagatcctcgagggaggacgtaccatgacaggtgtgtacaagcgttgtagaccataaatctctaccctgagaacgtggaagaaagccttgtcaaggatggctaattccctacagtgatcggatctcggtttggacgcaatgcgttgccagtgacgtgtggacagcctttgtggcgttatccaccaaaggcgaaagaacacggtatgcacaataatatgacgctaaacgcaacgcttgtaaaggggtacacctacagacggaggctagaaggacaaaagggtgaatgcagagcccggaacgaaacccggaacaggaaattgcagatggatttccctggagcatagggtgaagacatatgggaaggcaccgaggcgagaataaaaaggggacaggtatgatggcgcacaagcacacttcatcaggcaaaagaacgaaacggaaggcaaagttgccaaaaaaccaacagtcggcaac

SEQ ID NO: 662390 - DNA, 1127 bp, Homo sapiens
gtagatctgaaggcaatccatgtactttaatgactgatggaagattacaatcaatggatgggcagcaaaccattcagtccttgtaagtctagtcagacagcaacacatcaagcacgtttcggaagggggaataaatcccagtttgagatatctcaagttttaataatagtaggatggacatagtacgcacacaacatccagtagcacaactggcaacgtgtgacctggcatagaggtgaccataatctgaagtcatggcgagtgacacaattgcctctacaggaacaacacgcagagactgaatctcagaacaggactggatggacgaactcgcagtagcagaagaaacagacacatggtcgcacttccggcagcaaacagcacgaaggagtgtcaggaccaggcagcggctccaagaaccgaaaggctgcacgcagaaaccacgcaagacaagatcaaggacagactcttcaagtctatggtgtcgtttcccgagtgctcaacgactacagcatgcaagagtggaatatcaacatgcacaagagattaaggagcaagccagtccataacagagtcacaatgtatgcgacttcttctatagcgcacacgcagagaccagacatagcgattggacctccttgacagctacaacccggaacgaaatggtacaagctctctagcaatcgactactagccacatttaggacacgtccgctcacaacagccgacctcatatctggcgcttaagagctacataactgagcatttagagatacatttgcaacaagtgatctaggatttcaatcttgatatatgagaacagctgatgacaacttaatagatgagtagatctcaagagtgtaaacagtacctccagccgctatgtcgatgtagtaagtctcctgcatacgagctagtcgacgctctcctgcatgctcgtgcgtagacgccgcaaagcacgagccggctgcactaccagcggcgagcatcacggtgctctctaccgctcgattgctacgccgcacggtgccacatctataaatagcggtgagcgcctccgaagagcgcatctcttcactgatatagcaggacgatagaatatatacagagaacgcgacagaatcacg

SEQ ID NO: 662391 - DNA, 623 bp, Homo sapiens
attatacattattttttttactaactcttttcttttcctttatttctcttttttgcggggagaaaaaaaccatttattgccaaaaaaaaggcggacgccaaacaccatatcaaaaacccccacggagcaattaaaagacaccctccggctaaaaaaaaaaccacctgaaacccaaatgggggcagctcggtcccaagctcccaaaaacacttcaaaagttaacacccacccctcccccccttataaaaagagggctaccttccctctctcaattaaaaaaaaaaacaacgcaccccacaaaaaaacaccctcctaacccctctcacaaacggccctccaaataccagcaaacactctagagcgaccccacaaacacatactccaaaaaaagaccacctaactgttctcccataccaaaacccatctaacgtcaatacaacgcggaggaaacaacaaatccctgggcaccattctacacttccacacaacaggcatggccccaaaaccacaacactactacctccttccaatcatcccacacctcagtcaacacagcagaacttcaccagaccaccaacaacaccgccggcctctccccaacaaaacaacaacacacctccccg

SEQ ID NO: 662392 - DNA, 672 bp, Homo sapiens
tcccctaaaagtcatatagtttggcctacccaccaacagtgattgacagtgtgtctccctatagccttgcctaacagaaatgtgtcgtcctttcctatcaccagactgagagatgataaatggtatctcagaattatctcaataaacattcctctaatgagttagtttgaatatttcaatttaaagcgccattttaatatattaacgtgagtatgtttatgtcatttcccagtttttctatcaagttgttggtcctttgtcccttaatttctaattccttatatagtaagaacactagctgtttgtctattatataggctggataaatttttctcccagtcatttgatttaaaggtgtttcttgtgtcctcatgtaaagtgtacatgctgctggtagaaagatcacctcttcaaaactttctggagtggatttcttagagaaagatcttacactgcagttgggtttagtgcaccagttaagaaggatgtgatgactgtgttcccacttaggtgcactggatagtctccatgctcttttttgctatttcaacatcaacattattgtgatcgctcgtgtgcaactttgatttgtcggcggtgctaccacgttgtattcctcctacggctttgggcctccttttttccagggagacccggggcccggtcgtctgc

SEQ ID NO: 662393 - DNA, 217 bp, Homo sapiens
actccacactctctctccacaccggcttttaacactctctctcctcactcctctctccacactggctctctccacactggacctacttcagaatggcctggctttaccaaaggtgatataccactagaaaatgagggtcttgatacaactctagacatggactatgtccggttgtacagttactcccgtcactcttcttttactaaatatgcatgta

SEQ ID NO: 662394 - DNA, 1103 bp, Homo sapiens
  misc_feature (91)..(91): n is a, c, g, or t
  misc_feature (417)..(417): n is a, c, g, or t
  misc_feature (437)..(437): n is a, c, g, or t
  misc_feature (440)..(440): n is a, c, g, or t
  misc_feature (446)..(446): n is a, c, g, or t
  misc_feature (451)..(451): n is a, c, g, or t
  misc_feature (457)..(458): n is a, c, g, or t
  misc_feature (464)..(464): n is a, c, g, or t
  misc_feature (469)..(472): n is a, c, g, or t
  misc_feature (552)..(552): n is a, c, g, or t
  misc_feature (554)..(556): n is a, c, g, or t
  misc_feature (568)..(568): n is a, c, g, or t
  misc_feature (603)..(603): n is a, c, g, or t
  misc_feature (621)..(621): n is a, c, g, or t
  misc_feature (627)..(628): n is a, c, g, or t
  misc_feature (630)..(630): n is a, c, g, or t
  misc_feature (647)..(647): n is a, c, g, or t
  misc_feature (653)..(654): n is a, c, g, or t
  misc_feature (658)..(658): n is a, c, g, or t
  misc_feature (677)..(677): n is a, c, g, or t
  misc_feature (680)..(681): n is a, c, g, or t
  misc_feature (683)..(684): n is a, c, g, or t
  misc_feature (704)..(704): n is a, c, g, or t
  misc_feature (706)..(707): n is a, c, g, or t
  misc_feature (709)..(709): n is a, c, g, or t
  misc_feature (713)..(713): n is a, c, g, or t
  misc_feature (728)..(728): n is a, c, g, or t
  misc_feature (730)..(730): n is a, c, g, or t
  misc_feature (736)..(736): n is a, c, g, or t
  misc_feature (740)..(740): n is a, c, g, or t
  misc_feature (744)..(744): n is a, c, g, or t
  misc_feature (753)..(753): n is a, c, g, or t
  misc_feature (757)..(757): n is a, c, g, or t
  misc_feature (763)..(763): n is a, c, g, or t
  misc_feature (769)..(769): n is a, c, g, or t
  misc_feature (772)..(773): n is a, c, g, or t
aggtgatcttagagcgaacatggttataggcggaccaccacgcccacaacggacacccaccataaggcataagccaaagtaacatacccgncgaatgtaggacaagaagctctctctcagacaaccatctcatgggccccattccaggacacttctgagtacatcatttcatgtcatcctgttggcactgatgaagaacccttacagttcagggttcctggaacttctaccaatgccactctgacaggcctcaccagaggtgccacctacaacatcatggtggaggcactggaagaccagcagaggcataaggttcggtaagaggttgttaccgtgggcaactctgtcaacgaaggcttgaaccaacctacggatgactcgtgctttgacccctacacagtttcccgttatgccgtnggagatgagtgggaacgaangtntgaatnaggcnttctgnngtgccngtgcnnnngctttggaagtggtcatttcagatgtgattcatctagatggtgccatgacaatggtgtgaactacaagattggagagaantnnnaccgtcggggantggccagatgatgagctgcacatgtcttgggaacnggacataccacgtagganaacagnngnagaaggaatatctcggngccatnngctnctgcacatgctttggaggncanngnngctggcgctgtgacaactgncnnanaccngggggtgacccagtncngaggcnctantggncatcctacnccgnattctnagagtnccnncagagaacaaacgctaatgttaattgctcaattgagtgcttcatgcctttagatgtacaggctgacagagatgattcctgagagtcaatcatcttttcaatttagaggaacaagcatgtctatctgccgagatccatgtaaactggactgatgttagcagacccagcttagagctcttctttctatgttaagccattcgatctgcaggaagttcttcagcttcagattaactcacagcttctccaagcacactcatgggagttatctgagggttatctcataaatgagggctgcacattgccttgattgtatgcagtattcaatacctgt

SEQ ID NO: 662395 - DNA, 886 bp, Homo sapiens
gaggttttgttaaaagactatcttgcttaataaatgacaacttgttaacagattcacacattacaagtaggacagtataacaggagattggtgtgtgaatgctacaaaacagtcagcaaaaggaatcatgtttgcttgtgacaacttcagaaggtaccctgaaagttcattttcctaaagctaagtgcatgttgaattctttttcttggaattgtgcagaataattggattgagggcaacatatttcgaggagtagccaggtggaatggtcatacatgactacagaggaaaattatcttggcaatattcgcaagggaaggaggaaacaaagttttttctttcttaccacgttttatttggttggactaaattggggtcacaatttggctggtggaaccttaattcaagaagaatcctgcttttgctggccccaggggccaaaaggaacttgggttaactggaggttccttcaaaaagcggttttacacttataattcagaattaacgttatggaagtgtgccttagatgtattgtcactccataccttttccagttctttattcttaaattaaccccatttttactttctggaaataattcatctgggtagtggctttatgaccagctttaaatttcaatttgaggaataataacaaagcctagagattcataggaaaagagcattgaaatacatgataggcataaagataactagaagcatcttaccagccttaggggttgaactggaatttctgtgaaataaattggattgtagatactaatttattttagaatggttaaatacttaagaagaatgttctcagtttcaaaagattacaatagggaggagtatacgttaaaagagctaatagatgggaagatata

SEQ ID NO: 662396 - DNA, 186 bp, Homo sapiens
agaggctccccacaatttcaaaatgtcagatcagagatctttggcgattaatccacgtctccattttatgcgtgggacaaccaaggccctgactgttgtccctggcccaagtccagtgcctttcacatttgaggcttttggctcttcccctctgaggtggggcagtgcatcactgtggtggaaggg

SEQ ID NO: 662397 - DNA, 807 bp, Homo sapiens
taaacttaggctaggtacgaggcctgggtgtcacagcccatgaccctaactagggccctctcagccctcctaatgacctccggcctagccatgtgatttcacttccactccataacgctcctcatactaggcctagctaaccaacacactaaccatataccaatgatggcgcgatgtaacacgaaaacagcacataccaaggccaccacacaccagctgtccaaaaaggccttcgatacgggataatcctatttattacctcagaagtcttgtttcttcgcaggatttcttctgagccttttaccacgtccagcctagcccctatcccccaatcaggagtggcacgtggtccccaacaggcgatcgacccgcgactaatatccccttagaaaggtccctactccgtaagagcacgatccagtattactcgacatccgtgagtatcaatcatcgctgagctcgccatagtctaagtagaaaacaacctgaaagccaaataagttcaagcatctgcttattacaaatgttactgggtctctatattaccctcctacgagcctcagagtacttcgagtcgtccctgtcaccatcttccgagcggcatctaacggctcaacgattctttggtagccacgaggcttccacggacttcacgtccttatcggctcaactttacctcactatctgcttcatccgtcaactaatatttcactttacatcccaaggatcactttggcttcgaagcgcgcctgatatgcattggtggagatggttggactatctggtgtctcctccatgataggctaa

SEQ ID NO: 662398 - DNA, 416 bp, Homo sapiens
aaatccgagcagcgatctgctcacaaaaggtgatctataggcgtattgcaacacgcatgaaggtaaattgctggacaaaggaattcatccattgactcagtcggattcactggacgggcacagtgctatcacttggaacaccctgttgattctgaaaggtgtcagcaagttaccatttgctgtgagcaatccgtatcctctgctactggtgaacattggtgcaggggttagcatcctcacagtactagttccaacgataaatacagagggggtcacaggtactagtcttggaggagagaacgttctgcggtctcgtgctgtctgcttatcgggcccggcgttatacagaagaagctcttgaaatggcatctcgtggagatagcaccaaagtggataacctagtacggtgtcgctat

SEQ ID NO: 662399 - DNA, 110 bp, Homo sapiens
  misc_feature (2)..(2): n is a, c, g, or t
cnggagatcagtaagcggagcattagtaagcggagctcaacacaacatacccccagcaggcgtgaccgctccgcttactgatgctccgtaactgatgctccgcttactga

SEQ ID NO: 662400 - DNA, 1610 bp, Homo sapiens
tctggtttcacccttttttttttgtgtttgtgaacttctcccattgttttaaaaattttgtagaaaaaaactccctgtggagtataaacaatctcccttagaagcacgtgacattgtgcgtggtggctccagaggtttcaccaggaaacaggtgccgtgtgtgccctgtgccaaatgtgggggggttctcctttataagcccttctgtggtgtgaatgaaaggtgtgttctcgaggggaaagagagagaggacactgggagggcgccccgtgaaagagagacaccccagccacatgtgtgtgtgtgccacacctctgtggccctctctgtgtctctcgtgtgtgtgtctcacaggaggtgagatacgcaaatactatctctgtgtgggagagtgcgcgccccccttctctctcacaccacagcgcgctctgtggagagcgccgggggtctgtgtgagacgcctgtgcgcccccttctcgagggggcgcccttgtgcgttttttctcagcagcggtgtgatgaccccccctgtgttgtggcaccagagagaatgtgtcgtgtctgtggcagagtataacgcccccggtttgagacccacacactatctcctcaagatagtcttcttctgtctccctatttctctcacagagccaacagcatagtgtcttcatatgagagagagtctcacagctgtgtagtatgcggctctcccgcagcgctgctactctctctcccaactctgtgttgtctcatctctcagaggagaaatcgcccacatttcttttgagagacacatgttgttctcttttgcgaccccaccaccagagatgagaccccccccattttctgcggcccattgttgtgtgtgagaggtggctccccccctgaatatagaggaagggtgctctcttccccccccaaatcgcagcgcagcattttttgcccccccttttgtgcggcgtatagtggcgcgctcctctccaaagagtcttttgtcttgtgcgggcaccctgcttttactacccccgcagacgaggtggtctctctccgtccaaccgaccccacccaagagggaaccgtgcgctgtgtctttccctgctgctgcggttgcaggaccaccgtgggcttggcttgtgtcttctcttctcccggctgtgttgtggcccccctttaataaaatatcctccccccctttgaggggagagtaaaaacaaacccccgattcctcgttttcagtcttcttgtaaccgaagctctcttcctcagtcgtgcgttaccgcttcttacgaaccccagcgaagattgttttgttctcacattattctacgccggggtgttgggcgaccaccaccactttttcccaccactactacgggtcggcgagtaaataacatgtttgctcttcccccgagggaagtattattatctcccctcaaatgggtcccccgcgcagacacacatcatctttcatcaacccgggggcgcaacagtgtgttgcatacctatgtgcgaacccacaccgctgtttgttgctacacccacaaagcgagcgtgcataattaatctccactcgctaccgagacgagtattgtacgtcgtgtgaggcatcc

SEQ ID NO: 662401 - DNA, 107 bp, Homo sapiens
tacccgggtatcccacccaaagaaatgaagctggatggagtcagcacaacatctctacccgtggggctggactattaaaacacagtgacttcctctgcctgcctcac

SEQ ID NO: 662402 - DNA, 272 bp, Homo sapiens
gcagtttcgacggtatgactctccttacttgagtaggtgtctcctactatgccaaaactcagagagtaagtcagaagtacaacctcccaaggttgaaaactagagctggcacgtattacatggtctgtagatgtttataggtgtgctggatgagtgaaggaatgagtgagtgagtgaatccaggatcgatctggaaacacaccagggctcagacctcttgggctaagtgccagtctcagtcctcttgggctgtgtaacaccaaagagaacac

SEQ ID NO: 662403 - DNA, 154 bp, Homo sapiens
  misc_feature (13)..(13): n is a, c, g, or t
aggatccttgtgngagacggggtctcaggtgatcatatctcaaggtaagggcacgattgccaggacaggcggaaggtccaaagcagctcttgcccagccctaccccagcacagccctggaaagtgcacagtcacgaaagcacagcaccttggtt

SEQ ID NO: 662404 - DNA, 273 bp, Homo sapiens
ctactgacttcaagtgatctacgacctcggctcccaatgtgctgggattataggcatgagccactgcagccacccagacgtgaatactcctcatttttttctctggcctgatttccttggcctgaacttccaatcctatgttgaataagagtgatgagagaggacatccttgtactgtgacagttttcaaggagaatgcttcctgctttggcgcattcagtatgatactggctgtgggtttgtcataaatagctcttattatttcgagatatg

SEQ ID NO: 662405 - DNA, 223 bp, Homo sapiens
  misc_feature (68)..(68): n is a, c, g, or t
  misc_feature (71)..(71): n is a, c, g, or t
  misc_feature (77)..(77): n is a, c, g, or t
tgggtcgttcttatccaacatcgaggtcgtaaaccctattgttgatatggactctagaataggattanggnggaatntgaagtagatagaaaccgacctggattactccggtctgctaagacttcaccagtcaaagcgaacgttgatcactcgatccttcaataactggtgcaacggaacaaggtaccctatcaacatcgaggtcgtaaaccctattgttgat

SEQ ID NO: 662406 - DNA, 802 bp, Homo sapiens
  misc_feature (468)..(468): n is a, c, g, or t
  misc_feature (503)..(503): n is a, c, g, or t
agcggaaccttctcctctctgagtgacctggcgttgggcatgtcccagcttcgtacgggtgactgaaagtccacatcgacgtaacagtctgaaatgggaaagcacgcggagagccacccggatacccgccccacggcgtttccaatacgttctccgtcctggcgtgctgcgttgtcctgcgtgctcgtgtctcatcgtctgacggtgcgacggtcgatgccttcgaagtctgatctagaagcgctccgatcgtgctggatcactcatctcaatgcaaagcccaatcgaatcggtatataattagattgcgaacacacatgcccgtcacactgagaacgtccagttgcacgagaacttattgcgtacatcactacgttagtattgccttggcgtccctatgttaaagttacttgggaggtctgcgaggttgcgagacgttgtagccgagtacatggcttggacttcttnaccatggaagagcaagaccttacttgcaagactancttttgttgcagaagtactaacttcatattgcgacactccgcttttgtcccgctgtggatgggaacgttgtttcgaaccctgcgaggtaccgcctaccaggtacttgagtggacttaaagaggcgtggtcgcccaatagagtgagtatatttggtcaacattttgttcgcaattaacgaggacgctttttttgcattgagtcgcgaagccacccttaactgttgttcccttgcttggtgccggggctaccgagttgccaccttggggaatttcgccaaacgaagcctttgtccaacttg

SEQ ID NO: 662407 - DNA, 239 bp, Homo sapiens
gcataaaatttgtttgtcaaagttcatcccttcatgataaaaattctcaacaaattaggtacagaatgaatgtacctcaatacagtaaaagacatatatgacaatcctacagctaacaccatactaaatggtgaatagttgaaaatatttcctccaaaatcagggataagacaaggatgtccatttttaacacttctgtttaacatagtactggaagttttatccagagaaattattca

SEQ ID NO: 662408 - DNA, 302 bp, Homo sapiens
gcgtcgacaccggttgctgatgcaagcgatgtgcaagtcgacaacgtcgggcgcacgataccggtcgagttgattgcgaatgtcgatgagtgcttgcacgacgtgagatcaacgtagttgacagcgctgaagtcgagaatgatggccttgacggtcggcagatcctcttttccagcgttgaggttgatgttgcctgctgctgctttcttgagctgacgcttggtggggcccggatcgttccaaggccggtcaccagggtcgaggtaggatgtgaggtttgtgcgtcaggtctggctgaaaat

SEQ ID NO: 662409 - DNA, 158 bp, Homo sapiens
ttttccccccccccccccccccccccggggtttttgtttttgggaaaccccttgggaaaatttccccccccccgggttttttttttggcccaaggggaaccccaaaaagggggggccctttttttttttccggggaaaaaaagggttttttcccttta

SEQ ID NO: 662410 - DNA, 1000 bp, Homo sapiens
ctctgtgtgtgcgcccccataatggcagctgatgtcgcccttttccgtatatcaactataaatttttccccttattcttttttatttttgggaacggagtcttgctctgtcacccaggctggagtgcagtggttcaatatgggctacatcgcaacctccgcctcccgggttcgagacagtactccctgcttccaagaagtctcctgagatagctgggattataggacacccaccacccacagcatctgtggataaaatcgtgtacttttctctgtagagacggggttctcaccatgttgcccagagtggcgtcattgaactccatgagttcaggaccaatccgcccacctcagccctcccaaagtgatagattacaggcctttatctttaaacctaaacttgtcctaggactgtccttgataacgtgtgaaatcacagtcaatatatctttacctatacaataacatatttcaattcaccataaactcttcttctctccgtagtatctattagtctctctctctctctccagtggccaccagatatacgaacagtcacatctgtgtgtatagcatggtgtaagagtatagcacaaggtaccttgacaaactggttgtactccctaaaaatgctcgcaggatcagccaatggcccaggttaagttatcctgccagaagcgtgtgtacccacaggggagagaagtcgtctagacagtcctgatgacaatcatttagcaacatacatcaagtgggataggaagtagcccaccacacaagggcgtgaggcgaaaacatgggcacaagattagaaccgggccaaccatagcaagaacagctgaaaggaggggaagacaaccagggtcggactacaaagagaccaccccactccagggatataggttacacgacagaagcaacacaacagagaagttcaggaagacaaaaccaatagatgcacggagagggcggccacgcaccacgcaagggaagtctcaccggat

SEQ ID NO: 662411 - DNA, 331 bp, Homo sapiens
  misc_feature (64)..(64): n is a, c, g, or t
  misc_feature (66)..(67): n is a, c, g, or t
aaaaaacatggttggaaccacttttctcaataagaaactttgtataggccggccgtggtggctnanncctgtaatcccagcacttttggaggccgaggcgggcggatcacaaggtcaggagttcaagaccagcctgaccaatacagtgaaaccccgtctctacttaaaatacaaaaacaaaattagcttgggcgtggtggcgcatgcctgtaatcccagctactcgagaggctgaggcaggagaactgcttgaacccgggtggcggaggttgcagtgagcctagatcgctccactgcactccagcctgggtgacagagcgagactctgctc

SEQ ID NO: 662412 - DNA, 136 bp, Homo sapiens
gcggccgcctactactactactactactgctcgaattcaagcttctaacgatgtacggggacatgcctagctggattgcagagttaagtttatgattatgaaataaaaactaaataacaattgccaaaaaaaaaaa

SEQ ID NO: 662413 - DNA, 272 bp, Homo sapiens
  misc_feature (195)..(195): n is a, c, g, or t
tccccagcaactatgggtcgacagtcaggccaggggttgcacaatgtgggtactttccgtgagcaactcataagggtagttgggcaatttctagcatctgatgcacagtgggcaaacagtactgccatgcattcttcagcgcaccaggctccttctccctccagcagaaaactgccccctcatagagctgggtancaagggcaagccccgaaggcgaaactgcaaccatccgccagccagctccaggctgcccatggaccgctcagttttca

SEQ ID NO: 662414 - DNA, 119 bp, Homo sapiens
atatctctagaacctaagcccttaactgaacccatcttataccacaatcaaacacccaaggtcatcaaataggataaaagaatgaaagaagaaaatagccaaaggacagcaactttaaa

SEQ ID NO: 662415 - DNA, 87 bp, Homo sapiens
ttttttcaacccccccccccccccccctttgtgggtgggggtttcccctgtgtgtcccgggccaataaaattttcctgcccctgcca

SEQ ID NO: 662416 - DNA, 396 bp, Homo sapiens
gaatgcatccaattgcctgccttcatgctcgtggacatacaggcgctggttcctgcacggggtctaccagtgaagccagtggtctgcctgcgcctccagcaggagcgcagccgttgtggctctacagcaggccccggcgcatggcctcgtagatggacaccttctccttggtgtcctccaggtagatgccggcgaggcagccactgccctgcagcagctgtcctgcactggagcccagctccgaaaggtccttgaccgtcgtcttgccgtccttgagctgctcaaactgggccctgctgaggaccctgcggtgttggatgcagtcgactgcaacatattcacagcaaaagaatcccggttgctgtcgtgatgtgaacccagcaccagttcttgctg

SEQ ID NO: 662417 - DNA, 1038 bp, Homo sapiens
catctgaacatcacaagcccacgtagatccgatgtctcacgcgcccctggaaagccgtggcgagaccgcgcagaactggaattacgaccaaccgcgcgttgcttcacccgcgtggggcgaagaaaaaaagtcaacgggaaatcgaagtgaaccggtgtctccatacgaggattagaagcgtaaaaaagaacgggtccaaaaggctatccaagaacgtctagtagagaaaatatagaaccgtgcactttggtaagaccctccaagagcattcatccaagtttcagttgtgcaggtgtgatggttattatagatatttaaagtatagcaagcggctgtgacacaggagagacctgctgttttacttactgtactgaagggtatactgctgcccgcgctagttaaatcagcattggtcctttcctgtcggcatgatcaattgcggtaccggtagcttcctgctcgtgatcatgtttacctaatttgtgtcaatgtacatctgtagtaagccacatgtgaaagtgcctttctattgttagaggagttttagccactgctcttgtaccgttgccaccgactctgtggccccacccccaccctccctcgctgcccgaattcctgcctgcccactcgagtgtttcgaagcttgccttccctgtcccccaccttccccatcaccgccttcctgtgcctcggtgctcagtaattgtccacatccttcaccaatccctgtcggtcctcagactgtctgcgtgtttccatatgtagacgttgattgtgcctttctcacccctgtgtcctcccatcccaccgcatccgtcccccgctcatgtgctgccatgacagcatcgcattcgcccgtgctctgtactgcctctcaccatttcattccctcctctctgaggtgaaaataaagggggatgcttttacagtctggaaagaaaaaaaatgttttgttaatctgttgtgacaatgcacttttatgtatagtactgtacatttttggcatgtaccattaacaggcttcggagtatacagtca

SEQ ID NO: 662418 - DNA, 83 bp, Homo sapiens
tgctgggcctgctggaggagctggcctggaacctgcccccgggacccttcagccccgctcccgaccttctcggagatggcttc

SEQ ID NO: 662419 - DNA, 169 bp, Homo sapiens
agggtaggcgccgggcgtctgcgatgttcttcgagaaagcgcatcccgcccctcacgcgtcagatggccaggcagggcgaggtggcgccgcagcacatcgaagaaccggcggtccgctctggccgcccacaagccgatcgcgtgggcgacggcccaccacagaaggccg

SEQ ID NO: 662420 - DNA, 140 bp, Homo sapiens
gtgtctccttctacatccggctctgcgccggctgccacccggcggttccctcggcggcggccggcctttgcttgcttgcttcaaagctgctgccggcccctttggggttaaaaagggttttcaaaattggaacgattttg

SEQ ID NO: 662421 - DNA, 323 bp, Homo sapiens
attgcccactgcaaacgccgcccggactcgtcgttggggcacaggaaactgtccttgtcggaatcgaaggcggcggtttcgtcgaaattcaggtcgcgcacgtcatagatcgacagcttgtcgtcgagactcaggctgtaggcgtgtcgaatttcatggggctcgggtccgtgagaggtttcgctattaatagcgggatattgcgcaaatatcagcagaaatcacgtacgcaccgtcacccgccggccactcaagaaacacagggtaccgcccactgccgtcagcccgctcaatacatagaacatcgaggcgggcggtcgacg

SEQ ID NO: 662422 - DNA, 286 bp, Homo sapiens
atttacctggcttcaggagttggctagctcaagtggccaaggttgagaaaagatgcaaaggaattaaaccctaagatccttctttaaaaccagcaatcaatgaaatcactccaggtgaaggttctagaacctagatcagtggtttgcctggctttcggattgtaaggaccctaacgttcactgctcttccctccaaactggagaaccagcaaagggctgacaatttttttaatgtcatatcagggcgttaaaggaaaaaaaacccccaaccccattcagcctctgt

SEQ ID NO: 662423 - DNA, 122 bp, Homo sapiens
cctcctcagcctcccaagtaggtggggctacaggtgtgcaccaccacacccagccaattttttttttcattttgggtagacagggggtctggctatgtggcccacgctagtctcaaaccccg

SEQ ID NO: 662424 - DNA, 343 bp, Homo sapiens
  misc_feature (201)..(201): n is a, c, g, or t
  misc_feature (224)..(224): n is a, c, g, or t
gggtgctctagaggatcgcggcgagtgcatggtggggaggctcaggaaacttacataatggtgggaggtgaaggagaagcaaggtgtcttctttacaaggtggcaggaaggagaagggctgagtgaagggggaagagcgcttataaaaacatcagatcttgtgagaactcagtatcatgagaacagcatggggtaaactgnccccataattcaattacctccanctggtctctacctttgacacgtgggggatgataggcattatggggtttacaattcatgatgagatttgggtgggaagacaaagcctacccatatcaatggctcactgcagccttcaatc

SEQ ID NO: 662425 - DNA, 305 bp, Homo sapiens
aagaagctccggcaactccagaggctccgacaaaattttgggttgagcctggctttcctctccagcaagggtttcgcttaagccccaagggcatcgggactggtgactcacctatgaatgggggccgggaagacaggacacacaaaaaatgagtttgtgggccacccttaagccccgcgcccaattttcgcgggcccaaaaaagcccgccgcagcctcccccattttgcagccaggggagccattcacacaatccccttttgttaattctatctgcaacatcaattaaattgtttgtagaaacta

SEQ ID NO: 662426 - DNA, 163 bp, Homo sapiens
attggaaaaaagataatataacaatggactagaaataggtgagcaatctgttatagggattgtgtgattgacttgtatgatagtcgatgctagtgggtagtaacttatcatactcctaccatatttagattcatacatggctatattatatagttatatagtt

SEQ ID NO: 662427 - DNA, 221 bp, Homo sapiens
gggctcgcaccgttagtagtcaaaagtataggcgctagaattgagagctggcgcaatagatatagtgagcgcaagggaaagatgaggacagattatagacgcaagtgataatatagcaaggactaacccctataccttctgcataactgaattaactagcaaataactttgcaagagagagccacaagctaagagccccagaaaccgagacgaagctacgc

SEQ ID NO: 662428 - DNA, 917 bp, Homo sapiens
ggctggagccagcggtgacctaaactggtgataattgttgcgtcccacctctctccctagtaggtgacctcatacagacaatgctttcgtgctcctacagcatcctggttgtatagctatgaaacatcagagggtgatcgtgcgatggatcgcttcacgatcgatcgggaacatgctgcagaggctctcggcattccatgtgctgctattggacaagttgtaggagcactgagaagcagaagaaattattatattttacagcctttttaaagcataactttcgagtctccgattaaagaggagaatacggaaatgcgtgttgaagatgataggaagaacgagaaatggggagacaaagatgaggagtaagtgacagaattatgcatatggaggagctagaaagaggaagggacaacagcacaaagaattgtgacttgtaatgataatgtggaagagaaggatacatgatgccattttggatcgcagaagtaggttcaggatacgaggctgggaaaaggcaaggaggttgagcagaacgaatatctagcattacttgaagaggaaaagcaaggttgtgagtcagtgaaaagtacgtcagggaattgggcaagtgttgatcggaattgttacatcacaggaagaagtaggttgtgcaagacaacggatgccgattttttagcacctttagccccggaattaaaacaggtcacgtaaagtttgtagagttgggaatacatacacgacccaaaggatagacccgcagggaactccgtgtcagggtctggagacctcaaggcctgtctcgaactggggacatcaggcgtcagagaacgatacacatattggggccatgggtaacacagtgccctgcagagcttcgagacaactggcaacacccatcgaggtcagaataggga

SEQ ID NO: 662429 - DNA, 202 bp, Homo sapiens
gacatactgaacctgctgcctgttacatgtcataaagcctacagagacttatcttactgcagtcacgcgagctcagcaccgcagctctgggagatctcaccaaagaacatctcatttatagctataagaaccagtttaaatgtaggcagcctcagtgctacacgaccaaccagatggatcatgatgttacttattgagtcca

SEQ ID NO: 662430 - DNA, 179 bp, Homo sapiens
tgaggatcccaagcttctcaaccggtatatatgttacctgtacagcactctatgctaactacaccagtttaagctagggcctcatctccaccttgtttttcatgtccagcagcaataccgtgcttgctggtgtgccggacccacgcgtactctgtgatccccagcttcgttgctctata

SEQ ID NO: 662431 - DNA, 633 bp, Homo sapiens
ggctgtgggataaactgataggtggaagtttcagtgggagagtaggtgggagtgaccgatgtgaaggagaaaaactggatgtgagggacagaagttggaacgctagctgcttctttagctaccttatcagtgtaagcgttgccctgagcgatgggatctgatgccttttggtggcccttgcagtgaaggactccagcttcctttggaagtaaagcggccttgagcagagtttttattaaagaggcattaatgatggaggacccttacatagtgaggaaacctctttcaccccatgtaacagcatggtggtgcaggatatggaaggcatatttagagtcagtataaatattgacgcataattcctttgcaaaagtgagggcttgagttaaggcaacgagtttggcttgctgggaggtagttggggggtagagcgatagcctcaatgatagatgtggaagatactatagcatagcctgcctttgctggtgtgtggcaattaggcctggtggaactgccatcaataaaccaagtgtgatcagggtgaggaacaggagagaaggaaatatggggaaatggagtgaatgtcaggtgtatcagagataaacagtcatgggggtcaagtgtggtatcagg

SEQ ID NO: 662432 - DNA, 699 bp, Homo sapiens
  misc_feature (49)..(49): n is a, c, g, or t
cctaccactatttcgtatttttatagagatggatttcacatttgccagnctgtctcgaactcctgacctcaggtgatccccctgcctcgcctcccaaagtgctaggattacaggcgtgacccccatgcccactgggagcgttctttccaccaaaagtctaattcagagactccaccttccatcctggccactaaaccatagtactagaggtaagatctcccagaatttctctcacttaacccggatacttacctttaaatataattagcccagacttatttgagtacttgcctaattgtatttaattagaactatgctggatgctgtagaccgaagaaataaaatactccacttggtccctatcttccagccggttagaggcctttagggaagaaaagcctgtgtgccgggaaagagaacctcccccagaaagtattccataaaatgcccgaagtgatcttaccagaaccgtgcctgtgaccacccgaggggattgttctgtctttgtgagtgaacataccaatgatggggataactggtcctcataccaagcaggtcccctttctgatcacccccctggcaggaccattcaccgttcttgagccaactgagttagggagggtatgctaacgacagaacctatgccagttcttagaaatattttttgtttgctgaaataaagctccatccaacccccta

SEQ ID NO: 662433 - DNA, 337 bp, Homo sapiens
ctgtatagagtgaccaaaatcagtggacttcatgctgacagagtccgtgatgctgttcaatacactcgtccattgatatcatacaatacacgatacaacaaacgtgactgcactcgtgaacacgcactttttttcatcgtgcacacggactgatcagacaagactctaccccaaacagatggacaccacaggaaacacagaagaagaagacacagaaccaccaccatcaaccccacgaacagatacacacaacttcgacacaaatcaggacagacataaccaaacaaacagaaacgagacatagaccacacatacaacaaccaaaacgatcacaact

SEQ ID NO: 662434 - DNA, 147 bp, Homo sapiens
cactcgagtagtaggtggtatagtcatcaaaaccattcatccccttcttgatgtatcttaatctctggctctaaggcgacatctgagaggtcatgcatccttttttatatcgacatcataagctatcacccgctggttctctgagtt

SEQ ID NO: 662435 - DNA, 531 bp, Homo sapiens
ggggtaaggtgggccttacagacaggctgaggtttgggtggtgtgatctgtcctaattggcccctcaccaatgcatctatctgtctgccaccagcccacccacctgcgccaccctcaccacgcttctgctcattgtctcaatcccacctgaagaggagtaaggctgactccatgggcccattcccctcacccccagcaccaagacgtgggaggctgcttcccaagtaagaatccaggagcaagctttgggtgaatccagatggcactgaggatgggtttcttactggatttgtgagttgatcgtgggaatgttgggtacgggaacgcatgctctaggctctgaaaatgctccgcgctgtattcctcgtggtaccgacgccccgggtggcttgtcgatggcactacagctaagccacctgcctcccaaacttgcacttctccagtagtcaaatcccacctcactcactctggtgctctaccccccggcttactctcccatcgctcctcccataaccacttaccaggccctac

SEQ ID NO: 662436 - DNA, 1034 bp, Homo sapiens
ggcccgagggactggcagctccactgtggtgcacgctcagactacgaggacacaaagcaaagaacaggccaccatggcagctcttcctcctcttgtgcctggtgcttctcagccctcagggggcctcccttcaccggcacgcacccccgggagatgaagaagagagatcagaggaccatcctatgtaggatgcacacggttggcaccgcacagacaagaccagaagggactttagctttgatctctacagggcctttggcattccagcttggcccacagaccgagaacatcttcattctccccatgtgcagcgatctcctatgagccttggccatgctctccctgtggggactgggtccagctagcagaagaatgccatggatctctggaatgggaccgtgggcccatcaaccatccagaagagctcgagacgaagtgagctgcacagaggctttcagcagactccttcaggaactcaaaccagcccagagatggctatccagcatgagcctcggaatgaccttttcaacgagctggtggtagacctgctggactacctatcgtaagtgccatgaagacgctgtacctggcagacactttccccaccaactttagggactctgcaggggccatgaagcagatcaatgattctgtggcaaagcaaacgaagggcaagattgtggacttgcttacgcaaccctcgatagcactgcggacgtgatcatggtgaataccatcttcttcaaaagctaagtgggagacaagcttcaacacaagaggcaacacaagaggcacagcacttactacggatgaacgtccggaagaactgatgtgggcagggtacccccaatgagggaagccgagaaaggatacagggatacacatacacaaccttggagcaggaaagcgtacatacatgaagcgagggtgggcgaacacatacagaggggccatgcacagcggacaagaggcacaatgaatcacacaaggggggacaaaatgcgcagtagaggaaggaacagaggagcagaaac

SEQ ID NO: 662437 - DNA, 286 bp, Homo sapiens
  misc_feature (25)..(25): n is a, c, g, or t
tcacaaagcctgttggtctcttctnacacggatgcacatgaaacctatcatgactgctccagtcatctgaaactgtgagataagaagtggatattgctaaaatctactaaatttgtgggaatttgtaatatagcaatagaaaactaatatacaattattcaagttttactatgagttttaaatctagtggtatctgaatacaatttgaaaccaaaggtaaattctttgcttcatatcagcttggattcaagtaactttaattgggactgagaagctgtggcgggcg

SEQ ID NO: 662438 - DNA, 935 bp, Homo sapiens
  misc_feature (228)..(228): n is a, c, g, or t
  misc_feature (282)..(282): n is a, c, g, or t
  misc_feature (293)..(293): n is a, c, g, or t
  misc_feature (306)..(307): n is a, c, g, or t
ttggtcaggctgtctcgaaatctgacctcatgatctgcccaactcagccctcctaaaaagggtgggattacaggcatgaagccctgcacccagccttgtgcagtctttcttaatctctagttctatgatagaatttaaaaattacaaagcctgaaatttttcctaaataatttgtacctttctgggattattagggaagatatttcaaaaatatttaagaggtcagancttttactgagcaagtgcttatatgagagctagattcttaagcttgccacaaanaatactatgtnattcatgatatannatatatttctgaaagactttaagttaattcattgatttctaagtaaaagtgagtaatgaatggttcttttatcccatctttcagtatacaaatttattattcttggcatctaacttggtggaaaaatgtactgcgagttgaatagctctcagaaagtttattttccaaaagtaagcattactgtattatagaaggaatgcctaaggaagatggcctcaaatatcccttagtggactcatttataagattcataaattgttttgtttggtcattgtatattaactctttcaggtgagtctcctgaaacttaaacatcttaggacgtgtttaagattattagcacacatgttgggaattaagttgaaatcctggtctttttattcaagagcgtatgttcctccctgtgtttgtctatttatggaagtattcagaattagaaacatgacgaaaccctgtctctactaaaattacaaaaattatccaggtgtggtggcacgggcttgtagtcccagctacttgggaggctgaggcacaagaatcacttgaacccaggcggcagaggttgcagtgagccaagattgcaccactgcactccatcctgggcaacagagtgagactctgtctcaaa

SEQ ID NO: 662439 - DNA, 181 bp, Homo sapiens
  misc_feature (126)..(126): n is a, c, g, or t
  misc_feature (146)..(146): n is a, c, g, or t
  misc_feature (156)..(156): n is a, c, g, or t
tttcgtcatcactgttcaggatgatggtctgggttggggtctgggtaggggcccgggctgtaggggtctccctctcattcctgacggccttcatcttcgcctgtttggtcacccacctgacgttgngcgctcagggaagcaacttnctctccactntgaaggagacaccagcaagcgtgct

SEQ ID NO: 662440 - DNA, 1198 bp, Homo sapiens
  misc_feature (1175)..(1175): n is a, c, g, or t
agcggttcaggtcccaattcctccgattcgctgcgcttgggcgccaaggacggctcggatgcgcggcggtctctgctgaccagtataagatggtcgctgggacggatccataaggcagcatggaactgtggaggagcgggaaggcatgcgtcagtcggactccgccaattattatctgtgcataggattgtaagcaactccagactggttggtgcaatgatacacgcagcgcaaataggctctcgggaggcctgacagtgccatcacgtagggatagctgaaacgttacacagttggcttaccaagggtctaccgggccattagttggtcagcgcgaagtggacgacttatctagacatggacgtgtctgaggcagtcccaaggggtctccaccttaggtgtgagtggagacacggtgaagtactctggggccccatggggcaatacaagtagaggaccaatgctcggtccggggctccacccgtttgatcgattccctgtgtgaaaggggttgacccaatttcttgctcgcggtaagccacacgtgcgattaccaaccatagaccctttgcgatccatcccaactgaaattgcttgcaacaaccccccaaaatttttgggccctccgggcggctgaggccttccttccatgggggaacattgcaatcaatggttcaacaaccgtgcctggtccacccaacatgaatttccttgaagccctaaaacaaaaggttttgatgaactcgcaatttcaaggggtgtccaacctgtggaactggtaatggcgctcgtgtcgcctaacacatgttgacgccacgagagtttcaaaaccttctattggagcgacttggcattttgcgtgggggaacttgtgtgagccaaaaccaccttatggaaattcccactcgctgggaggcaattgccggacaaaattggaagatgtctgggaatcccggcaccggtcgtcaggacgctatggtttttaaaaaggaccaatttcgcggttggcaacgacctttcctctcccggaacaggccaatctttggggcgcccaagattttggtcgtcccattgttcccacagacgggggcaacggtcggctttgacattagggtcaatgtggggagccctttacacaaaagagggtttgccttgggtggcacaggtgaaccacntctggatttgtgggggccaccag

SEQ ID NO: 662441 - DNA, 100 bp, Homo sapiens
ttaccttttgggctctttttactctctgatttttatttggaaatatttaattcctacagaaaagttgaacgttaagtatagtgaccacctgtactcctgg

SEQ ID NO: 662442 - DNA, 158 bp, Homo sapiens
aatctagacgaagggtatgcggatattaaatgactttagtatactctcaactgtgctatagctgtgaatgtttttatgttcttaccgaaacaagacatccattgacaccaagccgtgacctggagcggaaccattaagcttaactagacccgccgccc

SEQ ID NO: 662443 - DNA, 332 bp, Homo sapiens
ggaccccaaagtgctgggattacaggcgtgcgacggcgctcggccacttccgtgtttctttccccctctggaaggctgaggcgggcagatcacctgaggtcaggggtttgagaccagcctggacaacatggtgaaacgccgtctctactaaaaatacaaaaatagccaggcgtggtggcacatgcctgtaattccagctactcgggaggcggaggcaggagaatcgcttgaacccaggaggctgaggttgcagtgagccaagatcgtgccactgcgctccagcctgggctacagagcgagactccattaaaaacaaacaaacaaacgtcgac

SEQ ID NO: 662444 - DNA, 295 bp, Homo sapiens
  misc_feature (79)..(79): n is a, c, g, or t
taatatcgactgctcggtggtatctcccatagctgctgcaggtggggaccagatgtctggctgggccatgttgcctaancgaacagcacaggtctggctcctgggaatgagaggtgctgctatccagtatctggagatcctaaatgaagagggaggtgagtcctggtggccccctacccctgggagagctgtccgcaaatccatgatctgtgttgggccctcggggctcagtcatcggccaggttgatgacgtcgtactcgatgccctggtgctgcagctgtagaatggaggagt

SEQ ID NO: 662445 - DNA, 172 bp, Homo sapiens
tcagaccgctgtaactattactgtgtgtgtgtgtgtgtgtgtccccatggtgggagtgtgtgtgtgtccccatggtgggagtgtgtgtgtgtccatggtgggcgcgcgtgtgtgtgtgtccatgatgggcgtgtgtgtgtgtctgcgtgtgtgcacatagttcagcgtctga

SEQ ID NO: 662446 - DNA, 491 bp, Homo sapiens
ctgggtatctaagatccgggcatgggtctgtaagagggtaagacagcagatagtgtgctggaagaaggaggagcataggctcggcagttttaggatggaaggaaggcagcgataggaagacgggacaggaaaaataacgttgacaagaacctgagagggggtggaccagggtttgaggagggggtacaggaaagaccccaaggctttaaagttagcatgtgcattgtgaggtgagaagagggtgcaaatgccacagctggcctccaaccagggaaggcggggattcaggacaggccagtgctaggtggggagtgcacaggaggcctgccctgtgcctctgtgcggacagccgatgctgggcggagactgccacgtgcccggctctcatccttgctttctttccattcctcatccaactattcagagtcacatgatatggctgagaaaagccagaagggtctatagttgaaagataaacccaactctgcaaa

SEQ ID NO: 662447 - DNA, 370 bp, Homo sapiens
  misc_feature (31)..(31): n is a, c, g, or t
gcacgaggggcaaggctggactgtgatcttncaatcatcctgcccatctctggtacccctatatcactcctttttttcaagaatacaatacgttgttgttaactatagtcaccatgctgtacaagatccctgaacttatgcctcctaactgaaattttgtattctttgacacatctgcccagtccctctcctcccagcccatggtaaccagcatttgactctttacttgtataagggcagcttttataggttccacatgtaagtgagatcatgcagtgtttgtctttctgtgcctggcttatttcactcagcataatgtgcaccgggttcacccatgttttcataaatgccccgatttcctcctttaaag

SEQ ID NO: 662448 - DNA, 487 bp, Homo sapiens
  misc_feature (16)..(16): n is a, c, g, or t
  misc_feature (65)..(65): n is a, c, g, or t
  misc_feature (73)..(73): n is a, c, g, or t
  misc_feature (182)..(182): n is a, c, g, or t
  misc_feature (196)..(196): n is a, c, g, or t
  misc_feature (238)..(238): n is a, c, g, or t
  misc_feature (241)..(241): n is a, c, g, or t
  misc_feature (305)..(305): n is a, c, g, or t
  misc_feature (321)..(321): n is a, c, g, or t
  misc_feature (324)..(324): n is a, c, g, or t
  misc_feature (351)..(352): n is a, c, g, or t
  misc_feature (414)..(414): n is a, c, g, or t
tgaatctagaaccgtngccagacatgggactggaggacgagcaaaagatgcttaccgaatccggngatcctgnggaggaggaagaggaagaggaggaattagtggctcccctaacaacagtgttttttgcttgcgagcagttggagatttgtgtgaaggcccgggagcggcttgagctctgngctgagcgtgtctnctctcgatcacattcagaagaggattggacggaggagctctntgncttcttgcctgcgagggaccattgcgtggcccacaaactctctaacaacttgaaattaatgtgnggtcttaattaacccnatncttcatcatctgggcatcataatcttnncttatggttttggatgtaccatttgtttcttatttgggtaactgtaagtccacatgaacctnatgggtttggcttatgctggtagcttctatgtattcgcaatgattccatctaaataaaagttctatgatctgc

SEQ ID NO: 662449 - DNA, 701 bp, Homo sapiens
  misc_feature (169)..(169): n is a, c, g, or t
taggtttggagggggaatgctggaaattgtaatggggtatggagacttgtcatataagtaatgctagggtgagtggtaggaagtttttccataggaggtgtatgagtgggccgtagcgggaaccgggggttatgctgtccgatattctataagaacacgagggaaggtntaaaagatagggccttggtgcaccaacatattattgttcgttgtcagagtcccagggcgagagtcgcgtccattattgtgggtctcctaggaagtatttgtagtggggtgaggggtgttaattcatcaataatggttgtggggtatcccggctatgaaagaataggcgccgaatgggcgcctggcggctgtatccgattgttagaacgcctggagacatagtccggagactccccttctggcaaggtcagaagtgggtgtccaggttgggccctctgctaggtggttggagatccacctcattcttagtggccccagggtctcctgagtggcgagggagttaactcaggaggggtgtccctcgtgttcgctcgacacggggtgggcaggagggttcaagggagccccctttttcagtaactgtcgatccgtagaaatggtggcctaggggtggctctcctttggaccattgttggggcaacctgtccccatggcgccgaatcaagggggaactgggagttcgttcccccctg

SEQ ID NO: 662450 - DNA, 241 bp, Homo sapiens
taccattacacagcttcttctatctgactatcctctgtcctaaagagttacatggactggatcctttacgatgattttaaaaataatattacattaagttttcctggtctaataaccaactatgagaagtacagtggaagggtatagaacttcctatatcttctatacttttaatgccaatttgatttttattgtgatgtgatatttaacagtatgctaaaaataaaatggggtaccggag

SEQ ID NO: 662451 - DNA, 890 bp, Homo sapiens
tgtagaatgatgacttttgtatcgcggtgccatatatcacataaacttaggtcacctatgggttcctgtaagcaggataccgtggggcactagactagcgctaagatatagccttcatccttgtctgacccttgtcctatcgccttggtctcgccccctgctttatgtgttgcttcgtttgtcctctttgtcttcttttataccgaggcgtctatctgtggtctatattctattttttcctcccgttttgtcatttctccctatcacctaactctacttctctgttgtatttgttgtatctggtaactggtcagtagtactgtatttattctcttccttctctctgttggttttttctctgtctcagttatttattcttttagtttgtcccttttctctttccctctttaattttattccccgccgtctgtcttcctttatttatctccctaccctttcatttcttttttttttttcttggggaaagggacctctcgccttgtgccccaggggggaagtgccagggttggtgcccctttgccccccgggtcagggagatccccctgttaagccccggggtttttggaattaaggggcggcacctccccgcccgctattttggttttcggcgagacggggtttcccacggtgtggccgggtgctcgatcccctggcctgtgattccgcgcctggcgcccccaggtggtttttggggtgacccggtccggccccttttttccctatcaacctgtccaactggtccacaaccctggtgcccacgggggatataggcctgcccaaatccctttgttcccaggtcctatttacgcggtccggggggaaacccgttactcttggggcgcccgcgtgtcccgtcatctcaacgctga

SEQ ID NO: 662452 - DNA, 458 bp, Homo sapiens
ctaataatatattaaacttaacttggatattctatgcacttctctgcatttgtggttttctctcactctttaaaaaaagttttaaaatacctatatatgatgcatacatgatacatacaagtgtacattcatacatatgtgtgtaaacagtggtgataaagatacttgtccttggacagaatggttctgctaaatgtgctgggctctctgctttggcagaatgtcttgctactcctaattaaggtagtctaagcctcctatatatttgttttcagctacttgatttcagtcaaattgcgacaagacattatctgcacaccttcacatcgagacatttacgccggcagtgcatgtacgcccgtcatcccagcactttcagcgccccagccagacggattgctcgcgccagcagttcaagaccaacgcggccaccacaccaagaccctctctcacaaaac

SEQ ID NO: 662453 - DNA, 257 bp, Homo sapiens
ataaaacaaaactctaggacttttttagatttctgaatcccccgcagggctccatggctcatgcctgcaatcccaccactcctggaccccacgctgcgtagactccctgagcccaagggtccaagaccagcctggccaacatggtcaaaccttgtctctaccaacgatacacaattagctgggtgtggtggcatgtgcctgtaatcccagctcctcaggatgtgacgctggagcatagcttgaggctgcagtgagcc

SEQ ID NO: 662454 - DNA, 799 bp, Homo sapiens
gtggacgtgactgccggaacgtgggagtatttgctgggccgggtcaccagggacgtgggcgaaattctgagctatcgaaggagggtcatgcgaggagcagtagaggctgtcgcgtgcgagatgtcgtatccagtatccacataggctgtgattgcttgaacatgtgactagtctgaagtgagaaagtactgcgtctctctggtgtcaccgagactggaatacagatggtaatgacttggattactggtaagcctcctgtggctcaagtgatcctctcacctcagtctcctgagtagtagggactacagtccaataggggcagaagacgtccccgggatgctgaagacggaggagcagaagatgcgtcggaacacgaactggtagtcgagaacgcgtgacgttgatcgggacagaagatgatgactgtggtggaggaagcggcatgatgatagaaataaggctgcatggagattattgagagagatggggaagaggaagaggagagaggaggtagccgaatggagtgatggctgagtgtaggatcatgattccgtcatcattctcgtgaatgcttatcacaactaagagggcaaggaatggcgccacaaagtcatcctcgaggagaacaccaagagtaggtccatggaagtccgaaggacgaagcagaaactgaatgccctccagggagctcgcggcgtccgtggcacactcagtgccagacctgtgggcaaccttctgttggaagctgcctgggtggacaagccgaacagcgaatttgcgcggacacgataaatcccga

SEQ ID NO: 662455 - DNA, 1159 bp, Homo sapiens
taaaaatttaatgtaatggttaattttttaaattcccatcctaacttgggcttaatccttacctctcatttccattcttttcttggaaatccaatctaaaaaaaaaaaaaaaaaaaaaaaaaaaaaaaaaaaaaaaaaaaaaaaaaaaaaaaaaaaaaaaaaaaaaaaaaaaacaaaaaaaaaaaggggggcggggcggcgcacaacaatctcccatgcgggggcgcccccccgaccgcgccccacccactagttgttgtgtacaagggggcggccacatagggagggggcactactatacacacgccacgagcgcggcgccgcgcaaaaaaacaagagagagaggggagaaaaacagtgcccccggaggacctaggaggggaagccacccaaccaccggggggaggcgaacaacaagcggggcgacaaacacacacacccacacggcaaacgaccaggccccgagggagcacaaacacacaaccgaccccaaggggaaccgaggggggaggaaaaaccccaccagaacaccagggcggcgcccgcccaaagagaacacgtcccaccccacggccgccacaccaccggcaggagacacatatccaccagcccgggggatgcacgcaacaaaagcgagcacagaagaacaaacaaaagaaaacaaaacgagcgcaaagaacaaaaacaaagagaacacaagcaagaacaccgaaaaaacaaaaacacaaaaacacgaaagacaaagacaaacaaaagaaaaaagaaaaaaaaaaaaacgaaaaagaaacagaacaataaaaagaaacacacgacagagagacacaaacgagacagcaaaaaaaagaaaggggagagagaaaaaaaaaaacaaaacagcaaaacaaaaaaaaagaaaggaaacaacaaaaagcaagaaggagcaacagacagggacacggacacaaccagcggccgccaggggccagagggacagaaggcgacgaaagcagcgaggcgagagccagtgaacagacgcgcgagcaacgagaaagagcaacaggagcaacaagacgaggacacgagagagaagcgcgaaaaggagccacccccgagacaagggcgcaacccaaacaagagagggaggggacagggcgccaagagcgcaggacgccgacggaca

SEQ ID NO: 662456 - DNA, 593 bp, Homo sapiens
ttgttggagttgcattgtatttgaggcctcttcttccttctgcctatttatctccagcaacatctttgatcgtttggacctgaaactcttctgcaaagcatcacagcagatggaagcttctttaatctctttcttgtctgaaaaccccttccaaataggcttgaatcaagcatgctgcttgatgtagtttctgctcttctacttcctgatagaccattgggcttaaaaggccaacaagctgtctaagttcttgactgaattcagtcccagtttcctgtttacttagtagacgtctgagtcctttgtagcaggtactttgtctcagtaaaatcaaaatttcctgatgggattcagccatcaacagtaggagttttgtagcagtacttcttataactggactaggagttgaaaaaagcttgaaaataacttcatctaaaattgaatacagggcttttcttcctattctgagtaaatcaccactgttgatctgtaatatattctgtagcatcatcatgactgcagatcctatttggacattgtcagcttgcagtaaatgtaagaaatgatcactttgtagtacattctgaataagt

SEQ ID NO: 662457 - DNA, 130 bp, Homo sapiens
ttcggcggctacaagacgacagcaggatcgtcaagcagcagcacagcaagcagctgctgctaaggcgtctggcgacaaagcatcattggcggtcatcataagtagtaaaggatcttcttgacctgctgtc

SEQ ID NO: 662458 - DNA, 118 bp, Homo sapiens
  misc_feature (20)..(21): n is a, c, g, or t
  misc_feature (30)..(30): n is a, c, g, or t
  misc_feature (43)..(43): n is a, c, g, or t
  misc_feature (45)..(45): n is a, c, g, or t
caggcgcgcccgtatcactnntgcactgtngctcaggactgananacactggaggagccagacccggggtactcacttggaggagccagatggatcacgtagccatctcctatataca

SEQ ID NO: 662459 - DNA, 406 bp, Homo sapiens
  misc_feature (37)..(37): n is a, c, g, or t
aaccatatggttggacgagagtgagactccgtctcanaaaaaaaaaaaaaattaattactgggggacatgggctctttaatctcttttaatgaccagcccccggccttttggttggttactggtggcttggtttttctggacattatcatccgttaagagtacaggccagtcacttggtagaatgtccctcagggtgaggttggtgcaatggttcactcattattagattagggtcaaacattttgggcaaaagtaccacatgggagaggtggtggcctccccgttgcatcggtcccagaggttcagggtgccagcttgtcccagtatggctgtcctaagtggtccgcttgatgtctctacagttttcccattttaaagatatatcttactcttcataattaaggg

SEQ ID NO: 662460 - DNA, 806 bp, Homo sapiens
ttggttctccttctctcagtatccttgttcttctgcggtattccttgcttgtttctgctgggcattgtgcagtaggttgaatcaatgtcttgggttgctttgtttgtgtggtctatatataggtgttctcgtgttccttctccaatttatacgtccgttgtacttatcggtgtctattcacaactcgtctgattttcacatgtcgtatgaaatcttatttctgttgatgccttgggctattttccttgtcttagattttggttgccactcctctaaactttattgttgttatctgaacctctactctcttctgctctgatactattgagcattctgccctcaaatcgacagggttcaaagacactggaggaagggactggaatcaatggtatgtctcagcatctgattgctcaccattggagcacttgctagaaagttctgctgacctcggctgcaacctgtcagtcatgtgaatcaggattcttgctccaggtatcaagcgcatccagctgcaactttgactgcttgctaaggagccctccaagaggtctgggacccactgctcagtaatggctgacaaggtaactttgataagccaaacagatgagttctgggaaggaagggctcctcctcaggctgctgccaacccacgtggaggccacctccctccaggagatcccagggtgcaaagatggcattgagacagcagcaacagctcaagagattactctccctgcctaacgtgcccctctattccagcccggctctaagagaaaggcccatctactcaggtagagggccgttat

SEQ ID NO: 662461 - DNA, 206 bp, Homo sapiens
gaatacactagtgattatacccggtacctgggtaatataggtgaaaacccgtctctaactacaaatacaaaaaattagccaggcataggtggcacacacctgtagtatcacctaactacgggaggctagaagcaggagaatcacttgaacccaggcggtggcggttgccgtgagccacacttgcatctaacctcggtgacagagca

SEQ ID NO: 662462 - DNA, 554 bp, Homo sapiens
  misc_feature (499)..(499): n is a, c, g, or t
aaagtagggattacattaatatttcagaatccttactctgtagataagtatattttaattttccccatgtatactttgatttacttggggaaggagcttttaaagggggtggtttgctatctctttagctaccagaacagtgtgcctttgatctcacacatcctacttttatggacacagtagccatgcttcctgggaggacagagctgggcaccgtcattcctgcccgactgaggttatgacatccttagactttgttgtatgctgcttcgaatgaaccagagatacccggccctttgcagcatgagaaagcccccaaagctctggaatttacctccacatcaataataagtgaatgttttcagggttacattgtgttgtgtcatttgaattcaatttgactacgcttgggctttggagaggactgttgagtagacgcaggtactttctgagcttgatagctgacaattctaaagcgcatgtggttacacaagttttnaccagtcaggagatttttacatagccagtgatagaacctttaaggtttggaaaaa

SEQ ID NO: 662463 - DNA, 429 bp, Homo sapiens
  misc_feature (428)..(428): n is a, c, g, or t
tctgggcaattcaaagaattctcaagggtaattttagtcgtctataatttttacatgttgtatgaaatccagctccatattattgaactcttactgtgtactagatgctttacaaacatgatcttatttaatcctcatgctcattcattttacagaagagggatctaaggctcacggtggttaatcaacttgtccaaggtcacatagctagaaaaataaagatgttcaaaccagaatagtttgattcccaattctctgacagtccatccctattgactgatctggtctgtaggataataggtattcccccattgaaaagtggccagtggtcaacaagggaaatgggcaactggccatccctgaaaatatggccttgtcatttggctccacgggaacttgtccagtttcatactctagggcactacacna

SEQ ID NO: 662464 - DNA, 437 bp, Homo sapiens
caacctcatttctttgatttccaatttcaattttaatttcatcactttgacaaggtttttcattggaaagaataagagtttgctttttttattttttgggaatttttatttatttatttattttttttttacctctttcaatttattcacttttccaaaatatttttcaatttccaaaatatttttttcttttttttcctcttccaaaatatcctcaattctttgttcgttttttttcatcatttccaattgttctttcaatttctcagttttttcaaaagagaaatcatcaatcgaattcaataaaaattgttttcttttttcaagtttttccaaaatttgtttaaaattcaaaataatttcttctctcatttgatctttatttttggaaatttttatcatcatttcattgatctccttttcaatttccagaattt

SEQ ID NO: 662465 - DNA, 285 bp, Homo sapiens
atatatacatatataggtagagatgagttctcacatactgtagctaggcctcgaactcctaagctctagatggatctcctgcctctgcctcccaaagtgctgggattacaggtgtgagccaccacgcctggctaatttgtgtatatttaatagagatggggtttcaccatgttggccaggctggtctcgaactcctgacctcaggtgatctgcctgcctcggccttccaaagtgctgggatggccgagtctctgattttaaagaccaacatgattacattgtgcc

SEQ ID NO: 662466 - DNA, 209 bp, Homo sapiens
ctatgactgggacacgctgcccgtgtctgagagtctgacgagaagcaccgaactagagagacatagacagagacacagatagacattgggggccttaaccagatacacagatagacacagagagacatagacagatacacagatagacttagagagacatagacggagaccaagatagacttacatagacatagacagagacacagata

SEQ ID NO: 662467 - DNA, 974 bp, Homo sapiens
  misc_feature (216)..(216): n is a, c, g, or t
  misc_feature (224)..(224): n is a, c, g, or t
  misc_feature (246)..(246): n is a, c, g, or t
  misc_feature (276)..(276): n is a, c, g, or t
  misc_feature (296)..(296): n is a, c, g, or t
  misc_feature (330)..(330): n is a, c, g, or t
  misc_feature (356)..(356): n is a, c, g, or t
  misc_feature (359)..(359): n is a, c, g, or t
  misc_feature (419)..(419): n is a, c, g, or t
  misc_feature (451)..(452): n is a, c, g, or t
  misc_feature (462)..(462): n is a, c, g, or t
  misc_feature (472)..(472): n is a, c, g, or t
  misc_feature (513)..(513): n is a, c, g, or t
  misc_feature (518)..(519): n is a, c, g, or t
  misc_feature (525)..(525): n is a, c, g, or t
  misc_feature (556)..(556): n is a, c, g, or t
  misc_feature (569)..(569): n is a, c, g, or t
  misc_feature (581)..(581): n is a, c, g, or t
  misc_feature (622)..(622): n is a, c, g, or t
  misc_feature (657)..(657): n is a, c, g, or t
  misc_feature (681)..(681): n is a, c, g, or t
aggtaaggaaagtatttttttaaaatagccacgggaagggacaccgccttttttcgcgcacaagtggtgttctcccaaagtgggggccacattcctggccttagctttcagacccggtttttatagtctcggcgtaagttacaatcgattaatcctcatcttcatagtcagtgagcacgcgcttgatacacggaaagattccagcttatgaacagntttcatcncgtgaaccgcatattgacgccntagcatttgtcggcccctgagttttttttntggatctaagccagcagatntatgaattgacagatcttaatgactctgcacccntcctttgtgagtagatccatgacagntanatatcttgattactgcttagatgctagcaacgtgaagtgcttagatgctagccacgtganatcaagaaagtaggtactagctttacattttnntaaaggtaanagcatgaccntatctgcttaatgcaagtagcactattaggtctctgcaganccagnnataganaatctttatcaaactacggataaacttaaanatatctgatcccnatgatttggtcntgctggaatcagtaaattaaataccggaagcagaatgatanaatcaggggcattaaacattcctaatgacatgccnagctattttagagacagcggcaanagcttctctacaggtgggtttgatgtaacgctccggcagcaagaatccgtatgtgcccgtatctcgaagttcaattgtaaacgaatatttgatgcccaaatcatagatccaatcgtccccacctccaggagctaggtataaggtttctgagccatggccatgtgtatacctggtatttttactagttttctcaatagcacgaactgcttcactggctactagagacagttcctcatggtctttgcttttacttcgtgtataggaatatggaaacactatatgctggctcgtgc

SEQ ID NO: 662468 - DNA, 119 bp, Homo sapiens
ggaggcggaggtggtgtgggagccactcctggagaccagagtggggacacgggaggttactggtggggaggatgaggacttgactgcgggttcggaagccacgtccaagccatcaaagg

SEQ ID NO: 662469 - DNA, 106 bp, Homo sapiens
ccatgcatatggctttggtaaatcatgtgaaatgtttagttatgtatgtagtcgaaatgtaaaatgtatttctcactgtgagctactgataaaaaaatgtttgaga

SEQ ID NO: 662470 - DNA, 276 bp, Homo sapiens
  misc_feature (126)..(126): n is a, c, g, or t
  misc_feature (128)..(128): n is a, c, g, or t
  misc_feature (195)..(195): n is a, c, g, or t
  misc_feature (215)..(215): n is a, c, g, or t
  misc_feature (233)..(233): n is a, c, g, or t
gaccggatattggcgctgctccccgaatcccggacctgcgctgaggaggctgttcatctgtggccagcggtgcttcgggggccgcgctgggggaaccctggcgacggggcctggcctgctatatgngngggcctcggctggagtgagcggcgtggacgcttctttcctccggctcttcccttgttgctgcgagangagagggccgcgggccgganggcagcggggccgggatngaggacgttaactctaacgtgaacgcggaccaggaggtgcgga

SEQ ID NO: 662471 - DNA, 115 bp, Homo sapiens
agatcaggtcaacgactcgatcgtgacgtgtcagcaccctgtggcggggcatgccctgtgaccaggcagggatgggctatgtcgctgttggggaccacgagggatggccagtgag

SEQ ID NO: 662472 - DNA, 492 bp, Homo sapiens
ctcacgacgatccccctaggtggccgcgacgttgcaatactcaaggcaggcaacatggtaaccatttccaatgcaatagcagctgctcacttgcaaaaacacagctttccctgtgcccagtgcatctctggatgagatgtctccctcatatgtaaattttttaaagtccagcaaacaatttaaattctcatttcctctcaggtagctactctgctagaaatagcacaaccacaccagttcaccaattatgcaattcacacatcattgggttcaggcagatgatgccacagatgcgatcatcactttaaaattctcaggtgcctggcaaaggatgctgctttcagagactgccctccatcagggtggctgcgggcgccctgcacagcacactcggatagcggcagcggtgaagggaccggcacaagggcttactggcccttccatttaaacgcagcctcaatgaacacaaaaacggagaaatgagacaaggct

SEQ ID NO: 662473 - DNA, 103 bp, Homo sapiens
gcctgcatgagacctgccaatgatgtgctatcagaggatgccatttccactagagagcaccatcttgagcaaggaggatagcattagaaaaggaaggtaaggg

SEQ ID NO: 662474 - DNA, 487 bp, Homo sapiens
  misc_feature (20)..(20): n is a, c, g, or t
  misc_feature (63)..(63): n is a, c, g, or t
  misc_feature (78)..(78): n is a, c, g, or t
  misc_feature (80)..(80): n is a, c, g, or t
  misc_feature (82)..(82): n is a, c, g, or t
  misc_feature (86)..(87): n is a, c, g, or t
  misc_feature (89)..(89): n is a, c, g, or t
  misc_feature (91)..(91): n is a, c, g, or t
  misc_feature (99)..(99): n is a, c, g, or t
  misc_feature (155)..(155): n is a, c, g, or t
  misc_feature (157)..(157): n is a, c, g, or t
  misc_feature (162)..(162): n is a, c, g, or t
  misc_feature (165)..(165): n is a, c, g, or t
  misc_feature (172)..(172): n is a, c, g, or t
  misc_feature (185)..(185): n is a, c, g, or t
  misc_feature (200)..(200): n is a, c, g, or t
  misc_feature (242)..(242): n is a, c, g, or t
  misc_feature (300)..(300): n is a, c, g, or t
  misc_feature (305)..(305): n is a, c, g, or t
  misc_feature (308)..(308): n is a, c, g, or t
  misc_feature (349)..(349): n is a, c, g, or t
  misc_feature (351)..(351): n is a, c, g, or t
  misc_feature (356)..(356): n is a, c, g, or t
  misc_feature (364)..(364): n is a, c, g, or t
  misc_feature (399)..(399): n is a, c, g, or t
  misc_feature (413)..(413): n is a, c, g, or t
  misc_feature (486)..(486): n is a, c, g, or t
aaaactaacacacgagattntaggctagagataccaagaaatactacttcagtaaagtgcgantgtagccaacatgtntngntggnnantncctaaatnaatttctgaaataataagctagatctaatgttagctactggatattataatgatgngncacangtnctctganggttttgccagtnatcataactcataangcattctgcaaattaaatttcactcaggatcaacatatatgngaataaatacatgttagcattaactatacatttgtctagttaaatgattcatatcatntattnggngatttcactatttcaatatctcaggaaaattggatccaaananaatgntaactctntacaaattagttaccctaaaatttgagctgttttncattaggaaatggnctaaattccaggtatatttccagaaaatgaactggatgttaatctaaaagaactactagtaaagccagataant

SEQ ID NO: 662475 - DNA, 300 bp, Homo sapiens
caatcatcattaatcagcttaaaaagctctggtactaaagattgtacattaggcattgcagttgcctgttaatcacatagtgctcatgtagaggaaatgctagctagagagtgattcggggagttccatcattaagtccagcggtctggcctgcggggttcggtctggacggcgtgccatgtgttgaggagactgggaataacccgtggtgcatttaaaagatttggggaacaaaaaatctgacttgtaaaaatctctctatagcccttattttgtggcattttatcaaaatgctatgaa

SEQ ID NO: 662476 - DNA, 1475 bp, Homo sapiens
  misc_feature (1475)..(1475): n is a, c, g, or t
ccgggcgtgatggtgggcgcctgtggtcccggctactcggggggctggggcaggagggtggcgtgaacccgggaggtggagcttgcagtgagccgagatcgcgccactgcactccagcctgggggacagagcgagactctgtctcaaaaaaaaaaaaaaaaaaaaagttgggaccttttttttttagggaaacctgactgtgctttgtgagcatttttcttcgtgttttaagccccacggttggccggttgttgggcgggattgttgagcttcctttgacccgggaagagccaggcacccgggtttccttgttcaccagggagggagggttagggctcctttgccagtctcaggttgcccagggttcttgagcagagggggccctgtggcattcttgagaagggaggttcccctgtgccggccacccttccagcccttctgtggtcccaaggtttcccccaaggaaatttccggccaaaaagggggacagcgccaacgagagaatatgggaatgtgaaccacggttgcataaatcagcgagaggacagatatcaccgcccaaataagaggaccaccacaaatagagataaaacgctcgaaaaaaaaaagacatatagggggagaaaagaatatattattgattggaagaaagagatcaaatagataataaataaaagacagatacgggaggtcaggagaggaaggggaaacgaggggaaaagttgaacatctaggggagggccaaataaccccccagggaattagagaacaaagaggagatgaggaagacaggtaagggcaatgaggagacacccgaccgacaacacataaagagggagacacacagaaagggagagcagggaagtggaggaccaccacgagagacgaaaaggggaatagggacgcacgagaaggagcagcacacggcagaaggaaataggaaaacaagagaagagcgcagaaatacaagaaaggccacagcaagaatagagcacggaaccgagagcagaaaaaaggacaccaacacaaagggacaacacgacagaaggggcgaagaagagaacacccagaggacaaacaagaaaaaatagggagcgacacaacgacgaagaggagctcaataaaaaacaaacaaaacaaagggcgcggacagcacaaaagaaaactcaggatgaaagacgaaaaagtatggacggatgatacgaagataactgattaagaggaagggggcaaagatgagagaaggaacaaaataaaagaagagagcagcgtaataaaaggatgataggagaaagacaataggcaatgaaaagaagaaaactgagtagagcgtaatcgagaagagcaagacaaatcaaaggaagaagataaggacgttgataaagacgtgaaggtatggttaggaaactggatagaggagagaagaaagacgaaataagaatgaagctgtagaaagaaagcatatagaagacagn

SEQ ID NO: 662477 - DNA, 101 bp, Homo sapiens
catggatttgctggtgcagtacaactaggcttaatagggacatgtgggcaaagccttcaatcagggcaagatcttcaagtgaacatctcttgccatcacct

SEQ ID NO: 662478 - DNA, 191 bp, Homo sapiens
cgtgtataattctcaggacagagaaagtgctcggtgtgtctgctgtggagagctcaatcgtcactggagactggtaaagctcagggcaggctgatggattattcaggagaggcttcataggggccaggggctgagctgagctctccaggggtactgcatgggtcccatgggtcaccgaagctcgaattcgt

SEQ ID NO: 662479 - DNA, 308 bp, Homo sapiens
aatgcaggctcagtcagggctgcacataatctccaaacacttcttcattcagagtaaagctagtgtccgcatgtcgctatgatggacaggtccccctcctccattcttgccctctgtgcagaagtggttcctgcagtgtcagcactatgcaacagggtatggtaggcttggggaaaggggagagcagaagcagtagatacactccttatcctccccaaaattttaagctcatatttcatgtgcccatcagtccatcagacacaaccattcagcactccagggcagtttttgtcttgaagacccaggtc

SEQ ID NO: 662480 - DNA, 430 bp, Homo sapiens
ctgtgttgtaaagataaactgacgatatacaggcacattatgtaaacatacacacgcaatgaaaccgaagcttggcggcctgggcgtggtcttgcaaaatgcttccaaagcgaccttagcctgttctattcagcggcaacctcaaagcacatgttaagaatgctgacccacaagtggaatggaagctgcaaggacaccggggacttggtaagcaaagatcttgatgacttccctttatagggcagactgggagggtatacaggaatcggcacctgcccaacgggcgttttcatgctgtacagtgacctaaagttggtaagatgtcataatggaccagtccatgtgatttcagtatatacaactccaccagacccctccaacccatataacaccccacccccgccccaccccgcgcgcctctgccgcctct

SEQ ID NO: 662481 - DNA, 504 bp, Homo sapiens
aaatatattactttcacagtgttacagtttgtacagtaaaccataaaatacttttactaaccaaccccaaacatataaacagtagtgaacagtacatgctttgtgttattccaataaaatcataaatgggcttttaatataacaattaaacacatctgtgtgtataatgtttactgcttcataatgtaaaattacacctgaaagagtctcgtagtgtaacctttaaaaaataaatttgtggctgaaagcattagtcatatttgtgattttcaagtgacaggcgctcttctgaatgtcaggttgagagggtgtcctgctgttcttgacccagacgtgacctgtcaaaagtggtataagtttgtgcctgtctatacgaatggaaatccattatatgtccagataatgtgccccttctcaaagggtacacttactctctttcaatctgactgcaaatttagtttctcatttttttattaaaaggtatttcattatttgtctgctgga

SEQ ID NO: 662482 - DNA, 148 bp, Homo sapiens
gaactgctcactatcacacagcataaaacacgccgcataattaaaacgctgggcacattagagtgacaaactacactccccaatctacagagttaattacacaacctctgaaacttataacggcaatctatttagaaattaggaagct

SEQ ID NO: 662483 - DNA, 650 bp, Homo sapiens
ttcaaagtgggaactgaagaagacaagtacagactgacctatgcctactttattggtggcgaagctggagatgcttttgatggctttaattttggagatgatccaagtgacaaatcctatacctaccataatggcatgcgcttcagcacctttgataatgacaatgacaactttgagggcaactgtgctgagcaagatggatctggatggtggatgaatagatgccatgctggtcacctcaatggacaatattatataggtggtgtgtactctagagatactggtacaaattcatatgacaatggcattatatgggcaacatggcgtgaccgatggtactccatgaagaaaactacaatgaaaatcatcccattcaacagactctcaatagatggacagcagcactcaggaggcctcaagcaggttggagactcataaaggggcaatttaataaagactgatctgaatggagaaaataaatcttttatttgtacgacactgaacttatctcaccttccacaatttggacatcagtgttgtgaaatgtcatcgactataaaatgcacaacagttttccttgagcagcgcttacctctttacatggttattttttctgtacacattcccaataaatttttgattattacaga

SEQ ID NO: 662484 - DNA, 303 bp, Homo sapiens
  misc_feature (9)..(9): n is a, c, g, or t
  misc_feature (153)..(153): n is a, c, g, or t
acaatgtanacaactaactgtccatcaactgatgaatggacaaacaaaatgtgatctatccacacaatggaagcctgttcagcaataaaaaggaacgaagcaccgattcatgccacaacacgtgaggaatcctagagaacattatgccaagtngaaagcaaccaggcacaaaacaccacacattatatgattccatgtatacacaatgtccagaataggcaagctgtaggcttagtaggtcagtggttgcccagggctgggagaagaaggggttagggtgtattgctggaggccacggaggca

SEQ ID NO: 662485 - DNA, 948 bp, Homo sapiens
actcaataccaaacgcgcctctacgtctgatccggtcctactcactagcaggcgctactgtctcctatctctcccagtcctagtctgctggtcgagtcacgtagtacctacgtaacagaccgcaaacttcagaacaccaacgttcgtatacggatcgccgacggagagtaggtagacccacgagttcgtatatcgcaagcagcgctattacgtgatattttcggtgttcaacgctgaaggtttatgtgctttagtcgctacccaggctgtcggcaatcacatcgtccgcatattggtaactgtactacgtccggcaagaaaaagcaacgcgattatgggattacataatggtatggtactgcagcgtagtgatatccaaattggtgcgttccatagcgggtattcatcggtagtgcagcgacaacccatagtagtattcacaaggtagggcaactagcaccgtagaacaacaagcgagcgatatatttcgagccgtccaggtaaccatagactcagtcgcctaatcccacaaccggacgttgaaacggtaatgtgaaggctgaactcgcgcagaacgtcacaacggtagagtcaactcttgcaaattgaagtcctggcatgtcaggtgcgctctgaacgccccccttaaagggcactttcacgtcgttctctcggtgtaattccacgcggtatacggggatgagcctcagtgaaagggatgagtaacacctcggggtaccttcacgccaacacatcttccaattccaatctgttacggaaccaatttcggggtacaccattaaccaacgaaatggcaccggtttaacggttaaacggttcaggataaagggcccccaaagaatgaccccaacacataagtggctctccataagtccaaactcaagtggcaggccataggaacgtatataggcccgaaaatcacattag

SEQ ID NO: 662486 - DNA, 204 bp, Homo sapiens
catggttgaggaagagaacgtatcagcaggagaatatttaagtttaagatatgctatttctgggcttttcttggaaactggtagatgaaggattatggaatggggtacatacaaaatagcaagataattataataaaaataaacggtttggaattggtataatacctcaaaggaaataaaatgtgtttacctgcgaacctatga

SEQ ID NO: 662487 - DNA, 574 bp, Homo sapiens
agatgtcaccaagaccaaagacacagtattatgaaggtttggaaacccctctctctacctcccaccgagaccttgggcaaaccctggctcggagcccagggcagaggcagctcagagtggaggctctaggcaggtttgacaaaggtcagtaatacggcttcccttggggttgaccagatgttccaaaatatctgcatccacctggagatgcagctaagtgggtccttatgtacacaccacgttcacacacacacagagggaccacgtgtgcacgcatgaccgtgtgggtggcggcgttagctgtgaaccatgctcaggccacacagagacacatacttggtttttgagactgagacccaggcctggcaggaccgtgcctacagatacttgaaacgttcctacaggctagaggtgcgttacacacccgaggacacgcactcaggcatttcatgggtgtagtttgccacattggagcaatacctttcccggacttggcatggcaactctgcaacagagcggtgtcccaggcaccattttttaacggggggcttggggggtaagaagaatatttaaa

SEQ ID NO: 662488 - DNA, 685 bp, Homo sapiens
  misc_feature (575)..(575): n is a, c, g, or t
  misc_feature (595)..(595): n is a, c, g, or t
ctgcttacagggacaatttgacttcctcttttcctaattgaataccctttatttctttctcttgcctgattgccctggccagaacttccaacaccatattgaataggagtggtgagagagggcatccttgtcttgtgccagtttgcaaagggaatgcctacaatttttgcccattcagtatggtatcggctgtgggtttctcataaatagctcttactattttgagatatgttccatcaatacctaatttattgagagtttttagcatgaagtggtgttgtttgtccaaggccttatctgcatctattgagataatcatgtggtttttgtcattggttctgattatgagatggattacatttgatgatatgcatatgttgaaccagtcttgaatcccagggatgaagccaacttgatcatggcacataagctgtttgatgtgctgctagattcggtttgacagtatcgtattgaggatctttgcaccagtgctcatcatggatatcgattgacaattccgtctttcgtattatgactatgacagactttggatcaggatgatgcttgcctcatancatcgagtaggggagatccnctctttttctatggatgggaatactgtcagaaggcatgctaccaggttctttatgtacctttgttgatttcgctgtgaatccattgcctg

SEQ ID NO: 662489 - DNA, 158 bp, Homo sapiens
cagagtctctggaacttataccagcgctctgtaacatctaccagttctacagccatttagtgctaaagtgctgtggctgatgagatcagacatggagagagtcctttctgtatctgtctagataccacaatattggctaggaggtcttggtggtaaca

SEQ ID NO: 662490 - DNA, 180 bp, Homo sapiens
acgaattctcctactctgcggtggcgcttgctgtagtcccagctactcgggaggctgaggtgtgaggatcgcttgacgccaggagttctgggctgtagtgcgctatgccgatcgggtgtcggactaagttcgggatcaatattgtgaactcccgggaacgggggaccaccagggttgcta

SEQ ID NO: 662491 - DNA, 146 bp, Homo sapiens
cgactatgtatatactacccatgagtgctacaaggaggatagaaacctgtgctttatgtgggaaaattagaggaggttgagacatgtttagactgtcatgtttttctagaaattatgcgaagactaaaatagatctactcttggaa

SEQ ID NO: 662492 - DNA, 231 bp, Homo sapiens
ccaactgttcgtatattaaaattgaagatagtttttctgcagagaacattagacacctagatggcaatttaaattttttcttcagtacagtcggaaaccctataattgtgttaaatatattttttcccatatggggtctcactatattgtccaggcgggactcaaactcctgagctcaagcaatcctcccaccttggtctccagagcatctggagacaaggtagagccgag

SEQ ID NO: 662493 - DNA, 366 bp, Homo sapiens
gggggaaaaaattttgggttttggtggggattttatttccggggggggcccccccaatttttcgggggaaacgggggctttccccccccgggggtttttcccccttttttccaaaaaatggggggcgggcccggggggggggccccccccttttttttttttagggggggggggtttccggcccccaagtccccccggccgggttttaaaaattttccccaccccaaaataattttttctttccccccccgggttttggggggttgggccaaccccctttttcccccccaggggcccccccccttttttttgggggggggccctttttggggggggcccccaaaaaatttggggggcccccgggta

SEQ ID NO: 662494 - DNA, 144 bp, Homo sapiens
ccggccaggctatcaccacgtgaatctcactggacggtagtgctttcttatactgtaaaatggtgaacttgtgtagcttagactggtagtgagttttaaggtgtggtatagggtggtatagtagtggtatagtggtggtatcag

SEQ ID NO: 662495 - DNA, 1035 bp, Homo sapiens
  misc_feature (1035)..(1035): n is a, c, g, or t
ctgagaactagcatccaaacctttcaatcttatgtctcaagactccacttggcctatcgtactgctaccccaatgtcactgtactaggctgcatataatctctgtggctgtctgccatagatttttgagcgcagcttgtcgaggacatggcacggtgaatacactctggacattgtttctccattggaattcatgacccgtttctgcttctctgccgttatggaagttatacctggtgaactatgatattgccgagagaatggcacggatgcgtacgaggcaccttcagaaccacgatcaagactaggcatatgtagcagctttatgggcgaggacaactgcgcgattcctcattgattagacccagaggtcagtttgtgggcacagacattgttttgtcaaagctcaggaacggccggaactgcgggcccataacccttaagcctgtgggtcgcattaacccatggggtgtagcttcctttgggcactgtgcaccatctttcacttatccaactctttgtcccccagttcttttacccccaggagattgagagcgactccttacaaagtacacctcttttgtgtactcaagaacaattgcgtgagtggacttgcgcacacacggacaggaaccacaaggttacttaggggcctaccaactttattgggaaaggggaaattccccttgtgttaacaagaaggatggttaaggcccaaaatctttaaattacgccacgaaattcgttcacgtgttgcattaccaaaacagttcattcgcaaggcgcaaaacttgaccccgagattagcactggtccccatgcatttcgaacttggccagcccatttcttccatgactttggaactggtggccccgtacagcaactctattggaactccggttgtcaccccatttcacaaacaaacccagaagatttgttgttcccccatatcacttgaatacgggtccacttaattaggcaacctaaaccaacttgaatggcggcctggcttttaaaagtatccaaggtgattccn

SEQ ID NO: 662496 - DNA, 117 bp, Homo sapiens
ggggatctcttgttccctgcttaatgaccacatcacattacttggtttgtacgctagtggctgaaccaaaaaaagtaggagatgatttttttttcttttttcttaaagcagttgccg

SEQ ID NO: 662497 - DNA, 207 bp, Homo sapiens
actcagatcggtgagttcacttacctatcttctcagagcacaaaactgaatgttcacatgtcaaaaacttcaaataccatttctctgcatctcacccaaaatacattagcttatacataacacaagctgtagtcagggcttagggtaaacatttgcttttgttttttactatcttcgcgggcacagattctcggccgggccccccgg

SEQ ID NO: 662498 - DNA, 211 bp, Homo sapiens
  misc_feature (127)..(127): n is a, c, g, or t
tatgggacggcgggaacggaaggctgccttcaagggggattccggaggccccctgctgtgtacactgtggcccacggcatcgtctcctatggaaagtcgtcgagggtactccagaagtcttcaccanggatctcaagtttcctgccctgttattaggacgacaatgagaagcttcaaactgctggatcagattgggaaccccccccgcagt

SEQ ID NO: 662499 - DNA, 307 bp, Homo sapiens
agcgcactagcctcatgaaaacagtctcgcatttgtttccatgctgcactgagttgtgatcatgcgactgcattcctggctggctgacagagcgagaccctatctcaggaaaaaaaaaaaaaaagaaaaaagaaaagaaaccagttctctggggaggggccccaaagggtccccagcctttaaaattgcccccattgagcactcgggacctttacgtgagtcccgcgaatcattaatatggcctcggtttacccacggtggagtgagggaccagttaatgatccccatacaaaacctcgggagccag

SEQ ID NO: 662500 - DNA, 454 bp, Homo sapiens
  misc_feature (150)..(151): n is a, c, g, or t
  misc_feature (154)..(154): n is a, c, g, or t
  misc_feature (164)..(164): n is a, c, g, or t
attatacatcccccccaccttttattaatttaataaaaaaagaatttcagcttttcttcctgaaagatgcaaatgcttcaaaaactgaacaagttgataaattataccgggacgagctcacccaccaggggaggggcaaccataatttanntanctccctacanctgcttaccaccatgctgtggtgcctaggaacagtctgtcataaagaaaagaacaatgcacttggaatataagcaacacgcaatttgcagaagagaagatataattatctacattggaatatgaccaggacaaccataccattcccacaaacaaccaagaaggcaaaaagtaaccaagagaggtttcggtatctggtatctattaagacacgtttggatatctaataattgtttaaatcacaatctaatgtttttatgctaccaaaaaatgaatcaaatttacaaaccct

SEQ ID NO: 662501 - DNA, 120 bp, Homo sapiens
  misc_feature (39)..(39): n is a, c, g, or t
  misc_feature (61)..(61): n is a, c, g, or t
agatgtgagactgcaataatgaatgtccatggtggtcantttgcaaagcactgcttctcgnattttctctggccacatgcctcttaagggttctctagacaccaatttcaggggccggtg

SEQ ID NO: 662502 - DNA, 206 bp, Homo sapiens
  misc_feature (182)..(182): n is a, c, g, or t
gcggccgcgtcgacgggtgtgttggtcaatctgcagctttaataatagacagacagcagggtgaattgcaggcagaaataaccccagtcagtcaattactggcccagtcagggtcttgtctctgtgccattgtttaatgtatctgacagttgccacagtccctggtctccctaaacctgccntggcattcatacccacctatccaa

SEQ ID NO: 662503 - DNA, 228 bp, Homo sapiens
  misc_feature (84)..(84): n is a, c, g, or t
aggcgagttctaaaccaacctgcgccatctgatccgcacgcagtgactgcgtgtaccttctactgtgcgcctcgtttcacaggnctcacccagattcagaggtggggaaactgagtccaccacttgagaagagtagctataaagacatatgagcgaggccagctgagcccagcactgcggccaagtcgaagactttaggagcaataaaagtgcttattgtgtttcagt

SEQ ID NO: 662504 - DNA, 145 bp, Homo sapiens
ccgatgtgcgaagtttccgatggcgaagtttccgatggcgaagtttccgatggcgaagtttccgatgcgaagtttccgatggacgagaccacccagaaggaggggacccaggccagtgaggggtacctcagtcaatcacatggag

SEQ ID NO: 662505 - DNA, 1942 bp, Homo sapiens
agcggctttccctgggtgcccacatgaacagagacaccaggatgctctcctgagaccacagcaactgcagaagctgaagacatttccagaagttcaagcttccaccctctgcaggtccccactgagctgggacccaggtcatccaccccaccccaaatccctggataggaaacccctttctcctcctgctccttgtccccttcatccctgccgcccagcatcctactggcctcagcacctgtggccagaccgtccaagatcctctgaaggcccagctcttgctgtccaccccggcagtaggcaggcagcctggccatgtgccctccggtcagcatgcggtatgaggaagagggcatgtcctacctctacgcctcctggatgtatcagcttcaacatggagatcagctaagcatttgcttcacctgcttcaaggctgcctttctagactttaaagacttgctggagtcagaggactgggaagaagacaactgggaccctgagctgatggagcacactgaggcagagtcagagcaggaggggtcctcagggatggagctgagctgggggcagagcccaggacagcctgtgcaggggggctctgaggcatgggggccagggaccctggcagcagccccagaagggttggaagatgcaggtctggacccccactttgtccccactgaactatggcctcaggaggctgtgcccctgggcctgggccttgaggatgctgactggacccagggtcttccctggagatttgaggagcttcttacctgctcacactggccaagcttctttccttcatagcaggggtttctcaaagtggacctgcccccaggggagcccgtggtgttgaagctgggcattacctgggcagtggaccctgccgaggctgaggcctagttactggccctgcagcttgtctccatggtgggctgctatgataccatctacctacagaagatgaccccagacagggccctgaggaccccagggcagcactggaaattgctgctggagcctggtgaagtgtgggtggtgagactccaagatgcaccccaagagcaggacctgcactggtggatgctgagcattctagaaacatcgttaacaggacacagggcagagctggtccctgcagcctcagccctgcagaagaggattcaccatagtctcttattcaccctggaccaacagggagagcaagaagggagactcagcctgtaagccacagtcctccagccaagaacaggatctcagcacccctgagacacagagcaggggtcctgaggaaagcctggctgttgcaggagcctcggccatgggggagctgccctgtttccagcctcagtccagggccccagaactgagagactaaggctcatgtagctgccattgtcctgggcacaccaggacatcagagactgggaagggccagcaattgctgttccacaacagccaggggagcagttggcaaaggaaacatggggagcaactttaggggctgggagatagggcctgttgtggcctcagagggaagcattacaaatattcataacctggaaacaagttcttaccagttgattgtcacatagttctggatgtgttggcctgaatggctgttgtgctgcttgtgacatggggggcagggcacagaacttgtgcctatttcaccttggccatggggagggacattgcttgtaaaacacatgctctgcagaacacaccagaatctgtggtgacctggatgtgttctcgactttgccaggacaatctcaggggtgccacaagaccctgtcagcagcactaggatctctggtctacagtggagggagagctggttttaaatgttggccgttgatgcaatttaaccatttaattcctgttgctctatatgttgtttttaattttaaaaagtcataaaagctttcaaacaaaa

SEQ ID NO: 662506 - DNA, 1869 bp, Homo sapiens
agcggctttccctgggtgcccacatgaacagagacaccaggatgctctcctgagaccacagcaactgcagaagctgaagacatttccagaagttcaagcttccaccctctgcaggtccccactgagctgggacccaggtcatccaccccaccccaaatccctggataggaaacccctttctcctcctgctccttgtccccttcatccctgccgcccagcatcctactggcctcagcacctgtggccagaccgtccaagatcctctgaaggcccagctcttgctgtccaccccggcagtaggcaggcagcctggccatgtgccctccggtcagcatgcggtatgaggaagagggcatgtcctacctctacgcctcctggatgtatcagcttcaacatggagatcagctaagcatttgcttcacctgcttcaaggctgcctttctagactttaaagacttgctggagtcagaggactgggaagaagacaactgggaccctgagctgatggagcacactgaggcagagtcagagcaggaggggtcctcagggatggagctgagctgggggcagagcccaggacagcctgtgcaggggggctctgaggcatgggggccagggaccctggcagcagccccagaagggttggaagatgcaggtctggacccccactttgtccccactgaactatggcctcaggaggctgtgcccctgggcctgggccttgaggatgctgactggacccagggtcttccctggagatttgaggagcttcttacctgctcacactggccaagcttctttccttcatagcaggggtttctcaaagtggacctgcccccaggggagcccgtggtgttgaagctgggcattacctgggcagtggaccctgccgaggctgaggcctagttactggccctgcagcttgtctccatggtgggctgctatgataccatctacctacagaagatgaccccagacagggccctgaggaccccagggcagcactggaaattgctgctggagcctggtgaagtgtgggtggtgagactccaagatgcaccccaagagcaggacctgcactggtggatgctgagcattctagaaacatcgttaacaggacacagggcagagctggtccctgcagcctcagccctgcagaagaggattcaccatagtctcttattcaccctggaccaacagggagagcaagaagggagactcagcctgtaagccacagtcctccagccaagaacaggatctcagcacccctgagacacagagcaggggtcctgaggaaagcctggctgttgcaggagcctcggccatgggggagctgccctgtttccagcctcagtccagggccccagaactgagagactaaggctcatgtagctgccattgtcctgggcacaccaggacatcagagactgggaagggccagcaattgctgttccacaacagccagggaagcattacaaatattcataacctggaaacaagttcttaccagttgattgtcacatagttctggatgtgttggcctgaatggctgttgtgctgcttgtgacatggggggcagggcacagaacttgtgcctatttcaccttggccatggggagggacattgcttgtaaaacacatgctctgcagaacacaccagaatctgtggtgacctggatgtgttctcgactttgccaggacaatctcaggggtgccacaagaccctgtcagcagcactaggatctctggtctacagtggagggagagctggttttaaatgttggccgttgatgcaatttaaccatttaattcctgttgctctatatgttgtttttaattttaaaaagtcataaaagctttcaaacaaaa

SEQ ID NO: 662507 - DNA, 145 bp, Homo sapiens
accaacgttgtctcagctgctagggtgagggctggaaatgggctggagtcgagtgctgggtggtaccggtggttgctgctggggtgtgggaagtcacctgtggagaggctctagtgattgtgggtgtgtgcccaatgatgccctg

SEQ ID NO: 662508 - DNA, 419 bp, Homo sapiens
ctctatataaatgcagtaggggtatgagttaatgtgtccttggaatgtattgttgagtgagggtgaggggcggtgtgtactgcgcttcagtgtcctgtcaaataagcactctactctcagtttactgctaaatccaccttcgacccttaagtttcataagtggctatcgtagttttcttggggtagaaacatgtatgcccactttctatgccactctcatgtggctacaccgttgacctacacgtctttacgatgggtacgttgctgcttactcttgtagccttcatcaggtgttttgctgaagactggcgtgtatatagtgctgagcaagattgtggtgaggttgcatcggggtttatctgattacatgaacatggctcctactagcaggtgatctgaatgcacctgccagtgtcctt

SEQ ID NO: 662509 - DNA, 657 bp, Homo sapiens
tctttaccctgagccatgtaccacagtataacgtgtaggcgaatgtaaatctgatgtcctgtctacacctagaatatatggtatcgcgagtgatagaattgtaaatagtatctagaaccaaggcactaagcgagtaccaatggagctaagcccctaatagcttatctgacactaatgacatgaaccttagcaagatgacctgttgcaatggacgtagactcagcagtcgtatactaagctcctcgcagagaccaggtagcgcacgacctcagcatagataatagctcgcgtaacaaaaggcacgtcaggcaacgcaacggtgccttagtgctactccaaaataactaagatcgtggggagacgagtctccacttacggcgatagcgatgcgcccgaggcaaaagaaactcttgaccacgcacgacactgtgcactgggagtaaacgagctcgcgacttgtgattgcccacacgcaacttacgtaagaattttccctcatgcgtttacacacgcgtttatctggcacatgtgtcgtccccccaacaagtaaatgtcacgcgtaccttcaaggaattactcgcactttgtgaatgcaaaacgtgtagcacgagtcctagactaaagggtggctcatctgcgccagttggacagccagta

SEQ ID NO: 662510 - DNA, 220 bp, Homo sapiens
agccaattacagtgaggaacgggcagtgcgggcgtcttgagaatccacagtgcacagaaacaagaggggagcggcaagtgccctgacaggaggcccctacttcagaggcaagggccatgtggtcctggccccccagcccatcccttcccacctaggagctccccctccacacagcctccatctcctgggattgggctatcaaggggactccgtcctagag

SEQ ID NO: 662511 - DNA, 169 bp, Homo sapiens
tcacctacatttaatagacagacagacaacaaatgactaaaactacagaccaatatctattgtcagctcctagatgtagaagctcttcaaaagcacttagaatcggacaagtacaggcaagcatatgaaacaagaatgtacaacatggtgcaatttgggacttttccgc

SEQ ID NO: 662512 - DNA, 97 bp, Homo sapiens
aatgggacttgagcacccatggattttgatatcaagttgggttcctggaaccatccccccatggataccaagggatgactgtattgcccttttcaag

SEQ ID NO: 662513 - DNA, 243 bp, Homo sapiens
gctgatccgcttaaggctgatcgcttaagcatatctgaacacacaatagctaagacccaaactgtgattagataccccactatgcttatgcctaaacctcaacagttaaatcaacaaaactgctctgcagaacactacgggccacagcttaaaactcaaaggacctggtggtgcttcatatccctctagaggagcctgttcttgtttgatttaaacttgttgagcgttagcggtaagcatagt

SEQ ID NO: 662514 - DNA, 196 bp, Homo sapiens
actcatctgcccggggtgcttcttcctctcccatccccctgacctcgtgccctgcccggctggtatgtaagatactgggttggtgcaccgtgatttttttcttgtaatttaaacaggcccagcattgctggttctatttaatgcacctgagctaatgttagaggtttgacagtgattcaacgtgcagatcaggtgg

SEQ ID NO: 662515 - DNA, 857 bp, Homo sapiens
gagctctgcgatgggccggagcgcggcggagccatgctgtacccgaccccgggccgggggggcgccgtgggggtgccgtgtacgcgcccacgccgctgctgcaacccgcaccaaccgacgcccttttacatcgaggacatctgtggccgcgggcccgccggcgcacgcagttcccacgctgaccagatccctcaactcctcttttaccagcctcgtgtccccctaccggaccccggtgtacgagtcccatgcctgatcccgctgaggccttactcgcaccatccgaagccgtttggcacgtgccatacgcacccggcagagctgcggggcgccctacttggccccccattcactgcgggacagagatgaaagcgacctaaagcgagcatcgcccctgcattccggcctagtacccccatgttctcaaacctcctattcctggtaagccacatatctttgacaccaagtgtctaacagtgccactagcaccactgcacaggcgcctgctcttggagaagatttctcccaacaggtacatgactacaagttcgacgcctttaacacaaactaaacaatgtcgcgaggaaccgcccgaaaaactaatcattcaacctccggccgccgcaggaggcaaaccaggtcttggacccaacgcatgttctggtgtctcaatcacatctgatgcggtctcaagtacctgggtgatgagacaatcgaagcccatcgtagaaatggctctgtcaaacaaacttcgctttacattccatcccacatcgatatgtcaaactggaatcaccgcaacgtctctgctcactttgatccaatggtcaacgcactcacgttgttctctgggggaa

SEQ ID NO: 662516 - DNA, 397 bp, Homo sapiens
  misc_feature (39)..(39): n is a, c, g, or t
  misc_feature (230)..(230): n is a, c, g, or t
  misc_feature (233)..(233): n is a, c, g, or t
  misc_feature (235)..(235): n is a, c, g, or t
tctcttgaggcccggagttggagaccacctggcccaacntggtgaaaccccgtctcctactaaaaatacaaaaattagctggccatggtggcacacacctgtaatccccagctacctcgcaaagctgaggcaggagaactgcttgacccccaggaggtagaggttgcagtgagcccaagatcctgtcactgcactccagcctgggcaacagagcaagactccatctcaanggngnattaataaataaaaataaaaatattaaccccattttatacaaaggaaaaataaatatgtgccttgtcgaagtgagagtaagaagagagaaaggtcttattactataaattcactgttttttctcagtgaaaaggccacactattacccattttaaaaataca

SEQ ID NO: 662517 - DNA, 487 bp, Homo sapiens
caaatcagcacccgcagagaaaagcacatacttaccagaatttttagcaagtatggttcgggaattcttgtggtttacgttttttaaaaaaaggcccccaggaaaagtaatttacagtttaattgccactgtcaactgatctggaccttgatcgggaccgggacctctggtgatccacagatactggagacttagatctacttgaaagaaccacgtttctggcctcttctacaggccacgggaagacctactaacagaacgtgacttgctccgggtccgggctccgtgatccctgcttcttgaccggctgtaagatttgcgactacgggaacggaatcggctacgagacctagaggaacttctggtccggggatcgaggacctgcttcttgacctactggtgccttaggctgccttcaattcatttaattttactcccataatttcctttccagaaagtttttacatagcattctttaagtcaccat

SEQ ID NO: 662518 - DNA, 494 bp, Homo sapiens
  misc_feature (1)..(1): n is a, c, g, or t
  misc_feature (81)..(81): n is a, c, g, or t
  misc_feature (86)..(86): n is a, c, g, or t
  misc_feature (146)..(146): n is a, c, g, or t
ngggggttttgaacctgtaaaatttgtccatcccattttaaatatttccctttaactgtcctcaagatatacccaaaagcntggtnccattgtggaaatgtgtgcccagtctcaaatgccatgtagctctgtaggatggaaagtcnagttatgaagagagacttctttttcttctgtgtcctgttgattaagaagaatctgtatggccgggcacgggttgtcacgcctgtaatcccagcactttggaaggctgaggggggtggatcacgaggtcaggagttcaagatgaacttggccaagatagtgaaaccctgtctctactaaaaataaaaaaaaaaattagccgggcgtggtggtgggcgcctgtaatctcagctacttgggaggctgagacagagaattgcttgaacccaggaggcggaggttgcagtgagcctagatcgtgccactgcgctccagcctgggcgacagagagagactccatctcaaaaaaa

SEQ ID NO: 662519 - DNA, 410 bp, Homo sapiens
tatagaggctatagggaaaagaacccaggaatggcatagagagaaaaactttcattccaaaattaatctccagacaaaggggatagaaacaaagtagacaacatctccggcaggcttcagagtgagacggggccaaaatagttaccacagactagcagcgtcatggactacggtttaggttctagtgactcagtccagtgtaaaaaatcacctattattaatccacctccattctctatcgaagagtttcttaaagctagtccacagatcacttactataggatcgccgggacagctggttaagaaatgcacattcctggtgtctcacccaaatcaagggacaatacaaattattatttatttatttatttggaggcagaatctcactctgtcgcccatacgggactaca

SEQ ID NO: 662520 - DNA, 286 bp, Homo sapiens
  misc_feature (59)..(59): n is a, c, g, or t
  misc_feature (185)..(185): n is a, c, g, or t
cgcaaagaccttgggatggatgacttgggtatttactcttgcgatgtaacagacactgntggaatagcatcaagctacttaatagatgaggaagaattgaaacgtttacttgctctcagccatgaacacaagttcccaactgtcccagttaaatcagagttggcagttgaaattttggagaaagnccaggtccggttttggatgcaggctgagaaactgtctggcaatgcaaagtcaactacatatttaacggaggaatttttgaaggcccgaaatataaattgca

SEQ ID NO: 662521 - DNA, 738 bp, Homo sapiens
  misc_feature (101)..(101): n is a, c, g, or t
  misc_feature (205)..(205): n is a, c, g, or t
  misc_feature (235)..(235): n is a, c, g, or t
  misc_feature (283)..(284): n is a, c, g, or t
  misc_feature (311)..(311): n is a, c, g, or t
  misc_feature (315)..(315): n is a, c, g, or t
  misc_feature (329)..(329): n is a, c, g, or t
  misc_feature (341)..(341): n is a, c, g, or t
  misc_feature (349)..(349): n is a, c, g, or t
  misc_feature (363)..(363): n is a, c, g, or t
  misc_feature (371)..(371): n is a, c, g, or t
  misc_feature (374)..(374): n is a, c, g, or t
  misc_feature (391)..(392): n is a, c, g, or t
  misc_feature (398)..(398): n is a, c, g, or t
  misc_feature (400)..(401): n is a, c, g, or t
  misc_feature (420)..(420): n is a, c, g, or t
  misc_feature (433)..(433): n is a, c, g, or t
taacttatgtgctaggtacgaggctgggttgtgggaattggcctccgctgcgtgagcctggcggaacccgcttcccgcctccacggggcagtgccagcggnctggtcctttcaccggcagctccgtgccgacgctctcaccgctcttcctatcgccgggagtggcgggccgaccagggggcggccgggctaccgtccgccattcncgtgtctctgcgcccgcggtggccgcccgnagccggccaccatgccgctgggcctgaagcccacctgcagcgtatgcnngaccacgtcgtcctccatgtggaagangggngcgcagggggagancctctgccatcnttgcactnggccggggctggcngcgggcangcngggggcgcaggctccgnnggtgcngnncttggagggactgtggagnctggctggcggcngcttcggcgcggcgaccttcgccagcacctccgccaccccttccgcagagcaacgggggcgggggcggcaagcagagtaagcaggaaattcacaggagatggtctgcttcgtgcatcaggaacatcactaatgtacaaaatctgcatccggctagctgaataacgaaaggtctccaaccaagaaggaaaatgggagaagacactagtactttaaacttgatgaaatcccatcaaatgctcctgagtcagttgccacgatttgtcactgcagaatccaatcttctagcaagggagtatattaccaa

SEQ ID NO: 662522 - DNA, 445 bp, Homo sapiens
ggttgtaacagaataagcagaagtttacagcatgatagtccaagtggtgataactttaaataaaactcaaatttttactgtttgtagacaggaatgctgtcctagagaacctcctcctcaaccagctacgtacatagttttatcctatgcattcctgcactccagcctgggcaacagcgagactccatctcaaaaaaaaaaaaaaaaagataaaaagaatgtagcggccgggcgcggtggctcacgcttgtaatcccagcactttgggaggccaaagcgggcgattcacggggtcaggagatcaagaccatcctggctaacacagtgaaaccctgtccccactaaaaatacaaaaaattggccgggcatggtggtgggcacctgtagtcccagctactcgggaggctaaggcaggagaatggcgtgaacccatgaggtccgtctc

SEQ ID NO: 662523 - DNA, 112 bp, Homo sapiens
  misc_feature (23)..(23): n is a, c, g, or t
  misc_feature (32)..(32): n is a, c, g, or t
cactccccaccgggggggcggtntcccttatntcaatcggcccacccccccgcccaccccacaggcattttcagaccccaccagcacattcctaacagctccagctttccag

SEQ ID NO: 662524 - DNA, 375 bp, Homo sapiens
  misc_feature (233)..(233): n is a, c, g, or t
  misc_feature (280)..(280): n is a, c, g, or t
  misc_feature (310)..(310): n is a, c, g, or t
  misc_feature (326)..(326): n is a, c, g, or t
tgggtggatcacctgaggtcgggagttcgagacccgcctgactgacgtggagagactccgtctttactaagaatgcaaaattggccgggtgtggtggcgcgtgcctgtggtcctagctgctggggaggctgaggcaggggaatcgcttgagcctgggaggcgtaggttgcggtgggccggggtcgcaccactgcactccaccctgagcaacaagagcgaaactccatctccanaaaaaaaaaaaaaaagaaagcaagaaatgcctcaggtacccccagangaaaaagaggtctccaaaagctattaagtncatttatccactccantaagttatctagtaacaaagaaaaaaagtggtatttatcaactagctat

SEQ ID NO: 662525 - DNA, 478 bp, Homo sapiens
  misc_feature (14)..(14): n is a, c, g, or t
  misc_feature (23)..(23): n is a, c, g, or t
  misc_feature (350)..(350): n is a, c, g, or t
cacaatccccctgncctaggtcnaacctaatttttgaccaaagggtgcaaagggcaatttgatggggaagatggatagtcctcctacaacaaatgatacctaaaataattgaattcccatcccacaaaaaaggggggtttaggatctttatctcaagcccataagtgaaacaaattaatttggtcagctacagcggctcacacctgtaatccccagcactctggaaggccaaggtgggcagattgcctgagtcccaggactttgaggccagcctggacaacacggtgaaaccctgtctctacaaaaaaaatacaaaaactttgctgggcatagtggtacacatacattantgggaaaacccagctacttgggaggctgaggcgggagaatcacctgagccaggaagtcaaggctagagtgacatcatgccgctatactctagcctgaatgacagagtaagaccctatctcaaaaatta

SEQ ID NO: 662526 - DNA, 208 bp, Homo sapiens
gcgtgcccagcaagttgattcaggcaaagaaattactaaaacaaaatagcccgcccccctattcatcgagaggatggactattcttagttagacaaactacttcacagacctaattattagcattgaacagcacacgtgtgggaattgggcggcggctagcgaaggaacacccctgcgatggtgatcttgttatccccgtccccgaat

SEQ ID NO: 662527 - DNA, 432 bp, Homo sapiens
tctcaaactcctgacctcaggtgatctacccgcctcggcctcccaaagtgctgggattacaggcgttagccactgcacctggcccatgaaaggtttttacagtgccaaatgattcagagtaaatgacatataattgacatagaatttgtacaatttagtttgagtcatcatagaaacttcggctattaaactggaattttatcgttgacaatttttttaaagtaaaatggaaagtcaggaaaactaatttctttcaggcaaagcaaatatgagccattttattattattttttaatttgttaatttttagtttttgtgggtacttactaggtgtatatatttatgggttgcatgagatgttttgatacaggttgcaatgtgaaataatcacatcatggagaataaagtatccttccttaaacattaaaaaaa

SEQ ID NO: 662528 - DNA, 258 bp, Homo sapiens
atgggaggatcccggtacgagcacagttgctggtgcgggggatggcaccacatggcaccgttcgttcactactggatagatacgaaaacaggtctaaagaacaaaaggtgtcaggaggctgaggaaggcgaagggcatgaacccaggaggtggaggcttcagtgagccgaaatggtgccactgcactcccgcctgggcaacagagtgagactcctatctcaagaaaaaaaaaaagaaaacaggaaccgaaagtgggtg

SEQ ID NO: 662529 - DNA, 869 bp, Homo sapiens
agctttaattttttgtatcggtcactctgatagcagacattgactgaagcaaaaaattaaaagctttatattcaaaatttgcaaaatgaagctgggtgtggtggtgcacgcctatagtcccagctacttgggaggctggggctggaggattgcttgaggtcaagtattggaggctgcagttgtaccatgatgttgcctataggaatggttactgcactccaacctggacaagcgttatcaagaccccatctcttagaaaacatgcaaaattaattgcaaaagaaatgggctgggcatagtgattcatgcctgtaatctcagtaccctgggaggctgagcggtggaaggattgcttgagtgcaggagttcaagaccagtctaggcaacatagtgagaccctgcctgtaaaaaaaaataatacaaaatacgttggatatggtggcatgtgtctgtagtcccagccactctggaggctacggtgggaggatcagtagagcccaggaggtcagggctgcagtggggcatgatcatgtaactgctctcaaactggggaaatcagaccctgtctcagagagaaagcgacgccacatgtcagacagggttttgaaaggtttggagcattatattctacagtttaaggttaattactgactttgatacttgatttccataaaaggcccatttaaagagtaccccaacagggccataggttggcaacgcgttttaggaagttgcaccaggtttacacgtttacgaaggcgcatataaggaaacggggtcccacccacccgggccaatcggtctagaacacccatctgtcgggaaagaaagcctcaaaaggagaaggcctatatagtaattgcataaag

SEQ ID NO: 662530 - DNA, 485 bp, Homo sapiens
gggggccgtattctctctccgggaatccaaaacaccacctttgttgctggggagggggggtcaaacccactggggtggcccttccttttggaaaaaattgtgatccggtccttttgggaacggcccaaatgggcccgtgacaaaaatgccccccttttggggggtttttttgggcccctttccctgaatgggggggggaaaccccccaaaaatttgggggcccccgtgccccctttgggcaaaatgggggggccccattttgggttgggggaattttttttttccaggccccccctggggggcgtgtgtatttgaaaggtaaccccgggggtattttccccaaaccgggggggggttttcccgggtccccagggggggggggggtggtgggggtttcctttcccttttttttaggggggccccaaaccccccctttggtttttttttttggccccttcctttaaataaagaatttggggccccca

SEQ ID NO: 662531 - DNA, 219 bp, Homo sapiens
gtatgttcaatttttatgaaattgaagatgaaccaggaatttatggtgataaaaaatacgatagcccagcgcagtggctcacgcctgtaatcccagcactttgggaggccgaggcgggcggatcatgaggtcaggagattgagaccatcctggctaacccggtgaaaccccgtctctactaaaaatacaaaaaattagctacagcgagactccgtctca

SEQ ID NO: 662532 - DNA, 1020 bp, Homo sapiens
gctggctgctatctctagaggcaagtctgacagtgagagggcactgcaggcgaagcagttgtgcttgctcattgcctcagtgccaagtgtactctacgaaaagaggcagtacagcatgtgcggtgctgatacggtaaagcctcccgcccatccgcgtgcgagctccgccggcccgtctagctggcaccagggggcgtgtatgttgaagtgtggtaacctccccatcttccaaaccatggatatggtctcctttcatgagaagcggaagcttgatctcctagactccctgagtctgaatccgttcaaaggcacatgtaggcagtaattgatgggctcacagtgcagcgtagtggctgtggtgcactactgccgttagcgagtcaacatcattcatcactatggcgcgtttctttaataactgatgcacttgtgtaatttgataacgcaggaaattgaattaaaaggcagtactgataaaggatgcactctggagaaacagtgcggagagcactcatttggttcggtgttgccggcaggacagggagtgcatagtgcaagttgggccaccagtggggtccatgggggtggtataccgtggccgcgcaagggtcttttgtgttcacacgtgttgggtacaaactagtggcgggggaccccgcagtaaatgagtgggagttcggcattgagttgcctggataaatcccgcggttttagccaactgggtgtagcagtagatctcggggaaacacaaatgggaagggactgctgacaaatggaccggggaatcattggaacattgctgaagagcgggggccaaagaaaggaaaagggggaaatgtcactagataatttcgcgtattacgcaaataaagtacacaaggatgggaattggtatagcgagaagaggtttagaagttgaataatagcaacccaaaaaggaatgacattgacaataatttagaattgggagaacggagggacagaaggataaaattggcttagcaattgtggtagaaagat

SEQ ID NO: 662533 - DNA, 823 bp, Homo sapiens
tctggacggagtagctccaagagctctcactgtgacagcccacctcgctcgcagacaccacaagataccaacagagcttctgaaacagatacccatagcattggagagaaaaacagctcacagtctgaggaagatgatattgaaagaaggaaagaagttgaaagcatcttgaagaaaaactcagattggatatgggattggtcaagtcggccggaaaatattccccccaaggagttcctctttaaacacccgaagcgcacggccaccctcagcatgaggaacacgagcgtcatgaagaaagggggcatattctctgcagaatttctgaaagttttccttccatctctgctgctctctcatttgctggccatcggattggggatctatattggaaggcgtctgacaacctccaccagcaccttttgatgaagaactggagtctgacttggttcgttagtggattacttctgagcttgcaacatagctcactgaagagctgttagatcctgggggtggccacgtcacttgtgtctatttgttctgtaaatgctgcgttcctaatttagtacaaatacaagaatagaccacttaaaatcatgtgatctatattacacctaatggaatcaataagcttgtcagactgatttactgtctactgtgcaacattgcgtattaaatttcctttgatttagatatacatatctcgaatttaattatttcaatcatactatcagaagtgggtgggttctacaatttttgcgccctaattcctgaggtcttttttcaggaaataaaaaatggaaaaaacaaataaggggtggca

SEQ ID NO: 662534 - DNA, 210 bp, Homo sapiens
ggtagctcagagagaaaagtaggtctcgcagttgtcctgatgccagtgagctccaccatatcgtgtcccatcctgtcaaagcaaaaaaagagaggctggtctggaatatgtctcaggtgcgctggatgttgggaaaacattcacgaggcgttagatagggacgtgaagctgcgctgtctgtggctatgaggcacaaggaacttgtttgtg

SEQ ID NO: 662535 - DNA, 281 bp, Homo sapiens
tctacagctatagctcactagctcacaggtcttctacgtcttctggtatgtcccacagggctatctgcacttgtccttgagcgtgagcatcctcatcatcctttaacgttctggttgataacgctggattaatccccggagcgttgaggatacatggaaggctcaggaagagttcattctcaatgcgatacatcgcctttaccattgttgacacgggatgaatcctggatggatttgtcacgatggattcaatcggatcgggcagacttaacccgaggcgc

SEQ ID NO: 662536 - DNA, 1158 bp, Homo sapiens
  misc_feature (897)..(897): n is a, c, g, or t
cgccgtactgctggtggtgcgtcggacatgtagggatggggcttgctcgtcgtcccgtcactgccgtcgagccttgtgccttgttcccgtgtccatgactggggggatcgtcgtctgggtatcggctgctgcgctgtggggactgcgggtcacttcttgcagggatactccctctcccgcttcggtcgctatttgtgttgtgccggcgtgttgcggtcgccggtgggcccgtggaggtgttgttgtttgtgggtgggaaaggttggcaaaggggttttatattgtccccttactggtcccgggcatagccttgtaaagaggggccttggttttaattccgcgccgcaggacgcccaccaccaagcggctggggtgacgccggccatacccagggcccaaggggggtggtcccatacgggggtctgtgaagaggaacctagggagaccgggtgtatatgctgtggtacctcaagtacaaatgatagtttttagacttgttgtcgtaagtaaataaatggattatatatgcgagatgactcaaaatagtgtttgaaaggaggggtgatacctttaatttaatgccacacccatctggcacaccatcgggcccgtggccccccacgaacaacctgtgcctgtagaatgtggtgcgtttaacgatatcccaggccccctgcatttgtgtggttgagtctgttggtgtggaacctgttttgggtaaggggggaacgcgaggataaagtatccattggagacaatgtgctgagaggaaaactcttggcttgttgaagaccctgccacccctgtggtgtgggcggtttctttggagaggaaacgtttaatgcacaagaatatgttcacatggagaaggggaccacaccatgttgtatgatgttnattgggggccttcgcgacgtggacctggacccacacagtgggtaatccctggtgaaccatggtaaaccagccacagggatgtggttgaaggccgttcacagtgaatggtggggtgtggaataatgttgactaaccctggtccaagggtgttggtgttaaccctctccctggtaatatgggtggtaccatgaatgtaattggttgggtaattattttgggtaacttttatggatgtaatatgttattaaccagatttttacc

SEQ ID NO: 662537 - DNA, 1454 bp, Homo sapiens
  misc_feature (1153)..(1153): n is a, c, g, or t
aaatggcgcctccggcccccgtgacccggcctccggcggctccggggagtgtatgactgagactgttctgactgtaaatgaactgccttctacatctggcagctaccagcatgtgcataaactgatggctgcagctgtgtgtgaatgcttgtcaagcccagagatgagactgtggatgatggtgactgtccttcctgggtattagatgctgtaccattggctgcaagatgtgaatgttctgggtgttgtgtccttgtgattgatgatcaaatgccactccatcagtgcgcatcttgagcatccaatgtgcccgttgctgcaatttgtatttgcttgaagctaacactctgacaccaactgactgactgtctgagtatgtgtggaccaatggaatactgatggggcactgatcgccattggggaccgtgatggatcgcattgacagccgacgtgaaggctgttgcggacatcgttgaacccaaagcgagcacaataccagttacacgttgcactccatgggggaccacttcaccatacacgaagtacgttagtcatacgcaaagcttgcaccctagtggacatacccacatggtggaatggcccaggcgcccccttggcacggattgacagtgtccttgggccagacccaacgtgtgtcgtggacccaatggcctcttggtgcacgcttggaccaacgaaaggcgcacaatttgaacccaatggttagggcaggcaattgcaccttggactttggcaaagggaccttgagaatccaggcacttggggacccctcctcgacacctgtggaacaacgggggatggcctgtggcagcatggcattgcaacattgggctagagtggaacgccatttgttggcagccacgaacgtggaattgggcacagacagcacgttaaccaagcaccgccaaaagacagtcctggcacccaagagtttatggtcaccttgggcgtggttaccaatgtgaccaccatttgggtggacccacaactgctatcggtcgtatttggacagctcttgggacatcggcaataatacgctgctttgtgggaccagtagcgtgagacactttggggccacttttaactctttctaacccaagaagattaacatgatgataccacccacaaccgncggtgagcaccgtagccacagcatgttgagtgaaccatttgggacaacacaaagacagtaatgggggcagagttcccaggaacgccggcaccaaacacagcgacgaattaggcacgaattggtgcccaagtgcgtgaccaatcaccagacgaacttggtgaggcggaccacaactaggtgacacggaggggcacccgaattggtacaccacacacccaaacattgtggaggcacccacaccaacgagtgggtggccacagcctcagcacctaggtgcgagacaaaagcaggagccaacagg

SEQ ID NO: 662538 - DNA, 1366 bp, Homo sapiens
ggagagagaactagtctcgagtaataaatgatcatttttggaacctttaaaatccctcaaaaccggttatatcataccaagtgagtttggagctcaccatgggctaatcggcgagattccgggtccccgacacgcgggcaccagggccaacacaaacttcgtgggactacgcagacgacaagggtacagatcaccagcagggctaccgcgtacactacgggcatgaggatagtccttggaaacgtcctatctgggaagcctcatcacaacatcataacccgggcacaatagggccaccccagaggacctcacgaggcacaacggccacacgagacggagaaacccatataacgctagggggggcaccagtggagcacccaccgaccccactaacaccacgcggcacaccggcgactaccaacaccacaacaaaaaacagcaccattgccgacacacagcaaaccagcggctccacagccccacctgagacacccgcgtcaacccgtagcggcgcgacaacaaacacatcactcccgcgaggccccgcccacgatatacaccctcgtgagacaacaaaaccccaatgtcgccgcgcgaatcgcgcccgaagagcgcacaccagaacgagtccactcgcacactacctacccgcctcccagaaaaaaacccaagccatccgcaccgtcgacaacccgacaccccccaatgagcagcccagagcaacgtgccccaccaaagaacgccaggagcgcacactacaacacccaccccctcacccctgcagccgacccgctgcaacaacgcacccgagacagctgcaacacgcaaacgcgccagagacccccagccacccgcagaacaccacagaacacacgtgcaaaccaggcacaccacaatgcggaccaatggggcaaataaccaccagacaccacatcccgacacggccgtgcataacaccgcgccaagaagaacccaccacaggcgaccccacctgacacaccacacgacggacggctccgaacactgaccgtcgcccagcacccggagcccgcccacgacgcccaccagcgcctcccaccaacggacacaaccaacgctgatgcaggcgccagcaaccagatgcctggacacgccgagaacaacccacgcgcacaaacgagcaagatggactactgccacaccgctatacccacaccgcagaacacaacaccccacaatacgccccacggaacacaccacagaaccaggcgccacacagactcaacacgccgaaaccccgcccaccgccgcaaacccgcgcccccggcgcagaaaaccacggcagcacgcacacccatgccaaccaccgactgcccacgaagcgaca

SEQ ID NO: 662539 - DNA, 100 bp, Homo sapiens
cgtcccctcccgcagcaccagcggccccggtgtgaggacctcgaagcccagccacggcggcgtgatccgctcgaggttcagcgcgtcggagaagaacgcg

SEQ ID NO: 662540 - DNA, 772 bp, Homo sapiens
gctggaggaaactgcatctgacggactggcctgccagctacgtggaggacctggatgtggcactgggctgccctgacgtgaccatccccgtggatcctgccgtgcccctcgtgcgccccgccccgccgggccgctcccctgtcgggttccccaggccacagccttacctacggtgctcctgactcctgcagaggctatccgagaaagatgcatctgaaccgacctggccgtgggcctcggggcagcagtgagtgggagtgctgtacaggcccccactcagctcttctcctcctgtgccaggggctccccgggggattgagcatggttggtttaccctcgtgagcccccctggactcgggacgtctgagaagatgccggtcactgaggcttgttacccttgcttccttgcagctcctggccgggcttggcgctgactgctgtgccccacccagcagtgggccttgtcttgcatagaggaaacggctcgacagagggtggaaagttggtacccttaccagagacagtgtgaggagccgcaagactacttgccgggcagctgggagaagtgcatgggtggcactgtacgtgatccagaagatatcccccgaggcggagcgttgtcacgcacattgtacaagcaccaattcctgatagtatccactagcatggcgcatgcacaccgagattgatgacgagctaatagagaaatactgacactgtagtgaccgatggagacggcaaaattgtaccaatgaagctccgtacaaatccg

SEQ ID NO: 662541 - DNA, 348 bp, Homo sapiens
  misc_feature (107)..(107): n is a, c, g, or t
aagagtcaccgctaagatcatccaagtgttttcatggtctgagccgccgctccatgttcccatctctcactgcccctcggccctgtgctgagctcttgttctcccanagagggggctcagatggtgcggcctgagtgtgcggccggcgggatatgggatacacccgtagggtgggcggggtgtgtcccaggcctaattccatctttccatccatgacagagatgcccttgttgaggctggcctccttgtgcgcctgtccccacggtccccgcggcgtgagccacgatgctccccatagcccacccattcccgatacgccttacttactgtgtgttggcccttatcgag

SEQ ID NO: 662542 - DNA, 207 bp, Homo sapiens
ccgggttgggaacgcacacgctggtgcctgtcaggagtcggggggctaggggaggaatagcattaggagaaatacctaatgtagatgacaggttgatgggtagcagcaaaccaccgtggcacgtgtatatctatgtaacaaacctgcatgttctgcacatgtactccagaacttgaagtataataataattaaaaaaaaacacacag

SEQ ID NO: 662543 - DNA, 772 bp, Homo sapiens
gattcacccttttatttctttctctctgagaagggatctcactctgtcacccaggctgagtgcagtggcctgtcatggctcactgcagtctcaaatttctgggttcaagtgatcctcagcttcctgagtagctgggactacaggagtgcaccaccacacctagctatattaaaattatttttgtagagaggagggcttgctcctattgaccagtctggactcaaactcctgaactcaagtgatccttctgcctgtggctcccaaagtgctgggattacagatgtgagccacttcgcccagcccaccgtttattttaaagaacatgggagctatcatgtctggaaggtgtgttgcaatctaattttacctattcactctcctccttaaatttttctttgtgacttttctgcaaccagtaagggaaacctcagattatcatgagaatctttctaaatccctccaatttttcgtaacttcaccaggactgtgccaagacatcacaggtgacactttacaacatgtgcttcctcgtgtatgtctgtgagtctaaacggaaccatggatttttattttctcaggaaccaaacatcaaaaaggttcttatcaggagaggatcacatgggacgtgaaacgcaatgattttcattcaccttgttcagcacttaacttcaggggtagctccctctggtgagccctgggggactttacatatcctgttcttttaaaaaccccctgggatcacaatctgggggtgtgcgccacgcaggaacgt

SEQ ID NO: 662544 - DNA, 118 bp, Homo sapiens
gaatctagaggattcccaggaggctccgatctcatctacaggatagagaagcttcctggaggaagcaggtttgagatgaaacctgaagggtagaagataaatagatgaaggaggagga

SEQ ID NO: 662545 - DNA, 1271 bp, Homo sapiens
ggctgggaccctgagtgcggcctgtggttaggctggctccccgtgctggctcctccgcggcggtgacaggcgactgcactcccctgcttccctgtctccacctgctgcctccctcctggccctgtgtgttccctgccatgcactgatgtgcctggctccctgacgctgtctgtgaacgatgcctggcctgtgtccaatgggtggactgggatgctggggcctggcggtcttcatctcgtgcatcatcctgccaacttgtcaacacagtcacacagcacagccagcacacatcaacacacacggcatccacaccaaggcacacttggccaacatcatccagcatcaaacacatttcacacagtgtcgcaccacatggcacgcttgcattggctcatcagtcacacacacaaacagtcacgtcttgcaacgtatggctccttcactcttgtctcccttgcgtcatcgacatttgacttctgtgcacacatcggcggcttgttgacacctgctgagttcaaaccagctacaccggcaccaacgcagcatcggcgtacccttttcatctctgatgtatggctgaactcacaacagttgcgctgatccgcctgactgaacaacgaccatcacagaatgacctggccagccgcagacccaccttcatgggccttggccctgcactgacatcgccagcagtggcgcagccgggagatggcagaggcttcgccggggagatcctaaggtcctcgtagccggagacactatggacagcgtgacgccagaccgcggccttgtgcttggatgcgccttgtacagggacgtcccacgaatctaggccccatgggcgcctggacctcacgagtggtgcaccttgcttcacttcgaccacacttgaggtcgtggacactgccagccactaaggctgatcacaccagtacacgacaaacagaacccaagacagagtaaaagacgccagagactcatgagcagggcctcaggggcaacgacgcaccggcgagggccggccacaccaggacacccaggaggacactaccaaacctgggcccggacccagggccgagcgcaacccccgcggagccgcggagagcggaccaccccaagaccacgggagggcgagcagcggcaccccggcgaccccagcaacgacacaagcagaacacgcgccaccagcagacacagaggaaggcaaaacacaagacgacccgcggggcccagctccgcgcccacccaggagaacaacaacaacagcggcg

SEQ ID NO: 662546 - DNA, 97 bp, Homo sapiens
  misc_feature (87)..(87): n is a, c, g, or t
ttcgttgcgcagtagtgctagctggcttcgcggttcggtcctcgcttcccggcagccgcactggtgctgagctgctaggaagccccntatcgcctga

SEQ ID NO: 662547 - DNA, 257 bp, Homo sapiens
ggcccttaaaaaccccccccttttttccccccctttttttttaaaaaaaggggggggggggtttaccccaaagccccctttccaaaattttttttccgggtttttgggaaaaaccccccaaaaaaagccccttttaaaaaggggggttttttttttttaaaagggagcccccccaaaaaagggggaaattttttttttttttttttttgggccagggccccgggaaaggccccaaaaaattttgggggggggcccca

SEQ ID NO: 662548 - DNA, 228 bp, Homo sapiens
gctatagatcttggcgcggatcttggcgcggatcttggcgcggatcttcggcgcggatcttcggcgcggatcttcggcgcggattcttcggcgcggattctgcttacggatgtggaggtcagacgtgctacagaagcagaacttgtcaggatgcgtgcaccgagggtgactcggggcgtgtgtgtgtgtgtgtgtgtgtgtgtgtgtgtcatagacagtgtctcgctc

SEQ ID NO: 662549 - DNA, 83 bp, Homo sapiens
aggcttggtgtggggctttcatttatcactccatttcagtctctttctcagtgttttgtctctgccccttctgtcgtcttctc

SEQ ID NO: 662550 - DNA, 108 bp, Homo sapiens
ggcacgagtgcccgcaggcattgcccgagccagccgagccgccagagccgcgggccgcgggggtgtcgcgggcccaaccccaggatgctcccctgcgcctcctgccta

SEQ ID NO: 662551 - DNA, 669 bp, Homo sapiens
gtttagcctcccaagtggctgtcactgggggcatagcagccagtcgtgcctggctagttggtgtattctgggtgcgagatggggtttctccatgtatggccgggagattctcgcggctcctgcgtcactcgtggatgatccctcctgtcctcgagtcctcccaagagtgctctgcaatagttgcaggcgtgagccacctcacccggcatgatttagataagactttgaagcttagacttttaagggtgatgctgaaacaaattaagacttcttggggttattaggatggaatgaagatattataggatgtgagaaagatatggattaggggagctaggggagaatgctatggtttgaatgtttttctctatctccaaaaatttatgttgacatgtaactccccattacaatagtattgggaggtggggcctaatgggaggtcatgagggctctgacctcattaatggattaataccaatgtataaacgggcttactgccatgtgaggacacacatttcatccctttgtaccctcatgacattgttgccatgtgaggatccacgccaagaaaagcccttatcacaaccagatgtgggcaccattctgcttggactttccagcctaccagaacagtgagaaaatacatgtctagtactctgtaaaggaccg

SEQ ID NO: 662552 - DNA, 1077 bp, Homo sapiens
  misc_feature (341)..(341): n is a, c, g, or t
  misc_feature (495)..(495): n is a, c, g, or t
ccacgtcgctctggtgattcgtggactgaaggtagtaacagcgcagcccagcatgtccggcgcctgttctggtggtgaccagtgttacagcaggaggacgtgagcgtgcagactccgagattgatcatggcatcactgagggaccgtaagtgtcgctccattcagataacccttgtcagagtagtgctacacgtgaatgcgctacaaccgacgtcactccgatatgactcgcatgcgaaggggtcaggactcatatcctacagcatgagcttcgtgcaaggcgcatggcaccaaaggggatcatcaacgagctattgactgcaagcctagagccctccctntaactctagtgagcggccattcgggttgctctccctagaagggattcctgtgagtgcttggcctgggctggctgtgagaagaagatccgcatgtactcccagaggaataccaagcctagtgcgtgaaaccgttgcgaaccgcctattttgcagngcacaagacgtatacgtgggctaccagcgcagtgctctgagttgtacacttgtatcccccttggttcttgtatacctcatcacgcgtagcctaagtcttcttagatgggagacgtctccgcgtgaaacgcatttgttagaatggggggatgggagaggaaggatataagagggagaccatccccattcggcttaaaaggtcttgttgcatcctatccttgttgacgggtctaaccatatgaggacgcagcataatgactcttaaagttcgtttatcacctctattctccccccttccccacgggttttctcccactgagcgttcgctataccagaagggccttgttcattgccccgcagaagggcggccccttcttttgcccccgtattttccaccatgcatttgtgcgtcgccatgaccttaaattacttgaaagggggcccaggaggtcttccccatgggttgggctttcctttgcgcgtagggtcgattcagaagttggattggggcctgtgcgcgggcgggagggggactctgggtgggcaacggtcaaagccttttgccttttttccttggcaagcg

SEQ ID NO: 662553 - DNA, 150 bp, Homo sapiens
ttacttaggatttcatttatcctgctatggccaggcaccgaacaatcgaaaccaactccagtgtaaacaggggtgccatcaagtatgcgctggttgtcagccttgctggtggagtcattgtgtcacgatgaagcaactacgagccagtgc

SEQ ID NO: 662554 - DNA, 595 bp, Homo sapiens
aggcagtgactcgtatttggtcatagttgttccagaggatccctgttgagggatcgatatgcatagtcaatatatataggagatgatataaaaagatgttaatatctaattgtcagtggatttgtgaactatctgatggttaatatcagataaaagatagttaaggatagaacatcaaagaatcaaagctaaatctatttttttttttttttggtattaaatgtagagacggaggtaacgccaatgtgggccaggcgggtctcaacctctgggcctcatgtagatcaccccgtctctgcctcccaaggtgccgggattagaggctgtaagccaccacgcccggccgcagttgttcttcatcatcgtcataagggtagtcccaattacgggctcgggatggggtgacaggatgtctcttatctcctaaagctgacaatggtataccgctgactggaccaagcacttcgggaaaacgacagacaccgaattccccaggctgacagatgacctgtgagagcgatccgattgttgtacgattccggcctcacagtattcctcggggttcctgggtaccccttatgtgaccgttcctccc

SEQ ID NO: 662555 - DNA, 311 bp, Homo sapiens
ctgtcgcttgcaaaatactgattgtctgtgtagacgatgcagagaggcacctgcgctcagaactagagatatccaatgacccagacaaaattaaacttcagctttctaagcataacgagattcagaagactcttggtggcaagcagcctgtgtatgataccacaattagaactggcagagcactgaaagaaaagactttgcttcccgaagatagtcagaaacttgacaatttcctaggagaagtcagagacaaatgggatactgtttgtggcaagtctgtggagcggcagcacaagttggaggaagccctg

SEQ ID NO: 662556 - DNA, 133 bp, Homo sapiens
tttacaggacaaatcttaaagtagtattttgcagcttagaatttattccaactctattctggcatgagcttttacgacttgctatggaattcacaaagcacctgttttgttttgttttgtttttgttctgtga

SEQ ID NO: 662557 - DNA, 213 bp, Homo sapiens
tctttagatgtgtcggtacatgtacaggcaggtgatactgaatcgcggtgtacttatcaaaatcccctgcgtttaggatctctgtttccataaaactttccaggtgattctgatgaggacccagggtctaaccacacttccgtttccctttttctttctacaaaaccttgcttttacgttcagactggactgactagacgggactacggaacg

SEQ ID NO: 662558 - DNA, 249 bp, Homo sapiens
agtgtacttcagagcgacggcgccgaatgatgtcgaaagaaactatgaaactgcgctcagccgcccgagaggacaggtgttgcagcaaattaatcaatcaagaaaaaccacaggctcttccccttcccccctgttcgatttaatcagtcggcatttgccacagtagtagattttctagatacgtcttgtagacctcaaagtaccggagaggaagctcccattctaaggaaatttatcttgaagaacact

SEQ ID NO: 662559 - DNA, 114 bp, Homo sapiens
gccccttttttttaattttttgggccccccaaaaatttttttggggggccctttccccccccccccccccccgggggggtttttttttttccccaaaaaaacccccttttttta

SEQ ID NO: 662560 - DNA, 318 bp, Homo sapiens
catgagcagtgcttgactattacagtacggaggtcctgctacaagctgatactcatctagagggcaagggcgtctttcgagggcgggaccaatgtcctgggccacctgctgcagggtggcgctccaaccccctttgaccggaactatgggaccaagctgggggtgaaggccatgctgtggttgtcggagaagctgcgcgaggttaccgcaagggacgggtgttcgccaatgccccagactcggcctgcgtgatcggcctgaagaagaaggcggtggccttcagccccgtcactgagctcaagaaagacactgatttcg

SEQ ID NO: 662561 - DNA, 107 bp, Homo sapiens
atttcactctgactttcttctctttgtctttccaattctttccggtcataatttaacctactcaggcacataattccacactggaaactgtctctgaaaactgtcga

SEQ ID NO: 662562 - DNA, 1201 bp, Homo sapiens
gggagaactgtttgtgacgggcaccatgagggacatacgtgagaacttccacttgaccgtgatgcatctactgtgcccaggacgtgtggtccaatctcacatgacgttgtaccacgactacgcagcatacactgatcattgctttgtcagagggtgtaccacaagcactcacggtggacgtactcggccgcggagccgagtgtctggtgaccattggagtggttcgttccgtagcacatgactcgtgttcaacacaggaaactgaggatgcgttacgctggacagcaggcactagggcgagcattatgagtgagctccagggggagatgagccgaagtctgccgatggactcctggtccatcatgattgctcgtgccatgcttgctctctcgaggaagacagcgtagcaagaggaagaccgctcttggcatcatggaacgcctggcagtgaggaccctgtccaagaaatttaccgcgagaatcaaatccataaagagaggtcgaagaaaggagacaaccagaccaacaagaccaaggtaaagatatgctccatactggaacgagggggcttcgttggggccacactgagattgcaatcgccaactgtgcactctaggcggtaaagtactcctccgagaacctcatgcaaggttgaattgagtgggtgtagattaaccaatcgaaagtaccgatcaatggggcctctggttgtcgctgcttatgtcgggaacagagcttgataggaggggaatggcgtcggtggaacctcccctttgatcactagagagtctggcgtcctctctaagaacgagcatttgcgctggaggaaacaaccccggtggaaattggggttacccaggaaaagtcgtctcggcccccccggtgtgttaaggactgaatcccttgaccagtgggaaacccccggggccgccgagtcctgccttcagtccttgcaaggactgacgtggctcaacgaaccttaaaaggctccaattgtggcacattttacacttgtggggcactgtgggtttgccccttcttaagtaactaactccagaaactcgtgtcaatggagcttgggggcgtcacgtatgggtagccctttgtggctagaggaagaaaacactcttgggccatagcttggcctgacaagagaaccaacccctgagattgtcaggctagggggtagggcataggccac

SEQ ID NO: 662563 - DNA, 1633 bp, Homo sapiens
  misc_feature (335)..(335): n is a, c, g, or t
  misc_feature (655)..(655): n is a, c, g, or t
  misc_feature (1153)..(1153): n is a, c, g, or t
  misc_feature (1219)..(1219): n is a, c, g, or t
  misc_feature (1227)..(1227): n is a, c, g, or t
gcgtgtgctcattgtgttggcctctgtctagaatctgtcgtggcctgtgttaatactgcgtccgagataacgacaagtgtgttataagagagcggtcgtggtattgaccggcgctccttgctgtctagccctggaggctgttcctcataaagatcctcttgggagtgattggggccaacacccctctttcgaagatgtttgtgtgttcgccacacatctgtttttgggggataatgttctttgatagttgacggcacacattggggggtgtctgcggaagtagatttttccacgaaaagggggccttttttaggaagagcaaccctgctgtgtgncccaagaggaagagctcttttttgtctgagcaaagttgttgtttggcgaccacacaagaggcgaaagttggttgtgcgccaaccacacacgttctcgcattattggtggtgttctcctttttttcgggcgcgcaaacttttagcccaccccaccgactttggtgaaaaaattggagcctttatttttgggcaacaaaataaagggattcgtgtgtacatagaatgttgcccttcccgtgtggttaattagcagaaagcgccgaattaggttccgttggaaattgttgttgagcccgttcgggtgagcacccacaagattnaagtgtggttgacaagtggggatcaccagcgggccttggttggccccacagtataagggcgcccaccacgggccgcgcttggctctcgttgtgtttccttctcggttctccaacgaaggggggagaattatagctcttcttgaccccctccggtagaatcctctcctcttctctaggccaattactatctttgcggggaaatatctcctctgtgtccctcggagactcacaccggcgaattaggtggaaaaaataatgttgggttgccccacagatgttctaaaccttcgtgtccccgcttcaacattccacacatgtatattttttaaagcccacatctctggagaatataattatgtatattggttatatatatgcccctcatagagataataaaatgtttccttctcccctttggccacagctgagacttacgaaatttttccaccctcaaaatgttgttccttaaatgtctaatgcgcctctccacgcgcttgngcacagtgtaactcgtgtcttgtgttaaaatgtcccccctcgagaagtctggtctcgctcgtaagngagagacncacagagaaattgtctctttggctcgttctcgtgaattcccctctcggagagtaaagagaaggttaagtggcacattgggtgggaggtggtggtggtttctctttctccccaattctatatatgataggtgttattataacacctcttctcgtagccacaacagagtgggtgggtaagtttctctttggttaactcgaaagtgtgccccttccaccctggcgtatttgaaaaaggagaatgtaccttggaccgtttctctgtaaatctcttgagagtataacctgtttggagaatttaacccacctcttcttgaatgggggacccaactcttatggagaaattgtaaatacgttttatttataaacctggccctgtattccataaacatttttgcagccctttcca

SEQ ID NO: 662564 - DNA, 212 bp, Homo sapiens
  misc_feature (45)..(45): n is a, c, g, or t
  misc_feature (60)..(60): n is a, c, g, or t
  misc_feature (76)..(76): n is a, c, g, or t
  misc_feature (83)..(83): n is a, c, g, or t
  misc_feature (88)..(88): n is a, c, g, or t
gagatcacgcataacgcacccccctcataacccgcccgacaacancctattagtggaccncccaccatgcctggangaggagnaacgnctcaaactcctaggctcaagagatcttcccattctggcctcccaaagagtcaggattacaggcatgagccactgcacctggcccccaacttctcgaataaaatgaaactatgattcttggcctc

SEQ ID NO: 662565 - DNA, 359 bp, Homo sapiens
  misc_feature (27)..(27): n is a, c, g, or t
aaaaaagttgggaggcttccaaccgcngtttggcggccccgcttcttagaaacttagtggattccccccggggcttgcaggaatttcgggcaaccgagggcaactcaattctggcccagtgacattctggagatcggggcccagtggagcatcctgtgcaaagacattccctcctttgagcgctacatggcccaactcaaatgctactactttgattacaaagaacagcttcctgagtcagcctatatgcaccagctcctgggcctcaatctcctcttcctgctatctcagaaccgagtggctgagttccacacagaattagaacgattacctgccaaggacatccagaccaatgtcta

SEQ ID NO: 662566 - DNA, 338 bp, Homo sapiens
  misc_feature (325)..(325): n is a, c, g, or t
aacagcaactagataagcacgatgtcaaatagagtatttaagagagaacacaggaactcagcaggaaagtgacagaaaacctctcaggcatggaaggagaggaaagcaaagcagctggcccagctgagatcggagccaggagagactcctcagtgcaggaaaagggaagggagagagccccatgttccacatttccaccatggactactgcaatcctagctacagagtgccctttggctcttcacagaccctgagactagtataggaaacttcctgggagcccacacgatggcattgtctcagagaggggatttcaccatgggtncacacacataggc

SEQ ID NO: 662567 - DNA, 771 bp, Homo sapiens
  misc_feature (537)..(537): n is a, c, g, or t
ggaggacaaggtgacacgctgaggggggacttgtgttagactggggctcccaatgacccacaatctgcggagtgagatggtctgaatcttgtgaagccctcaggctgttcagctcactctagacctgatcaagcctgatgcagtggtccatgcactgattatggacgctgttgatcagcggatgctaagcaacacgatcctgattgtaccaatgagagaactactgtggacaaaggaagattgccagaggtttcaccgagagtatgaagggcgtgcttgctatcaaacgctgccggagtctatggtcagatggccaccccgagcctacatccttgcgcacgagggagccatccagctctggaggacgcccatgggacccaccagggcgtcccgagcacgccatgtaggcccagactctatggcggggaggctctgtctcactgactcccgaagcaccatccatgggtcgggcgtctgaggctctaaccaactgagagattgcatggctccttgcctaaattcagagaacagcccttngtgtaaggaggaagactcccatttgccctacgggcctttgtgcttatgacctatgggggcgtaccctctgtaggtgggaacagaggtcttggaccagactggtggacgcctttaaaaccacagggggtgggcagccccgtgtgtagatttaagcaaaaacattttctaaggacaaggaaaacccgtttaacgagccccctccataacggttttttgaagtaatgggggccagga

SEQ ID NO: 662568 - DNA, 1384 bp, Homo sapiens
agcggactgtgcacttgccagccatttcgcccgctccggagcccggctcgctgtgtgcagcctggcgcgtggtcgccgcgtgctctgtggtggtccgtcgggcctgcgtggggcgtcgagccttgttgcgtgctgcgtgcgtgctcggtgcgtgtgtcgcgcacgcccctccgcagctctgcagcatcgttgccgcgtggacaggagccaccgctggtgctaagcgcagcgatctccgtcccttggctgcacactgccgctcctcgccgcttccggcgcgtgcggtgccccgaggttgaggccggcgctggggggcggtgcatgtgagccttgcgcgcgaggctgcttggtcggcactccttggcttggaatgtgcgcgagccgttccctcgaacgctgtggtcgcctgcgttgccgacgagccgctaggcaggcttgacgcgattcaggctgcgcgtcgcgttcgtggatgacaggcattgcttggcagccgtctaggggagctgcccagcgcggcataattcttagcatcgcagtgctcctaggcgccctggcacgcaccgaagcaccggacggcgcccttggccatgcggccatgcattcggcatcggggggctttcttgacttccgcccgccgccggctctgtggcacactcgtatgagcgggcaccttcttggccaagcgctccaaggcggcttggtccccccctcggcgggctccctgtatcaccccaggtccttgtcggtgcactgacttccccgtcactcgcctgtgcgccccaagcgtaactacaccgacactggaatcgtgccctcgcgccgccagcgctccgacgcatgccctgcaggcgatggccccagtcgttgcaaccaagcgccttcgcaacgaacagtttggggaccacgcaacgaaaataagagcccacaggagacgctacacctaacgagcgaagaaagggaacagcgaaacaaaaacagctggccagaagaacaaacacagacgcgacaactccccgaagggagaagaacggggaaacacacaaccacaccgatacacgcgggactgtccaacgacacctaccgacaacaacgacacaggttcacaaaccacagacgacagaccagagcgaccccctaaagacaccgacagcactccaccaaacgaaagagcgacggataaaacaaaacggaaacgcaccgccacacggagaatccaagaacatcaccgcccaaacgaacacaaccctagtggacaccccacgacagagggactacgagaaaacaccaaccctggcaacaaacccacacacctgaaaccacaactaacgcacgggactacccaagcgaacccgacacggacagacccacaacacacacgcacaac

SEQ ID NO: 662569 - DNA, 871 bp, Homo sapiens
  misc_feature (8)..(8): n is a, c, g, or t
  misc_feature (73)..(73): n is a, c, g, or t
  misc_feature (77)..(77): n is a, c, g, or t
  misc_feature (249)..(249): n is a, c, g, or t
  misc_feature (389)..(389): n is a, c, g, or t
  misc_feature (460)..(460): n is a, c, g, or t
  misc_feature (472)..(472): n is a, c, g, or t
  misc_feature (481)..(481): n is a, c, g, or t
  misc_feature (509)..(509): n is a, c, g, or t
  misc_feature (520)..(520): n is a, c, g, or t
  misc_feature (524)..(524): n is a, c, g, or t
  misc_feature (526)..(526): n is a, c, g, or t
  misc_feature (551)..(551): n is a, c, g, or t
  misc_feature (556)..(556): n is a, c, g, or t
  misc_feature (558)..(558): n is a, c, g, or t
  misc_feature (583)..(583): n is a, c, g, or t
  misc_feature (621)..(621): n is a, c, g, or t
  misc_feature (626)..(626): n is a, c, g, or t
  misc_feature (651)..(651): n is a, c, g, or t
  misc_feature (668)..(668): n is a, c, g, or t
  misc_feature (688)..(688): n is a, c, g, or t
  misc_feature (733)..(733): n is a, c, g, or t
  misc_feature (748)..(748): n is a, c, g, or t
  misc_feature (757)..(757): n is a, c, g, or t
  misc_feature (762)..(762): n is a, c, g, or t
  misc_feature (771)..(771): n is a, c, g, or t
  misc_feature (774)..(774): n is a, c, g, or t
  misc_feature (797)..(797): n is a, c, g, or t
  misc_feature (841)..(841): n is a, c, g, or t
  misc_feature (846)..(846): n is a, c, g, or t
  misc_feature (868)..(868): n is a, c, g, or t
cagtggtngtgccaataagacaacagggattctccagaagccagccttcagacctctcactgtgttttgagancatnattatcaatttggatttaaaaaacaagggtgctgtaaaacccttgaagtcttcctcacctcagggtttagggatgccacttgcataaaaatgagttgtttacaagggcactgctctcttgaagcagggactggaaagaaacaggcagcccttcattatcccaagcagaaccnctgtgaacttgcccatggaggggttccatttgcctgggcttggaatcccaaaggggaagaaccacctgaaccggagtaacagttcaaagcctggggctgcagttgggggggcaactcttcactgtgcttgcacctgggcnggggcaggatcctgaacctctcgggggcgtacgcggaacgtggtcggcttgttggtgaaggggtgccactngccccggatgcnagggttgtnggtgtggaagggcttgcggatgcggatnacgttcaagcncgantngtcggccagcttctgcaccagcgtngagancncctcgaccgacttgcagttgatgcncttctcgcgcacagccccgttaaggtatttggccactnctctnggcacgcagcacggacgcgagtttncatatattacgaccccnggattccgttgggcgaagtngaacaccttccgctccacgaactccctggcgccgcgagaagaggngccgtcgcggcttangctgaagcncaaangctgcagcngcngcacaaagcgacccagttcgttnttgagaacgctggccaagaagcggcttggagttccgcgcgccgncatanctacagcttggagggcgcgganctt

SEQ ID NO: 662570 - DNA, 635 bp, Homo sapiens
tggtatcctatgtgagggacaaacattcagacgacagcaggaatgttctgaaatccttagtgaggaacaaacatttagaccacagcaggagttttctggaatcctatgtgagggataaacattcagacattgacaagagtgttctgcaatcctatgtgacgtacattcagaccctcgtagcagtgttctggaagtcctatgtgagggagaaacattcagaacccagcaacagtgttctggaatcttatgtgagggacaatcattcagaccacaggtggggtgttctggattcctacgtgtggggcaaacgtccagaccctcggataattgttctggaatcctatgtgagggacatttagaacaaagcaggagtgttgtggagtcctatgtgaggaaaaactttcagaccctcgtagcaatattctggaatcctatgtgagggacgaaacattccgaccctcctagcaggtgttctggaatcctaggtgaggtacaatcattcagaacctcgtagcagtgttctggaatccaatgtgagggagaaacaggtcagaacccacaagcagtgttctggaatcctactgagagggacgagtctttccagaccaatactggggtgctctgaaatcctatcc

SEQ ID NO: 662571 - DNA, 529 bp, Homo sapiens
cacgaaagcttcagctcctgctactccgtccctgtactcgcacgaatacttcacctcttactacttcgtccctgtactgcaagaaacttcacctcttccgaatctcaccaatgacagtgtcctcagcgtttatataagatatctaacagaggcgagacaaaacaattcccttccttttctgatggtaaaatactgcaatacaatttgtttgcaatgccggtagttaaaattagtaacattcctgttccttttatttgattgagtttcactcctgttgcccaggctggagtacaatggcacgatctcggctcactgcagcctcgtcctcccgggcccaggcaatcctcccatctcagcccactctgtagctgggactgtaggcactggccaccatgtccgcctagtttttgtattttttgtagagacagggttcaagagatctgcctgcctcggccccagaaagtgctgggattgcaggcgtgagcccctattcccagccattaacatcttacaggattccccagtggtg

SEQ ID NO: 662572 - DNA, 1254 bp, Homo sapiens
tctctttggtagatctaggcagggaatgagcgaggcgcggacacttccagatgctgaccggcagacccgcatggagggcagcagaaatcaacaagagtctcttagccctgaaggagtgcatcagggcccatgggaccacgacacacggctcacaccccgctaccgtgagagcaagcctgacacaggctgcctgcagggactcccttcactcggggacgaactctaggacctctgcatgacttgccacgcactctcaccaggcactaacgctcctgctgactatactcttaaacacccctgagcatatgcacgaccagggctcaaaggcacgctgagccccccaccagcggcgcccagtgcgcacgcagcagctcgattcaacaccggacaacagaagaccatgcgaacgccgtgcctcctaacgcgggcgcctgattccaggcacgtttagtccaaaggaacgaggacggaactgctcctccccagactgtccagcctccacaccgaagccactgacctcagactcacccgcagctggcagcgcagcacggccaccgcgcaccgagccacccccgccgcatccataccacccacggcacccagcactggccctcgcagcctcgtctgcaccacgcacgcgcacccacccccagaactcactgcacctcggcacgccccctgccgcaccccacagccgcgccactctggcccctggccccaagcgccagccccaagccgctccccctcaacgcccctggcgacacacgcccactcacacgggccttgcccccctcgccccacgccaccgccgccaacaccccgcgcctcagccagagaccaactacaccccggccagcaacaccgcccccgcaagtcgggacgcaacctggcacgaactagcgaacctcgcgggcccgcgcgcgaacaaccaccaccgcaccatccctggcgcccccccccccgcacacactccggccgataccacggcgcgcacgcaccacgcccagccccgaacccacgcacaagggcttcggctcgcctcccccgacacgcgcccccctccgccccccggacgaccgcaaccacgggcaccacgcgcacgcgccacactccccgaggacgccccccaccgccggcccagacacgcagcggcgacaacccacggtccccgtacacacaggaactacgcccccatgcaccccaccgcgcgcgcaccaccgccccccgccacccaccacgcccccccacgccatg

SEQ ID NO: 662573 - DNA, 359 bp, Homo sapiens
gtgcagaacagtgactaaagtacgacaggctggaagcccagaccctgtggacttggatgtagggtgggctcaggaccctgtccctggtgcctgaattccatgtgtctagcgtgggagcgagcgggagggcttgggcatctcacccgtggccagcgagcacgtctccagatctcctctgatgaggtagccactctcgctgcctcctgcttcatcgaggcgagtcgaggaacatgggcttgtgggggcagtgaggaaagtggctgctccaccagtggtctggaatgatgcttgtgctggggccttgctgctggtgtggatgaggggtaggagctgcaggttgtgtcttgtgtcttgatcct

SEQ ID NO: 662574 - DNA, 282 bp, Homo sapiens
  misc_feature (15)..(15): n is a, c, g, or t
  misc_feature (27)..(27): n is a, c, g, or t
  misc_feature (155)..(155): n is a, c, g, or t
  misc_feature (241)..(241): n is a, c, g, or t
  misc_feature (272)..(272): n is a, c, g, or t
tcagggatttatgangtggtggttttnggatggtgttacatattatatgttctagtaaacatgtaatcctaaatttaccctctcgaatataatccctggtatgatatttccatatcatcaaatgcagaataatcaaatacatcagtaagcaagtnaagtgtcctccatcaattctgtatcccagacttggctaggatgtacagttgctgtggtgtgtaatcaaacatgtctctgtgtagtnccagcaactcaagctgagctttgaaaaagtngggccttagt

SEQ ID NO: 662575 - DNA, 873 bp, Homo sapiens
agcggggcgggcaacgggttctacgctgcaggcagttcgaggatccgctgcccctgccccggctcggcctggcagatagcagaggcagcaggccgtgccgtgggggcatgttgctgtaaccagtggccatgggatgttacggtgtacagtgcacctggatggcgggccccgcagggtgaaccatgctgctgtggctgtcgggcattgggtatactccttcgggggttactgctctggttgatcgactatgacgacactgcgtcagatagattgtgcacatttgcaatgcaagtgtccttgcgttgtgacaaagcgttgcccccggtagaatgtctgtcatctctgtgggcaatgcgtccctgttggtagccctacatgcgctatggacacgtcaaccgtcctcatcgatgacacagtcctcctttgtgggcgggcttgtaatgacgccgataggggtcctgcaatgtgctctatgcctttgacgtcaatacgcacaattggttcaaaccccgatgtgtcagggacatgttcctggggtcccggggatggcacgattcatggctgtgtcctaggcgaagatcatgtacatttttggtgggctacgagcaggcaggtcggactgtattgtccagatgactattgcgacgaagctagataccagcacccatgacggtggtagctcttgatctagtacagagggcagacccgtgcaactgctggaatggacttccacctcaggcacaatgctgggaagtcacattgtatgtctgtggggggccgtgcccgaccgctttgggccatttccattccaatcagtgagatttactgcaaccgggttccgagtctttgaaccccagaaactgaggctgggtg

SEQ ID NO: 662576 - DNA, 179 bp, Homo sapiens
ttgatgctgtggtcactctagacgatcccctatcttcgtcccttctaaaatcaaataattaacaggcatgtgtgctgcgcctatgtcccagcggttcatggtctgtaggcgggaaatcgcctgaacccgggaggcaggggttgcagtgaaccaagaccaagccattgcactccagcctg

SEQ ID NO: 662577 - DNA, 387 bp, Homo sapiens
agggtctgcctgtacagagaacacggtttctctttcttgcctgacacacaggggcacgaatagattcactcttgcagagagtacatcccttcctgttactgaaaatcactttccaaaaaaaaaagcaacagatacacacatactcaccacacacacaggtggatcagagacaaaaaaccacgtaccaaatggcttagggacttgagaagtgtggccctaacttacgctgaaagggaccctattaactttacccctcacctctgggtcagagagcgttggccctctagggcctgccttgaagcttaacctattggaaccaaagggactgcttggaaagctattttaggccaggtgcggtggctcaagcctagatcgttgtaaatggcg

SEQ ID NO: 662578 - DNA, 252 bp, Homo sapiens
caaagtgtagttatctgcaagagcactaccacattgtaaacacatttatggtcatgtagctatttcaatattccggggagtggggggcaattagccggtctatggcttaggatctgtttccaggctggcttcctgaggcttcttctacctcgtgagaggtttttcatcatttttccaagtgttggcgtgaagttcaggggatggttactaagaaagaaacatggaaactggtttccggtctacaattccgag

SEQ ID NO: 662579 - DNA, 368 bp, Homo sapiens
  misc_feature (271)..(271): n is a, c, g, or t
  misc_feature (347)..(347): n is a, c, g, or t
  misc_feature (349)..(349): n is a, c, g, or t
  misc_feature (351)..(351): n is a, c, g, or t
tgaccagccgaccagccagcagctccccacgtctgcccggggtgagacaggagaatacggtctggaggcagggaacataagactgattcatgctgacttcctagaactaaatcaaatggaaatacttcagctattacaggaaatatcctcaccattgacacaaggcgtaaacccagtaaatgtctttgtaactttacttgatcctcttcatttacacagggcgtacaccaagtaaccaatggaaacctctagagggtatttaaaccccagnaaattctgtaacagggctcttgagcccctatgctcggggccactcccaccttattttcaataaatctctgcttatntngnctgccgtaattcggtaa

SEQ ID NO: 662580 - DNA, 236 bp, Homo sapiens
ggcctccaactcctgtgctcaagccaaccttccatttcagccaatcaagtagctatgactcccggcatgtgccaccatgcccagataattttttggagtttttttgaagacattggtctcactcctgtcaaccaggctggagtgcagtggcatgatctcagctcactgcaaaccatgcctcccaagctcaaaaaatcctcccatctcagcctcccgagtaactgaaactacagaca

SEQ ID NO: 662581 - DNA, 186 bp, Homo sapiens
cggccggcactgaggccaagatctggcacgaggccgagatctcataccaggccagatcttacctccttagacatggacagacccggatcctcataccaggacccgatcccacctcctcagatactgatggacacagatcctcatacttgtacccagcctcacttccccagacactagaagactcag

SEQ ID NO: 662582 - DNA, 933 bp, Homo sapiens
atattgtgcctattgccatactagtctttgccgctgcgaagcagtggtaggcctagccctactagtctcattctccaacacatatggctaccactacgtagtatgacctatacgcgtactccaatgctactactaatcgtcccaacaattatattactaccagtgactatgatctccaaataacacatatttgaatcatcacaagccacccacattactaattattagtcatcatccctcactactattttttaaccaaatcaacaacaacctatttaactgttccccaagcttttcctccgaccccctaacaatccccctcctaatactaatctacctgactcctacccctcacaatcatggcaagccaacgccattatccagtgaaccactatcacgaaaaaaactctacctctctatactaatctccctacaaatctccttaattataacattcacaggcacagaactaatcatattttatatcttcttcgaaaccacacttatccccaccttggctatcatcacccgatgaggcaaccagccagaacgcctgaacgcaggcacatacttcctattctacaccctagtaggctccttcccctactcatcgcactaattacactcacaacaccctaggctcactaaaatttatactcatctcactgccaagaatatcaaactctgagccaacaattatatgactaggttaacaatagctttatatgtaagatactctttacggatcagtatgagtcctaagccatgtgaagcccatgtggtcataatattggcgagtatctaaatagggttttaaaaaaaatttaacacaccaaaaagaaaaaaaggggggttaactggggcaataccgttttaaggtgggtaaaagggcaacggaaattgtggactggtgccaagttttttgtggctagc

SEQ ID NO: 662583 - DNA, 129 bp, Homo sapiens
ttagggccctgggcagcccctgggggaaagactaaaaaacacaaaaggaaacagcccagggagaccccctttgtgatttgcatgtgtgaccctgattttttggaaataaaaagtggaagctgcaggtga

SEQ ID NO: 662584 - DNA, 418 bp, Homo sapiens
cgtacctgcgtgggatatccagcatgagccaccacacctggccaagaaaatccttttaaatcctttattacccaacattagccatgccaagcagccaatatttctggcttctgaacattaccaaaggtaacctcccaggtgttcagagaaaggaaaatttaaggtggttcatgaaggggaagagaatcaacaaatgataaaggtcacaaagatatcaagccagaaaggactcattccctaagccaggattgaacccgggctgccactgtaaaatggcagaagctgaaacaaagcactgccatgtggttacaggtcacgcttccaaggacgtaaaaccagatggaggcctgcagcaaagtttgccactggccagtttgctgggcttgcttcaacagcaggcctatggagtcctagaccc

SEQ ID NO: 662585 - DNA, 165 bp, Homo sapiens
tcttcgcgatctaacgtacacctaatctcgagaaatgagtcattcagatggtcgggcaactctagatgattcggcagacatttgccagtcaatgagaagacataccgacctctaaatgatgtacagcatcaaggacataagattcatggcaaccccttatccact

SEQ ID NO: 662586 - DNA, 140 bp, Homo sapiens
agagcatggtctgaaaggcaacgacatcacagatgaggttctggatgggctcaacccatccagacagatgtggaaagaattaaggacacctgtgggaggacacagaacgaagacttcaaacaaggctctgactagatgca

SEQ ID NO: 662587 - DNA, 324 bp, Homo sapiens
ataaactcaggtccactctatttactctacacctcgagcttagcaccagtctccatccagtaccacagtccatccagtccacaccccatcaagatcactcctccatccagtccacactccatcctgtcatacacccatccagtccacaccccggtccagtccagaccctgctccagtacacaccccatccagtccacaccccatccagaacacagcccaatcctgtacagcaccccatccagtccacagcccttctagtctacactccatccagaacaaaccccatacagtccaaagagctgaagataggcccaaacggggatc

SEQ ID NO: 662588 - DNA, 453 bp, Homo sapiens
gttacccaaattgtaacgccccatcttccactgcactggtcctcagaatccgtcgtagctttccaaaagtttaagcatgcaatctgtttcaaaaagcaacggaccccaaggtacccccctttcgttaatccgtaaggccacttaatgatggtaagaacttggtgcaaccgcctaaaatttatccataaactaggtggcaaatctgcgtcagagcgggccataacccagcttgcgtaagctttaagcttggtcaactcataaaggcttgtaatcacctgcctgtgaaccacattactgtgttccttagctttagcagtccataaatgtcggtccacagttttcatagccgccctaagctcattcattactggtcctttcagagcatcagtgcaattcccatgctagtcaaggtcccagccttaacagcatactggatatactaccaacaattcc

SEQ ID NO: 662589 - DNA, 158 bp, Homo sapiens
gctgcccacagcctgaccgtgatgtcatcaaccgagcccccgccgcgacaccccattaccaccccccgcaggctaccgcggctgcagcctgagcgccgcgtccccgccccgacccacgtgcgcccggcttatgaggatgatgaggtcggcggcggccg

SEQ ID NO: 662590 - DNA, 684 bp, Homo sapiens
cgggccgaggttcccccgctttgcccttctggagttccgctggggaaggtcccgccccatggccctttttccaccgccgttgttttgcgcgcctggtccatggggggccacccccgaagcttgccggttcctttttcaaggagccttccccagggtttgggacaatagcagaaaccctattgggaaaattatgaacggccggcgccccaagctgctgcccagagaatctcttaatgctctggggaaaactatgatgccggcccccaaaggaccttggggtgttcttgggcgttgctaaacatctatcgaagcccttcccgggtcttatttttccggggtttattatgacgtactaatttaatttgtgaagcacagcaagcaccgttatattggaggggaactcgagaagtcccacgcagaaacatttaaggaatgggggcccgatagtggcacacaagagcccccgcccctgtcataagcgctggcggcctgtcccttatagaatatctgaggcgttctctggtccctctgcctctcacagggaaaactgtggctgttgagccccacacgttcttccccgccccagcacagggagaccaacacagggtcgctgaagctttttgtcccccgggactggtttagggcccccaaaggggttccaaaaaattttttccaatcgaaaaa

SEQ ID NO: 662591 - DNA, 277 bp, Homo sapiens
  misc_feature (4)..(4): n is a, c, g, or t
ttancgtatgtctcgatcgtgataacgtttcttttgtctgggagacagagcctcactctgtcacccaggctggagtgtactgacgcaatctcggctcactgtgacctccgcctcgggggttcaagcaatcctccttcctcagcttcccgagtagctgggaatacaggcatgtgccaccatgcctagctaatttttttggtattttttttggcagagagggggttcaccatgtaagcccagcgtggtctgaactccgtgacctcaagtgatccaccgg

SEQ ID NO: 662592 - DNA, 208 bp, Homo sapiens
  misc_feature (122)..(122): n is a, c, g, or t
  misc_feature (163)..(163): n is a, c, g, or t
ggagaaaaaatcgttcaagaccaaaactccaaatgcatcggactgacctaacaggaattttaatgcttcatggactccattcctaacaccaatgacccatgtgcagatactatcgggctctnacagagtccgagaagagacgaaagcttcactaatttcattngaggccacctgattgaatcagggtttacatcaccttccattccta

SEQ ID NO: 662593 - DNA, 219 bp, Homo sapiens
gtggatcacttgaggtcaggagtccgagaccagtccgaacaacacggcgaaaccccctatctaccaaaaaatacaagctagccaggtgtggtggcacatgcccgacatcccaaacacttgggaggttgaggcgggaggactgcctgaactcgggacagcagaggctgcagtgagccaagatcgtgccagtgcactccagcctgggtgacagagtcagac

SEQ ID NO: 662594 - DNA, 902 bp, Homo sapiens
  misc_feature (32)..(32): n is a, c, g, or t
  misc_feature (48)..(48): n is a, c, g, or t
  misc_feature (76)..(76): n is a, c, g, or t
  misc_feature (106)..(106): n is a, c, g, or t
  misc_feature (112)..(112): n is a, c, g, or t
  misc_feature (114)..(114): n is a, c, g, or t
  misc_feature (117)..(117): n is a, c, g, or t
  misc_feature (122)..(122): n is a, c, g, or t
  misc_feature (145)..(145): n is a, c, g, or t
  misc_feature (159)..(159): n is a, c, g, or t
  misc_feature (163)..(163): n is a, c, g, or t
  misc_feature (166)..(166): n is a, c, g, or t
  misc_feature (174)..(174): n is a, c, g, or t
  misc_feature (181)..(181): n is a, c, g, or t
  misc_feature (193)..(193): n is a, c, g, or t
  misc_feature (195)..(195): n is a, c, g, or t
  misc_feature (204)..(204): n is a, c, g, or t
  misc_feature (210)..(210): n is a, c, g, or t
  misc_feature (218)..(218): n is a, c, g, or t
  misc_feature (229)..(229): n is a, c, g, or t
  misc_feature (251)..(251): n is a, c, g, or t
  misc_feature (267)..(267): n is a, c, g, or t
  misc_feature (274)..(274): n is a, c, g, or t
  misc_feature (277)..(277): n is a, c, g, or t
  misc_feature (280)..(280): n is a, c, g, or t
  misc_feature (282)..(282): n is a, c, g, or t
  misc_feature (292)..(292): n is a, c, g, or t
  misc_feature (407)..(407): n is a, c, g, or t
  misc_feature (434)..(434): n is a, c, g, or t
  misc_feature (618)..(618): n is a, c, g, or t
  misc_feature (655)..(655): n is a, c, g, or t
  misc_feature (732)..(732): n is a, c, g, or t
cagggattttcaggaatttttgccctccccangtcaagtggaccactntccactccacgaggatgtgaaacggttntttaaaatgggattttagagcctcgggaangcatgngngtngcatntttcatattatgggtcaggatanattcatttcttgcnacanagnggaaaaanataagcngcagtaatttgntntttgaatgnccgtcncccccagnataggatatgnttgtatccccccgtcactcctncgcctgttttttaaanttttccnccnccngngtccaaaaanaatgttatagcgagtgctcttaaatgttgaacctgcgtgttgcttccgggccagtctgcgtggctccatgaaaagctcactgctgccccagccgggcttcttagaggaggtcagntgtcctatgtatcatcatttactctgngaatcctactgtgaaatcatgtctggatttttctggagcagttcacatagagtagaatgtggaatttcccgtgaacgtctcccttcttccccgtatctgccgcctgcggacttcgcaccgtgctagaatactcgtgtgtctaagatgactaactttaaaagaacctgcgctcgaacgctcttgnaacgcattgaaagggagaacttgtctttaccagtttntccttgaggatggaaagtttaaaagccagacgttgcatggctgtccttggggtctatcctgtacgtgagatagctgngctgttacaagaacgaaagtttatgctttgtacaccgattgctagaaagtccgacgtaaaatgcctaatctagggtttcagattctgttaccgggtggcactttaacagccgttggtgcctaataaacttgggctttttggaggctccgatgaaggctaattccttctct

SEQ ID NO: 662595 - DNA, 364 bp, Homo sapiens
  misc_feature (32)..(32): n is a, c, g, or t
  misc_feature (48)..(48): n is a, c, g, or t
  misc_feature (76)..(76): n is a, c, g, or t
  misc_feature (106)..(106): n is a, c, g, or t
  misc_feature (112)..(112): n is a, c, g, or t
  misc_feature (114)..(114): n is a, c, g, or t
  misc_feature (117)..(117): n is a, c, g, or t
  misc_feature (122)..(122): n is a, c, g, or t
  misc_feature (145)..(145): n is a, c, g, or t
  misc_feature (159)..(159): n is a, c, g, or t
  misc_feature (163)..(163): n is a, c, g, or t
  misc_feature (166)..(166): n is a, c, g, or t
  misc_feature (174)..(174): n is a, c, g, or t
  misc_feature (181)..(181): n is a, c, g, or t
  misc_feature (193)..(193): n is a, c, g, or t
  misc_feature (195)..(195): n is a, c, g, or t
  misc_feature (204)..(204): n is a, c, g, or t
  misc_feature (210)..(210): n is a, c, g, or t
  misc_feature (218)..(218): n is a, c, g, or t
  misc_feature (229)..(229): n is a, c, g, or t
  misc_feature (251)..(251): n is a, c, g, or t
  misc_feature (267)..(267): n is a, c, g, or t
  misc_feature (274)..(274): n is a, c, g, or t
  misc_feature (277)..(277): n is a, c, g, or t
  misc_feature (280)..(280): n is a, c, g, or t
  misc_feature (282)..(282): n is a, c, g, or t
  misc_feature (292)..(292): n is a, c, g, or t
cagggattttcaggaatttttgccctccccangtcaagtggaccactntccactccacgaggatgtgaaacggttntttaaaatgggattttagagcctcgggaangcatgngngtngcatntttcatattatgggtcaggatanattcatttcttgcnacanagnggaaaaanataagcngcagtaatttgntntttgaatgnccgtcncccccagnataggatatgnttgtatccccccgtcactcctncgcctgttttttaaanttttccnccnccngngtccaaaaanaatgttaaagggaatgttttttgttggttttgcagtccaatatgtaaccaataaagctccctggtttcggta

SEQ ID NO: 662596 - DNA, 285 bp, Homo sapiens
gagcttctgcacagcaaaagaaactaccatcagagtgaacaggcaacctacagaatgggagaaaatttttgcaatctactcatctgacaaagggctaatatccccaatctacaaagaactcaaacaaatttacaagaaaaaaacaaacagccccatcaacaagtgggcgaaggatatgaacagacacttctcaaaagaagacatttatgccaacctagacacctcatgcttctgtctcccccaccccactctgttttacatcttttataaatgtgccaaactgaa

SEQ ID NO: 662597 - DNA, 191 bp, Homo sapiens
  misc_feature (43)..(43): n is a, c, g, or t
  misc_feature (52)..(52): n is a, c, g, or t
  misc_feature (60)..(60): n is a, c, g, or t
  misc_feature (75)..(75): n is a, c, g, or t
  misc_feature (84)..(84): n is a, c, g, or t
  misc_feature (144)..(144): n is a, c, g, or t
gctcaattccagctcccccggggctggctgcattggggggggnatggttcanatggcaanaagtggctatgccangtggccggnctctgaaaaacgtaacttatcattggtattttcacacaggcactgaaaaggggtcagctnttctttttttttttttttttttttttttttttttttttttttttttt

SEQ ID NO: 662598 - DNA, 757 bp, Homo sapiens
gagtctccgtgcagcgaactcaggctccggagctgtggctacaacatagggtattgcctacgcgaaatagtaaagatgaattatagcgtgtagactgttctaaagaccaaagaagataaaaacttaatgccacaagaattcctcccgtatcagagaagccatggagtgcaatccttgtgttacaatgcattgtcttaattgtgcgagagagctctacacgtgtcttacaaactgctggttgaaacaaatttgcccaaccgtgaattggggttaccacaaacttgagggagtagcatattcttctaaggaaagaaaaacacccctggggggaaactttaaacaatgggtcttggaggcaagtagcggggaacacgatttagaaggaaacctgtgggatgggtccctacaacttggatgtgagaaagtggaaacgtggatccacaatattcgacgaacacttggggaggatttctctaaacatgttctatataaccgtggtaaaaagactgcggctgagatttgtgaaagctggcagaaactgccatgccttcgaagaactggtgtttgtaggcaatcccttggacagagaaacattctgtgagaaataactgggattgaagaagcaaccaagaagagtggccaagatgaaaaaggtggatgggtactccagtaattaaaaggggatgagggagcaagacactaatgccacagtttcactgtgtgttacttatttacatgtcatagaacatagattaat

SEQ ID NO: 662599 - DNA, 107 bp, Homo sapiens
ttacgtaattagggttcaagaacttaatgaccatcagtccgataaatcacacccacataactaaaaattatcaacaagcgcattcattgacctcgtaattcgggttt

SEQ ID NO: 662600 - DNA, 367 bp, Homo sapiens
gcagcccccagtcacgtaccccatttgatcaatcgatcagaccctctcacacggacccccttagagttgtgagcccttaaaagggacaggaattgcttacttggggacacggctcttgagacaggaggcttgccgatgctcccggccgagtgaaccccttccttctttaactcggtgtctgaggagttttgtctgcggctcgtcctgctacacagggagccgagaccataccactgcactccagcctgggtgacagagcaagtctctgtctcaaaaaaaaaaaatttttttaataaaaaaaattaaaaaaataaaaataaaatgtttctcattttacttgttttctagagatgcagtcttgctgtgt

SEQ ID NO: 662601 - DNA, 219 bp, Homo sapiens
ctatcacactatcgtccgcgtcgtatggctgtgacctccatcacagaggtacctggaagagcaccttccatgacagacccttaaagacctactgggtgaattcgggcttgttgtcattctgatacggttaccggtgatcaagaatctccattggatcctacaacggtctatcacattgatacccacttgtattcatgtgcctaccccgagtgaaacaga

SEQ ID NO: 662602 - DNA, 279 bp, Homo sapiens
caattaaatgtatacggcagtatgaagttgaaacctggcgcaatatatttttaccgctaggtgaaagataaataacttatatccaaacattatatagcaaggactatcccctataccttctgcatattgaattaactagaactcatctttgctaggatatccatagctcagagccccgaaaccagacgagctatcctaaaaacagcttaaatagcacacccgtctatgtcgcataatagtgggaagatttataggttgaggctacaaacctaccgagcc

SEQ ID NO: 662603 - DNA, 181 bp, Homo sapiens
ctgtaggctcattcatttgtctaccagcagtaatattaattcttttcatgatttggggagccttcggtttgaagcgaaaagtcctaatagtagggggaccctccatgaacctggagtgctctatatggatgccccccaccctaccacacattcgaagaacccgtatacataaaatctagac

SEQ ID NO: 662604 - DNA, 103 bp, Homo sapiens
cagaggagcgtctatacaccacatttctgtttctgttgttggatgcaggtcttctttgtctgtttcttctctgctcttttcacaggtccagttggggtatcag

SEQ ID NO: 662605 - DNA, 289 bp, Homo sapiens
cagtacttgtccatgtggacccatgagcaccgagaccagccgaaagagcgggtaggagtaagacctggatcgcggtgactcatgcagcgaggtttgcctaccagttgccgaaagatcagctggcggcctcgatttatgccctgtgaaagcgcgagctgccttacccgtcctaccggccacactggctcacctgccgtcttgaagactggcagacaggtgcaggcgtagagatatgatctgaaacggcaccatgcccagataatgccggtaccttgtccgacatcgtgct

SEQ ID NO: 662606 - DNA, 379 bp, Homo sapiens
caggaacaacagtggcatcttcaggccagtcagataacttggccaggcaaatacagaggaaaggcagggaacaccctgatttcaaaccacactctggactaggtgaggtggctcacgcctgtaatcccagcactttgggaggccgaggcaggcagatcacgaggtcaggagttcgagaccagcctggccaacatggggagaccctgtctctactaaaaatacaaagaattagctgggcgtggtggcgcatgcctattatcccagctacttggggggctagaggtaggagaatagacttgaaactgggaggtggaggttgcagtgaagctagatcaagccactggattccagcctgggcaacagagcgagactccatctt

SEQ ID NO: 662607 - DNA, 634 bp, Homo sapiens
  misc_feature (31)..(31): n is a, c, g, or t
  misc_feature (94)..(94): n is a, c, g, or t
  misc_feature (108)..(108): n is a, c, g, or t
  misc_feature (113)..(113): n is a, c, g, or t
  misc_feature (145)..(145): n is a, c, g, or t
  misc_feature (154)..(154): n is a, c, g, or t
  misc_feature (160)..(160): n is a, c, g, or t
  misc_feature (168)..(168): n is a, c, g, or t
  misc_feature (194)..(194): n is a, c, g, or t
  misc_feature (223)..(223): n is a, c, g, or t
  misc_feature (235)..(235): n is a, c, g, or t
  misc_feature (308)..(308): n is a, c, g, or t
  misc_feature (342)..(342): n is a, c, g, or t
  misc_feature (344)..(344): n is a, c, g, or t
  misc_feature (361)..(361): n is a, c, g, or t
  misc_feature (421)..(421): n is a, c, g, or t
  misc_feature (497)..(497): n is a, c, g, or t
  misc_feature (515)..(515): n is a, c, g, or t
  misc_feature (526)..(526): n is a, c, g, or t
  misc_feature (544)..(544): n is a, c, g, or t
  misc_feature (547)..(547): n is a, c, g, or t
  misc_feature (550)..(550): n is a, c, g, or t
  misc_feature (555)..(555): n is a, c, g, or t
  misc_feature (563)..(563): n is a, c, g, or t
  misc_feature (574)..(574): n is a, c, g, or t
  misc_feature (596)..(596): n is a, c, g, or t
tgggtgtggcagggtaagcgggatggctgcngccaaggagctgggggagggccgggctcagggctagccctctccgctcttactgttgatctgncggggtcgtccgtngcctntcatgccggcctgggaggcccctcttttgctncccatctgnaggccnatgtcatnctttccctcctgccgctggctctctntgaattccctcttatgctcctgcgctttnttcataaaccanttgggatctccacggtagtgcccatcattcttggtcactgccaagctgccctaagccatccgggtcctctgcnctgctgccatgtctttgccttcaaagaggtcaanantttggaacatgtcagtnttgatgaccccatagtcctcagccgccttcaggaactgagccacctgctccatctgcttnaagaccatggagggtgggttctcgggcaccttcaccggcttggagccatcagggtacagggctgttcaccagcttnctcagaatcacgccattnttcagccaganctggaagcccaagcgccnaangtntgggnggccacancaggggcacantgcactatgatcactccaccanccgctcctccagctcctcgtcatacttcttctcgattt

SEQ ID NO: 662608 - DNA, 419 bp, Homo sapiens
ttatatggttgggctgtgtccccattcaaatctaatccttgattgtagctcccacaattctcacgtgctgtctgagggacctggtgggaggtggttgaattacggggacaggtctttcccgtgctgttcttgtgatagtgaatgaatctcgtgagatctgatggttttataaaaaggagttcctctgtacaagttctctcttcactgccaccacgtgggatgtgacttgctcctttttgccttctaccatgattgtgaggcctccccagccaagtggaactgtgagtccattaaacctatttttctttataaattacccagtcttgggtatgtctttaccagcagtgtgaaaacagactaatacatctgttaagtactaaaaatgtatgttattatcatcaatatgactatacaagtat

SEQ ID NO: 662609 - DNA, 862 bp, Homo sapiens
ggaataaacttataaattactgttccttgttttgattttcttatccggtctgctcccctatcatatcctcatctatttgagaattttatttttgtttacctccctccattcattcacatgctcatctgcatgaagacttaagttcttccaggcttcggacaagtaactggcttctgtagacaagctgtgaaaggtgaagttacacaagagaagcagattgcccaagaacgtcacgtaatttgttatcagaatagaaatggagctgtgtgtcttttgtggcccaaagtcttgactctaactgggttttgagagtaaaaccattgtcctcacctggatccttgcagtgctggacgaaagtcatctgacgggcgagacgggagactggcatgcgtccagttgtcacttgtccattaggagtatgcgcagttaattctatgcaggatccagttcgttgtttgtagggccttctcagctgttagacgaattctgaggttgcactgatactgcgttatgctccctaactgcatcgctggctcggcggaatttgcgaatccgaatttatagtcggtctcagttcagaacgacgcaatagctgtggaattggtaagtatgtctactgcccctgtttcttattagaccggaaattgaacgcctagtagcgttggtttgcgtagcaaagtagggacattggggaccacttctgtgcacaccgcgccaagaactccaccctttttgggtgatttcgcaaaatataagggggtcctctagaaaccaatttgtttgtgaaagaactctgcagttctcaaacaagttggcttacgggaaggggcttggggagcctaatgtaagttctaactcctat

SEQ ID NO: 662610 - DNA, 256 bp, Homo sapiens
  misc_feature (93)..(93): n is a, c, g, or t
  misc_feature (111)..(111): n is a, c, g, or t
  misc_feature (115)..(115): n is a, c, g, or t
  misc_feature (141)..(141): n is a, c, g, or t
  misc_feature (160)..(160): n is a, c, g, or t
  misc_feature (186)..(186): n is a, c, g, or t
  misc_feature (203)..(204): n is a, c, g, or t
  misc_feature (220)..(220): n is a, c, g, or t
  misc_feature (224)..(224): n is a, c, g, or t
  misc_feature (229)..(229): n is a, c, g, or t
  misc_feature (232)..(232): n is a, c, g, or t
accacccctgttaccccaggatccatttgccctcataaaagtgttcaggtacagcagctgaggctgcccttaggaatcaaggggccctttccnaggggcaggaaaaggatntgtnaaaggtggccttcatggtaaagcttnacccaaaaactactccccntttggatgggccagactgactccatnccctgactttccctttnncttccccctgtttgtnaatnaaacnatnaaatggaaggtgctgtgggctgga

SEQ ID NO: 662611 - DNA, 345 bp, Homo sapiens
tgcagaatataattcctcgactctacagatagtatgcctaaacatgaatgtgcccagaatagctatacgtatggtatcttattatcacaaattaaaagttacacatgaggctgggcggaggcggcacacccctgtaatcccagacactttgtgtaggcccaggtccacggagtctgacaccaacctggccaacatggtgacaacccccatctgctactaagaaaaaaatacaataagttagcccggctatgatacgcaggcgcctatttattccagctatcacgggatggcatcaggcaggagaatacgcttgaaaccctgcatggcggaggtcgcaggtgagct

SEQ ID NO: 662612 - DNA, 1149 bp, Homo sapiens
agcggggccggaggaggcgagcgaagctattgagccagcgtaggagtgaacgctgagcctggcctcagcacgctcctaggagagaccaggcctcctgagagtagttctttctacccccatcttctttctccgaatgctcgcgctccgtgctctccatccctgcccaatacaatgcattcttgagatggcagcgtctggactccaggcaagcaccagagaaccgaagccaagccggaagagaggactggagccacacatactggtggcgggagacttgggatgcctggcttctctttgaggagcatcgttctggagcgaggggtgggctttggggtgggggcttgtgctgtcagggaagtacaggcaggtccccaagatggacacattcgtggggcacattccagtgacgtcgcgggtgtggcgggacgttggcatgatagcatccgctagagtgcgcccgtggtccatcgcgtcgtggaggatgagtcagacacgacagtcagtcgagcagcagccagacagtcagcaggcaggccatgcattcgccggagcgcctaacaagcgagctccggccagcgagcgcctggagagccatcgctggcagcttgctcaggctcccgaagccttcaagggagcacgcggccagcagcaggcagcgaagcgaggacggagacgcagacaggcggccgcacgacgacggagcagaagaaacaacgagagtaacctcccctgagtgacatgcatagacacccacaggacacaacatacgaagacgccacgcggccgcgaagcacccgcgggggcacctgcctggcacgtccgtccctcccccaagggcccaacgcagggccccccccccaagttagcgacaccaccaaagaacaccaaaacagaggacaacgcccaaccgaaaacacagccgcagcagcacaacgccaacggggggacagaaacaagacccatcaaaaacccgattagagagcagacacccacggatggtgacctgggcgcacgaacaacacccagaggacaccaagcaacgcgacacacacaaggacggcacccatcggccaacacacggcccgcaccacgagtcaccacgggaaccaggcgccgaagcagccacacagcagagcgcggacgccgagc

SEQ ID NO: 662613 - DNA, 881 bp, Homo sapiens
ggacaaacactgagcttcagcgcctcggtccgtgcgccatggtgccctccaggaagttcttacgttgagggaaactggaatatgagactgggcggaaccagcagtctgggggagctcgatcggcactcgtgaagctgcggacaaggttgccaggactcgacgatccgaggtgtctttgtgtggtcctcctcatacctgcacgtatgatcgacgttgccgctcggataataagctagatcccaaggattggtgtggtgcgcagaactgctacaaagtgactaatggggcttttactggggagatcagcctggcatgatcaaagactgcggagccacgtgggtggtcctggggcactcagagagaaggcatgtcttggggagtcagatgagctgatgtgggcagaaagtggccatgctctggcagagggactcggagtaatcgctgcatggggagaagctagatgaaagggaagctggcatcactgagaaggttgttttcgagcagacaaaggtcatcgagataacgtgaaggactggagcaaggtcgtcctggctatgagcctgtgtgggccattggtactggaagatggaaaccaaaaggccaggaagtaacgagaagtcgaggatggtggagtccaacgttctgatggggggttcagagaccggtttattaatgggggtctgggatggggacctgaatgaagtggcagcagtgattgatggttctggggtgggttccttagcgattgggattataggcaatgagcatcttttttactttgagagattaagcgaaccaatggctcgatgtgaggggggtgggcacaggtttgttccgggggcgaccatagggaaagtgaaggggaaaaataggcgaatgaa

SEQ ID NO: 662614 - DNA, 217 bp, Homo sapiens
gtactaagagatgtatctccagcatacctcctcctcagcctctttctggtgcttcagcttctggtgcttcttattcctcatgatcacatcttccattgggtcagccatctcttcatcttcgccatttgagacgttccctctttcctccatcttgttgccgactgcctcctcccttattatcagaccggcacatcgaagcccaccttgaagcccgtta

SEQ ID NO: 662615 - DNA, 1003 bp, Homo sapiens
acagtgtctcgcacccgaacatgggctccatcaagtcgcatcctgccccgtcggtcgccgcatgggagctcgcccacacgctcagttatcctgagccccaggtccagatctggctctcagaaccgtagcatccatggcgcagtcaggcgcaccaagcttgccctaacgcccaggatgcgatcctcgaattctggcctcggccttctgcctggcccacccagggttagctacaaacctcatgagcccacacctgccaggtccccacccgtacccgagcgacctccacacccgttccctcggtccatagtaatcgttctagagatctgtaaccagtttgctatcccttacctgctgattctcttgctcgttctcctgcgtccgttcctcagtccacccctccccatctggaccagtaatagacgaccggtgacggactccaaattggtaaaaagcaataatcggacaagaagacattatccggttaagagtctgtcgctggttgccacccaagagagatactagttgtccaggatgctggctgtgtggaactaacctgctggcccgagaacaaggctgccaggctgtggatacctgagaaggactacttggtatcaaatacttgttgagatggctacagtcagctagctggacagcccatgctgaactggggacatacacttgcatctttgttgaaagcagaagaagtacagacccgtgtccccatccttgccttacctcctgcttcccccatttaaggcagctaatcgcaagcttcgtagtttcaactgaatacaatgagtagacattggtggacctcgacaagattatttcaagttcttaagatgtgtagaccttgatggtaggtgtgacatgttagtttattctgaatggcatttatttaagacactgttacagagataatgttgtcaccttctggggcacggtctttggggagaggggagtgcatttagacttatgtgtaacctgcacaggttgtatgtgg

SEQ ID NO: 662616 - DNA, 982 bp, Homo sapiens
gagagagaactagtctcgagtttcgatattattttcactttccatttttttaaaaagctacgaaaaatgagcaggtggactgtggtttccaggaattggtggcgtctcacgcttcttgtgcttttcccttgggggcctccgagcggctggggttgggggactgggcaggaggctcccgtgtaaatcattgggacttgggctggggcaggggctggtgttgggcaaagctggggtggtccatggctgggaagaacgcatgggtgccccttccagacgcagccttgtggagactcagctttgtgcccccactcccctcatcacaagaacaaagacaatgggttaaaaaccagaacataatgcccagaatggggtgtacatggccattaccagaatctcaaacaatgggcaggcttcaaacagggaggcctgtggaaccctctcccctacgtctggagctgaggggacagggggagctgaagaacaaagagaggaaagacggaaaaaaaaggcggaggggaaaccagagagggaagccggtgaacataagtaagcaccgacatagtatacataaagggagatagagaaggaaaccaaagtcagagatgaagcacacatcaccgacagagaccacgaaagaccctcaaaaagaaaggccaagcaaggaccataacaggaaggcaactagagagagacagagaacatccggataacagggaggaaaaaaaacaaagaaccgtggcaacgcaccctagggaatacaaaggggacgacacaatgaaacgacgccggggacaagaaccatgcactaagaaaggcgtcataatagcagactaaaatacaaaggagtcccaaaaaaagtcaaccacactgggacagaacgcacgcgtagcaacaaaaaacatatagtaaggcccatggtggaaacaaggggggagaagaaagaatgggcacgggagaactgaagaaaaaacatagcccgcaa

SEQ ID NO: 662617 - DNA, 182 bp, Homo sapiens
tgtatatctctccagctgtactgtagtgccctgcaggctgtttatatgttcacagttacttttacctttttctaaataacagtcatttaatgtagaatactgctaatgggactctccgtattttcattttgttgaagggctgattgggatttccatgttcttattaaaaatctaacaaatca

SEQ ID NO: 662618 - DNA, 116 bp, Homo sapiens
aagatgcccagtactgggagaatctgcacatgtccccaggtggttttcaccaaggggttttcaaagacaacactgggagtacagaatataaagcccccagagggatttaatatata

SEQ ID NO: 662619 - DNA, 156 bp, Homo sapiens
cttttggagttgatttccagtttattccactgtggtctgagagagtgcttgatataattttaattttcttaaaatttattgaggctcattttgtggctatcatatggtctatcttacagaagagttcatgtgctatatgaaacttctaaaactagg

SEQ ID NO: 662620 - DNA, 84 bp, Homo sapiens
cttcagagccaggacacagctcagcagtctgtcatgactctccatgtcttcccattttcctgcggcctgatccagggaaggagg

SEQ ID NO: 662621 - DNA, 518 bp, Homo sapiens
ggtatatcaggagactcccaattccctccatctccagctaacaactccaaccccgtgaaggacacggatgctgtgaccttcacctgtgaacctgaagacgcagaacacaacctacctgtggtagagtaaatggtcagagtctcccggtcagtcccaggctgcagctgtccaatggcaacaggaccctcactctactcagtgtcacaaggactgacgtaggaccctatgaatgtgaaatacagaacccagcgagtgcaaacttcagtgacccagtcaccctgaatgtcctctatggcccagatgcccccaccatttccccttcagacacctattaccatgcaggggtaaatctcaacctctcctgccatgcggcctctaatccaccctcacagtattcttggtctgacaatggcacataccagcaatacacacaaaagctctttatccccaacatcactacaaagaacagcggatcctatgcctgccacaacaataactcagccactggccgcaacagg

SEQ ID NO: 662622 - DNA, 502 bp, Homo sapiens
  misc_feature (107)..(107): n is a, c, g, or t
gactttgggtagagggtatgggggatgatttttttctttggagtttggggagaaatattggtttaagtaacttctaattggccatcgagtaaaccgataagtaatgnaaggactccagggtgccccacgtttctgccaagtgaacaggggctggataataccaagtatggtggtaatttataaaatggaaggcaacccccgctccggccgcccccaatctccccatggccatagagcgctgcacatggaccccagctctgacttctcattacggggctgaaagtcagcccacgtcggagcggtgaggaggagccacagcacagggggtgccacctcgaggtcggcacaggaggactgggcgctgccatttcctaccccggccatttcccaccccggcttcagcgaaagggactctctaacagggcagtcacggtggactctattctgaatttcctccctgggggaagaagggaaccaacatttatacctgactagagtggcc

SEQ ID NO: 662623 - DNA, 124 bp, Homo sapiens
atggtctggggatgagatgtccctcatgggtgctgagaacttagctagaggtactctctggcacgactgcatcggcctgcctcagtcgagaatgtgggagtgctagggggcgggtacgagtcga

SEQ ID NO: 662624 - DNA, 969 bp, Homo sapiens
  misc_feature (119)..(119): n is a, c, g, or t
  misc_feature (225)..(225): n is a, c, g, or t
  misc_feature (227)..(227): n is a, c, g, or t
  misc_feature (289)..(289): n is a, c, g, or t
  misc_feature (303)..(304): n is a, c, g, or t
  misc_feature (315)..(316): n is a, c, g, or t
  misc_feature (320)..(320): n is a, c, g, or t
  misc_feature (323)..(323): n is a, c, g, or t
ggagttccgagcgaccgatggagatggcggctgcggtgagtgacggacggtggaggcccagagcccgggctgaagggggggacaaacctgggtgcccgcaggagcccggcaggtactgngctaaaccctggggagacggcgaagtgaaaacatatagagtctgtgccctcccagattttacagtcttacttggtcacttcacgtatgtacctgcggtttataaantngagatgagtgctgtgaaggagaagtccattctgatgctctgagtgtcttacaagtatcaagnaacttactatatgnnggttgaataanncaantcnaaggataccggaggcattcaagtgtaacaacatcttctcgcttgtgattaagctacttcagcaccacttcccccagttggcctgtaacgtgtggccattatgaacttactgaagctcggatcatttggaatgaatgtaggagaattgccaatgggctcctccgtactccagcagcaggaaacctcgatccagggccaatgaagccacttcctcaccatctgtgtgctgcttaagctaatgctgcgggaaccgtggttccttgggaggaatcaagctgaatcttggcatgagattcctgccttcctagggtctgagagcggtgctgccatgtgttctctggactacccagggacgtgacggagggctacctctgacgttgtgactgaaggaattgcagtggtccaatgaggttcagtcacattagaagggagacgtcgggggaggacgggatcgccagggcattcgcgtctgttcgacggtcaaggcagagcagtggaacaacgggaaccgcacactggacaaggaactttcctaggggcacctgggacgcgtggaaaacaccaacacagaacgtggcactcacgtctatttttcttctcgtctctcctcatcatgccataagagaagagagaaaggagaaagaacg

SEQ ID NO: 662625 - DNA, 804 bp, Homo sapiens
  misc_feature (119)..(119): n is a, c, g, or t
  misc_feature (225)..(225): n is a, c, g, or t
  misc_feature (227)..(227): n is a, c, g, or t
  misc_feature (289)..(289): n is a, c, g, or t
  misc_feature (303)..(304): n is a, c, g, or t
  misc_feature (315)..(316): n is a, c, g, or t
  misc_feature (320)..(320): n is a, c, g, or t
  misc_feature (323)..(323): n is a, c, g, or t
ggagttccgagcgaccgatggagatggcggctgcggtgagtgacggacggtggaggcccagagcccgggctgaagggggggacaaacctgggtgcccgcaggagcccggcaggtactgngctaaaccctggggagacggcgaagtgaaaacatatagagtctgtgccctcccagattttacagtcttacttggtcacttcacgtatgtacctgcggtttataaantngagatgagtgctgtgaaggagaagtccattctgatgctctgagtgtcttacaagtatcaagnaacttactatatgnnggttgaataanncaantcnaaggtacaagagcatcaatgtaaaaaacttctgctgtgtgggataaggtacttcagacatttcccccagtggctgaagtggcacatgatttatgaagtgggctcattgtgccacccaaaaacaaacacacaaacaaataaaacattttggggggcggcctggggcccctgggagaaaaaatctttttctgaaaccacatttctggtgggggcgcgcagcgggcagtccgaagaacgtatggacactgcaaaactgtggcgccgaaagcgttgcgtccccaaggaggacccctgggggccaagcgcaagcgggcgtggggcttctcccacgcaataaaaaaaaaggccgcggggggacccacagaggtgtttcgagcaccgactcccagagggaggtccgacagcactacggagtccttcacaccgggggccaaggaagcgagtacgtacgagaccgggtgagacggaaacgcagccagggc

SEQ ID NO: 662626 - DNA, 117 bp, Homo sapiens
agcttcacctggtcctagtcaaggaaagaaagtctcaaggagttggcagtggacaagatgaggctgatgtagaccctcaaagccctccaaggccagaagtaaaaattaccagtccag

SEQ ID NO: 662627 - DNA, 542 bp, Homo sapiens
cgcaaagggaggatacgtcaggagtctgtgctatgaatacgaggggacagcactggagagagaggtctcgggctggctccccgagggcaggtcttttcggtgtgttaggaaggatgtcagagataagcatgaagcatgcgaacatcattacatgtgtgggacagagctcggggtgcatgggcacaagtgaaaaatcaggctgatacatacatcgtgcataataaataacacctatgcccctcctgggtggggattttaccattctaatgaggcaagaggtaaagctcagccgttcttctggtcttgtgcacaatgccagtgatagaggtgactcccgtgagtaaggtttccagtggaacccttgtaagcttggtttctccagggtctatggagacagtgggggtggtggggcgagctcaggtgcttagctgatgtgcatgggaagacacatcagtgggaatgggccaagttcctatgggggccaagtcctgtccttatgctgtctcaagataaactggcaatcttagaggacttcctggaac

SEQ ID NO: 662628 - DNA, 186 bp, Homo sapiens
cccctgtgacactagaaattgtgtatgccttaagtttttgtagagacagggttgtgatctgttgatcaggctggtctggaactcctgacctcaagtgatccgctcacctcggctcccaaagtgctgggattacagttgtgagccaccgcgcaccgccaagacttttcttttgccatttcccaatcg

SEQ ID NO: 662629 - DNA, 423 bp, Homo sapiens
tgtgcgaagacgtgtttgcgtacgtgcttgtcctcccggcgtagcccaccagtacttggcgttcagaaactctaaggctcataacccatttgctgggagcagagacgagccaggagctggatgttggagaagtatggtctggatgtcggagcagagagactcatcctcaaatgtaggcatatagtttttatcatcctctgcaagagaggagtctggcagggatggctggagaatctcaggtgaagcattaccttcttgttccgtcccctttccagatccctttctcactgagagccactttcataggcaatgaaatcccccacatttaccaccttcaattcgtctgtgagaccttattcctcctggactccagaccaaaactccgtgtgccacaagagtgggcaccaaatccccggggtaccg

SEQ ID NO: 662630 - DNA, 119 bp, Homo sapiens
ggttcggatgtaaatgacgtgaggcaggagtcagaggaggttagttgtggcaggcggggagccagtctgcagctgggcctgaaactgggcaagctgctcaaggtgatcttctgcacgat

SEQ ID NO: 662631 - DNA, 186 bp, Homo sapiens
ggagctgcccggaggggaacctaggtcccaggcctgccatccaaatcctgactcctctatactctacatatgcactaataatacctatgaatggagacattattattattagttccgcgcgagtagtctgactcctcagactgggtatctagcctcttctactcttgatatcctcccatgaaactt

SEQ ID NO: 662632 - DNA, 354 bp, Homo sapiens
gccccctccccctccttccctgctccttcgctctgcaggcccgttctccgactgccgcggacctttgcgcgccgctgccaagacatcacacgataccatgcgaagcagacaccataacgcgcctgcagcagacggagcccacatcaatcatgacaaagaaacagaacagagcacacacgagaaaaaaagagaaagacaaacaacacaagaacacaaagaagacaacagacaaccaccaatagaacaaaaacagaacagagagaaacacaaaacagaggagaacaacagcagaggaagaagaaagaaaacaaagaacaacaaaacaacgaaaaaggagaaaaaaaaagaacacaa

SEQ ID NO: 662633 - DNA, 332 bp, Homo sapiens
gccgcccctactgtgaagtgaggagcccctctgtccgggcaccaccccgtgtgtgaggtgtacccaacagctcattgagagcgggcgatgatgacacgtggcggctttgtggagtggaggtggggggaaggttgggaaaagattgtgaaatcgggtggttgccctgtctgtgtataaagaagaagacatgggagacttttcattttgttctgtactaagaaaaattcttaccctataacttaaagtgttataaaaaaaaaaacttcagttttctaattatatttttgtaatcagttttcagacattaagtgactgtatcatgttcgggttat

SEQ ID NO: 662634 - DNA, 433 bp, Homo sapiens
  misc_feature (52)..(52): n is a, c, g, or t
  misc_feature (81)..(81): n is a, c, g, or t
  misc_feature (104)..(104): n is a, c, g, or t
tgcagcgaagtctctgccatcgccaggtcctgattcaccttgcccaaatggngctcgaacacttcggtaaaacccttgggntgcaaggtgctcgacaggtcagncgaggctggcatggcctcgagggcctgagccccatccagtgcgcccattgctgcaatcgattcgatcattgtcctgctccaatttccaatgcgcgggtagccatggcttttgctgcctgcatggctgccacgttggcttcataggctcgcaaagcctggttgatgctcatcatctgctcgaggtgattgatgccaggttgacgcaccatgccgttcgcatcggcatgaggatggccaggctcgtgcacgaggcgcggctgcgtgctcaagtcgggaaccaccgacgcaacgacgcccacttggcccatggctcgggtgaagccctgcgc

SEQ ID NO: 662635 - DNA, 287 bp, Homo sapiens
  misc_feature (53)..(53): n is a, c, g, or t
  misc_feature (73)..(73): n is a, c, g, or t
  misc_feature (81)..(81): n is a, c, g, or t
  misc_feature (113)..(113): n is a, c, g, or t
  misc_feature (118)..(118): n is a, c, g, or t
  misc_feature (128)..(128): n is a, c, g, or t
  misc_feature (130)..(130): n is a, c, g, or t
  misc_feature (132)..(132): n is a, c, g, or t
  misc_feature (142)..(142): n is a, c, g, or t
  misc_feature (162)..(162): n is a, c, g, or t
  misc_feature (164)..(164): n is a, c, g, or t
  misc_feature (213)..(213): n is a, c, g, or t
  misc_feature (271)..(271): n is a, c, g, or t
tctgggcggggctagtctttgcggggggcgggtggaggggggtatatatatanatatatatatatatatacanatacacangtgtatgtgtatatatatatatacacacacanatgtntatatatatntntntgtgcgcgcncccccccacacacacacacncncgcacatgtgtgtgtgcacacacacacgcgcgcgcgcacacacacacanatatgtgcgcacacacacacacacacacacacacacacacacacacacacacacacanacacacacacacacac

SEQ ID NO: 662636 - DNA, 314 bp, Homo sapiens
  misc_feature (146)..(146): n is a, c, g, or t
agtgggagggatgtgcccctgaccattaacgactgtttttttttttaaagaatggagttgttggggcaggacatgcccccaatgtgaaacagacaaaatgcattacccctgtagtgtaaagtggcccctatgaatccctatgtatnaaaggagggaggcaggctgcagcttcagccccagaatgggggctatggaagacagcaggagctcatttcctttgcacattttggctgttagacctgtgtgtgtgtttaaaaaaaaaaaagtcagggctccctttttgtattttaatattaaaaatgattcccactgga

SEQ ID NO: 662637 - DNA, 231 bp, Homo sapiens
tttttctttttctttttttctctcttttttttcccccccccccccccccgggttggttaagcccccgaaaggggttttttttctttaaataaggggaaagggcttaaaaaaattccggggattttccttccgcccctttttgggattccgaaaaaaatttttgggggggaatttgcccccccaaaggttttaagaaggtggtttccaaaaaaaggcccctttttgttttga

SEQ ID NO: 662638 - DNA, 419 bp, Homo sapiens
gccagcttgggctgttcaacctgatgcagaccagagtcaacggcgggttgcattgggtgcaatgcaatggaccataaattctcattttttgaatgctctaaaaatgatgatgcatggatcgtggtccacgagtagcggcgcaagttggaatggcaaagcattttcattcccggtgagcaaaggcagcttgagttccactgcgcagaaggcagatgtgaagtactccggttctgttcattttaccggtgttggcggaagaatggatcttactctcgccgaccctgagattgtcgttaacaatggcgatgatcatgtgattatgtccgtgaagtccaagactatggtcgggcagtcggttgattatggccgtataactttcgttgatatgaccggctctattacgcagggtcaaaacgatg

SEQ ID NO: 662639 - DNA, 190 bp, Homo sapiens
ctaggtaagagtttgttcccgtggtgcgggagggtcaaggccacacccgggaaacctagcggagggtaaaggttcgcgtctttgggttgtaggaccggcaactttctccggtttcctcgggcggatggcggcgtccgggaacgcggtattggcccagaaaacctgtggaacttgcgccaacaacacttca

SEQ ID NO: 662640 - DNA, 225 bp, Homo sapiens
tctgtatatctactaaggctttgtatacgacccagagatacacgatgcgaatttagttttgcaagaaagggtttgtctctgtgccactctataattgttttgctacgataccactgaaactcttcgatcaagctactttatgtaaatcacttcattgttttaaaggaataaacttgattatatcgtttttttatttggcataactgtgattcttgttgggagctt

SEQ ID NO: 662641 - DNA, 181 bp, Homo sapiens
agaaaaaaaaaagtcaatgtgggtagaaaacttgaaattctatttattaagaaattagtgctgccaggccacagtagctcatgcctataatcccagcactttgggaggctgaggcagggattgcttgagcccaggagtttgagaccagcctggggcaacgttgcaaaaaccctgcctacaa

SEQ ID NO: 662642 - DNA, 350 bp, Homo sapiens
gatgacatgatacaatcgagctcgtgtacctgtgggtagcatcaatacggaagggcccagcgttggggagagcccccagttgagaactagtatgaacaattatgtatgaccactgttagagactgctaatcatcaaacaacctgtgtgctcaatgatccccctacacacgtagcacccttcagcaggaccctatgaaactttcctccagcccttgcctctttgcaggtagccccttctctgctgagctgcccactgcaacatattttcacaatttctctaataaatctgcccttctttacctacaactatcttggtaaatggctttaccacctgcaaaactgaccctagg

SEQ ID NO: 662643 - DNA, 151 bp, Homo sapiens
atgttggatcatgacatcccgatggtgcagccgctattacaggttcgtttgatcaaggattaaagtacctacgtgatcagagtacagatcggagtaatccaggtcggtttctatctactgcaaattcctccctgataccaatgactagaaa

SEQ ID NO: 662644 - DNA, 465 bp, Homo sapiens
tagaggactctcccttagaagtactctgctaatatacagccaacagcccacatgtccacacctacaccatacatcctagctccaaatagtaactcgggggccgataccacctggttacaaactggattgttgttattaaaggctcctattggggctcccaaaagatttggccaggccaaaatctgccagttttagaactccattttcatctagcaacaagtggtttggtttcagatccctatgtaggatccaatgttgatgtaaatattctaatccttgaagagtcatcaacatgtaggcttggatgtgtgatggtgtcagaacaagactattatcctttattataacctctagatcagtttccataaaatcaaagacaaggctaatattagatttatgtccaaaagcatcaaggagcaattatattgggatgacttagctcctgtaataattttacctctctta

SEQ ID NO: 662645 - DNA, 1199 bp, Homo sapiens
ttcgctgaccagtaccatggccggtcggcaagaacaagtcgccttaacgacaatggcggcaagaaagggagccaacgaagcaaagtggttgatccagttctcataagaaaagattagtgtatgatcgtgaacagtcaccgtgcatatgttcagatatagagaatatgattgcgaaatgacgcgtcgctacgagccgaggtacccgaaaggaacccaaaacttgcagtctgcatggtgctcaagaggtcggtgtgtcttggagagtgacgtgcttgcatgatttgccagcacatgcatgcataggttgcgatgttagacacatattcaaagacctggagttcactggacaccatggttccagggctgagaagaacttgcctgcacgtatagctgtccatggaccagtggcaatccttcaccgcggtggactcaaacatgtgcttcctcatggctcgaagagacacactggtcaggacaacatgcagttgcacacgcatcgacagctctggaaatgctcaagagaactgtagcctgagtgcggtatacatatgccatgtcgggtcgtgatatcatagtggtgcggggtctattagcttacaacaaagacgacagaccagagtccaagagtaccgggagaagagccctcgtattacttggcatctagcaaaccaaaaccgaggctcgcgcccgaaaaagttccggaatagaacaggactgactgcggacacacgtcaatcgaaccccggcactaaggggttgcaagaacaaagatgaagcgtgtgaaacacgaacgggtggggtccaagtcgaaacttggagttccaagaaccaaggcactttggggcccccactgaccattagaaacgagggcctatgcccaaaatcttaattttgatgtcccttcctacccgatggaatggtccttggcggatctacgaccgctcatggtcagcccaacatgggcttggacacggacaagaccccccaaagggtttctcgccacatttgggggcaacaaaaggccttccaatgtgggcacgcacctctcccataggcgctgcaagagggcgcacacacgagtctcactaggtgcggcaccaacgggcaactggggtgtgacacagtatcgcaccgaaggtgtgcctcaaaccatgttctggccacctgacaagctctgctatctggcgcttatttgcagc

SEQ ID NO: 662646 - DNA, 1484 bp, Homo sapiens
  misc_feature (1)..(1): n is a, c, g, or t
  misc_feature (977)..(977): n is a, c, g, or t
nccgcaccagatgtggggcgccacacgaaatgtgtgggtggcgccgatagataagggcgcccaccacaaagggtgctgatgcccccgaaccactgtagtggagcggtgcactcccgagaaggtgtaatctccccccccgggtatataggggtagggccgtgtccaacagcaccaaggacggtcccccttctcaaccaggggaatagaccacaggtgtgtgcccccacaggggcaccaatgggccacaaaaagggttggtaaaaagaaaggtcccattgtggaggccgctctccacagtgccgcccccctccgacgtttcccccgaggaggtgtgttatctcctccaacacttctccacaaagggggctctcgtgtttgtgtgcggcgccaacaaattgggggagaagagagacccttgtgacgccacaacagagatgcgccgcggaaaattctcggggtgcgcccccaggtggataaattatgcgcccctcttctcctccccacggaagtttattccgccccaaatatttgtgtgctcacgccccccacagaaaaaggagtatctcccgtggggggtgtgttcagcacactggtgggccccacaccccggcgcgggcagcgtgtgcccaccgccaccatgagtgttcagcacgttcttgtgctttgtgtttccgcgtaggtgtcgccacagaggacagcacaatatggtgtcctcggttttgtcgtgtctcccaaggggatatgccgccgcgcctcgcgcgcctcgtgttgtgggggcgctcgcggcggctctcttctggtggtgtggagaaataatgtgcaacaccacgatatataatcgtcgttattatggaggacacaacagagactagtgtgttggtggggacaccacccacaagtgtgtgagcatattgtgttgtgcccacgaagtactctgtgatatatatagagatagtgtaccacccacggcacacacncgtgtctccgcccacataccccgtgtgggcacacacagagggagacacacgcgcagcacgcgcgtgtggtgtgtgtgtgtctctcctgtacacccacgcccaggtctcaggcgcccgtcctcagagagacccccccctttgggggtctttgtctccccagatctcacacacagcgacaggcgctctcctctccacaggagattcgtccagacccccacatattatatatatgtgtgaagagagattgagagaatatatctcacaggagacgcctgtgctcgccagaccacgccattgtgtcccacataaaggagtattccaaggtggtccccgtgtctcgtgtgttccctttagaagatgaatatctttgttcttataaagattgtggacacacatagtttaggaagcacccttgtggaaccatctttagacccctgcgggatatccagcttcccattgtgttctctttttttcagcgaacctgaatttgatcccgactcttaccca

SEQ ID NO: 662647 - DNA, 1197 bp, Homo sapiens
  misc_feature (494)..(494): n is a, c, g, or t
  misc_feature (551)..(551): n is a, c, g, or t
  misc_feature (554)..(554): n is a, c, g, or t
  misc_feature (616)..(616): n is a, c, g, or t
  misc_feature (628)..(629): n is a, c, g, or t
  misc_feature (643)..(643): n is a, c, g, or t
  misc_feature (647)..(647): n is a, c, g, or t
  misc_feature (651)..(651): n is a, c, g, or t
aggagtctcccatcactggaacaaggctataagagcatgatgagaagtgacttcatctctcgacatcttagccattttgttgcgagccaagtgcatggcacagttgtaacatgcaacacagtttgggtgcgcagcagctgttaggctccaggcaggctgctaggttccagcaggctcgcctgtattcatcatggcgctttccaacagttcgtcatcgcagaatgttcactcagagatgtacagtattgctgcatagacacttacatcagagatcccaagaaaagggaatttttatttaatgcaattgaaaccatgccctatgttaagaaaaaagcgagattgggccttgcgatggatagcagatagaaacatctactattatggggaaagagtggtggccatttgcatgcatgtagaaggagttttcttctcaggatcttatgctgctatattctggctaaagaagagaggtcttatgccaggactcacttttnccaatgaactcatcagcagagatgaaggacttcactgtgacttgcttgcctgatgtnccnatacttagtaaataagccttcagaagaaagggtcagggagatcatgtgatgctgtcaaaatngagcaggagttnnaacagaagccttgncagntggnctcattggaatgaatgcatttgatgaaacagtacatgagttgtagctgacagattacttgtggaaccttggattctcaagaggtttgtcaggcagagaatcctttgattttatggaaaacatttctttagaaggaaaaacaaatttcttgagaaacgagttctcagagtatcaggcgtattgcagtctatggcatgaagaccacagataacgtcttcaccttggatgcagatttttaaaaaacctctcgttttaaaactctataaacttgtcataggtaaatagtagtctattttcctctgcttaaagagaaattttaagtatatccttctaaaggactgggggtttgcctcaaaaggacaatccaaagacctatactaagacaagtttgcatttatataattttcctgtttaacaagcaagagtgtgacctaaaatgcttagtcttgtcactggaaacttcacagatggcttatcgtggttacgaagcctggggcgaggggcccgacattggagccaagggtcctggccttactccagtgtgcgc

SEQ ID NO: 662648 - DNA, 510 bp, Homo sapiens
tcatagaatggcctgatagacaaagacttataacaggggatacttgcaatcctgttgacagagaggactaagtataagatatatgtctattgaatatgtgcaaagtagtcctaggcaagagttcctcagcatctttggtcaactgcacacatttcatcagcaagcaatcgtaaaactaattttgttagtggcagtgtttggttacttcagtagggccagacagtaatgctgtgtggtcagcaaacccatttttttttccttcagataggatctcacttggtcacccaggctgaagtgcagtggcaccatcatggctcactgcagccttaacctcccgtgctcacgcaattctcccgcctcaagctcccgagtagtagggtctacaggcgcatgtcaccacgtctggctagttttttaatttttatttttcgtagacacatggtcccactatgttgctcaggctggtttcaaactcctggatgcaaggtatcctcccatctttgcttctca

SEQ ID NO: 662649 - DNA, 233 bp, Homo sapiens
accaggctgattattgcagaaagaggaagacaatagagaacaatggacgcaataacatggactgtacatgagaagtggtatgcgggtcgtggtggctcacacctgtaattctagcactttgaaagattgaagcagtgtggatcacttgagtgtctggggtacgagagcagcctggccaatatggtgaaagctgtctctgcgtataaatacaaaaatataggcaagcatggtgg

SEQ ID NO: 662650 - DNA, 1208 bp, Homo sapiens
tgggatctgtctcttccttcgcctcctgcacacttgggagccctgtgtgactactctttcactggacccatgttgccctgtgatctgtagtgtcctatggtggacgcacagttaattgtgccaggacatcctggaagctgggaaatgatatgtattacattaacctacccaccgtagtggaacgagacgataattcccatctctttacaacctgactagcatttccaacacgtaaagctgtgacgattctgctatgaaatcacctctacaaacaaatacacaaacagacctgggagacatgctacactcattactgctgagtgaaataggcatcatagctgggaaacggatacacaagacccaggctgtaccctacatatgtaacctacctccgaacatcagttcatcagtcaatcaagccaatgtgagagtggaggccattgtataccctatacattcttggtgcactctactccaagataggaaaacggccagtgaggtcctgttaaacaggatgcacatcagaaggccgggactccctaagcactatgagacgtgctaaaccagaacaggtgtaagaacaatcattcacacgacatgacgcactgcagtggagggacatccaaacctggacctacaatccacttactgcaaatcctcaagacccacattcctgcaggggcacgtggcaaaggaaacacgtcatcctggccagggttccaaacttcgacgaacagacgtgttgagcactctgcatgtgacctcagtctgcgacatctacaattcggtcgaccacgacctgtcacaagcgccgaaacatggtgcctcgttgactcattcccgtactaacggtagagattcgagtacccaacacattataccacatgcgcacggccgaccagccagacaagcgagagacagcaagaaggaagaagccacccggaaaacacgcaccagcgacagcgcgagccgcgggcgagcgacgatcggccggcccgaggcagggggaaagcggctgagaaccagaggacgatagcagcagggagcagcgagggcacaaccaaggaagaagtaagaccgccagcaagataccaaccacgcaaaggcacaaccacaagaaagcgcacaccacagccagagccgcgaggaggagagagaggagacgagagcgggggacggacaacgaacgcaacagaccaagagcaggg

SEQ ID NO: 662651 - DNA, 462 bp, Homo sapiens
atgggtggttttgccatgttggccaggctggtctcgaactcctgacctcaggtgatctgcccaccttggcgctggggttgcaggtgtgagccaccacacctggtcacaggtgcagttttgttacatggatatattgtgtagtggggaaatctgggcttttagtgtaaccatcaccaaaatactgtacattgtacccaaaaggtaattgctcatctctcaccccctcccacctttccaagcctccagtgtctattattccacactccatgaccctgtatacaccctgtttaactcccacttataagtggaaacatgtggtatttttttttgtttctgagggttctttaaaaatctttattttcttatttttttctgagttgtttcacttaagataatagcctccagttccaccccgtcgggtggagcgctccacccgacggggtgggggaaagactgaggcag

SEQ ID NO: 662652 - DNA, 250 bp, Homo sapiens
tctgggaagggggtggcactcatgctgagtagcagaggtatgtagatacagatgtgtgtggttactgtaagtggaattcaataattttatttattgtattttcttcgctcactttgttattgtgtattgcgttattgtctaggagtgcatgaaatcatctggaggagcatataaatacaaatggctggacccctctcccctctataaacgctgatccgataacacaaacgcctggacccctcttccccag

SEQ ID NO: 662653 - DNA, 284 bp, Homo sapiens
gaaaataaaggttatttgaagtgttgaaggtataaaaattatttgataaacaccccaccgaattccaaacgtgctgccactgtctggcctgtgtttcgtcagtggtaaaaatggtcgctgaaaggccgaactcactataatagccagttccagtgcatgttctgcatctctcgcaaatggtgattgccgcaaaacgggccaaaaacatttcttccaaacgcgtcatttctgggtaacattcgccagaaacgtgcatagtagtacctgccccagcatcttttccg

SEQ ID NO: 662654 - DNA, 454 bp, Homo sapiens
atcacatctgtgtcaggttagcaaactatgacctggggccaaatctggctcaccgcttgttgttgtaaataaagttttattggaataaaccatgcttatttacttatatattgtttgtctatgattgctttcatgctgcaacaagggtaagtagttgtgacagagacgggctcaaaaaacctaaaatatatactgatagagctcttaaaagcaagatgttgtcgatccctggtgaatgtcagtggctcctttatcattatccagctattcctaactgccctgcatgtgctgtggtgaaacagtgttggtttgaactgtaactgcttaatagctaggaaaccctaaattttctgagactcagtttatctataaaatgaaggttaaaaatacatttttaagcttattgtaaattcattgtagatgctcaataaatgttaatttccttcctgacaaa

SEQ ID NO: 662655 - DNA, 452 bp, Homo sapiens
agtatgttgactctggagagaagtattattaagagaaatggagatcagcacctcggagccacacacaggtctctgatatcccttttctgttcttctttctgccctaacggacaggcttgcagttccctacctctgaccaccatcttttgtttctgatcgctgttcctccttttctttctgcattgcccagaccacactagagcagaggtgtctttgtgctcctagctctaatgcaaacctcacaaacactgaccattcagtattcagataaagttcttagctaacagaatagctaatatagtcagtagaaataaccctgagggagttcgagatcatcctggctaacgtggtgaaacctagtatcaattaaaaatacaagaaattagccgggcgtggtggtgcacacctgtagtcccagctactggggaggctgaggcaggagaatcacttga

SEQ ID NO: 662656 - DNA, 153 bp, Homo sapiens
ctcatgtccactggaaccgccacagctgcttctaacacaggattttgaggttgcttcagcctgacgctttttttgtgctatctcctaatagcaaaagaccctccagcgacaaccagtatgccaagctccgtgtgcacaccgacttcgaccttg

SEQ ID NO: 662657 - DNA, 194 bp, Homo sapiens
ggggacttgcggctcctcaggctctgagaggccctgtgtgacaccggtctgtcgtcccggcctcccagtggtctgagggaccgtcgtctcgttgtaggccttaggctctgtcttgtctctccggtaggccttgggcggttccttgtatgccgaaggcggctctttggtcgacttagtccggctgcggtgggcct

SEQ ID NO: 662658 - DNA, 143 bp, Homo sapiens
ccatcgtccaccggcaagatgcttctaaacggactcagcagatgcgtagcattgctgcagtgggtaattgagaatagaaatgtgcccctggcaaatgcacacacccttcatgcttagcctcacgagaactggaataaggcctt

SEQ ID NO: 662659 - DNA, 236 bp, Homo sapiens
gaatgactaaatgagaaagttcagagtgatcagaggacctgctccagtgtttaccttcacgtgagtgtcagagctgacactcacaccctggtctgctgagcctggccgccgagcctgggactcccatgtttgcctcacccatactcttccaggtgcctggggcaactgctggggctctggcctaatggctgttcctgttatgagggtctgttggccggtgtgggtctcttggccag

SEQ ID NO: 662660 - DNA, 1066 bp, Homo sapiens
  misc_feature (53)..(53): n is a, c, g, or t
  misc_feature (90)..(90): n is a, c, g, or t
  misc_feature (95)..(95): n is a, c, g, or t
  misc_feature (103)..(103): n is a, c, g, or t
  misc_feature (133)..(133): n is a, c, g, or t
  misc_feature (145)..(145): n is a, c, g, or t
  misc_feature (149)..(149): n is a, c, g, or t
  misc_feature (169)..(169): n is a, c, g, or t
  misc_feature (171)..(171): n is a, c, g, or t
  misc_feature (191)..(191): n is a, c, g, or t
  misc_feature (194)..(194): n is a, c, g, or t
  misc_feature (244)..(244): n is a, c, g, or t
  misc_feature (279)..(280): n is a, c, g, or t
  misc_feature (310)..(310): n is a, c, g, or t
  misc_feature (315)..(316): n is a, c, g, or t
  misc_feature (327)..(327): n is a, c, g, or t
  misc_feature (329)..(329): n is a, c, g, or t
  misc_feature (335)..(335): n is a, c, g, or t
  misc_feature (372)..(372): n is a, c, g, or t
  misc_feature (384)..(384): n is a, c, g, or t
  misc_feature (492)..(492): n is a, c, g, or t
  misc_feature (506)..(506): n is a, c, g, or t
  misc_feature (747)..(747): n is a, c, g, or t
  misc_feature (766)..(766): n is a, c, g, or t
  misc_feature (807)..(807): n is a, c, g, or t
  misc_feature (850)..(850): n is a, c, g, or t
  misc_feature (861)..(861): n is a, c, g, or t
  misc_feature (873)..(873): n is a, c, g, or t
  misc_feature (883)..(883): n is a, c, g, or t
  misc_feature (937)..(937): n is a, c, g, or t
  misc_feature (960)..(960): n is a, c, g, or t
  misc_feature (993)..(993): n is a, c, g, or t
  misc_feature (995)..(995): n is a, c, g, or t
  misc_feature (1048)..(1048): n is a, c, g, or t
gggggtgagggtgatgagggtcaggtgtgaatccttgggcaggagaggggatntccagtgggatctgtgtccacacggggggcctcctangcctnaccggggntgggcacccgtcagttcttggtgcgagganctgcgcgtgggngggnacgcaccttgccatcgtgcncntcgcatgaccttggtgcggnttnggcggctgcgaggaggtcacatctctggatgactgcgatccagaggaggnctgggagtgagcgagatgtgggcgtcctcgccctnnagcaggcggcggtaggtggcgatctcctgntccanncgcgtcttcangnccagcnggatgttgtactcctggttctggctgctccatctcgnagcggagctggngccagctgctcctccacgcgtgccaagtcatctcctggatctgggccagctgcatgcagtagcgacctttggtctcctccaggctgttctccagggatgctttcatgntgagctgggggtgnagctcaatctccaggttctgcatggtgcgccggagctccgagatctcgctcttgccgctctgcaccatctcgctgttggtggctacctcgcggttcagctcctctgtcttggtgaagagccattcctcggcatccttgcggttcttctctgccatcttctcatactggtcacgcatctcgttcagaatgcggctcaggtccacgccaggtgcagcgtccatctccacattgacatctccanccacctggcctctcagggnattcatctcctcctcgtggttcttcttcaggtaggccagcncctccttcaggctctcaatctgcatctccaggtcagctctggncagggtcagtncgtccagcaccntgcgcaggcnattgatgtcggcttccacactcatgcgcaggttcaactctgtctcatacttggngcgggagtcatccgcggccagangggcattgtcaatctgcagaaggacattggcantntccactgtggctgtgagaatcttgttcctcagggcctcaatggtcttgaagtngggactgtagtctttgat

SEQ ID NO: 662661 - DNA, 624 bp, Homo sapiens
  misc_feature (163)..(163): n is a, c, g, or t
  misc_feature (168)..(168): n is a, c, g, or t
  misc_feature (179)..(181): n is a, c, g, or t
  misc_feature (192)..(192): n is a, c, g, or t
  misc_feature (198)..(198): n is a, c, g, or t
  misc_feature (205)..(205): n is a, c, g, or t
  misc_feature (217)..(217): n is a, c, g, or t
  misc_feature (236)..(236): n is a, c, g, or t
  misc_feature (292)..(292): n is a, c, g, or t
tatactacatgttcaggaactcagtgtgttcaccgagtccctatctaggcgattgttccactgcattcaaaccggcacgtcagaggccacagagcagctatttcataggacactgaatactatgattctgtgaactcgttatgaggtaacccaatgttatgtncacanacctttctcannntggtctcatanttctanaatgganggtccagctgtnacaaaatgaagacagacancacaacatttactctgtggagatatcctactcatactatgcacgtgctgtgatttngaacataactcgtcccaaaaacttgtcacgatcatcctgactttttaggttggctgatccatcaatcttgcactcaactgttacttctttcccagtgttgttaggagcaaagctgacctggacagcaaccaatggctgtagatacccaacatgcagttttttcccatcaatatgggcaaatattttaagtctatcattccattatgaggataaactagctacaatttggtatctcttcattctttgaaacacaatctatccttggcagtccttcaggctttaatccaattattctgtacatattcacaaggaatacaagggttaccttgaga

SEQ ID NO: 662662 - DNA, 153 bp, Homo sapiens
cagacaatgtggattggggacaaaggtcaggacagatccccttagaggacctgagtctgggagagtggtgagtggaagggaggagcagcaagaagcagcccgtattcactcagacttaattctccttcccagatcaggcaagccagtcatgga

SEQ ID NO: 662663 - DNA, 377 bp, Homo sapiens
tgggagagaggcctttgctttctgggccgccctcttctagtcagcagcttctagttgttggcccctgtgccttgcggtttgtaggtgccaggcatgtgaaaacggctggtttcagggatggcttttccctgccatcttcctctgttttcagtgaattttggaagatgacacttctagaagcgcctcttctttgccatcttagctcgaagtctggagcttctgcttgctggtgagattgaagcagacgctgaggtcctttcacccacctgcctgctttcctctctctcggattccattcctatccaaaactctgtctctatttaaagcagggtccgcaaatgactgcttttaaaaataaaattttatcagcataaaaa

SEQ ID NO: 662664 - DNA, 142 bp, Homo sapiens
gtcataactacctttctctagtatactttggaaacacggataaatcttcatcagtaaactttcatcataagcaaaacccattaaacgaacaatatctttgttatctacagcataaatatacatacacagtattctacagaat

SEQ ID NO: 662665 - DNA, 349 bp, Homo sapiens
cccaaatggggggggggggtgggcggtggggggttttttttacccaaccttgttttttttaccggccggtcgcgtgggggggcccccccccctgtttttttctccttttaaaacccgggggcgggtccggcccccggccttttgttttggccggggggggggtagcatttttcccccggaaacgcttattctcttttggcgttttttgggtgcccctttaataccggtttggtttaaaaagcggggggggggggggccggggttcccggggtgttgttgtcccccggggccgctttgcgggggggggcggggtttgggccccccccccccccccgggttcctttgttca

SEQ ID NO: 662666 - DNA, 336 bp, Homo sapiens
  misc_feature (25)..(25): n is a, c, g, or t
  misc_feature (34)..(34): n is a, c, g, or t
  misc_feature (75)..(75): n is a, c, g, or t
  misc_feature (79)..(79): n is a, c, g, or t
  misc_feature (195)..(195): n is a, c, g, or t
  misc_feature (239)..(239): n is a, c, g, or t
  misc_feature (251)..(251): n is a, c, g, or t
  misc_feature (264)..(264): n is a, c, g, or t
  misc_feature (327)..(327): n is a, c, g, or t
  misc_feature (332)..(332): n is a, c, g, or t
gtgcggagacaagtcgagcggcaanactacggcnagttcacgtgcgagggctgcaagagcttcttcaagcgcagngtcngcaggaacctgatctacacgtgccgcgccaaccggaactgtcccatcgaccagcaccatcgcaaccagtgccagtactgccgcctcaaaaagtgcctcaaagtgggcatgagacgngaagcggtgcagaggggcaggatgcgccgacccagccgacccanggtcagttcgcnctgaccaacgggnatcccctcaactgccactcgtacctgtccggatatatttccctgctgttgcgcgcggaccctnatgcncacg

SEQ ID NO: 662667 - DNA, 443 bp, Homo sapiens
atagacggatgtgatgagatattgtgaggtggggatcatatagggggaaatagaatgatcagtacgtgcggcgggtaggcctaggattgtgggggtaatgaatgaagcgaacagattttcgttcattttggttctcagggctttgttataatttattatttttattgggctttggtgcagggaggtaggggcttactagacagtgtgaaaacgtaggcttggattaaggcgacagcgcatttctaggcatagtccagtcagaattagcaattgtgcacagcatgatacagctgtagcagggcaaggttcaatgcgttgcatattgctcagggtggcgccttccaattaggtgcatgcagtaggtggcctgccagtaatgttagcggttaggcgtacggccagggctatcggttgaatgagtaggctgatggtttcgatagcca

SEQ ID NO: 662668 - DNA, 196 bp, Homo sapiens
atgcacaaggggaaggtgccgtgtaagcccaggcagacagagacctctgccggtggaagaccaacaccagcccgtgggctgccgcctgcctccccaccctccccatggcccacccatcatgggctgtctctgcagggcagaagccgtccagaacctgggatcacgggaagcctgctggcaatcgatccccaccccc

SEQ ID NO: 662669 - DNA, 414 bp, Homo sapiens
ccttatatgctgttcataaatgagataggtgttcaactttttgggaacacttcggtgtagaatcgtggttattaatttatttattgatgtaggtaaatgttgggtagaattcagcagtgaagctatcttgggtagagattttctttttgggatggtagaaggatttatgattacaacgttccggttctaataagagatacgtggttacctggttcctgggaaggcttgggaaagtttaatctttaaaggaaattgggccaatttcactctaaggttggcttaaacatgggttcacaggcattccctttaattctttccagtggtctattggaatctagtattggcggtcccccttcttgggttggtccatatgggggacggggaaagggggacaaggcatattccagggttacc

SEQ ID NO: 662670 - DNA, 603 bp, Homo sapiens
gttctaaagggaggagacaccaccgaatcctgggacttctgagattggttgtctcatttgccaaccctaccgaagcactagataatgtgctgaaatacctcccaaaaaaggatcgagaaaatgttaaggaacttctctgctgttccatggcaagaataccaaccagtcccaggtgaagcgtacaggacttctgtccagtgtggtacttatgtctgtccagatgccttgaatcttggtttaccagaatgggtattcagtggctttagctaaaggccagctatctcctttcatcagtggatgctttggtcctaaggacggaccagtcttccgcacacaggtggaaaacagtgcagcaatcaaatgcccatcatgaatatctcagttccattaggcgaatcatctatgggcttcttttacatgcctcatcacatctggacaaggacagtcctggaatgcattgtgctcctcgagcctgctaggctgttcacgtgaagctggaaaggattagtacccaatatcaagaacctcatatcattggtgctagttagaactggtcaagtgatcattctgacttaaggcaggattgacgtgacgcgtctcctt

SEQ ID NO: 662671 - DNA, 227 bp, Homo sapiens
  misc_feature (69)..(69): n is a, c, g, or t
  misc_feature (109)..(109): n is a, c, g, or t
  misc_feature (199)..(199): n is a, c, g, or t
  misc_feature (206)..(206): n is a, c, g, or t
cctgcctcattgtgcccaggagttctccaaacccgcgcatggaggtccttcctcgggaggcggcgaagnggtccaccctgcgcgtgatccttcatgcccggcccctgcncctccctccgggtggaacttccccctcaccgccagactttaagctgaggatcgttgtatctctggcggggtgcagaactgagcccaggcnacagtancctattcacgctctgtgcttg

SEQ ID NO: 662672 - DNA, 364 bp, Homo sapiens
atgcagcgaaaggggaaagtgcctgtcctaaaggcagaggaggtaaggtgtctccttgggggtgcccctacggactaccagggttgaacgcacaggcatggacacgtcgccctattgccaagcttttggcgcagctggtcgggtggccagactgcatgcggcttagcaggagacgtactgggctgtttgcgcaggacctctggaggccctcgagatcgtcgcaagtggaaaggtaaagcggaacaagggacaggctggagacgggggtcgcgtctaacatcaggataacttacaattcggttccaaagagcgcggtacgcgcagagctggggaaaggtgttggatccggcgccagtccttggac

SEQ ID NO: 662673 - DNA, 241 bp, Homo sapiens
aatttagatcttttatgatttaattattattgtttcccaaagaagttccccccctttgaaattaataaataatgtataaattttgccctgaaccatggcggagatgggcagcccctaggttaaagtggagacggaggcccaggcgcaggggtcacccctcatttggtttccttcccatctcacagcttagcttgtgcttttcaacaccaagtctttaagagcaataaaaactgccccctga

SEQ ID NO: 662674 - DNA, 351 bp, Homo sapiens
caaccagtcaggcgtgggggcgcgtgcctgcgatcgcaggcactcggcaggctgaggcaggaggggcgggcaggcaggttgcagtgagctgagatggcagcagtacagtccagcttcggctccgcatgagagggagaccgtggggagagggagagggagagggagagaggagaaccgctttaaccggggaggcggaggttgcagtgagccgagggttgtgccattgcactccagcctgggcaacgagagtgaaactccgtctcaaaaaaaaagaagaaaagttagaagccaggtgactgaatttcaaggaagtgtgcaaccccgaagacggatacaaccccgaacacgata

SEQ ID NO: 662675 - DNA, 1332 bp, Homo sapiens
tctccaagggtccatggaccacctactgagactctgggggggtcccagggagaggaacctagcatccccatcaccttccactctggttgaggcaagagaggtgggggaggcaactgagtggtcctgagctatctgtgggtccctcgaggagagagcgaggagacaggaagctccgagggtgccccggggggctgcttccagtcacacgtggccccatgagggtaccaggcagctggaggcaccactctgaagataattctggacagaactgacccagcagggacctcagtgcaggccctagacagtgctgaccactgacagcgccagccgaggtggagtggcacgatgagtccacctgcatcaggtgaccttgtgtcccacagacacctgacacaagtggctggtgacatgcttggaccgcaggcagtcacacgggtccgcatgcctactgtctgcactggcattatggcgagagagcaacaatgttgtacaaactagcttgggaacctccagagtgtcaactagctaacaccacggaactgaggaacagtccccatttaccaagtggtacgtcctgtgataacatatgccaacattattataccatcaaaacaacacatgtatgctgagacaggtgagggtagcacgaccacgcagttggcctgagttttgtcttgggcgcaggaattctaaggaagcatgcagattcaatcatatagccactgagtagagacctccagacccttccaccatcacacctagcacagggctaactcagtggagcataccaaatggtgggcatttgggaactaagctcggcacctaacgccatctcagtcatagtgagacacttcttggaatgactctgctatgtcgccttcacgctggccccatagtagacatatacggacgaaccacatgaggcaatgatcatagaacaagagaaacttccagatgcaagctacagcaacagtgctcggccacatacacatggcaccgacacctgagggaacagatgtacgtatgaatgagccgaacaaaatctaaagaatcgaacacagggcaacgcagtgagccggtactacgagaagaaggaccaggaggcaaagatgggcaagttgcaggacgtccggaacgggagtgagtgaggacacgtggtcatagcgtgtgatgttggctgcgagcaggaggtggaggtcacagtctggagcgtgccaccaggcgtgaccatctcttgcgcgtctggtgctgtcctcgaggcctcagcgggcgcggtcgggtcggtgcagaggcgcagcgagaagggacggacgggaaaatgaagcacaaaga

SEQ ID NO: 662676 - DNA, 470 bp, Homo sapiens
tacaggattacccggcatcgctaccgccggtccctgatgacacagcccaatggcctcacgccgtcctggcaagctgaacgccttctaatgcagacactcccagtctgggcgagggcccagagaatacccgctcccagctgctgataatggaccgggcagctgaccccgttgtccccactactgcatgagctcacgttccaggccatggcgtatgatctgctggacatatgagcaggacacataccggccatgatacaacacgggctgagcgaggcgcgggagaaggccgtcttgctggacgaggacgatgacttgtgggtggagcttcgccacatgcatatcgcagatgtgtccaagaaggtcacggagctcctgaggaccttctgtgagagcaagaggctgaccacggacaaggcgaacatcaaagacctatcccagatcctgtatcctgttggctggcgacacgggta

SEQ ID NO: 662677 - DNA, 119 bp, Homo sapiens
ctccctgctcacgaagccccctgtgggagcgccccagtagtgaagggcacgtggtgtgtgggaagccccattccccatgcgccggtgtgggtgaatgcgacccacgagggagcaaggtg

SEQ ID NO: 662678 - DNA, 663 bp, Homo sapiens
gctcggtctcctgtgtgtatgtgtgtgagtggtgggcaggccagtggtcagtggccgtgcccaggtccctgcatggattccttgtggctttatctgtactttggcctagtcttcatcacagtttctgttccttgtgggatgctagctctagggatactcagggggcgttcctgactctccgttctcccttcccgttcttgcgctcacttgattctccctagggcaggacctcgtgcgaggtcgccaacagcttctcctcagggccctgaaacttgggcgtgcttgccctgaggagctggtcctccggtgaggccctgtcaggcggtcttaggctcctgcacatgaaggtgtggttgcctgtaggttgtagtgggctggctgctaggagcagatacagggctgggtatacgacggatgcaggaaagggtagagggagtagtgtgttgaaagtccgagagttggcacatggctagggatactgctcactaggctgtggagtgtcctcaggagtggagagaatgatgtaggagggcgagaagcttaccatatttggtggctttcctaagaccctgtctgttgttgttatgctcctgccttgtccgagtcctgcagtgggctgcctgtactcctgaacctcatgagcctctaatggcaaagggaggc

SEQ ID NO: 662679 - DNA, 975 bp, Homo sapiens
tcatgcttgtatgtctgagataagaactgtctcaaggccagacgcggtggctcacacctgtaatcctagtaatttgggaggccgaggcgggcggatcacgaggtcaggagtttgagaccagcctggccaacgtggtgaaattcccgtctctactaaaaatacaaaaaaaaaaagaaaaaaaaactgggtgtggtggcgggcgcctgtaatcccagctactgaggaggctgaggcaggagaatcgctgtgaactcggaggaggttatagtgagccgagatcgtgccactgcactccagccttgggcgacagagcaagactccgtctcaaaaaaaaaaaaaaagaaagaaagacacggcctcagggattttaaaacattaacccaaaacaccccacaatttttttcccattcttctcaggcttttaagtggtttgcggcccaacttggcctcgtttggcacaattattgcagcaacatttccttatgacaagcgatttctttggcgtaagatatattctcttttaaacactgcagcacgcacagattaagaattaactggtcgaaagggacggttgggcccacgcaggaagggaccttccacacaattgaccgggacttccaattctggatttgggagcctgggaaacacaactcagctttgttctccaacacggttaatggtgaagcgtgcgctcctttaccagttaaatgctgcccccctagtttttccgtttcttcaagaccccgggggttggccatagcgggcacatcgggggttagtaagtcctctgggtcctcccaagagaaccccggatctgcggaacatccctcggggcggctttaggcttccaggccgccagaatattacggttgggggcatgcggcaggcccgcttcctggtttgaatgccaaactacagggggctggccaaagttccgcggaaacagcaacgaagtgcggacagcgagcaaatgcg

SEQ ID NO: 662680 - DNA, 124 bp, Homo sapiens
gacatccttcctctctcacgtttgtccccggtctttgtgacccctgcgtccataggtctttctccaaatctggtggtgactattgcattgtgtgtgtgttctagtgcatgtggctcagagtcta

SEQ ID NO: 662681 - DNA, 650 bp, Homo sapiens
gtctccaacccctactactggaagcacctcaaatcatgagtcttcatgttgacactctggttacaaaattcctgaacctcagctccagttactcaatggctgtccggattgctgctctgcagtgtatgcacgctctcactcgcctccccacttctgtgctactgccatacaaatctcaggtcatccgagccttagccaagcctctggacgacaagaagagacttgtgcgaaaggaagcagtgtcagcgaggggagaatggttcctacttgggagcccggggagctgagcccttggtcctggcctaaaccctcctgacaatctaacctgcaagtactaactattgagccatcccacaaggcaagactactggtctgccttcccatggatgcagtacaaatgctgggcctcctgcatggctgtgcaaaactcttaaagagccatgacttctaatggattgttgaagagactgagacttgtatttgaggaaaagaccttggatgttggggctctcccgtgtctgtcaggaataggaagctgtgctgctgaagggtcagtgcagtggagtgtgacctcgagaactggggttggctgtttacattgagtttcacctcgccagagaattaaagccttcttttgttaatggcgcacc

SEQ ID NO: 662682 - DNA, 310 bp, Homo sapiens
atgttttcacaaagtgttcaccattccatctgcccttgcatggtgagggctctcttcactgctagaatctaggctgaccctactctgtaatgatcacagggtgtgggattatcatcccctctcatgctgcacaaggtctcgagggtgtcgtcatagctggatcctggtctttctgcattgcactgcacagccccatggaacatgaggcacttgaggccttgcttcttggagcctctggggagcagagtaggtcactgccctctgggagtgttttgcagtagttttgtaaatgtgtcgcagtgtgcttccg

SEQ ID NO: 662683 - DNA, 925 bp, Homo sapiens
  misc_feature (253)..(253): n is a, c, g, or t
  misc_feature (814)..(814): n is a, c, g, or t
ggaggtattttatctgtaatgtttacctatgagctattttaaatgattcttcaaaatttagagtccagaaggtagaagaccatgtcctttctgaaaatgtcccttcctttcccaggtaccaggctctttttaaaattagcttctgaatatgaacaacccagctctttaaagtttaatgtcccagccattttaattgtttctttcgaagtacaaaagagcagctgggccacatcggcactaatcacttgccaantttcctttttacaaaaacagctaagctctttctgagatttaaaatcactccatctgagaccccagcttggcacctatctttgcactaacataaaaggaacctaatttctgcttttaagaaatgtgttgcggaagtgatttttggtttggggtttgttctccttcttctttttaaaaataacgtaataaagtgtaatacaacttttaaagttttttttttcctttaccagttctctattctccttttctacttgaattgtcctgagacaggttgccagataaaatacaggttgctcagcaaatgtgaatttcagagaaacaacagatactctcctagggcatggaccgtgcaatatttgaaacatacttgtattaaaaagttatttgttgtttatttgaaattcaaatttactggggccccatgctttagtttgccaaatctgccaaccatagcctgaatgcttcccgttcccaccatgagtttggcaaatggaaaatgctaacctatgcgatggacactgctgtattctgaaaatgaatatgtaaataaatcaaactaccntgacttgagagagctcattacgtgcgtgcatgcatgcccactggtccctgctaaataattcccttcttgcaatccagaaggataaatcaatgtaatttctggaattcaaaa

SEQ ID NO: 662684 - DNA, 303 bp, Homo sapiens
aaagggttcaccgcacgcttcataaccgcgcttttcataaaagacctgggctgaagccctggcattaagctcaatttctttgtatccgcgagcctgggctaaagtttttgcaaagcgcaccagcttgcggcccaagcccgccccctgagcttgtggtccgacagccatctgcctaagtttaatgagatcagacgtaagcggctttagcaaaacgcaactgacaatttctttgtcttcagcattaatagccacaatgtgaatctgtctttcctcaccggctatgtcttgagcgctcagtgtcag

SEQ ID NO: 662685 - DNA, 342 bp, Homo sapiens
gatagagcatccccggctaatatagagagacattggctcaaaaagaagttatacatttaccatgcgatacagccattctattcctatctcctcacaagaaaaggaaataggctgggcacagtgtctcacgactgtaatcccagtacttcgggaggctgaggtgtgtggatcatgaggtcaagagatcgagaccatcctggccaacacggtgaaaccctatctccactaaaaatacaaaaattagctgggcgtgatggtacgcacctgtaatcccagctactcaggaggctgaggcaggagaatgacttgaacccaggaggcagaggttgtagtgagccagga

SEQ ID NO: 662686 - DNA, 751 bp, Homo sapiens
ctgcatgggctgtaggcagccattgctgcccagccggaatggcatggtcttgaatgccccacttccacaatggactggcagactggctgcgtggccactgtggttcaaccagccgtgccctgtaagatcctgcatgactgtaatgtgccctggcaattgccaatggctgctgcctgctatctgcccctgtctgcccctgctgtctgtgtgtcctcatcctgtgcccagtctgtgctgcttgcccgcacgggttctgcgtaccagcactgaattgtgttgcgctgcctgggcctgcaggcttctagccttggatggatgctacagatggatggcctggaactttcacataaggaaagtgtgtgtccctgtgattccattccggcagttatcatgtagggatcctgaaggagtgctggaacaaagtccaacgggaagttccccttgcaaagggcccaacccggttgcatagcgggtttagacgggagatatacccgtatcaaaaaatactcgatcgctatcttccgccagtgagagcgcctcgagaaccacccaaggagaggggaggacatgattctgcctagaaaagaacttgaacactggcacacagccagctgagcactgggaccgggtcattgcccgtccgggaacgtctatacagaaaggagaaaaggctcgagtcatcacttgagggaaggcagaagaattttcaaaagcctttcggatagtctcccgtaatggcccgtgacaaccg

SEQ ID NO: 662687 - DNA, 114 bp, Homo sapiens
ttgaggatccctccaaagaggagggttgtctcatagatactaaattgtggtctagtgagcagcaaagggtttggttttgtatgtttctcctccccagaagaatgccactaaatg

SEQ ID NO: 662688 - DNA, 1029 bp, Homo sapiens
gcctgtttttttcctgcttggacgcgcatgagggccccgtccactggaccgcgcggccgttggcgatgggtgggcgcggttagcgagcgccagcgtgtgcgccctgtgttggcgtggggctggtgctggctcagtgtacagtattcaccttgtaacgacggaagacggggcggaaagaccaagatcagtcgagcagtgaacgattggactaatgccatatgaaatgatctacactcaaggatgttctgccgctatcactgctgaagagagtgactgccagagaattccagaaggagcttcagttcgatggtcaagaagccctatcacatgagttacgagacgaagacttcactctgctgggtcttactcagaaaggagagagctgtccaatagcgttcaggataatacaacggaccttgtgataatgaacacgtcagttacggagttctgagtattacagaggggcaaaacgtatgctccatagcagtgatccatgaattagtccacttgagccaatctgttaaagcatggggttcagcaggagtgaaattgtcgtaaacagagaagtttgatttggcaacctgagatgaggggacagaggaacatcatttagagcggccttgattgtgcgaacagcttggcaattccccctgtttagcttgtgacctggttcagccacagggaggtccaaagttcgagcccccgtataactaagttgggtcgtggcaaagtcgtggctcaattgaccttacgaaattcccaccatttggggctatttcgcctgtgtaggctttacccaggtccaaaaggatctgttttaagccccaaaaagaaggtcctagaaaaagcgtgtatgaaccatggtacacacttgtgggttggagggcaaggcagaacttcctagggaacccggttataattgggcttcttccgaaacaagccaataagcgtgaatcacatttgggacgccacatattttttcccctttttctggccaaatttaacaggtgcgtgcggcgaaatgccaga

SEQ ID NO: 662689 - DNA, 354 bp, Homo sapiens
acggacatgggctgtatcatgtatattatctttggttttcatgttggctgtgaagacaggtggatattattattattttttttttttagagacggggtcgaactactgtctcccatgctggagtgcaggggtatgctcatagcttactgcagcctcgaatccggggcacagacaattcttctgcctcagcctgctgagtaggcaggagccaggtgcacaccattgcacacagctaatggttagaatttggggtagagatggggtctcgcttagttgcccaggcgggtcttgaagtcctggcttcaagctatcctcccaccttggcctgtcaaagcactaggattataggtgtga

SEQ ID NO: 662690 - DNA, 298 bp, Homo sapiens
gagagagagagagagagagagagagagacagagaatgatgaggagatcattatataccataatgtgcgctactattgcataatatgagcaatagcccggcacttatatctaagacctctctgatgcactccattactttttatgaggtatcatgccacgagacggcctagagttctaacagaccttagcagctttagagccattacaacgtgccaggaactgctttgagtgaccaatagcagcccatattacttggacgtggtggacctttacacatgctcagagaccctcagcggcc

SEQ ID NO: 662691 - DNA, 1282 bp, Homo sapiens
taacatggtaaacaactcaaagggctttcttttaagtgctaggaaaacgtggtccaccttttcaacgggtgacggggcgtggttaacacaggtgtaagagcaaacaagggtaaaaaggtgaaagccacttacagattgtatgcacacaaatatttttacaaaatgtgcccagaaaatctccacgaggcactgtgttaagccaagtggtttctctttaagccagaaactttttgtgtggtccttataaaatagcacctaacaatatttggggtgatagggtgggagaaaagaacttcgagtatttctcacacaaattttataacttgtggaaacaccgaggcgtggtaatacaagccctccagcctccaatgtggttataattaaaagaattataacaagaggacacccacaactcggatcacttttgtgagacaacactcttatgagaaacacggaaagaggcctccacaaaagagacacacccacatatttttaatttatctctccatatccaccgagtgtgccccccaagaggagtagtgtccagccccacataaagggactctcccgagagagggggaaacaacacagagaaaccaaggggtccctggctatccccatcacttatatttggccatttcacccacacacgttttaatggggcccataccagagacgacaaaaacaaaaaattcctcccactctttccacgtgtggggctccccaaattggtgtcctcaactcctgggggtaaaaggcccactcttttattgagaaggatatgaggaagggggcgttcaacaacatttgggacagaaagcaaaaccgtggggctccaaagattcttggcgcattcaagagagaacaaccccccaaaatattcccctatacactccttttgggccccattctgggcgcgtgagaatgcgcaaatttttaaaactccccattttttataaaaacgcaacgcaaacctttttccccacgggggacaacaacatcttgttcaaacaacaaaccaatatttccgtggggggttactcttggaagccagaaaaaccacggcacctggcgggcaaaatgctgctagtataataaagagacacaagaaaacaattttcaagggggccccaagggtattttttttcccactctcacaagaaaacacaaacatacacttctggtctacaccaaattggtggtggtctccccttttgtacattattgcacaaacagctgatcaatatactcgcacattataagtatataaccccccaattaa

SEQ ID NO: 662692 - DNA, 398 bp, Homo sapiens
agaagctaacaaactgaaggtaatacagattgaggtaagtaggacagaaggacatttgatggtatgcttctctggtgtctctccccctcctctcttcctcaaagctctagcttttattggagatggctatggttctgatgaaggggactccattgtggtttcaggagcggtacaaactaatcagtggccatggtgattggatcagggttaagactgtgatctaatccagtaatagaaagtgaattttctgatttttcctaggaatcatgagggtcaaagttgtttgtattccttacgggtgattatcgtcccagctgaataaggacacataaagtccctcgttggaagaggagccagccttaaggaatacaaacgagggactttatgtgtccttcttc

SEQ ID NO: 662693 - DNA, 102 bp, Homo sapiens
gataagaattcaagctttgacattgtaaaccacagacgaattggatgcttggcattgaaaggaggtgttctgcaatgattttttttcttgtttagagaagtt

SEQ ID NO: 662694 - DNA, 420 bp, Homo sapiens
caagtgctactccattgtagcggtcaagtagtctcaggtcgacagtgtctaggactaatggcttcagtatgtagcagttacagatgagacctcggtagcaggtgcactcgtaggtacagtactactggtgaccgtttgatttgatgtgtaatcgcaggagtcgttaacatggtctgctatgtgtagtatgagtacggatcggaagtagatgaggtctaggatgatggcgccagggatagatcagaatgtttcgagttcttgagggtagacactgatagtataagttagttgtgttgtgagtgataggcatataccactacattccgaggaaccagatcagtaaggtcactatgagggtgtgatcatgtagggtcttaagtttggctatgatatcgcagtctgagtcaaggatctcgacat

SEQ ID NO: 662695 - DNA, 362 bp, Homo sapiens
cggcacgagggagatatacaagtagttaagaaaaaagtgtaccctattcctttaaaagccagggtaaatttaaaacctataattgataattgaaggtattctccataaccctataagactccaataccactttgttgtcagtgtaaacaagggcgtattctgaaagcactgaggccactgataacccgtagccttcctatcaaaaatccttaacccagtaacccgcagatggcccagatgcattcaatctgtagcggcaactgctttgctaacagaagaaagtaaaaaaataacttttagaggaaacctcattgtgaggaaacctcattgtgagcacacctcaccagttcagaagtatccta

SEQ ID NO: 662696 - DNA, 160 bp, Homo sapiens
gtttcccccccagagaaaaaggggttttttttgccctttttgccccccctaataaaggtcttggggttcccccggaaatgtagacttttttttatgggtccaaagtcccaggaaagggggggatgttttttatagccactaaaaattatttttgaactga

SEQ ID NO: 662697 - DNA, 109 bp, Homo sapiens
  misc_feature (79)..(79): n is a, c, g, or t
  misc_feature (100)..(100): n is a, c, g, or t
ggcgactacaataagtgccgggagcttgtgagaaggccattgaagtggggagagaacaccgagaagactatcgacagantgccaaagcatatgctcgaantggcaactc

SEQ ID NO: 662698 - DNA, 110 bp, Homo sapiens
cgtgaatatgtgcacaagtatttgtttgagtccctgatattcagtcagtttgggtgtatatacctaggagtggaattttatgggtcatatagttattctagtttactttt

SEQ ID NO: 662699 - DNA, 182 bp, Homo sapiens
cacatgaaaaaaaagcgactatgaaaggaccggatgacgatagacagtcaagtgctagctatggttagctatacaggtagcctgatatgcagatgacagagtgatgaactgctacctgtaatcttctgattgctcctggggaaaacacgccttgtcctgaagaacaaacggctgccattggg

SEQ ID NO: 662700 - DNA, 142 bp, Homo sapiens
ctgtaggaaagcggcttcgagaactgtgcagttggggtaggcttcctcaaaacgcttcttgatcttttctgactctgcatatttggagattccattgatgaagagggtccgcttcacgcagaccatcctccttgctagcgca

SEQ ID NO: 662701 - DNA, 180 bp, Homo sapiens
gagcgactcgccagatagaataacctatcatctacacacatttaggacttgctgggctcgtacatataggatgtcgtgtagtggcaaatcaccgttacgatttgaaacacttgtcgcgtctatcactaaataactgtccaaggttgaccaattcgggcgtggctaatgcattgaatcaat

SEQ ID NO: 662702 - DNA, 171 bp, Homo sapiens
tcacaagaatcgaagaagtaaagaaagcatagaataggaagaaagcacgagacaaagaagaacacacggaagcacaaatcttccaagtcaaatgagggttctgactcagagtgacaaggatgtgacttgttcaacattctcttctcaaacactgaccaaggaacagaggaa

SEQ ID NO: 662703 - DNA, 195 bp, Homo sapiens
tctatacttgttctctggttctgggtagaacgacttcttcctattgtgttctcagcttcttgaagatcagtataatgtcactaccctgtgttgatcttctagattgtcttgcctgtctagatcttgatcttcttagggattcagactcttcatccctaacaggtgtgaggtatgatctgcgtctctccctggatt

SEQ ID NO: 662704 - DNA, 801 bp, Homo sapiens
ggtaccggggctccatccatgacttcccaggctttgacacccaagcaggatgccagaggctctgtacaactgaccatgaatgggctattggtcagtgacaaggaggccatattggacataatcgacctcgacgtggagcaacagtgctagaggcaggaggtctgccagagtctacaagtccctctacggcaaggacctcattgctgatttcaagtatgaattggacgggcaagtttgaacggtagatatgtggagcctgaatgaaggccagctggcctattcgtgatgccaaagaaattaaagatgccatctcgggcattggcactgatgagaagtgcctcagtagagatcttggcttcccggaccaactgagcagatgcaccagctggtggcagcatacaaagatgcctacgagcgggaacctggaggctgacatcatacggcgacacctctggccacttccagaagatgcttgtggtcctgctccagggaaccagggaggaggatgacgtagtgagcgaggagctggtacaacaggatgtccagagacctatacgaggacaggggaactgaaatgggagaacagatgaagccaagcacagaatacatctgggaaatcgcagcaatcagcatctcaggatggagcgacgacgagtatctgaaaaaccacagggaagacagataggaagccagactccgacagggagctagctggggactctgagaagcaaaggaggacgtgaggaaagggataccagaacaacccggaataaaaagatgaaaggcacaacaagatatgaa

SEQ ID NO: 662705 - DNA, 325 bp, Homo sapiens
ccccatcaatgactgaatggataaacaaaaagttatacacacacacacacacacacacacacacacacgcaccaaggaattattatacaggcttaaaaatgaagtaaatgctgacacatgctacaacatggatgaaccttgaggatatcatgctagctgaaataaaccagtcacaaagaccatatattacatagttccattaatatgaaatgtctgaaataggcaaaaatctagagacagacattagattagggcttagggccctaatctatgagaggtgcttaggaccccaacctaagagagcttcttagagctgaaggagata

SEQ ID NO: 662706 - DNA, 181 bp, Homo sapiens
taatgccgtccgatgccatggagagatggctgcatctctcaaagattagtctgagccagcgcatctcttgtactgtgttcaatcagtagtccaggagagaagcttctgctacttcagagctttgataaactaacctaatttgtccaaatcaggttagtttagcaaagcgggtaccgagctc

SEQ ID NO: 662707 - DNA, 819 bp, Homo sapiens
cacggccagcagggtgtagcccgagagccacctgcagcccccagcccttgccaggaaagcagcagccgcagccatggcggggatgaagacaggctccggggactacatcgagctcgtcatgggagctgcgggtgttgtgggagaggaggacccagaggccgagtcggtcacgcctgcgggtcactggggagtcgcacatcggcggggtgctccgtgaagattgtggagcagatcaatcgccaagccaggactggtcagaccatgctatttggtggggaacatgaagaggcagtggctgctgcagtacgccacttgggaacaacttggggcccagttcacgggtatctgtggcggatcgcacgctctcttctttgggccccagccatcggcccgtcatccttcggttgccgcgaaccgtccgcgcactgagcctccgtgccagcttcctcccaggcccctcttccaggctgtggctgccattctgcgcgccgtcctcagtcgatccggcaagccaccgatggagctgtccctgctccgggctcctgagaagaagggagaagaatgaagaaaggagaaggagccaggaggaagagcgtcgtatgactgtgagcagggttgtcttggctggtgggcgtggctggctgcactgttccgggggatgtcctagctcacttctcgtgacagcgcccaggactgagggctgtagcgcatgctgagccgggcccagcggcaccgatcccctctgctccagcgtctgcgcggccagtccctgtcgactgaccggtcacagcggtggtggatcgtcggggggttctgggg

SEQ ID NO: 662708 - DNA, 1145 bp, Homo sapiens
tggttagttgctgttggttaaagcttgtccctggacgctattgagctattcgtctggatgaagcgcggttgcagacagtcgtgaatacacgggtgctgccaaggatacggtgcagcacaagtgtaatatgagatctccctggattacatgagtgcgttacgaacaaaggtgcatactgttcttagagctgaaacgcggaactggaccttaattgttaagcaacgggagaaccagatattcttggacccatctgtttgttagtttctgtctttaaggacagccttatgtgtggtgatacataggcacttctgatagctgtgaaggttcttttgagaaagtgagaagtatatgtgctcattgtgttaagtatataatattggttttgtatacttatcactcgtaattttgagtactagtttgtttataaaacatgtgtataaatatatctgtcttagagaccgatttatcgttggtagtgaatttcatagagggctgggtttgggtaggaatagcacgagtcactttcagaggcgaaaggggagtcattcagaagtgatagcattttatttgtctgaatactctgccagtttaatcagctgtacgtagaaagttatctcgttgtgtagaactaatgatgtagagtttacgtaactcagtgcaggatgtcttgcttctctctattttctgcaaactctgcctcacatcttaaaatgcattatcaacaatacctaatctcaaagataactctttggctctgaaacgcttaccttatttttatgttgagttagtgacttcattgtctcttgccacaatataagcttttgagggatttttataaattggtcgcttttaataagcaaataaatcccagggttttatattcttcagtgatacccctatagacactcttaaatgtatgtgcgcatatatatatatatattgtcttaagcatgctcgatgcattttcgtcctgagaaaaatgttctctacgagaaactacccggctgtgtaaaaagaagattggcttaaaatggctactgtgatgggaacagtgtcttagggagatgcacccttggacttcgaggtaaacttgaatactttacaactgtggtttagagtttgctttaatgacattgtattacacc

SEQ ID NO: 662709 - DNA, 655 bp, Homo sapiens
caaaacaaggaaagattgcgctccaaccccaaaatgtgttggtttttcttttcaatgaataacctctttctattaataaaaatgcgaacataaaaaggtaggattctcccagctttgttttgtgcagaatttgatttatccttctcttatgaagcttagttagctggaataataaattctgggttaaaaatattttctttaacaatgttaaatattggctctcactatatctgacgttcacagtttctgctcagagagccactgtagtctgatcggtcttcactttgtgggtaagccgacctttctctatggctgcccttaacattttttccttcatttcactgttagtgaatctgatagttatgtatcttgtagttgctcatctcaaggagcatctctgtggcggtctctgaatttcctgaatttgaatgttggcatgccatgctagattgagtacgttctccagaataatattctgcacagtgttttccactatctgttccattctcgccgtcactttcactgtacaccaatcagatgtagatttggtcttttcacatagtaccatatttcttgtagacggcgttcgttccgatggaatctatgtcatgtgaacttctcttctccttcatttcactcgttagatcctccatcg

SEQ ID NO: 662710 - DNA, 364 bp, Homo sapiens
aagatccatccatttattccttcagccaacattttctgggattccttgggtgctaggcctcgggccaccatttggagatgcagagaggcgggagacccatgtggcctttgaggggctttcaggctcgtgggggttcaggcacagacaccaccaatctgaaccaggggactgcaggatgctgggttaggggagagagggataggctggctggcctaggggggccataggaagtctttgggggaaaggagagaactcctgaaagttaaggtgatgccctggcctatatcacattactagtggaggggaagggttgtttacgaactactgttaatcactttgatcagaaacgtggtttcttcacagg

SEQ ID NO: 662711 - DNA, 446 bp, Homo sapiens
ctttgatccatgggtaaggagaaattaaaccggctggatgactcagataagggcaattaacttagcccatttcccaccatcataaatgggtgcaaacaaacccaggagcctcccatggacttccaccagagctaaggagaaaagcactcccttctgtaagatactgagtgttgcggacgattgttattacactacagccatccctctcaatacatgaacaaagctttcgagggaagcatcacggaggcaagacgatccccagtaatacctaaagctaaggaaggaatatccctagacttttcagttagcagaataagtcttacttttttttttttttttttttttttttttttttttggaaaagggattccccctctgccccccgggttaaagtgaagggccccaaccccgccccacggaaccccccgtcccccgggttccccccc

SEQ ID NO: 662712 - DNA, 646 bp, Homo sapiens
cgctccagctctcggggtcggctccaggaggcgccctcaggagaggggcgggcgctctattccatgagacctgcgtggcatgtgcggccactgtggcggggctctttccccgtttcgcctcagctacccctcagctcctggtagtctgccatgtcctggggtctgtctgccgtttggtggctgggatgctgctcggccccgccgccgtccccgtcgccgcttccgtggtccagtgcccctcgtggcctgctctgcctgcctgtcattgagtgcttctgtggtgcgtgcttctgaatgctggacctggccagctggatgtgtgccctgagactggatgcctgatgctggggcattttgcgctcgcacctgaggcagtccctgctgtgcacctgggggtacagttctaatacccgatttacaagttacattgaactacaaggatcccctcactggagatgaagagaccttggcttcatatgggattgtactggggacttgatatgtttgattcttcacagatgacattccagcgcctaatataccttacatccacagattcagagcatacttcactccaagaataatgagcaagcctctttggccacatgctccaatcagactagcattgcaggatgaacaacaagtg

SEQ ID NO: 662713 - DNA, 882 bp, Homo sapiens
cctccagacgttacctacaccatacgttcatgactgggtgaacccacccttttagttcagcctgtgcataacttcctccaactggatctttcacctgactcgtgacttgtatactgtccaatgaaaaatgcccgggtaaccagagctctactgtgtaaattctagattgagttcttgtgtcgagtcatcagtggtttgtatctatagggtcgtctattaagtattgctctgtcagtttgtactgcagatcgaggatttcattgcacttttaatttaacttaaaaatgccttcccttgatgttgatatgtatttttgtgaagtgtgtgttgaagccttgagattatttttaaattagaggtttatcataggtatatctcctaatgctatccctcccccctccccctaaatgatgagttaatggtgcagcacaccaacatggcacatgtatacatatgtaacaaactgcacgttgtgcacatggtaccctaaaacttaaagtatacttaacaaacacacattcgaggtttcttcgggtgcctttctgagagttcaccaggaattcttgcaacttatttctattctgtaacctacctttcattaccttagcagtggttaaaagccttaagttggatcacattccaaattacttcccattttaacaagtaatgcttaattggttccagacaaggtctttacttcggtcacccaggctgcgtgccgtgccagcctgtccccgcaggtctcgcccccagtcaagtgatctccactccaattttaagccaaaggggcattgcgcaaacacgcacctggattggagctctcccaaacacatctgcggccccttccaatcgacggggtcgcccagccttgccccccggacc

SEQ ID NO: 662714 - DNA, 240 bp, Homo sapiens
tctgacagcttcctgatacacagtatagaatacctattatccccaggattacaaaattcctctaggctgggcactggtggctctcgcctgtaatcccaacactttgggaggcagaggcaggctgatcgcctgacgccagtgagttcgataccagcccggccaacatcgcgaatcacccggctctaccaaaattacaaaaatcagccaggtgtggtggcaggagcctgtcatcccagctac

SEQ ID NO: 662715 - DNA, 893 bp, Homo sapiens
ggacgtggttcctgacagtcaagatgtgcgtggagcagctacccaggcttccctggagtcggcccacggatcatgcggtggtggctgaatgcagccgctccaggcccgggcaggcgagctgttgggctgcctgcatgggacagtggccactcctgtgttcattgccagtgggcactgcaggccaccatgaatgggcatcactgacccgaacagttggacgctctgggtttgcctgatctgcctgtggcaatacctaccatctgggtctaatgtgccgtggaaccgagctgatccagaaagccaatggtctccactggcttcatgaattggcctcataatcttgctaactggacaagctggggtattacccagattggtgtcgctaggtgtctctgtcccgaggtgacgagacggagggctgtccgcttccgatacacgcctacgacggcaatgagaccctgttgagcccggagaaatccgtgcaggatccagaatgcagctggggatcggacatcatcatgcaagatggacgaagtggattagcagtacttgtgatgggacacgtgtgcacggaggccctgtacaaggtcaactcccgagtgggttggacagggatgtaattgcaagactcattaagcaggcaggacaagagcgagacactattggacattattccaggggtggagattgaagaagaatttacggggcaacatgctttgaggatgatggactaaggagagtgcttggtattgcaatgtgggcataaaggggtaaagaaagtagatatgcggattgtgaaatgggaataatggtgcagaagaaaaacccaatatatggaggtagaagcaagattgaaaagggagtagggataaagaatgataaaagagaagtta

SEQ ID NO: 662716 - DNA, 151 bp, Homo sapiens
aggtagaggatccattaggcaggacgatttgtcagatggtgagggccagaggtggcaaagagctaagggccaggccgacctgccccgagaagctgctggatcgaactcctcccggggacctatacccggacgtcgctgaggcagagggata

SEQ ID NO: 662717 - DNA, 245 bp, Homo sapiens
  misc_feature (34)..(34): n is a, c, g, or t
  misc_feature (36)..(36): n is a, c, g, or t
  misc_feature (139)..(140): n is a, c, g, or t
  misc_feature (190)..(190): n is a, c, g, or t
tttcgtcattaaggtttgactattaatatggtgncngtaccaatattaccatactgggtggaagtaatggggtgcgtggtgagttaaccaatcgttgtgggcattatctttccgttgagggataacagaaagacggtanncccagttccatcactattagcattaagcatggtcgttagggtgtctacgnttgtaattagtagtcccttatttgtagcgctaccgggaacaggccacacaccgac

SEQ ID NO: 662718 - DNA, 436 bp, Homo sapiens
  misc_feature (17)..(17): n is a, c, g, or t
  misc_feature (119)..(119): n is a, c, g, or t
  misc_feature (159)..(159): n is a, c, g, or t
  misc_feature (249)..(249): n is a, c, g, or t
  misc_feature (254)..(254): n is a, c, g, or t
  misc_feature (262)..(262): n is a, c, g, or t
  misc_feature (270)..(270): n is a, c, g, or t
  misc_feature (362)..(362): n is a, c, g, or t
  misc_feature (364)..(364): n is a, c, g, or t
  misc_feature (428)..(428): n is a, c, g, or t
ggacgtccgagagaaantgagacacgccggttgtgaaacctactgaagtgagaagcgctcaggattcctgggaccccgacctctttgcagctcgcacagctaagggcgagggcgcttcnggcagaagcagcaaaccgccggcaagcccagcgaggaggnctgccgggtctgggcttgggaattggctggcacccagcggaaagggacgtgagctgagcgccgggggagaagagtgcacaggtcagagancggcnacagctcncagcaganggtccccacgccgggcgatattggggtgcctgctgtttctgctgctctgggcgctcctccaggcttggggaagcgctgaagtccccgcaaangnttttccccctccgcttgcctccagatcttcgtcctttcgccaatagcagcttggacgcgcaacngacggctt

SEQ ID NO: 662719 - DNA, 317 bp, Homo sapiens
tgggtttttggggtaaaaacccgggttttttttttaaacgggaatggatttacattgattttaaaaaaaccctggttacattagggccccccaaagcaaatttacatccacccttcaattggggaaaaacaaagttttttttgggccccaacccaaaaaaaaacttctttggggttttttttaaagagccttcccctggccctaaaaaaaaggaaaaaaggccggccctttaaaagggaaagcgtggaaggttccaaaagggcgcaaaccccaaaaccccggaggcgaaaactttttttttttttttaaaaaaaagg

SEQ ID NO: 662720 - DNA, 183 bp, Homo sapiens
gattggatatagaatttgtgacgaacaggcgatatgcactggtcttgggcaacataccttgttgtacaactttagcatcgggactgctgtaaggggtaaaagctaaatgtgagtttctcctgctctgtccatttcctattaactaatgacaacttgagaaggctgggaggattgtgtatttgg

SEQ ID NO: 662721 - DNA, 536 bp, Homo sapiens
cttcatatcatgatttctctcaccctcccaatctggacccctctcccgaattctccatcttagttcataacatcactgttaacccagtcatccatgttaggacaatttcaattcatttataatccatgaaaccatgaaaaattgtcttctaaaaaccttaaagagagcacttcacactctcaaataaagacctccattgcccaactacttaactatcagccgaagacccccttctttgtcttcagcatgaagcaccaggcctaatcggactctgacccacttctggcagatcaccgcctcccacatccccaggctaccctatgcttgagccccactggactattcacagtggagattctttcacatttctagccttgcatatgctgctgctgccacctacagcagtgactctcaacaggggacaattttgcccctaggggacatctggcaatgtctggggacactttttgattgtcacactgggagaaaggggtgttactagcatttagtgggtggaggccaggcatggggtaccg

SEQ ID NO: 662722 - DNA, 405 bp, Homo sapiens
tatggaggtgacatgcaagttaacaataattaataaaaaatcttggcatttggttgctgaggctctttgagagctaaatatactgcctatatattatacttaataagacagcagttgttaggaagtgtttgcagtcagaatttaaacttgtttctaatcatactaagcatttaaaatattattttatttgaaggcgctgtgtgctatcttgaacatcagctttttagtataatttagatatccaagtttaactgaggttagttgctaagtgtaaaacattcaagtaattcatgttttggggttaggcatttgggcaaatgataaataacagacatgttctaaagtgccaagagacttcacttaatagtcctgagcataattagcaaaatgtacataggattaaca

SEQ ID NO: 662723 - DNA, 359 bp, Homo sapiens
  misc_feature (31)..(31): n is a, c, g, or t
  misc_feature (101)..(101): n is a, c, g, or t
  misc_feature (264)..(264): n is a, c, g, or t
  misc_feature (305)..(305): n is a, c, g, or t
caataaattgtaggtcattgatgccgatagntcacaactgaaagactccaaacatcgaggaaaacatgctgagccaaaacgcctggcaggcgtggctcgtntcaccacgatgaacaccaggagacagaatgtccgttgaggccatgcaatccatcgagatggacgaggaaaacagcgccagccagacagtttgcgcttgttacagcttcttctcgtggtcaggatgctgcgtagtctcccaagcggtggaagcatcttatcgtntgagacgccgtcgactacctgtcccccgtggtacgcacacnccccgtcctggacagtcccgatcaatgaccaacaatttattggggtaccgagct

SEQ ID NO: 662724 - DNA, 112 bp, Homo sapiens
cagcagctagatattacggtgttagagaaatgaatgagcctacagatgattagatgttccatgtggtgtttgcatcgtggtagtccgattaacgtctcgggcattccggcat

SEQ ID NO: 662725 - DNA, 151 bp, Homo sapiens
  misc_feature (2)..(2): n is a, c, g, or t
antagacattcttaaaggtgcacacagactttcaactgcactagtgtcccagttcagagtgaggtctccacagttaactaggtcaaacctgaccgcagattcttgtgaggacatcatgggaaaacaggggtgaatgtggcttgttgtgagg

SEQ ID NO: 662726 - DNA, 107 bp, Homo sapiens
cttctacgacgtcggcgtcgtccattcgcccaagcgcgatggactgaccaagctggtgcgaatcgagggcgccaacctcgatcgcatcaagcgttcgaacatcaagg

SEQ ID NO: 662727 - DNA, 3173 bp, Homo sapiens
  misc_feature (1435)..(1435): n is a, c, g, or t
  misc_feature (1515)..(1515): n is a, c, g, or t
  misc_feature (3066)..(3066): n is a, c, g, or t
aattcggcacgaggccacagtggttatctccaagctcagggcaatcccttccctcctgtcaactgctccccgactcctgcatggctcattccttcacaatgtcgccgtggctgccaggttcctcaggcagccccggtgggaggctgcggaccatggggactcagctctgcatggcaggcaaaggcccagggacactgacgtgcatgagcttgctgctttccagggtgtgttgagggtggccatgggtgacacgtcccactctttctgatggaggggcatccgtggtgccttctagcttagaaccattttccaggtctcttctgggttgggcaggactgatattcccaagctggtggaagatggttcatcttcctcgcacagtgtgggttcttggagttcatccagggaaggcggcgcctctttctcaggtcctgcaggctggtctctgagcctgcccccacgaactttctggattccaaggtgggatggtgatccctttgacccctgcagaccctctacttgcgaaaagcagcattgaagcagccttttcccattgtagaagggacagggagtcagatcccctcaaccccccggcttcagggaccccagaagtgccttccaagcttcccccaagatccacatcacccacgaccctgccactgtttttgctgtgttcaccacatctctgatcctgaagtgaattctggaactatggaccacattagactgggcagagattcgcccaacccctagcactccggctctgggctttcggccagaagttaattaacctcagagccaggagcctggggctggggcctccctcccaggccctgtttagctgtttagctggttgtgttttaagcaagttcttgcccaatcatgcatcctgctagaaaaggaaatgaagcaacgttcccagccaccgcaggcagttgtcggcgactttctgatgtaagcacctgggctccgacttgaggggggcccttcaagacccaatgtccatttcccaatccttgtcatcggcagggcccagggatgtgacaatttttgctaatggaggagtcacttctttttttttttttctttttgagatggtctggctctgtcacccaggctggagtgcagtggtgcaatcatagctcaccacagcctcaaactaggggtcacttctaagggatgctgggggttgggcggaaggggtgaggaggtaggattgagtaacttgctgtcactgcttgtactttgtagacagcctgagagtggcaggaccttatgtgaatggggggatggactgtgatcagtgccggggagtctctgaagctggggtccccacctccaggggcttctgctcagaggttacgtgtgcagtttgaagatgtacatcttgacctccggtttagaggcactttctgcccatcagattccaaactcnaggggcgcagcaccttttctttgctcccaaacaccaaccaacaccccttcacaggaccagcactgttaggatggctaagnggatgttttatgttcccacgtccctgatctgtttcagaggttgtgtctgctctcccagcccctgaagccaaaatgacttcctgcagctttcatgagctcagcctttccctggggtatgtgtgagggggaaagcctggttcaagtttagatttatttctagggagccctggtttcttcataccagaggctacccttagaactttggagtggggtatctttttttcatttgtttttttgatacagagtctcgctctattgcccaggctggagtgcggtggcacaatctcagcttactgcaacctccacctccagggttcaagcgattctcctgcctcagcctcccgagtagctggcattacaggcacctgccaccacacccggctaaattttgtatttttagtagagaaggggtttcaccatgttggtgaggcttgtctcaaactgacttcaagtgatccacttgcttcggcctcccaaagtgctgggattacaggcgtgagccatcacgcccagccgagggtatcttttataccaacaaattagatgactgaggtgtaatggacaaatcctatgcacaaagtgagggtatctgaatatgtgggcgggagtcaaaaatttttagctactttaacactaaagtcaaactaaagtagcttcaaaaagacttctcaagatgcagtatggcctgctgaggtttttttgttttttttttttttaagacagagagtcgctcgtcgcccaggccgcagtgcagtagcatgatctcagctcactgcaacctccacctcccgggttcaagcgattctcctgtctcagcctcctaagtagctgggactacaggcacctgccaccacgcccatctaagttttgcatttttagtagcgacggtttcaccttgttggccaggctggttttgttggccaattgtctctaaactgctgtcaaaaaaaggaatggatcagattgtcttgaatagggcagagctaacctgtaatcacctgtgtgatgagaaacagctttgactgcattttactcctgacctggcctaagctttctgtttacataagatttttcaagaattcaacttcaagtagcagccgagagagctgcctcaggattctctcaaaaactgggaataatatgggaacatttgtttcttctaaaaataaggcaaatgttacattgaatgatttggggggtgaggtttaattggaaatggtctctggggactgaaaactgatgtttttgcagattacctcagggaaacggaggtttgttgagtttacagacacattaaaccaaaggccgtgggaaaacccctctccagctccaggggattggtcaggaccacccactaaccagtgccttccttcttaacattcacttttagcagcttgtgtttattttacatgggcagttttgatgggaaattgccatgaccacaggggtttggagttctgctttttttttcttcttctttttcgggggactgggggactcctcccaagatcacattttagcatctttctctcctactccatttagaaaaanaagtaacaggtgaaatgtggtctcagtgttaacgggataattctgctaccggctcctccctgatgattctgaaatacactactgaacgagctctggctggtcctttc

SEQ ID NO: 662728 - DNA, 3293 bp, Homo sapiens
  misc_feature (1435)..(1435): n is a, c, g, or t
  misc_feature (1515)..(1515): n is a, c, g, or t
  misc_feature (3066)..(3066): n is a, c, g, or t
aattcggcacgaggccacagtggttatctccaagctcagggcaatcccttccctcctgtcaactgctccccgactcctgcatggctcattccttcacaatgtcgccgtggctgccaggttcctcaggcagccccggtgggaggctgcggaccatggggactcagctctgcatggcaggcaaaggcccagggacactgacgtgcatgagcttgctgctttccagggtgtgttgagggtggccatgggtgacacgtcccactctttctgatggaggggcatccgtggtgccttctagcttagaaccattttccaggtctcttctgggttgggcaggactgatattcccaagctggtggaagatggttcatcttcctcgcacagtgtgggttcttggagttcatccagggaaggcggcgcctctttctcaggtcctgcaggctggtctctgagcctgcccccacgaactttctggattccaaggtgggatggtgatccctttgacccctgcagaccctctacttgcgaaaagcagcattgaagcagccttttcccattgtagaagggacagggagtcagatcccctcaaccccccggcttcagggaccccagaagtgccttccaagcttcccccaagatccacatcacccacgaccctgccactgtttttgctgtgttcaccacatctctgatcctgaagtgaattctggaactatggaccacattagactgggcagagattcgcccaacccctagcactccggctctgggctttcggccagaagttaattaacctcagagccaggagcctggggctggggcctccctcccaggccctgtttagctgtttagctggttgtgttttaagcaagttcttgcccaatcatgcatcctgctagaaaaggaaatgaagcaacgttcccagccaccgcaggcagttgtcggcgactttctgatgtaagcacctgggctccgacttgaggggggcccttcaagacccaatgtccatttcccaatccttgtcatcggcagggcccagggatgtgacaatttttgctaatggaggagtcacttctttttttttttttctttttgagatggtctggctctgtcacccaggctggagtgcagtggtgcaatcatagctcaccacagcctcaaactaggggtcacttctaagggatgctgggggttgggcggaaggggtgaggaggtaggattgagtaacttgctgtcactgcttgtactttgtagacagcctgagagtggcaggaccttatgtgaatggggggatggactgtgatcagtgccggggagtctctgaagctggggtccccacctccaggggcttctgctcagaggttacgtgtgcagtttgaagatgtacatcttgacctccggtttagaggcactttctgcccatcagattccaaactcnaggggcgcagcaccttttctttgctcccaaacaccaaccaacaccccttcacaggaccagcactgttaggatggctaagnggatgttttatgttcccacgtccctgatctgtttcagaggttgtgtctgctctcccagcccctgaagccaaaatgacttcctgcagctttcatgagctcagcctttccctggggtatgtgtgagggggaaagcctggttcaagtttagatttatttctagggagccctggtttcttcataccagaggctacccttagaactttggagtggggtatctttttttcatttgtttttttgatacagagtctcgctctattgcccaggctggagtgcggtggcacaatctcagcttactgcaacctccacctccagggttcaagcgattctcctgcctcagcctcccgagtagctggcattacaggcacctgccaccacacccggctaaattttgtatttttagtagagaaggggtttcaccatgttggtgaggcttgtctcaaactgacttcaagtgatccacttgcttcggcctcccaaagtgctgggattacaggcgtgagccatcacgcccagccgagggtatcttttataccaacaaattagatgactgaggtgtaatggacaaatcctatgcacaaagtgagggtatctgaatatgtgggcgggagtcaaaaatttttagctactttaacactaaagtcaaactaaagtagcttcaaaaagacttctcaagatgcagtatggcctgctgaggtttttttgttttttttttttttaagacagagagtcgctcgtcgcccaggccgcagtgcagtagcatgatctcagctcactgcaacctccacctcccgggttcaagcgattctcctgtctcagcctcctaagtagctgggactacaggcacctgccaccacgcccatctaagttttgcatttttagtagcgacggtttcaccttgttggccaggctggttttgttggccaattgtctctaaactgctgtcaaaaaaaggaatggatcagattgtcttgaatagggcagagctaacctgtaatcacctgtgtgatgagaaacagctttgactgcattttactcctgacctggcctaagctttctgtttacataagatttttcaagaattcaacttcaagtagcagccgagagagctgcctcaggattctctcaaaaactgggaataatatgggaacatttgtttcttctaaaaataaggcaaatgttacattgaatgatttggggggtgaggtttaattggaaatggtctctggggactgaaaactgatgtttttgcagattacctcagggaaacggaggtttgttgagtttacagacacattaaaccaaaggccgtgggaaaacccctctccagctccaggggattggtcaggaccacccactaaccagtgccttccttcttaacattcacttttagcagcttgtgtttattttacatgggcagttttgatgggaaattgccatgaccacaggggtttggagttctgctttttttttcttcttctttttcgggggactgggggactcctcccaagatcacattttagcatctttctctcctactccatttagaaaaanaagtaacaggtgaaatgtggtctcagtgttaacgggataattctgctaccggctcctccctgatgattctgaaatacactactgaacgagctctggctggtcctttctatcctggatgtggttcttctgtgtagcaattccttgatgtccagtttggaaagatgtactcttctcaacaagaaaaacttaaatccgtcgtgcccaaatatagttgtgcttttatttcc

SEQ ID NO: 662729 - DNA, 1094 bp, Homo sapiens
aattcggcacgaggccacagtggttatctccaagctcagggcaatcccttccctcctgtcaactgctccccgactcctgcatggctcattccttcacaatgtcgccgtggctgccaggttcctcaggcagccccggtgggaggctgcggaccatggggactcagctctgcatggcaggcaaaggcccagggacactgacgtgcatgagcttgctgctttccagggtgtgttgagggtggccatgggtgacacgtcccactctttctgatggaggggcatccgtggtgccttctagcttagaaccattttccaggtctcttctgggttgggcaggactgatattcccaagctggtggaagatggttcatcttcctcgcacagtgtgggttcttggagttcatccagggaaggcggcgcctctttctcaggtcctgcaggctggtctctgagcctgcccccacgaactttctggattccaaggtgggatggtgatccctttgacccctgcagaccctctacttgcgaaaagcagcattgaagcagccttttcccattgtagaagggacagggagtcagatcccctcaaccccccggcttcagggaccccagaagtgccttccaagcttcccccaagatccacatcacccacgaccctgccactgtttttgctgtgttcaccacatctctgatcctgaagtgaattctggaactatggaccacattagactgggcagagattcgcccaacccctagcactccggctctgggctttcggccagaagttaattaacctcagagccaggagcctggggctggggcctccctcccaggccctgtttagctgtttagctggttgtgttttaagcaagttcttgcccaatcatgcatcctgctagaaaaggaaatgaagcaacgttcccagccaccgcaaaaaaaaaacaaaaaactaaaaaaaccaaaaaacacaaaaaacaagaaaaaaaaacaacaccaaaacaacaaaaaaagaaagaaaacaaacaagaaagcaaaaaaaaagccaacaaaacataaacaaacaggagggcgtccgtgcctattaaatatcttacccg

SEQ ID NO: 662730 - DNA, 169 bp, Homo sapiens
gcagcggtacggttcgcatgttcccaggctgacgtgcaatggctcgcttggtcacctgaactctgtctcctggttcaagtgagtctcctgcctcaggctcccaagtagctgggattacaggcatgtgccacacacccagctaatttttttgtatttttattagagacgg

SEQ ID NO: 662731 - DNA, 590 bp, Homo sapiens
gtggatgatcgcgagcgccggaggtggtccattatcgcatgagcatgcaaaatctgatagaaagatcgcgagaaggcagtgggacgcctggaggcagtactctcatacctctgacatgcaccgctgggtatgcacgacgagtcctatcaaaagcaggagtagctccatatgatgcaggcactatgactcgctgcttgctggtcctgtggcagagtacttgacgatcagtaaacgagattgggggagacgtgcagaaacatgcggagatggtccacacaggtttgaagttggagcgagctctgttggatacagcttctcagtgtcaacagccagcagaaaataagctttccgagtatgttggcacccatctcagagcagatcaaaagaagtgataacctttcgggacgaagaaccgaggacagcaagttgtataatcacctgtcagctgtcagagaaacgtatccaggccctgggctgggatggctatggctcccaaggactgggccttatgtgaaagacatgaatgatggcagccatgttttatacaaaccagaggtcctcaaagaggtacaaaagatgtggataagaag

SEQ ID NO: 662732 - DNA, 415 bp, Homo sapiens
ctgtttgggtcttggaagcttcctctcatgtgtcactcagtgctcaattcacatacaacttgattggcacagcattgtccgaatcggtgcctaagttcattaaccttgtcaggtccgtgtctctccagatcatcccgtgtgtcaacgatgtatatagttctcaatcctgaccatgggtcgcgtgtgtcttcatcaatggtttgtggagagtacatagattctctcccagagctcagcatgatccagtcagccatgtcccggcctgtggctacctttggtgaagagagacatatacggcctttgatatcctccctcttctgatacatctggcgcctttatatccctacgagaactagcagtgtcacacatctgtacacacagagcgtctctcttcttgtgcggcatctggagggcc

SEQ ID NO: 662733 - DNA, 405 bp, Homo sapiens
ggatccaccatagcgagaaggacggaaggacactggggagtgatgtacagaatgacactgtggagaaaacaaaagatggacattgggaagagacggactgacagacagttgggacagagtgaaagacagagggacactggggagagaagaacagatggacactggggagagaaagtcagacagagggccactgtggagagaaagacatagtgacactggggagtaaaggacagaaggtcactggggagaggacagatggactgtgggtagataaggaaggatagacaggcactgggaagaaacccagacagacacctgggagagaagacagagagctggtcactggagggaaggacaaacgaaacctggagaaataccaattggggggggggggggggggaattc

SEQ ID NO: 662734 - DNA, 504 bp, Homo sapiens
ttattagcctcatactgcgagggacgaatatccctctggttaaacataggctctcattaagataccataggcgaggggcatatacctggcaaggtcagagcattcatggattagatgtaggctttagtgttgatgtctatccacgtatacccatggccacagaaagaaacatgaaaaggtgggagcgacctagagcccgtggcctgggagtaccaatccctgccatgtgccgcgtgacctttcttgggctgaacccaccagctccgtgcttgtgcatctgcgaggccctgttgggaaggagtcacctgacaccgttgtactgtacacagcagatctgttcccctcccctctggctcctgacatccacgatccctgccttctacggtatactgtcatatggcttgtaccactaaatcaccaaaatattttggacatatcaatcttgtatcgggcacctggagggagtcccataatcccatcaggtcacatgacccaagtatcggt

SEQ ID NO: 662735 - DNA, 945 bp, Homo sapiens
  misc_feature (642)..(642): n is a, c, g, or t
ccgcccgacaatgtgtttttctctccgcagagctgcgcgggccctctccaaaagaagagacaccaagctgttcctggggaacgagatgacccaaccccgggtgggtccctcccccctcggcgggggccaccacctgtggtagttgcggcaaacaaaaaaaaagaagggggacccaaaagcccaaccacagtgggggtgctccaccgcaggggcggcgctgcacaaaacaccaagtggtctccgcacgaacgaccacgggctccgcgcgaatgtagatctgccgcccactggaccccacttgccccctgaggatgaactatctcgctctcggctgcccctggacacccccgggagacgctagataattctctgctggcttctcttttccccaaggaggtccgcacccctctggttcccgcctggctctcgccctccccccccgagtggtggacgccccgtcttgtggcagcgtgctctctcgcccccagctttgtgggagatgataggggatattcgcgacggcccctcctttgttaccctctgagtgggggtgcgtggaacagataatacttctctcttcggtgtctctatacctacattgtgtctcgcccctctctctcccagggagggggttttaattcnacaatcgcccccctctcttcttggaacaagactcctcaagagacctccctcttttgccgcctgccacacattatactctctgcagccccatcttgacccaacaagcaggttttcactactgacgatataccacttattaccatgattgtccccacgaaagacactcagtccagatatctttatgcgtggtgaaaaaagagtctgtttacccaaaagtgagcaagaatccccactagtagtagtaccacttctttaaggacccccccgcagagagtacccttcttccccccctccccctcatcc

SEQ ID NO: 662736 - DNA, 1028 bp, Homo sapiens
  misc_feature (957)..(957): n is a, c, g, or t
cagcacctgccaacagaattcatacgagaaggcgacgatgaccggactgggtgccgggagatccggcacaactccacgggctggctggggatgaagggcccatggggccagggcccggagaatctggctggggactggttcaaccacaaccccttccaagctaaacttggggcggaggctcaccaaatccttcaaggtcgttgaaaggttgaccagaaaatccacgaggctggtaaagtcctaccagtggaaaatgctccctcctccttgctgaagcaactgaacgagcagttaaactgggtgtcccggctggccctcacgcagggcgaagaccagtactatctgcgggtcaccacggtggcttcccacacttctgactcggacgttccttccggtgtcactgaggtggtcgtggctctttgactctgatcccatcactgtgacggtccctgtagaagtctccaggaagaaccctaaatttatggagaccgtggcggagaaagcgctgcaggaataccgcagaaagcaccgggaggagggagatgtggatgttgcttttgcacctacgggggcatctgagtccagctccccccaagatgagctgcagccgcccagagagagctctgcacgtgaccaagtaaccaggccccaggcttcaggccggcaactgcggccagcctgtcgcggtctggatcctgcactctgggactgggggggtggtgctcatgggaagaacagaattgctgctgcatgcaagtgattcaataaaactgtcttgggaggctgggaagaggggtgcgggggtggggggggggaggggggggggggggagggggggggggggggcgggggggggagagtggaagaggatggagtgggggacggtgttcgagctggcgtgggagaggccttgggggccccgacttaagaggcttggggccggtccgcttgcgcggngtgcggggatggcggggagggcggggcggagggccgtgcgaagaggtggcggcgcggagatgggggggggg

SEQ ID NO: 662737 - DNA, 295 bp, Homo sapiens
  misc_feature (156)..(156): n is a, c, g, or t
agggggccccccccccccaaaaccctccattacgttggggcccctggccgtaaaaaacccttttcccaccccatttgggtgggggcgggggttccccctttttcttgaggctggggagccccccccgggattacccttggccaggggggggggggngcctttcagggcccctggttttggctccaaaaccaaaaaaaaacccttgggaaaagccttttaaattaaccccaaataagcctttgggggaccccccaaattttggtaaaaaatttttaaatttaaacccccaagggga

SEQ ID NO: 662738 - DNA, 242 bp, Homo sapiens
tatgctgcaactcatcttcataagctctctctcacagcatccaatgtctgtctcctctggatgaggaatgctcagtcctgaaaggggtcggtccaggaagtcgagagacatcagctctcaactgtaattccagctactcaggaggctgaggcaggagaatcgcttgaacctgggaggcggaggttgcagtgagccgagtatggtgccactgtactctgtatagggggatactcgggaaatta

SEQ ID NO: 662739 - DNA, 235 bp, Homo sapiens
gatatgcgtgccggtgcatgaggaaggttatctgaagggcggggccggagttgacgtcggagagggggcagactgtccaggtcacggtgtggagattcataaaatagcgtactgggtcacacaagatggtcatgtctggcccagtgccaggtggctcctttgtgtgcggggctcgagccttgtagtggcaggagagccaatatctccctaagcgcgacatacagaacctgttcct

SEQ ID NO: 662740 - DNA, 150 bp, Homo sapiens
ctcacccctggattctcagataatgcgatcatgttattctcaccagattgcactcttaggaatacattagagtgtacttcagaagacagtgttgtaaagccagagtgtatcagagaagtggttgagatacgtgaggctgttattgtgaag

SEQ ID NO: 662741 - DNA, 988 bp, Homo sapiens
caacgattctgctcaatgacccagtaagtggagaagatgcaggctggaccaccgtggggtgcacatggcagggctgcggtgcactaccgtgttcgtgaaactacagagtcggattaagttcctggtcatcgccctcaagagctccgtgggaggatgtatgcctgtgtgcccccaaacctcgtaccacaaattcgatggccgttcaagatcctttgccagaccgtcccccaccgtcctctgctggtcgatctgacagtgaagaggagtggtgcacgcggctcagaggtcatctatggctccattgctggcttccatgctgtggactgtcgactcggggaagcacgtcgtatgacatctacatccctgttgcacatccatgtagccatgatcatcgcctccatgtccatcatcttcctcgccgcaataccgacggcatggagatgctgctgtgctacgaggacgaggggtcgtctacgtctaacactgtacttggggcgctatcatttaaggattgtggttgcttgcagtggggggagatgcctacttctgtggcctacatctgcctccaaccagataatcgggctaggggtgagaaatgccattgagatccggtctgtggagacgggccagctcgacggggtcttcatgcacataacgatgctcagatggctcaagttcctgtgtgagcggaactgacaaggtgtatgatgcctcagtccgctctgggggcagcaagccaagtttacttcatgactctgaacctgttgctgcatcatgaactggtgacggggccctgggctggggctgtccaactggacccaggtctcccctgctgccaggcttcccgggcccgcctcctttccactccctggctattggtttactgggttggtttccttggagcttgtggaacgtgacctctgaccgctgatgcttcgtgatcagtgacattctcttcgccaaatttctcttccaactgtgctttgca

SEQ ID NO: 662742 - DNA, 211 bp, Homo sapiens
attgttaaataatgatatgtaactaaaaaacttttaaaataaataacaagtaaaaaatgtgtgtctccctcagggttgtttaaagtttattttctccctcaagtataaatagtggtactatatgtttagtatcttctagcccaactgctgtaaaggatgctgcaaataatgcttgaatacagtggctaagccacaacggaataaataccct

SEQ ID NO: 662743 - DNA, 196 bp, Homo sapiens
atcgggccgtactgggctgcgcgcacgtcccagcgggcgtgccggtgcctttgccgtcagctttcgctcaccactcagatggatgccgagcctccggaccctcaggcgttacgctcagcgccacggttggtggccgggcgagggcgagttccctctttccgaagtcttttctcgagttgaggatcatcctagactg

SEQ ID NO: 662744 - DNA, 927 bp, Homo sapiens
  misc_feature (9)..(9): n is a, c, g, or t
  misc_feature (52)..(52): n is a, c, g, or t
  misc_feature (64)..(64): n is a, c, g, or t
  misc_feature (85)..(85): n is a, c, g, or t
  misc_feature (679)..(679): n is a, c, g, or t
gccgactgntgtttatcctgtcactcgccagaggttccttgggtcatggtgnccagcctgactngagaagaaggacgctcccggngagacagaatgaggaaccactctcctctctactgttcaatgtacaggggcggcctgtgttccgcacaaggtgaagaaaacgcaaagagacggaaaagtggcttaaattcggtgattccgcccaagcacattgccggccgactgcatgtgaccattactgcgcgctggatccaagggacgctcggcttaagatattgacatacattgggacagacacaatgttaatctttaagcctcgaaaacagattctgcttacgaacgactggttctgggaagacgcccaccctcttttaaccaaactgccgtggtgtggcagaatgtgcccagaaagagcacgttggactcccggaaaggttcacgagtcttctaaagcttcgccaatgttactatgggcccctttcgcgttgtacaatggactggcgcggggacggtacactaagaagaatctctttacaacaataagagtagaatgcatcagtgataaaatggaggcacacaagccaatttgttgggcttgtggcccatgttactaaattttactctaaatgacccggtggatgtgcgcacagcttatgtggtatctgtgaagggactntcttctgtgactgaggtgacttatagaggctttggcataggatcagaaaattctggagaattctaggccagggtggccatgaggtgtcgctggcagcagatgcccttttggtagcggaatggatgaaccatcctcattctttaaaagaaaacgtggctctgattgccagtgaaagggttggactgttcaaaattcacacggggtttgtctcaatgggaccgcgagggggggtgcggtgaataaccctc

SEQ ID NO: 662745 - DNA, 308 bp, Homo sapiens
agtaactacgctgcctaatatcacatgcctttagtaagggtcagtgccagattctgtactcactatactgatttcaaagcctatggtgctaattagtacaacactaccttgcccttatggcaagtatttctttagctgaatagagacgtctcccattcccttctgaaaggaagactcttgtccatggagatttgtaatttagtaggaggagcaggtgtgctgagactcaggttgcaagatttacaagaaaacagacatgctatttccaccctaggaagaacttggatactgaacatgtatattcttga

SEQ ID NO: 662746 - DNA, 259 bp, Homo sapiens
atcaactttggctcagtgatctcccactggctcctaagctctggaattatagctgtgaagcactggggcttggtctgaaatctcttttttttatttatttatttatttttagagagacgatctccttctattcgcccagcctggagtgccacggtgtgttatcacagcccaatgcagcctcaaactcctgggctcaagcaatctttccgcctcccagttagcttaggacttattggtgtgtgccactacgcccagatta

SEQ ID NO: 662747 - DNA, 139 bp, Homo sapiens
actcggccatgtttactgttaccaggtgatcctattaattgtatatcaacaccaagctggtgattagcagaacccactattttcctacccaattgcaattcctttctaatttctcatgtaattttaaagcgtattgata

SEQ ID NO: 662748 - DNA, 255 bp, Homo sapiens
acgtatggcctcaggttagtggaaggtgacacaatgactgtctactgtgagtctaagagaacaagtggtgaggacgcagagccagatactaggcggctctttcaaggataccatactgagaggacagaggctggtggttggggcaagaggtggctctccagcaggtcatggcatgggctcttggggcaggaaagtgcatccagtagcagaagcagaggcgtcgagtgcttccttgcaagagcatgcaggagcagc

SEQ ID NO: 662749 - DNA, 168 bp, Homo sapiens
  misc_feature (153)..(153): n is a, c, g, or t
atgatctaaggatcccatccccggttctgggtactttctgcatatcatctcatctagcctctgtctcatgtcctatgagggtaggttcatgtcactatccattcctgtacagaataaagaaatactgcaggtttggcaagggagaagacactngacccagtgcaccca

SEQ ID NO: 662750 - DNA, 1009 bp, Homo sapiens
ggaagttggtgggaagcgtgcggtgtcgcagcaatggcggcgctcacaattgcccacgggtactggcaattggcttttcggctttggcgctcgcgggtgactcttctcaaatgccttctcatccccacataccattccacagcattcttgacgctacaccgaacactggcttgctatcactcacagtttgccaatatcacagtggctattatgacggcaacttcagcagtggacgcttggattacccccctttcttctgcactggtttgagtactatcctgctcacactgtcgccaaatacttctcgatcaacgaacatgctgaactgtccactaacttcgacactcactccagcctcaaggcacctctactcttctccacgcagcatttctccgctcatctcttatgcgatgctacctctctccgcctcgtactgctgctccgcgcacgtgcctgctaaactgcatcgcactgcgcacaacacaagtggcgtaaacgaacttacagcaacacgtcacaaaattttatttcctgctcgcgtactctcaccttcatgctggaacctttcgcgcgcttaacttaacttgctggaccccactactctcactttcccacgctaacaaattgcgccttctctcaactcctgggcattctaactggcctacctccctcccacttttgccacccgcactcaatctctcacgaacacaggccatactgcgcacagcgtacgcacttttcctcctctcgcctgcttcctccttacttctttccaacgcattatcctacactctaatgttagccaccaagctttaactgggttgctactctcctggcctgtcgattcccttacctggctttccacttgccgaacttacaacccagattgggctctaatttccgactgggacagaagttctccagcctccgctctcgcgcatccctttcccttgccgcacctggctcgcctccctccgccctcccggccttctccccctcggcgcttcat

SEQ ID NO: 662751 - DNA, 221 bp, Homo sapiens
acccttccccacagtagggtgtagcagcggaacaggcaatgccagacacaggctcgctgctgctggaagcggggtgggacttcattcctctgtccggagagcacaggtgtcacatgttccagccaaagctcctcacaggcgctgtaaatttttgtacaagtcttgtaattatcgaatcaacaatttgtttcattttaataaaaatgctcatgtggggaaag

SEQ ID NO: 662752 - DNA, 313 bp, Homo sapiens
tgttgaactatcctctgtatgttaatatttaaatattgtatatggcctatgcagctgtgcttatacacacaaaagagctgggtttatatgttgtgattatttctaagctctctgcgaaaaagttacaaatcgtctccttaagatattttttctttgtaatttttttatatcatgtcgtgatttccataaatatgtgcagttactcttgataatacttgtcttattcacttcaggttgctataacaaagtaccatagactgggtggcttataaacgacagaaatttatttcttacagctctggagctggaagtc

SEQ ID NO: 662753 - DNA, 432 bp, Homo sapiens
agaagcgatgtttacgttattctgacagcgcacgggtaacgtcatacccttctataatcaatacggaggctacctactccacattaccttcttttcaagggcctgtttcccttgcctccataactggggtgggtattgacggtcaggcttctaaatctcttaaaactccccaactctggtgccaacttggacaacattcttttatgcactcctttttagttatccccacctgcccagctcccttatgaggtcaagacattttaactaaattatctgcttccctgactattcctgggctacagccacacctcattgccgcccttttccccagttcaaagcctccttcacatcctctccttgtatctccccaccttaaaccacaagtataggacacctctactccctccttggcgaccgatcatgcacccctta

SEQ ID NO: 662754 - DNA, 118 bp, Homo sapiens
tgcgtgtggcagttttaagttattagttttttaacaattcagctacttttaagtggaaacaactttgaccaaaaattttgctcacagcaatttttgagacccatttaaaaaagtttaa

SEQ ID NO: 662755 - DNA, 827 bp, Homo sapiens
  misc_feature (44)..(44): n is a, c, g, or t
  misc_feature (48)..(48): n is a, c, g, or t
  misc_feature (53)..(54): n is a, c, g, or t
  misc_feature (59)..(59): n is a, c, g, or t
  misc_feature (61)..(61): n is a, c, g, or t
  misc_feature (66)..(66): n is a, c, g, or t
  misc_feature (72)..(72): n is a, c, g, or t
  misc_feature (80)..(80): n is a, c, g, or t
  misc_feature (111)..(111): n is a, c, g, or t
  misc_feature (113)..(113): n is a, c, g, or t
  misc_feature (130)..(131): n is a, c, g, or t
  misc_feature (139)..(139): n is a, c, g, or t
  misc_feature (157)..(157): n is a, c, g, or t
  misc_feature (289)..(289): n is a, c, g, or t
  misc_feature (293)..(293): n is a, c, g, or t
  misc_feature (301)..(301): n is a, c, g, or t
  misc_feature (303)..(303): n is a, c, g, or t
  misc_feature (326)..(326): n is a, c, g, or t
  misc_feature (329)..(329): n is a, c, g, or t
  misc_feature (341)..(341): n is a, c, g, or t
gcgcgatgaagaaagatatatttggccacggcagccggcggggnctangtgtnntagcngngtggntagaantcagacangcttccctcaggaattgatgtgcatgaggantnctggagaataagaaggnntgaagtanagatgaaagagaatgttncacacaaaggaaacatatgcaagcatcaactcaactctatgcctacagttctgggtcagaagaactgccaagggagaaattatgcattgcctgcccccagttccctcatgcctactacatgaaggaagaaancacnctcaaaangnggaagccaaagcaaactcccatnctngactagaagacncagcttgccatttaccattccattctgagaggcaaaagttctttctctcagtcccttttccccagaaactgtgagaaggtgcagagttgttggatgaagaagcccgttcatcaagggctcctccctgtttcctgtgctctttatcaacccaaactcagtgtgcctacttggccttagcagtttccttcactcctggactgatgggtggcacatgattgtgcacttaaataccacagtacagacgggaggaacacctggctaataactcacagccccaatgtctcattcagtaccttagcccatgtaacccagactaacttgagcagggaaaggactctctcatccttgactactgcatgatttattacatcctaaacagagatgattaccattcaattttatctgtccttaaaaaattatttatggccacagaaacatcagcaccgcttttcctcacctaatgagagactaagggacttttaggaa

SEQ ID NO: 662756 - DNA, 224 bp, Homo sapiens
  misc_feature (190)..(190): n is a, c, g, or t
  misc_feature (198)..(198): n is a, c, g, or t
ttcggccgggatactgcactgacatccccggatcctgggtagcttggattacaggcatgtgccaccacgtcatctaagttttgtacttttagtagagacagagtttcgccgtgttggccaggttggtcttgaactcctgacctcaggtgatctgcccgcctcggcctcccaaagtgctgggattaccccnggctaaangcttgtttttaactgtacctttgttt

SEQ ID NO: 662757 - DNA, 850 bp, Homo sapiens
ggtctgggtccagatgtggccccggcccgccaccccggggcgggcgcccacacggagccgcggtgcgcacgtgagctgtcccgcctgccaaatgcgcggcgaagctgcggctgcgacttggcgaggtggtccctaacgttgccgctcggcatccttagaacctgggcggaccctgagcgccgctgctggggaccccatgtcgcccgcgcgccccatgcgctcactcttcggtgcccggcctgggccggcgcctcgcagacgcggagccagcgcgggtgacggaacagggccggtgagctgccacatgcacagacaagcccagaccacgagagaaggagaggcgcaggcagcagacatgagaagacacacaagcaagaccctcgacgacgagaagacacgacgtgcaaggagagccgaagggatgacacagcctcgcacaacaaagaggaacaccgtgcagcacgactgaccaccacacgccgacagcaccacggcgacagccaccgcgccataatgcatgcgaaccacctaagcaccaccgcacgtgaaggcggagacaaccactaggcgagaacaagaccaccgaaatcaaacgcaccgcaacacagggacgacgaagagaggcgagcgagacacaacagcgaccgagtgaggcgagcgagccaggagagacaggacacagcgacggagaacgtgggggaaccacaggcgcaagaagagagtgacgacacagagaacgagcgccggcagacagacggacgcggacgaaaagaaggccccacgaggtcagagaagtcaacagagagaaacgcaacaggaggggcaccgcggcacatagcgcgaggggaac

SEQ ID NO: 662758 - DNA, 118 bp, Homo sapiens
ctaacaaagttagcctgatttattcagtgtagtgacaaccagcactgtactctgggtccatgagtcccctcgttggccctcctgtgggctccattatgaccgagatgtgtaagtctat

SEQ ID NO: 662759 - DNA, 153 bp, Homo sapiens
  misc_feature (69)..(69): n is a, c, g, or t
  misc_feature (99)..(99): n is a, c, g, or t
  misc_feature (102)..(102): n is a, c, g, or t
ggaagccgtttttggggtcgcggtccggactttgggcggggggtcggcccaggacagttttaccgcatncgtcactccgattcttcatggatccggcgnctnactttacagaggtcaatcacgcggacccagaacccatggtgaccgggacct

SEQ ID NO: 662760 - DNA, 130 bp, Homo sapiens
atttttttatttcaaaaaattttgttttgcggcagggttatcagctttttgaaaaagtcaaaagctgcagtaaacttttccaacgttggctgcagtaacaattttcaataaaagctgtttggatgtttca

SEQ ID NO: 662761 - DNA, 1123 bp, Homo sapiens
  misc_feature (274)..(274): n is a, c, g, or t
ggaactagtcttgagttttttttcttttgtggtcttcactataaaaatgcttaaatggtggtgtcttgtccgagcatggttttggacaggaaaaacagcaattgcccccagtggagacagtgccacagtgacacgcgctgggagttgattaaagatttcacactgctttcccgtgttttccccagttgcctgaaggcctctaggccacctcctcctcagcctcctcctcgaattcgccctcctcctcggctgtggcactcctggtactgctgcntcactcggaccaccaggctcatctcatgtgtttgcctcctcggccaatcggagaaacctccaatctgtcgtccagtgcccttcgccccggtgtataccagtgtgcagagaaggcctttgcacgccgataaccattggcccgtaaccgtgcctcgagaagattgccctttgaacacagcctccgtgaaagtggccgttgacttgtgtgcacaagtgcacagcggtgcggcgagacaattcttataggcgccctcgaaggtgtggcaccatgctcacatgtaacagcgcgattttcacacattgtgctagtgcggagaactccactctcaacacaaaaataggctgttgccgtgtcacagcgctctgtgggagagcatttataacgcactttgtgcttcattccccacctctcgcttatcatgtggcaccatttgggcgggccccctattaacaccactcgtgtcgggcacactccgctcaagcgtataagcgcgtgccatttggcgcggcgggattccgcaagtgcagcgccacctccagtgtgtccgtttgcgccatctccaacagcatctctgtggcgttggccgttagaagccctccgcggcccacccgggctcacgccgcccccgaggtatccgtggcgtgcgcgatgcccccgctgcttggtacccagtggcgcggcgcaacaggccccggtggctattgcacaagcacaggttgccatccgggggggaaccacccgggtgcccctttgttttccacaggcccactctctccccgcaggtttccgcacattcgacgtctggcccctgtggaacgcccgccggtgctacggcttggatgaacccca

SEQ ID NO: 662762 - DNA, 735 bp, Homo sapiens
cacacgagaaaacaccctcatgtgcaataaagcgtatcccccattgctccatcctatccctcaaccccgatcatcattaccgcggttttcctcttataaataaaaagaagaaaaaaaacaaaaaaaaaaaaagaaaaaaaaaaaaaaaaaaaaaaaaagggggcgcgacgcagcaaaaacatcactcgctccggaggagacgcccgaatacacacgctcaccccaccagaattttcgtggaaaaaggagggcgccccacatataggagagggagcgcaccaatatatatatataacccaatagaagaacggggcgcgcgcgcgcatataaacaaacggaacggacgcggggggaaacaggagcaaccacgggagcaccttggagaagaaagaacaccccaatctctgggggaggggggagaaccacccacgtggcgcgagcacaacacacacccaaaacacaagaaatattataacaagacaccctaatggggaggacaaagataataataacattttcacaaagagggtgtatatacgaggggtgaacaaaaaaaaaagagcgtcagaaataaattgcaggtgaggtgaccgacgagagaaaatgtttgttggctgttcataggagagttattatgataacatattatggaaaaaatatatattatattaccaaagaggagaaatatataaataaaaaaaatatacaagagggtatataataaaaaaaacttga

SEQ ID NO: 662763 - DNA, 934 bp, Homo sapiens
gcaaaggatgaggaccacagagattcactttcgaggaagtccagcccaagcatacaatacctgtagcagaaggttcgcgccaaggagaccaggaagccgagccactcagcaccgttaaagtcatgaagctgcaattcaaagatagtacgctagaagtctctgtgggcattcactaatctggttccacaatggctctcacagcctcctccgaagtaatagcgtcttatccggagattagacacatatgaaccagctgaaagaagccaggacccggacctttacatacaagttactgcgctggctttgcttctgcctagctgataccaacgtacgggtctcagaatctatgtggagatcgtcatggcattatactggacgaaagaggataacagaagagctaaaacggtttgatgatccaggttgatgctcatgggtttcaagccgttggtactgcgtgaagaaacagccattagcgctgaggccctccctgttcgtgtagcccagaggagtcgctggtgattgggagctcaaccctgttcagtgctctgctcatcaacgtgtctggagaaggcaggtagcagcattgtgcagatacacaccccgaggaacatccctccttattttgtggctttggtgccacaggaagaagagttggatgaccagaaaatttcaggtgactcctccaggcttccagctggtctttttaccctttgctgatgatacaaaggaagatgcccttttactgaaaaaatcatggccaactcccagagcaggtgggcaagatgaaagctatcgttgagaagcttcgttcacatacagaaagtgaaagtttgagaaccccggctgagagcacctcaggaacctggaggcttgggctggattgatggcaccggaaagcagggactgaattggccaggtggagcatgataaagcg

SEQ ID NO: 662764 - DNA, 487 bp, Homo sapiens
  misc_feature (487)..(487): n is a, c, g, or t
tattacacataaaatttcaccaaatttacatctttattaatttttacatttttaacacatctttctatctatcactcatatcaataaacattatcattacctttaatactctctctttccctttccatacacttccatccacttttcctctcccctaactcctccattcacctttccccatctcctcacccacttttccccattaaatcatcctttttactcacatcattttctattattttaaattttaacatttaataaatatttaacacttccaaactttaatttctcattacattatacatcataatttttctaaatcttacaaacaatttatatttcttcattttcttcatctttttatttttttaaacatcctatacttctctcctatttctttccaaatctttattttctcattcttcaacaaaaactttttttaaaattcccaccttcccttttcactccccttccatccattcttcan

SEQ ID NO: 662765 - DNA, 257 bp, Homo sapiens
tggcgggcctcattatgtaggtaaagctctacgactccttgagccaacttttaatgtaactggctatcctaggctggggcttgacttaagtaaggaagccagggagtccagatctagatagcagagaagtaagtctcattctaaaacatggcaactacggttagagtccaccccatgaagctgtaacagattgtgtatcttggactgaattctataagtatatatggtccagactaaaacatatgttgctagctagg

SEQ ID NO: 662766 - DNA, 364 bp, Homo sapiens
  misc_feature (354)..(354): n is a, c, g, or t
catcttctgtaactttttctctcctataatacagaagcactgctgaagcatctcttttttgtctgatatatagaaactaactggtttcaatgacacagtcggtccagtccaccttcttcaaggtcactgtgtctgccaagaataattctttttccaaagttggcaaaatatatttagtttcctgctgcaaggagcccgagacgctggaagagtcggtactcctcccgctatctcgcggactcctggctccatcgctcgtcccgccacctaacatgtgccgccgctccccaccgctcggtgatatcttccacctaaaattggcgttccctacagcacgtgaccgtccccctagcncacttcgtcc

SEQ ID NO: 662767 - DNA, 596 bp, Homo sapiens
  misc_feature (295)..(295): n is a, c, g, or t
  misc_feature (387)..(387): n is a, c, g, or t
  misc_feature (458)..(458): n is a, c, g, or t
gactgtcgcggggaagctgcggacggcttcggacccggaacaacagagcaaggaaggtcgggaatccggagactcatcgtgggagctccatagacaaagcgtggtccgggggcagagcgagtttcccatgcgaagcagctggagtgagcgcgtcgctcgctcttcgatcactacgaatgccttgatctgtccatgcttactctctctcagcgaatccgagcgtcatccaggtatagcaagcggcgtggtcgactgccgtaaatcgacgtctatccggagtttcgcatcgtattcnaatcagggagttgtggagatcttgacggggtctgtgatgggatagaggctttgaatagttatttttaatcacaaggcaatacctacttagantgtggtacttggcaacgaaagcatggtgggactgttgtagcctgaataggggttaactagttgcatacacntttacgagagactcgtagatccatgtcgaggtaggttttagcaaagcaatgcactggtcgaattatctaatagcgttataggggataggattggctcttcgagaaggagggagctgaaattgctcaagtatgggtaaa

SEQ ID NO: 662768 - DNA, 1141 bp, Homo sapiens
  misc_feature (160)..(160): n is a, c, g, or t
  misc_feature (168)..(168): n is a, c, g, or t
  misc_feature (277)..(277): n is a, c, g, or t
  misc_feature (321)..(321): n is a, c, g, or t
aatttgagggggctgagaatgaagaacatgagtatgacgatcgagggaatcgctgaagaggacggatgtagatcaagaaagaagattagcatgattggctgccaggtactgtacaggacaaacgaaggatccctgtaatcttgcacgtgagcgtagcaantcggactngatgagtgtgcctgagtgacagagaggctgacaggttgaattgatcagtcaatcgacggtgagagcatcatcgtgatgatgtgaggtgatcatagtgagcgtgtggaanaaggcgttaaagagcagtgatccgtactgatcagcagaatgcantatggagtgtagagtggaacttacgtacatcgcatcatagagatgcgggtggcaagtgtacatcatatgtatgcggacgagtcaactgaggggctgtctgatcgtctccatgagccgatgggagtccgatttctcataaaatcaaacaggtagacctggctcctgacgtgaacatatgattactggacctatccatgtacctcgaaaggtgactcgacatctactacttgcggtcatcatgagttacgatggtcattggcatgactcgatgggccgtcctcgaagatgttgaaggaggcaggcgaaggaaaggaggtaggatcgtgtgcgtgtctgagatccgacacgtggatggacaaggcgggagctttcgggtgtttgtctgtccactggtggtaggatgatcgctgatcaattgccctgggtccgcgattaccttcggggtgccttggtgcacaaggcgtggttcctttgtcgagcctttctgtttagtgcatggctggaaaaagagtgcaaccagcaaaaaatttaaccaaacacaagggggggccaaaaaaggcgggggcgacggtaggcacgaaaatggcggaaggctacatattgacgcagtcacacatgtcgtgtgcccgacgaaagacggtcctttcatacgagcaatgtggagagggacaccacacagcgcatgcttgttctgtccttgttcttccgttcccttgttgcctacgctttttccttgcttctcatcgcttgatgcgtcgtaatcaacccgaacaacatggacacacaggtacgcacaagacgaaagagcggccaccaagct

SEQ ID NO: 662769 - DNA, 210 bp, Homo sapiens
  misc_feature (113)..(113): n is a, c, g, or t
  misc_feature (135)..(135): n is a, c, g, or t
  misc_feature (166)..(166): n is a, c, g, or t
  misc_feature (180)..(180): n is a, c, g, or t
tctttgacgtgcatgtccacgaggtggtggacgcctcgctgtcagtcatcgcgcagaccttcatggatgcctgcacgcgcacggagcataagctgagccgcgattctcccagnaacaagctgctgtacgccaagnagatctccacctacaagaagatggtggaggnttactacaaggggntccggcagatggtgcaggtcagcgaccagg

SEQ ID NO: 662770 - DNA, 126 bp, Homo sapiens
agagattggtagtcagaatgtgtaagggacttctacagttcaagactaacaatgacaaccccgattaaaaaatgggcaaactgaaactctgtacccatcaaataacaactcaccattctatggttg

SEQ ID NO: 662771 - DNA, 194 bp, Homo sapiens
gtcgagagtcagcaggttcactgctgttggaatggcaggtgtcctggtgctggctaggttcatggctgccgagagggtgaaggaatcctgctggcaaggttggctgctggtcgggttctgagactcatgagaggcaccgggcctggaacctgggacatccttgcagcaaggccagcagcagccatttacggtgc

SEQ ID NO: 662772 - DNA, 216 bp, Homo sapiens
ggcaggtagatggaaatagagatccttctcccttcggtacccatgtgatttaacacagccatagaagggtcaagttttggggtgggggcaccatttcaaagatatatttctattaagcttcttgagagtgatatgaagaagaaacgaagtatagagtctctcagatgcaaaaatcacttagaggtaggccatgtatccatccttatcacacttcac

SEQ ID NO: 662773 - DNA, 232 bp, Homo sapiens
ccagtccttcatcatacctaccttccgaatgtaaactggccgtaatcccagcactctggaggctgaggtgggaggattgcctaaggtcacggagttcgagaccagcctgagcgatgtggcaagatcccatctctccgaaaaaatacaaaaattagccaggcgtgattgtgtgtgcctatagtcatgtttactcaggaggtagaggtaggtatgatgaaggacggggtacgag

SEQ ID NO: 662774 - DNA, 216 bp, Homo sapiens
tatacgcaatgaggaataagacttgcctagtgttcttacctctcccgcagccgagtggtttctggagctggaattaacagctgagatctgtttcactggcacacctttctgtttatctgcggatgcctttcctctggaaggatccttctcctccaagacaacccgctgtccgtccagactcgatataggggcgccaaggaccgtggggtaggaggt

SEQ ID NO: 662775 - DNA, 393 bp, Homo sapiens
  misc_feature (1)..(1): n is a, c, g, or t
  misc_feature (75)..(75): n is a, c, g, or t
  misc_feature (79)..(79): n is a, c, g, or t
  misc_feature (98)..(98): n is a, c, g, or t
  misc_feature (103)..(103): n is a, c, g, or t
  misc_feature (120)..(120): n is a, c, g, or t
  misc_feature (346)..(346): n is a, c, g, or t
  misc_feature (364)..(364): n is a, c, g, or t
  misc_feature (385)..(385): n is a, c, g, or t
ntgaaggctatcggttgagaagcttcgcttacaatacagaagtgacagctttgagaaccccgtgctgcagagcancttnagggaacctgggagccttnctttnggatctgatgggagccnggaacaagcagtggacctgacattgccccaaggttgaagcaattgaataaaagactgggctccttggtggatgagtttaaggagcttgtttacccaccagattacaatcctggaagggaaaagttaccaaggaggaaaacacggattaatggaaggttcttgggaagccaaaaggccccaaggtggggagtttttccaggaaggagggagcttgaaggaccccacntccagccaaggggtacgnttgggccaattttcactgttngccccttg

SEQ ID NO: 662776 - DNA, 260 bp, Homo sapiens
tcgatgccttggctgagtgaagacctaaagactctgggttgatacctgaaagaatcctgtcttatttggtctccataatcctctgaatggaaagtgacctgtgtgtgattgaaccatggagaaatttgtaaatcctggattctgagtatctgaatggcagggcgtttagtactgtctcccctgtaccagcatacttgatttcaccatgtttactccttattcctacaaccagtttatatctgtgtaacttatctcctcat

SEQ ID NO: 662777 - DNA, 414 bp, Homo sapiens
tgacaacgaggccctctatgatatctgcttacgcactctgaagctgaccacaccaacctacggggatctgaaccaccttgtctcagccaccatgagtggtgtcaccacctgcctccgtttccctggccagctcaaagctgacctgcgcaagctggcggtgaacatggtgcccttccctcgcctgcacttcttcatgcccggcttcgcgcccctgaccagccggggcagccagcagtaccgggcgctcacggtgcccgaactcacccagcagatgttcgactccaaaaacatgatggccgtctgctacccgcgccacggtcgttaacctgactgtggctgccatttttccgggccgaatgtccatgaaggaagtggacgagcagaagctcaaccggctaacaagaaacagcactc

SEQ ID NO: 662778 - DNA, 155 bp, Homo sapiens
tccttaaactatacttcaacctacagcctaatctacatccacctcaatcacactacatccccatatctaacaacgtaaaaataaaatgacagtttgaacacatagcctcatcatccccacgatcatagccaccatcaccctccttaacctctact

SEQ ID NO: 662779 - DNA, 302 bp, Homo sapiens
tgacatctggagagaggtttgtctggctgacgtctagagaaagggttgtatggctggggtctggatgaacacggggcatctgaccgacgggccgtgggaaacggtttgtcttgactgacgattctgtgacgagagcgtttcgtctgcgctgacagttctaggagcaaacgcggcttgtactggactgacagctctgggagacaactggcgtcatctgagccaatgggtctgggtgacaccgggttcgttcctgagctgagattctgtgagagacgagttcctcctggccttgacggttcctg

SEQ ID NO: 662780 - DNA, 367 bp, Homo sapiens
gccgcacttattgtagagacaggatttcatcatgttgtgcaggctggtcttgatttcagtctatcagcctgcctcagcctcccaaagtgctgggattacaggcgtgcaccaccatgcccacattgaaaggtaattatataatgagatggggtctcactctgcggcctaggatggagcgcagtggtgtgatcttggcccactgcagcctctgcctcccagctctagggatcctcccaccttagcctcttgagtagctaggaccacaggcatgtgcaccatgcccagctgatgttgtgttttgttttgttttgttttaagtacagcggggttcaccatgtgcccaggtggtctcaaactcacaagctta

SEQ ID NO: 662781 - DNA, 440 bp, Homo sapiens
aatctaaaagaatcccttccctgaggcccacgagccggaatatctggcgaaactcagacgaaaactccaccaatcacgtggaagttaattttataaagaaatttacgtcaccaagagattttcacccatccatcagctgctccatcacctagttcttgtcctgaagtccctgctgggaatgctcccagtctattagagagcttctgagtcggcaccctggcgtgactctagtgatctacgtagctcggcttttttggcacatggatcaacataatcggccaaggtctcagggaccttgttaacagtggagtaactattcagattatgagagcatcagagtattatcactgctggaggaattttgtcaactacccacctggggatgaagctcactggccacaatacccacctctgtggatgatgttgtatgcactggagct

SEQ ID NO: 662782 - DNA, 369 bp, Homo sapiens
  misc_feature (249)..(249): n is a, c, g, or t
  misc_feature (270)..(270): n is a, c, g, or t
  misc_feature (310)..(310): n is a, c, g, or t
  misc_feature (354)..(354): n is a, c, g, or t
  misc_feature (360)..(360): n is a, c, g, or t
tctttgagacagaatctcactctgtcgccaggctcgggtgcagtggcgcaatctcggctcactgcaacctccgactcgctggttcaagctattcttctgcctcagcctctcgagtagctgagattacaggcatgtgccactacacccagataatttttgtatttttagtggagacggggttcaccatgttggccaggatggtcttgatctcctgaccttgtgatccgcccaccttggcctcccaaagtnttgggattacaggcgtgacanccgcggcccagccctaggttcttttaatcgggcagttatncaacttcctttgttggacagcctttagtgcagtgaagagttttngatttnacacagact

SEQ ID NO: 662783 - DNA, 259 bp, Homo sapiens
  misc_feature (7)..(7): n is a, c, g, or t
tggagcntggctcacaccttaatctcagctcttaaggaggcagaggcgggaggatagcttaaacccaggagttcgagacctgccttggcaatatagcaatgacccgttctccacacaaaggaaaaaaaaaagtattgttgggccaggcacggtggctcacgcctgtaatcccagcactttgggaggccgaggtgggcggataacctgaggtcaggagttcgagaccagtctgaccaacatggtgaaacctggtctgtac

SEQ ID NO: 662784 - DNA, 128 bp, Homo sapiens
agctctatctcagttactgctagatccaccttcgaccttaagtacataagggctatcgtagttttctggggtagaaaatgtagcccatttcttgccactcatgggctacatctatgaacataacgtct

SEQ ID NO: 662785 - DNA, 130 bp, Homo sapiens
tgtgtaatattgtcccttttacctcaagaggctgtaaagaatagctagtcttagaggagttggttggaatagtgattatcaatgggaggtgttggtcccgatgtaaaagccctgctggcctttctggtgt

SEQ ID NO: 662786 - DNA, 131 bp, Homo sapiens
cgtctaatccccactgactgaagtggaggagaaagtgagatgttacgtggcaggaggaaagtccccttggaattatggggaggagaggaaagggctcccacattgtctgcatctgtggttgtttgctaggg

SEQ ID NO: 662787 - DNA, 261 bp, Homo sapiens
gatctttcaaaactttaaatcaaattttatatctaaccaggacatttttggaaaattggtctattcttcttacaacaaaatttgttttatcttggttattaaacagtatctgtgacttttttgtcagaattttaaacttattttgttgccaattattgtttaccgagtataatgttgctatttagcaaaatcctttgttttaaagaaattctccttttgaaaaaagcatcctcttttaattttacttcccataatcctaaa

SEQ ID NO: 662788 - DNA, 622 bp, Homo sapiens
  misc_feature (432)..(433): n is a, c, g, or t
  misc_feature (444)..(444): n is a, c, g, or t
  misc_feature (454)..(454): n is a, c, g, or t
  misc_feature (462)..(462): n is a, c, g, or t
  misc_feature (464)..(464): n is a, c, g, or t
  misc_feature (473)..(473): n is a, c, g, or t
  misc_feature (477)..(477): n is a, c, g, or t
  misc_feature (493)..(493): n is a, c, g, or t
  misc_feature (499)..(499): n is a, c, g, or t
  misc_feature (503)..(503): n is a, c, g, or t
  misc_feature (508)..(508): n is a, c, g, or t
  misc_feature (513)..(513): n is a, c, g, or t
  misc_feature (528)..(528): n is a, c, g, or t
  misc_feature (534)..(534): n is a, c, g, or t
  misc_feature (622)..(622): n is a, c, g, or t
agaacttgtggtatttattgtagggtactgagcaagaagattcaggcagctcatgtttaagacctgaactctgagatggtttaaaggtaggagtttataaagatggggaggcagaggttacagaaaaagtcataaatcaatacattgaggctatacattggtttgactaaaaatgtgggacatcttgaagcagggcctctaggtcataggtagattcaaagactttctgaattgtgattggttaagaagcaaagctttgtctaaaatttgggatcagcagaaaagaatgttagctttagctcatgggtttaactgcctccctcgggaagaaatttagaacgaagaatgggtgatcggagttcagtcctcaattgccccttatctgagttctatgtgccaatgggatccgtttggggggagtttggatttctnnaaaccaactangaagagaggntaaaatgntntctttaatntctntagggaacaaaacatnttggangctnactgntttanctattgtttaaagcnactttntgctttttgcttatcaaaatcgctcatttactttccagggctaactaggggtatggaatttttcctttaaggagtcaaagatatttcn

SEQ ID NO: 662789 - DNA, 225 bp, Homo sapiens
agcgtatgatgggcagatgagggggcgcatatgatcctaggctataatatccggagtatacgtagccggtaaagtaaacaacggtacctctagaactatagctagcatgcgcaaatttaaagcgctgatatcgatcgcgcgcagatctgtcatgatgctcatggcaatgggatccatatatagggcccgggttataatcacctcaggtcgatgtcccatggccat

SEQ ID NO: 662790 - DNA, 890 bp, Homo sapiens
  misc_feature (476)..(476): n is a, c, g, or t
agcgtgaggtatagagctgggtggtaacggggtgtgcgagtccggatggatcgtcgccggggagatggtgtggctgccgacttgaacagagagatttccctacacaaaggcgagagggaaataaatcggcaactagcaagctgagtgaactgcagaggaactgacagaaatagtcgggagagaagataagacttgacgaacgggatagtgggtagaagtttgaatagcgtaggactaggcgttgactaagagatcgcatcacagaattgaaggtaaaaagaattgagttttcacgatgcacatctatggtgtagtggaatatcattatgggattgtatatgctggaatttaatcatatgctaatactaccagtacacaactgcgtgtactggtgccgagacggtctgtaccgtgatctctggattaagtgttcattcggctccggctagtgagcactggaactagcttgtatggtntccccacaattcctagtcgagcctatgttaaagtattcagcggctcacacatcaaattgcgacacgatcgtggagatacacgaggacgaaaaagattgcatatcgcaaagatgtctcggagtcttattcttagttataataaacttcgggatgagaaagtctgggggggttcgtggtggaaaaacaggtcgtgctttgcaactagtaaagtgcaatgaggaacaaggagtacaggaatggttatttattcagtgaagccgattgaaatcggaggaatcctctgactggtctgggttagtcatttgagggctggagggaggaagaaaacgtggctattacattcgtgcatttcctcattctaacacgtgaattagttgaattgtccttaggtaatcgctttcctggataatatta

SEQ ID NO: 662791 - DNA, 1003 bp, Homo sapiens
atgcttcatagggaacttgagtgtttgctgtccagttgtggcttatactatatgttgagtatagtggtttatatcgtatcatgtattatttatattgattcaaagtttcaactgtccctcaggctggagtgcaatggcgcaatcttgcctcatgcaacctccacctcccaggttcaagcgattctcctgcctcagcctcccaagtagctgggattacaggtgtgtgccaccacgccccaccgattttggtacttttagtagagacaggatttcaccatgttggccaggctggtcttgaactcctgacctcaagtgatctgcccgcctgggcctcccaaagtgctgggattacaggcgggagccaccgtgcctggccaatgtaagtatttaaaagtcatttaacatattggtcattgatgaaactggggttacagcacacgtaatggcttatccctctcttctgtgtgataggtgtaaacctctatttaactcaggtcctagattagaatgtccttggtcctgatgtttgccgtaatggccttcctgggttcactaacagatcttttggaaatatactctggactgttggtgaaagaggcaggcctggctttactggctactagtttgccactgaactgtttggggtgcccatgaggtacgcagaccttatgctgtgtatttggaaacgggagttcttgcctctttttgcccaggttggaattgagtatgtgtgatctcggtgctaacggacaccctgcctcccagggttcaaagtagattaatccctgcataggtttccccattgcggtgaccacaaggattgtggccccatccccataatatgtggttcatacagaaccacttttgcattggataaggtgctggaaccgtagcaggtatcacgtttgtctaaaggtcggtacgcgtagaacgagggcaacatcgtcgaagggcgcgtgaagagtgtgacacacgcgagccgctcaacaccgtgattaacagc

SEQ ID NO: 662792 - DNA, 261 bp, Homo sapiens
ctgttcccctcaaacaaaatatgtgcaagacttctttgaaattatttatgttatgaaaatacattaaaggaaacgttaaggaaaaaaaaaaaaatttattgttaccaaaatagcccctttatgggccctggggtcttgggtatagggactttatcacctgaataattactttttaaaattataatggggcatttatttatttgtatccggcttgggggggggccctttggaattttccacatttggaatttatgtttgggt

SEQ ID NO: 662793 - DNA, 222 bp, Homo sapiens
agaagctggaaaatgggctgccccagcagaaaactgttgcctctatttctccattgttgcagcaacaatggcgggatggaagcactgaaacaacacaaaccctatctcaagaacttgttaacctccggggagagctagtcactgcttcaaccacctgtgagaaattagaaaaagccaggatgagtacaaacagtgtatgaagcattcgtccagcagcaccag

SEQ ID NO: 662794 - DNA, 272 bp, Homo sapiens
cgagctcggtacccctccgacggtgatgttaccgacgaccacgaccggcaccggcgactggtagatctcgccctcgcccgccaggaaccgcgcgcgcttgcgctgcaccacccggcgatagagggattccagcggctgcaacaacgcaagcgccggatggccttcgtaccaggccttgagcaaacgatcagtcatggccatcagggttggctcgccgcctcgaccgtggtcatgcgcaaatgtccgctggggtatcctctagatacctcagc

SEQ ID NO: 662795 - DNA, 709 bp, Homo sapiens
  misc_feature (21)..(21): n is a, c, g, or t
  misc_feature (24)..(24): n is a, c, g, or t
  misc_feature (32)..(32): n is a, c, g, or t
  misc_feature (49)..(49): n is a, c, g, or t
  misc_feature (52)..(52): n is a, c, g, or t
  misc_feature (195)..(195): n is a, c, g, or t
acgcttcttttattagttttnatnagtttttnaaaagtatcagaaatancanaaggtggggagaagataaatctgcctttggaaaccaaatatttaatattttcattaaatggtttcaatacaatcttgccaggcaaagtgccaacgggaagaccaagcccagaaattcagaggaaataatcttccaaacaaggnaacaccaggggtaatcttcttccattccagccacaatacggggtgatcataaggggtgctagtcgagcttatccagattatcgaggtgtttaccacatcatctatttctcagaagtgctccgaacagtttcagttggcaaagagtcagagcactggactggataccaacagaggctgggacaaccagttcctccaaaatggtgggaaataccaccctttcgggacattaatggcctggcagtttttgtctccctggggcatgccgggtttcttagttctggttcactggtagaactggggattcaggccggcatttcaagctgagtggtagatgggaatggacctccatagcatcgggcaaaagcacgaacgcagtaggattccataccactcagggtccgtgaatattcagttaatcgtagggccaactctatttctggagcaccacctcctgcaataagagccctcttcttccattaaacaaggaataccacatagggcatcatgattggcc

SEQ ID NO: 662796 - DNA, 112 bp, Homo sapiens
  misc_feature (15)..(15): n is a, c, g, or t
cagggcagggatggntgagaatcagtctggggtgtaaggcagggcccagggcttcagaaggcctctatgtcatgtcaaggctctcaggctcctcctgacagtcgtggggctc

SEQ ID NO: 662797 - DNA, 477 bp, Homo sapiens
  misc_feature (255)..(255): n is a, c, g, or t
gacatgatacgaatccgagcttgatacccattggagtacttgcgctcaattcatccaacacaaaggtactcttgggacaggtgtagcgaaggggcccttggtcttgggctcagcaggcagcgcctgctcacattcatccatctcctcctcaggagcagggtgcagtcgcctttttctcctccttccgctcagcctggggcttctgcttctcttcccgtgaacccttctctttccgtggtgtgtcctttttaggtngggtctctgcaaacttttgtagcatcaaactgggccatcttctcacacagtttcacttcccccaagacagcccggaactggggctggttaatgcaggtgaggaaccagcggttggtattgggaaaggcctggcggaaagaaggctctagaacctgcttatagagccacaacagggtgcagacaactgtgatgtcagccaatgtcactccttcacccaagcta

SEQ ID NO: 662798 - DNA, 934 bp, Homo sapiens
tccattaaattggaccattgatgataagaatacacattgtatgttcctgtgcacatcacagtgtgtgtgtgtgcacgtacatactgtataggtcttaagaaatagcataatactggccaggggtggtggactaacgcctgtaatccctaggctacttttggagaggccgatggtcgggtggtatcacatctgtggtcaggagttgtgagatcagattcaggccagactctggtgaagaaccccgtctctactaaagaatacaaacacattagctgggcgtgatggtcgggcgcctgtaatcccagctacttgggaggctgaggcatggagaatcacttgaacccgggaggcggccggttgcatgtgagccgatgatcgtcaccatatgacatctcgcagttctgggcaagcaggaggtgagattgccgtctgcaaaaagaatgacacgaacgcggatgcacatatttaggctttataacctcttccttgtttctcaagccgcgcatgaaggttctgaatgctccaaatccagtggaataatccaagaagcagaaatgtgtactgtatagacataggttggactttctggataggaaagtaaggatactgtgacaaaagccctcggggtatatttatcttctaagcgcttactctcaggggcggctccgtgagcccacctaggtctctctagtggagagccactcaggcctatttccctgtgtgtagcctccggcgctgaccatggcgtgcccttgattgttcggcaattaccctgttggtcaaccattcggttggtttacatctgccagaatctccagggcggtcatgggacctggaagtaaaatgggtctccagtaggcggggtgctgtcccgttccttttcaaccctatgcttttccacccgtttgttttcacacgggctcccgctttgtgg

SEQ ID NO: 662799 - DNA, 101 bp, Homo sapiens
tctagcctccagaatctcagccacagtttcaggctctgcaccccctgaggacctggagaatggtgagtccagatgaatagagcactgtgtgtacatcgttc

SEQ ID NO: 662800 - DNA, 260 bp, Homo sapiens
ggtgactctagaggattcctcgaccggaagcagagcaaggcagtcttactgagatgaggaaacagagactagagtttcagaggctgaagtggtcacaattggcagtgcagaatactggagagaagaggggagattcacacacacacacacacacacacacacaaagagctacagagatcataatatgggaatccatgagtctagatgtatactaacctgcccatgtaaaaggtacaactctctgaggaaggaagggaaat

SEQ ID NO: 662801 - DNA, 147 bp, Homo sapiens
ggcacgaggccaacatggtgaaaccctgtctctactaaaaatacaaaaattagccgggcatggtgggtaggggcctgttaacccagcttactcgttgaggccaaggcaggagatttgtttagcctccagcagttgcagtaagccaag

SEQ ID NO: 662802 - DNA, 743 bp, Homo sapiens
  misc_feature (464)..(464): n is a, c, g, or t
cccaggcccctaattttagccgcccggcttatagcccccctgttatttggattgcccacccacggcgtccaccatgtgccaaggcccagtttgctgaggactgtatagggacaagaattgtatctccccgttcttggtataaaaaacctggatagtatggcccctataattctctgagaagttctctggtggatagctcgcccttgcttgaatattggtttcctggccagccccccatgtgtgttgaggagctttctcacgactattccaccctcttgggtcgctcttgtctggtttcgtgatattgaggaccacgaccacgcttgccgcgtgggtgtcactcccaagccacgtggacccaagaaggctggctggagctcggccaaggtcaccccagtctgcccacgaaagcttcacgaagcgctataatgaactattattccctatatatcctcgccaccccncaccttcttaaatccacgtcggtggagagaaccggttctcacgaactcgtttgtttcacattggccactttaagtttagtagtataaagaactggttaatgataaccatgcatcgttaaacccctcagaaggaaaggagaatgttttgtggacccctcttggttttcttttttgcgtgtggccgttttaagttattagtttttaaaatccgtactttttaatggaaaccacttgaccccaaatttgtccccgaattttgagacccccttaaaaagttaa

SEQ ID NO: 662803 - DNA, 277 bp, Homo sapiens
gaataacgaaagcctgaagctgctgaagactgctattgggaaagctggctacactgataaggtggacatcgacataggacgcagcgagctccgagttcttcatggctgagaaggatgacctggactgcaagactcctgaagaccccagtaggtacacctcgcctgaccagctggatgacctgtacaaggccttcatgaaggactacccagcgatatctatcgaagatacttttgaccaaaatgactgcggagctagtcagaagttcacagccagcgc

SEQ ID NO: 662804 - DNA, 614 bp, Homo sapiens
tcgggctgttctacacccggcctgttctcccccaatattggcgggggtatccagtgtctgtactcctcccgggtgccccccggggcaaccagctgtgcccacaaatgcccgcggggaattatccttttttggtgaacgggttcacaccgtggccaccattctctgtggcgccctttcccagtcagccccgcggtgtaccccacaggcccgcgccattcaatgttcccgcgctgcaactcttcgtgagcgccctcgtgttgccggtccggctacccactcgctcgtgtgcctctctctgtgtcgggtggccgctcgcctccgttgccccccctcccacccgcttcccacgcggtgcgtccgccctctctgtgtcaactctctggttaacaccgcttgagtgtggcgccccgccccgccctcacacacctctgcctcgggtttatcggcggtttgaagccccccgggtctctgagattctagaaggcgagaaaaggtggtattttttggagtcattgaccacgaccccctagatagattatcctcattgtcgttctgtgacgctttataaaaaccggggacccaccccctgtttgataaattataccaaagtcaga

SEQ ID NO: 662805 - DNA, 903 bp, Homo sapiens
gcgaggttgcagtgagccaagatcgtgccatgcactccagcctgggcagcaagagcaaagctccatctcaaaaaaaatacaatacaataaatcttcttgggtggacagcttagtcatatgggaagtatacacgttacctttataagaaaccacaacactacttgcaaactgtgtcgcaccctttagcgtactcaccagcaagacatgagtgtactaattattttccatctttaccagcaattggcatttatgtgcttggtggtctcattttttagccattctataagatggtctggtgtctctttgtggcttaaatttaaatttccccaatgagctaataatgttggacattctgtgtgtggctttatttgccaggccgtgttttatcctcttgtagaggtgtctgacacatgaaacacatttcactcattttttatcaaggcggttgtcttcttacttatgtgagtggtaaagagtccttttttataatttttctgtataaatcattgtgattcaccaccatcttttttgaaggtattctccacgttggcagttgtcgcatttcctttaaggtgtccttaccaagatcacgatttaatttgatggcgtcacaatatacaaatttgtcttccatgtggtctgtctatctcaatgtggccaaaatatttctactaggcggcactaaatcttacaattacggattcacatgggcttgatcaattatcacatttatttcatgttatacacacggcggataatatatttacccatacttggaggataggagcccattccaatgggcactttattccatatacttactgtaccaccaccagtgtgggcacaaatctcgcactattgtcaaccgttcttgacacaggggttgttcctgcgtcttactcc

SEQ ID NO: 662806 - DNA, 121 bp, Homo sapiens
ccgctgagacattgatatcttcttccatctcactcccttcctcttctcttctttcctcctccccttcttgccttgccccctttctccttctcttgctccctccttccctcgtccgagcgga

SEQ ID NO: 662807 - DNA, 207 bp, Homo sapiens
taagagcggtctcaacgcgggatccgagccgtgtctgcaacctacaccacagctcatggcaacgccagatccttaacccactgagcgaggccagagatcgaccctgcaacttcatggttcctagtcatattcttttctgctgcgccacgacgggaactccttaagcacattttgtctttatgcttactgtggctgctattatttcct

SEQ ID NO: 662808 - DNA, 153 bp, Homo sapiens
gggatgtgcaggcccatctatcgctacgagtggggtaattggagccatgttcatagcctccctagcttagtgctgcgagttcagcttagctgagcttcacgctctcccctgaaattgctaaattgggcttcacaaagaggcacacacagggtc

SEQ ID NO: 662809 - DNA, 1582 bp, Homo sapiens
  misc_feature (1582)..(1582): n is a, c, g, or t
taaaaccctcatcaatagatggagacttacagaaattagttcaaaccacattctacaaaagtgccagttatcagggcgggggctttcgaagccaaaggtgagtgttgggagtgtaaaggtgaaatattagtggggggagtgaagcagataggtgaggaagagtgggacccaaataagtgacggtgaaagctccggggaaacccgtggtggcctacaaaaagagtgtggacccgctagaatgccgctcggaaaagtgggtgaaggggagaacctcgaaagagatacctcgtggagcccttgtgtatagagaggggctaaaatataaaagcacccagtatacacaattggctaatataacgccaggcgtgcttgtgacatattattgtggggttcacagagctgtggtcttcccatattataagaccatatgtgggtagacccctcaaggtgtgactgagaatacacacccgtggaaaggcacgaaaagataaaaccacgggaagtgtgtgctccccagggaagtgtgggggacacacctacacaggggggaaaatacacagccagcggcgagtgcaaatggcccgtgaacgaggagaggagccccccagaggaccccaccccaacacaatcgaggagaggatagaggagcaacctagcggactgtgacacgcgttgaggcacacaccacgggggccactccacaaaaaacacaacctcaccgtgggcgcagaacaaacaaaacacaaaggcttctgccgaggcgctaaaactaaacactgagggaataaatctcacgcggaaatatcgaacggcggccccatataataggggaacacaccagaggatgcccagcagtcgcgaagggccaccggacgccaagatgacaggcctaacacctccacgatgctaaaaccaccgcacgaccacacaccgaaagagggacacacgagggtcccacgcggcaagaacagagatagacaaacgacggcaaccaccaacaaccaaacggagcacaccactaaccagacaagcaggtacacaagcaacaacaacacccacagagccgacaaaccgaccggcagagcgacaccacacacacacgagcagcacaaaaacgcggcacccccgaatagcaagaggcaaaacagtgcggcgggcacaacacacccccacacatgccacaaaaacagagcaccaaccaggcaacccacgccgacgcgaggggacggccagacgacgcagccacgagaagccacacacggactggcacaaaaacacgacgccacacgcacacaacacgacacacacggacccactcagccaacgaagaccacaaccgaaaccgtagagcaacacattactcatcactacgagcacgacagaggccgacacccgacgccccaccagcaaccaatagagaaaacgaacagcgcgagcgagaagacaacaccgcgaagaaagtcgaacgactccacacatccacactccacacccaaacgagccacacggtcgaataatcacaccacaaccaggcagagacacgacacacgacctagacctataccgccagatccgaacgcan

SEQ ID NO: 662810 - DNA, 250 bp, Homo sapiens
cctggtcctggtctccatcttgaccgggttggcccacttccgtccagccagcctctgccccgtacatccctctcactcctggcaggagatccttcaggccagatgcccctccctggctcagatctttcatcggatatccttagctctccctctctctgttttcctgcccctccctctcggttgccatttcctctgccactcagaaacacctgagctcatgctgtttcctggcttagagactaagctgagg

SEQ ID NO: 662811 - DNA, 687 bp, Homo sapiens
  misc_feature (138)..(138): n is a, c, g, or t
  misc_feature (153)..(153): n is a, c, g, or t
  misc_feature (167)..(167): n is a, c, g, or t
  misc_feature (251)..(251): n is a, c, g, or t
  misc_feature (292)..(292): n is a, c, g, or t
agacagcgaaagcgcgaagagactgcaagctagatgggcatgtatggcagctacagcatgtgagtgacccccttccccagagtccgcgatgaaaataaagttacacttgtcaataaccagatgtgggagatggagagncctttggcataaccnataaccgagctagngcgtggcagagcggtcacgcctggacataaatagaaaatataagttagtataactttaaaaactttttgtacaaatatacatgntttttttattttttccttttttttccttttttctttttttngcactgagtttcagcagagattaaacattttatataaatgactcttaaagctttacaccttgggaccagtgtaccttctcgtgcagaatacatttagatataaaaagacgttattaatacattgcacagttttcaaaatttaaaaacaaaaccgaacgctgctctccgcagccgccgccggttgctgctacatgaacggtcccagccgagcccagcgcccttccaacgtccgctgcccggcagttccctcggggctctttggctctaaattgctcaccgcagcctcttgcgcggggtctgctccaccgagccccagccaggggcggcgcttggagagggacacggcgcgggacatcgcccgacgacttctcaggcgctgatctcttgcgcttggc

SEQ ID NO: 662812 - DNA, 247 bp, Homo sapiens
cgtccaaagctggccgggcgctggtggccacttttcacaaagaagtgtatgtgtgtgtttacaaacttgtcataatatcattccattcagagctgttcacttttgtctcagcccaacaacacaccattacctgtcatggaccagaggggtccctagagaattgcgaaacttgttatcatccacatgtattccaaggtatctcagttatacatactgtaccacttacttgagctgagagactaactga

SEQ ID NO: 662813 - DNA, 330 bp, Homo sapiens
  misc_feature (138)..(138): n is a, c, g, or t
  misc_feature (153)..(153): n is a, c, g, or t
  misc_feature (167)..(167): n is a, c, g, or t
agacagcgaaagcgcgaagagactgcaagctagatgggcatgtatggcagctacagcatgtgagtgacccccttccccagagtccgcgatgaaaataaagttacacttgtcaataaccagatgtgggagatggagagncctttggcataaccnataaccgagctagngcgtggcagagcggtcacgcctggacataaatagaaaatataagttaatacaacccggtaaaccttttgtaggaaatcaatcaatagagttagtctcttttttcctgttttttattcttttttcaatggtgttgcagttatatgcaggaatactctgtacgtc

SEQ ID NO: 662814 - DNA, 690 bp, Homo sapiens
  misc_feature (346)..(346): n is a, c, g, or t
gcaggcgcagcccagcctcgaaatgcagaaagacgccggagagttcgtggacctgtatgtgccgcggacatgctccgctaacaatcgcatcatcggtgccaatggacgcaagctacttcatccagatgaacagtcgccgatgttgatcaggtcacagtgcatgttgcatagaggtcagcttaaaacattatgtatatctgcggggacatatacgtgaggactgggtgagtcacggatgattccattctccgtacttgggcaatggccgatgagatcgtctcataagcagacgtgatgactggcaccgagcaatcaacagcagtgtcggcgaaatcatgaggtgcantaacactacacaataaatgaagaatcctactgcagagacacaacagacaactgatagtacctggcgcaggatatctaatggtgcggagtggaggctagtaacatacgagagttgacattgactgcgtacctcaacgtgggcgctttaaaggagaagcctaccccttgaactcgccgtcatcgcatccagtggagacacatcagctagtggcaccgaaatactggaacggcggtaactaaccccttgtggcacggtagtatccgcaaagtaagacagttcctcaataagagacccgatcgatcgatcgaggcagtgtaagagaacatcccgttgcaattgaacgc

SEQ ID NO: 662815 - DNA, 780 bp, Homo sapiens
agcagctggttctgggagttaaaggagcatgggaaggcccaaaacccgtctcccttgagtggccaacccagactggtcggctggttttccccattattcatctatgattatcaagtgggagtcttatacctatgacactctccatctctggcattagcaggatggtgctgtggcaggctggctttgtgaaccaaatagtgacgctggggcgggaggaaggggcaggaggaagggttgaggttactatggggcgagtcccttccccttcagagaggcttctatccttcccagggaggaggcgccgcatgagacccttctgctgagagctctgaccctcccctcatcacctggcctgtgcagaaacgctcatgcacacctgtgctgcacaggtgtgcacgcaataaccattcgcgtgtacgtacccatgtgccccgtgaaagcatgatgtggctgcagacgtgtccacatgggaccattgcgaacctgaggttagaaacacctggccaggcgcaccgtggcgagattcacagcacaaaagacctcaccaccacacctgcactcaccccacctagcatgcacctcgcctacctgactggcggaatacacagcagagacaagaacaggggataatagaaacaagagatagccacaagcgacacccccaaagacaccaacggcacatacagaactgatggaaaccaaccaaggactagcaccagagcaccaagcatgacagaaatagagcaaaccggacagcctaaacaagagctgacacgacaa

SEQ ID NO: 662816 - DNA, 141 bp, Homo sapiens
aagattttgatgatttttgttttttggtttttaaaaaggaaaaaaaatataccaactttggcttttgtggctttgtgaaggtttctttaaaatgggcattcccttttgcttgctctttagtaaatgtttttcttccgggga

SEQ ID NO: 662817 - DNA, 303 bp, Homo sapiens
gaaaaacaaaaacccccccccccacccgggtttttaaaagaaacagaaatggccccgggaaatttgcctctgtcccaacatttcacccggggggagggggaagggggggggggggggaacccccccgttcttttttttaaagggggggggtgtttccttttgggttgttttgggccccccccccggggggggggggtgggggtcaaccccttttggccggttatgattttgaacatttgacttgacccccaagggaatttttttccggggggcccaaaaaaaaggaaaatttttccccgggga

SEQ ID NO: 662818 - DNA, 113 bp, Homo sapiens
tagaatacaagcagcttttgcccgtcaggtgccatcgttgttttgtgtggccacggagaagtccccacctcaggctcctgggggccagaggcagctgtggcgtgatggatgct

SEQ ID NO: 662819 - DNA, 935 bp, Homo sapiens
aagatgactaaggacgatcacgaagctggagaaagaaagcaaccatgataccggagtaccggtgggagagcagcaagcatagggcgcactgtattgagatggcatgagggagaaaacagctccggtgatcacatgaagcatggagggccatgcatggtaacaatccaacggcctgggagaagcctgtgccgggcatgtgcatgacaagagcgcaattgactctgaacaaggagggtacacggagctgagtgctggtggccacgggctccctcacgtgacagtggccctgagaagtgatggccagagggtgccgtggtgggctcaagggcatcgccagactcgcacccagggatcacacgaaagcgtccttgactatcgcgcaggacgacaaccagaaggcacaggaagcagtacaggaccagatctggaggccatcgacgaggcccacctcccgaccaagggccgtaagagaagctctaggttgataaggagtcattgcatggagaaaaggcgacgccgtgcactgacccaagcgcaagggcctgtggccccactaaataaatggctccgcatttgcgtagacgtcaacgctccatgtgctttgacacggccaatgcgacttgttcctcgacaccttgtggacttggagacaatcattgggactccattgtggcagaattgtttgggatctaaatgtaaggtattgcaagggtaaatcactagtcagccgatagaggggacaatttttggcaaagcgtcccatttcgcaaaagtgcaattttaatataccttgattaaaagtgggtacaagttgaggagtatggcaatttaggagggaatcggggaggattgtggtaccgaagaattggaaagttcagctggagattcagtacaatggttgacgcttggaaaggaaggtcatttgaacaacggcg

SEQ ID NO: 662820 - DNA, 847 bp, Homo sapiens
gcagggctcgacagcgactgcagtgcccgaaggcatgcacaccctgcaaaaagtagcctttgtcccctgtccctgttccccccaccccttccctaaatctggaccttggcacctgcataggaagagccttggacccttccagttgctgtaaagcaacacctaccccggatctctggcttcagccgccaggtgcgcagtggcagccctgggtgccctttcccttctggaggaagcacaatgcctcagggacggggaagcagtgatgcggatgggccaaatgcccgggacctctacttgaccagttctactggcgaggctggacgaactaaggaaacacctgtacatagtgtccgctgccctgactcccgcttagcacacccttaggcaggcgccccttccacctttccccgagaccgtcgtcgctggcacggggcagggtccagcccgcctggcatcggtggctgtgcacctgatgggcattctgggcactgggctactccgtacaccgctctctcttgcttggcttacctgtgcagacgtgcgcttctcttcctctggtcccttctggcggactctgtttacccatttcttgctgctgtgtcctcaccagttccttgcacggattccttcgactctacatgcccttgaatctagctaacgccttgcagaccccagtgggtgctgtcctcgcgtctcttcctgccaatgcctgaatcattgttccatctcccaccctctgcccacttggccccttcgagcttgctgcctcaatcctggtcagcttgcaccgccacggtgacacgagagctctcgaaccggcccgagccaacgtgctcactgcctctgc

SEQ ID NO: 662821 - DNA, 756 bp, Homo sapiens
gatgcctgacgcatctgtctgaggatgcggtcagtgacgcgatggacgcgcggcagagggatctgcttacacctgagacgaactacagaacatgcacgtaccagaggtggaagtccaagtcaaatcgcggaaggactgcctcgactgagctaaacaagatgtgtcagttgtacccgaggcgtgctcagacagacagcaagtaccatgtgggtggatttccaggctgaactgaggcaggcattcttagctgagaacaccaagaggtggttaagagccatattggagtagcgaggaatctgattccataggcaatagagagctcgaggcttccgatcgtactctttgatagctgtctgcccacagcttgcacttgtttctacggagaacctgcgtctactacctttatctatagccttcccctaggtcttcagaagcatcaagtttgaagctgtggacattggatttggtggaacaggaactcatgactgttggcaagagtagcaagatgctgcagcaacattgactatagaatgacgatgtatccgtgcgaagatggccgaatcttcattggcacctttaaggctttgagacaagcatactgaattcggatcctctgtgcacttcgtgatgagttcacgaacagatcagagccaagagcactgctgagggccacccagagcgtgaagcaaaagccgagtgccgggtctggtgttggcctgcgtggggagaacttggactccatgactgcggaacggg

SEQ ID NO: 662822 - DNA, 214 bp, Homo sapiens
  misc_feature (71)..(71): n is a, c, g, or t
  misc_feature (78)..(78): n is a, c, g, or t
ccccccccggctccccctttttttaagccccgggcctgcctttaactcacacttggggggtttgccctccngggcctnagggccagcctcctcccccccccctccccccatgggggggtcaccctttttccttttggggcaaaagaacatttttaaaaaaaactccttttggcccagggtgaataaagttagtgtgttgtctgggcccccccca

SEQ ID NO: 662823 - DNA, 436 bp, Homo sapiens
atgacatgatacgaatcgagctggtacccccgtatagcctgatgggttgaccctcactcctctgtgctgggttctgccgggtggagacgtcctcattcccagatggggtggcagcctgggtggaggggctctcacttctcagatggggctggttgccaggtggagggtctcctcagttctcagatggggctggcggggcagagacgctcctcacctcccagatgtggtcgtggcctgggctgaggtgctcctcatatcccagatggggctgggtggcagaggtgctccccatatctcagacgctgggcagcctgggcagagatgctcctcacttcctagatgggatggctggcctgggcagagaccctcctcactttccaggacttgggcaagccatggcacgaggggctcctcacttggtcgggctagtcgcggg

SEQ ID NO: 662824 - DNA, 191 bp, Homo sapiens
gcctactactactaaattcgcggccgcgtcgacacgtggatcagaaattatttttaagatgtactagccaggtgtggtggtcatacctataatcctagtagtttgggaggcccgagtgagaggatggcctgagctcaggagtttgagaccatcctggctaacacggcaaaaccctgtctctactaaaaata

SEQ ID NO: 662825 - DNA, 299 bp, Homo sapiens
gaatcaaaagaaaatcaagatgagggcggtgacacaggcctactacctcagcactttgggaggccgaggtgggtggatcacctgaggtcaggagttcgagaccatccttgccaacatggggaaaccccgtctctactaaaaatacaaaaattagctgtgcatggtggtgggcgcctgtaatcccagctacttaggaggctgaggcaggagaatcacttgaacccagtaggtggaggttgcagtgagccgagattgtgccattgcactccagcctgggcgacagaatgagactccatctc

SEQ ID NO: 662826 - DNA, 183 bp, Homo sapiens
agctgcattgctgggttcttggagactcgtcccacaatgatcgaaagagatccagtgggcgaggtcactagaacggggattctagtattctagtatcctcacatccacagcttatacatactggtggtagttcctcacctccaggcggggttgcgtgaattaaaacagtcaccgggctatgca

SEQ ID NO: 662827 - DNA, 309 bp, Homo sapiens
cccctgccccgggcccggttttcaggggttttattccctttcaccccccccatttgttggcaggacaaaacatgttttccaaaccccccagtttcccccaggaataccccccttgttttggggggaaaggaaccaaaaaaagcatattttcgggggggattgggcccccttaattgggtttttagtctttaaggggcccccttaccccccccaaaagggggcccaaaaaaggggcccgcgttccaaatttattttggcaaagggacaaagtccccttttccctttccaaaaaaagggttttctttttta

SEQ ID NO: 662828 - DNA, 127 bp, Homo sapiens
ttcaccatcaaatagtcatggctttgcacagcaaggctgtgggatccagcatgctgccaggcaatgctcaggatgtggattgggttgcatgccgcattgtcaactcattcatgcagtccgtcagttg

SEQ ID NO: 662829 - DNA, 237 bp, Homo sapiens
agcggtcttgaccgatggacgcagacaggaagagagaagccacgcgcttccaaaggagccgggcggctggccggggagggccgtggcataaggcactagtacgatccgtcttgctgatacctccctgagggggacgcgaagctcaggtccacagggctgaggcccagctcctccctccaacagcctatccttttcacaggtccaagggaagagaccaactgacttctagtttaaagg

SEQ ID NO: 662830 - DNA, 137 bp, Homo sapiens
ggatctcggaagcacactgctacatgaggcgaggtgtgaagatggcttgagacaggagtcgaggctgcaccagtagctgggactataagcatgtgtcaccgtgcctggctaattttttgctgttgcgggttgttgtg

SEQ ID NO: 662831 - DNA, 289 bp, Homo sapiens
gtgtccatcccccttcgtgtgtccatcccccttcgtgattattttaaatagacaaaagacctcatattactttacttgtcacatttcaacatctttcctcagcttattagctctatttcttttctgtctgtaaatggttgttgtggttttgttctttgagacagggtcttgctctgtcatccggctggctaaatggaagactagagttttattattactcaaatcagcctccatgaaagttgaaggctaggggttttcaaagatagttcggcacgaagggtgatggaca

SEQ ID NO: 662832 - DNA, 195 bp, Homo sapiens
accatcaggatttctcagatctgaaacatcctgcagatcagctggtagacaatcccacagcagtacttgatttgattccttctgctttttagattttttttaaacagagaacaaagggattcactcagagatcagaatccgaagcttcctctcagcatcatgggaggagataaacataattcattctctggttgt

SEQ ID NO: 662833 - DNA, 1455 bp, Homo sapiens
ttctctccctggcggccgcttttttttgtggggggccctctctcccctgttggtggggccccccgccgctgactagattggtggtgtgtctggcccccacgttgttttccccgcaagggggtgtttgtgcaccctcctgatttgttttgtccccgcgcgggtggcatctctcttgggtggtgcccccctgtctcacgggaggcgcgtggtggcacctcccctagttggacatgtttgggggtgggcgggtgtcgccccacccgccgctgttgttgcccccccgttggggggctcccctccgtcctctagtgattttgtcggccgcccttgtgtgtgggcccccccccccctgggggagtgcgtgtgttgttgtgtgccccctgtggcccccccccttctctggggggcacccccctgtgtggcccacccgggtgtttcttttttggccaccccttcctggggggaccccagagggccaccccagggctcccaaggagccccgcagttggggcccaagacttttgtcccagacattgtccccgcccgcgattgtgtgtcccagcgcgtcccccaggggaggggggggtacccccccggtgtacactcttctgtgcacccccccagttctttgtggagaaagttgtgagagcgggtggggggcgctctcaatgggcgcccccggtcgccccccgtgcgcccccccgggtgttgtcttgctgtgcgtcttcgcccccacgacttgtgttttttctctctctcttggctctctcccctctgcctcccccccgagaagaccgggtgtggcgccgtcttttggggcccccacacagaggcctctcccacggcgcctcggggagtctctgaagatgtgtgcgccccccacgccccccccccagtgtgtgtgagtttgtgtgagtgtcccaccccgcgtgtcggggtgtgttggacgctcttgctctcccactctgtctcacctgtggagcgcccccccgagaggtctctagagtggggggtgaccacacacgtgtgtggtgtttataggtgtctccccgcagagggctctgagagggagatctcctcgtgatcccgcgagtgtttccccgcgggtaagaatgtgggaggcccgcgagattgtggaccctcgcgcttctggcccagcctggaccaccaccgaggccccccgtgagaggaggatatatggtataggggggttgtaaagaaattcccctcgtcccccctcccccaatcccggccccgcgcccccctttggcttggagacaccattcccacacccccccccccccccctatagaactccccattctccccaaccctctttttcccccccccccccccctggaacttccctcttgtcccccttgaaaaatacccctgttttcccgactttcccctactccctccccccccattaaaggtgttcccccttttaaaaaa

SEQ ID NO: 662834 - DNA, 235 bp, Homo sapiens
gtcgacgcgatctggctgcgacatctgtcaccccattgatcgccagggttgattcggctgatctggctgggctaggcgggtggtccccttcctccctcaccgctccatgtgcgtccctcccgaagctgcgcgctcggtcgaagaggacgaccatccccgatagaggaggaccggtcttcggtcaagggtatacgagtagctgcgctcccctgctagaacctccaacaagctctca

SEQ ID NO: 662835 - DNA, 133 bp, Homo sapiens
tcatctcctattcccctactcagtacatggtacttccacaaccatgatcccatcttctcttacgtacagacacccctttccacaacaccaacaactatcacctacccttctgtggtgctctaccggatttcct

SEQ ID NO: 662836 - DNA, 531 bp, Homo sapiens
gccgagtagtggagtctaaggactcgtgacaatcttcgggtgccttcgagagacaaggggaggatgccactgagtcatcctcttcaatgccactatccttcccatctctcttaccctacagtaccacacaatactaacccttcccctcctctgatgtcttaatcacctccaggagatgaagtgtatctcactgttgccaatgtcaggtccccaggtgaagttcctaaggaccgtagctaaggcaggcagaaaattacaaccacgtgatagtcgagcagttatgtgtctgggcagacgacaccttctacttgagtgcagctacatcttggatcagggtcgagctggtgagcaggagcgccggattgtcgacagtgcgtccggagccagactcgtgcacagttcacaagctggtgtacagtgtagatgtagctccgccacgagaacctagtgggctagcttaagtactatgtccaacgcgggtcaccgcgccgccgaggttaaggcgcccttgtttacacccattggcgcatt

SEQ ID NO: 662837 - DNA, 420 bp, Homo sapiens
caggacctgattggtcgatcactgtactatatgcctgtttatcaatctactgagcaattgtggtatttttttaatctactttttttttttaagaggtgagggtcttgctatattgctcaggctgacatcaaactcctggactcaagcactctttctgcctcagcctcctcagtagctgggtattatggtatgtgtacatatatacttttagagacagggtctcgttctgttgtccaggctggactacagtggtataatcatggctcactgcagcctccaacacctgggctcaagcaatcctcccacctcagcctcctgagtagctagggactacaggcgtgtgccaccatgcctaatctctttttttttttttttgggagagagagtctcgctctgtcacccaggggggagtacagggat

SEQ ID NO: 662838 - DNA, 587 bp, Homo sapiens
tgcgaggctgcattcagctatgattgtgccatcacacttcaatctggtctacaaagcaagaccttgcctcttaaaaatattatacataaaataaataataaaataggaaaacaaacattattcatcctactacctaaacttctattacattattggtaattaccttgactttttttttttttttttttgtaattcacaaagcatttatgtaacacttttctttttgttaaacctgattttcatgaaggtaatttattcaaaacagagtcttgtgccagcatagaggttttcttctcattgttccctgcactaactacttatttgaaggagtctagctagaataatataccaatgtagttaggttttcaggacatctgtggtgaagcataacagaaatttgcagactggcagttcaagggagcagaggtggatttcttagtgtttgaaggctcttgaggagaaacccacagtataatagaatagggcttactggttgggacttattctgttgcctagtcttgagaaatgtctgcctcctagttttttcctctcttggtggtcctaacctaagtactatgtgaattgct

SEQ ID NO: 662839 - DNA, 246 bp, Homo sapiens
gtgatctgtctgcctcggcctcccaaagtgctgggattacaggtgtgagccaccacacccggccattacagtgctttttttgagacagagtttcgctcttgttgcccaggctggagtgcaatggcctgatcttggctcactgcaacctctgcctcccgagttcaaccgattctcctgcctaagcctcccaaagtgctgggattgcaggcatagcactcacctgccgatgtgcccaagtcatgtaaa

SEQ ID NO: 662840 - DNA, 221 bp, Homo sapiens
  misc_feature (168)..(168): n is a, c, g, or t
ctagaggatcccgcgtggtactgcagatgcatagttgcaaaattttctgtcatttggtaattgtctgccctggttgtttattttgctatgaaaaagctcttaaatccaatttgtccatttttgcttttgttacacattgcttttgggtgtcttcactccatgtgaaantcttttggccagttcctatgtcagaatggtattgctaagtatcttcaggattt

SEQ ID NO: 662841 - DNA, 834 bp, Homo sapiens
  misc_feature (602)..(602): n is a, c, g, or t
  misc_feature (642)..(642): n is a, c, g, or t
  misc_feature (650)..(650): n is a, c, g, or t
  misc_feature (663)..(663): n is a, c, g, or t
  misc_feature (686)..(686): n is a, c, g, or t
ggccattctaatcgcaatggcattcgggggggcttaccgaacgaaaaattctaagctataatacaagctacgcaaagtgccccaatcgttgtaggtccccctacgggactacttatcaacccgttcgctgacgtccttaaaatctcttcactcaaagatgcccgctaaatagtccgccgaaactctacctgggggggggtctcacatcacgctggctcctgaccttgtatgcgtctcgaccagtcagctcgttcgtactgatgatagccctcccttccccaattatgcctagactcctgcttgggtctagaccctcagaatcgtagtgccctccatagttgtcattcgtatgctcagcgctcttagccctacgcctcgattatatcctcaatgtccctcgtgactcaagggatgacgacatttcagaatcatcagaaacttacctggcccctgtaggtctggtcgacaacttgtcggaccgcccacaggtacgtcccatatgtcacacgtctcagtagtgatagagatcaactccgtaggcgccatttcgatgtcctaacgtgaataccaacccaaattgacctcatattagaagattgagnctaccctcttgttagagcacattccgtgcccgagctcccngttcaatntcgagctatagcnaccgaatagaagatcaaaccttnacattgaattttaacccttcccattgacgcaattcaatcgtaagctcccctattgtgacccctatttacacttattgccatgtcttcaatcgtaacaccaaacaacataagaccagagaggaaccgaagcccagaaaaaccaccacat

SEQ ID NO: 662842 - DNA, 420 bp, Homo sapiens
  misc_feature (1)..(1): n is a, c, g, or t
ngggatccactcccccagaggctgttcagaatgaagatctgactcttttagttaaggaaatggaacagggtcacagtgatctggagaagatgcaagacctttattctgagtccttgatcatggactggtggtacaatgcagaaaaggatggagacagcaagcatcaaaaggaaatctgttctatgatttcaaccccagaaaagtgtgcaaagcctcaatctgatgtcgattcaacacaaacttcatctctgaatatgttgaagggaccatggggcctttcagatcaaaaggttcagaaaaagaaagtccttcacgcagaatcaaccaaaaccagcctgctcagaagccagatgtcctccctcaggagctcagcttgcagtgaaaggaaggatggcctctccaatgccagcagccggagac

SEQ ID NO: 662843 - DNA, 468 bp, Homo sapiens
tgacttggggccacacttaatcaacaatatgatctgaacgagcttttggttcaaaacattccccccttatgtcgctttttgcacgaacaacaagtgtcgtaaaaaccatgtcgatgtgatgaacagaacaacaaataaaacagaaaagccgacgaacaactgaggaaccgatctaattaaagtcgggatcactcgcaaaagactaagcataacactaaagacagaagacgaaagtgaaacgataaaaatgccaataggagacaacgccatcaagcttagcaataacactatgagagaagcaaaaacgaaccacgacaccttagtgcgtgaagcactcttttccgttttatccgcacgaatgacggcaagaacgttttcttcaaaactttgcggaacttcaacacattgataaactaacgaaatgttattttttattgtaaccatgttttccatcagcaattgacattg

SEQ ID NO: 662844 - DNA, 172 bp, Homo sapiens
  misc_feature (78)..(78): n is a, c, g, or t
  misc_feature (113)..(113): n is a, c, g, or t
  misc_feature (137)..(138): n is a, c, g, or t
accgtccttcactggggactggccttctcgggggttgcttcttccttcactggggacttggccttctcaggcggactntgcttcttccttcactggggacttggccttctcanggggactttgcttccttctccctnngtggaaaacgtacggggactccgtctagagtcga

SEQ ID NO: 662845 - DNA, 415 bp, Homo sapiens
ccgtttttagcgaccgggtatcttatagcaccgtgggtatcagttttttctacagcggctcaggccaagtagacataaagctcttgatgggatttttttttaagacagaatttcgctcttgttgcccaggctggagtacaatggtgcgatctctgcaacctccgcctcccgggttcaagcaattctcctgcctcagcctcccgagtagctgggattacagacatgtgacaccatgctcggctaatttttgtatttatagtagagacagggtttctccatgttgatcaggctggtctcgaacccctgacctcaggtgatccgcccgccttggcctcccaaagccgggattacaggtgtgagccacgtgcccggccagttttctacttctttacctcctgcggtaccacggtgctat

SEQ ID NO: 662846 - DNA, 403 bp, Homo sapiens
  misc_feature (11)..(11): n is a, c, g, or t
gaaaatagaanttatcttcagaattgtcagcatacatttttgtctgggttttatatttgtctttgctagaaatgttgaagtgtcagcatttggcatagaagattataaagctattaacccagccaaaacaaaatggccttagtttatgtggcttctttgacaaatgagactaatttaatattgttagctaaatcttctgggttattggcaaaaacacctatgtatttaactgtgaggttcttatttaggtgaacacataatgttcattggctattaaaaatggttaacaaagacatttggcttaaaatctctattttctctgatacagtatttgatttaaagcccctttttttctttaagccaattaattagagcacttttacatgtttccagtagtgaaacc

SEQ ID NO: 662847 - DNA, 925 bp, Homo sapiens
gaaaatttagaggaatcaccagttcagtatgctgcgtatgtaacctgtgggaggcatcacctctgttataaagctgatgttgcaggactttcttttggtcttggtgaggtttgaatgtgaaggcaacttctcataaaattcccatgttcttctccttgggctatttttcaaaacaagggcccaacacaaaaacagattgatgctgcctcatacacgctgacattcttgtggtcaaggatacagccaaggcacttgtacagataagagcaaacaaatatcaacaattgtgtcctcaggtgaaaggacccagaggttggctatgtggtacccccatagctatggttcaggcagccatgactcttctaagtgatgcttctcatctgcctaaggcgggcggggtcttcacacctgagcagtttttttccaaaacaaagttgatgtgacagactcaacaaaacaccgattttcacgaatgagctgcaggtctaatgggggaggcggcgtcccagtctgtgttgcagcacgcatctcatcggggtgcgcacaccatcgttactgtcgggcagtaacttggccggttggctttgccggcaagtagaagggaaaatctcaactttcctttccagatagtagcttggcgctttagtaaatttaaactggcgtttttggcaaacaagcacacaacacacaaaacacacacatttgtggggcgtccggcccagagaagagttaacaactcttgtgggggcgggcagggagaatagaaaatggccaagtgtgtcaaagaactgggcagcatgtggggtcacacaaaaaaccgggggccgggtgtgaaaccagagtctgtacggtcacggacgtcacccccccgcggggggaggaagaaggaacaacaagaaacaggacggaacaagggcaacagact

SEQ ID NO: 662848 - DNA, 901 bp, Homo sapiens
caacgattttttttcccccagaggaaatttggcggccgcttgagtttttttctgcacaaatcacaaccgggtgttttgttgttatcgatattatcaacaaacgagggtgtcttcctctcgtattgtcggatatactcatgcaggtagtttttatatatcagcatatcgaggttgtggttcggagtcagaccgccccccgccgtcgacaacaacgtagtgggtgttctttccagtgcgactgtcgaccggctttctctctcttgtcgatacaaaccaaatattttgggtaggctcgatactcaccgtgtgtgtgatgtaccaaacacatgatacatagtaattttcctggccggcgcgattgaagattcagtcactattattgtaaagaatgttttacgccacaaaatattgtttagtactagcgaggcaggagcaccccacccccaccccctcttgcgggtaggtgggaggaagatcatcgctcccccacgcgcgcgaagcggaagctctcttctgcgttagagaatacctcactccactcaggcggagtctttcctctctcattttttttttgtgataacacgaggcttgttttgagtgctctctgtgacctcctgcggagggcctccccctgctatgaatagaagtcctctccccctctttttttggtcctccctgttggctcccccccccgctgctctttcccccccctctggtgcagtcttttcctcgcgcccttatttgggccctgcacctcgaccatctcctatttggggggggctccccccatttttgtttccccccccgcggcgggaaatttttttttttttttgtgttttttttgggccccccccccccgtttgtttttttgggggaaaaaaacacaaattttttttttgga

SEQ ID NO: 662849 - DNA, 149 bp, Homo sapiens
atcgcccgctggccaatggcaggggtttatattgccattgttgtgatgaaattgatggccctaatgatagaggagacacctgctaggtgtaaggagaagatggttaggtctacgtgaggctccagaggtgaggagtagttcccatgcta

SEQ ID NO: 662850 - DNA, 259 bp, Homo sapiens
gggagctcaccacatcaaacacagcctgcaggcgactaggcggaattagccactaatgactccaggagaaacatgaggacggaggatgtcccagaacccaaacgtgtcttacatgatattcacaaaagacactactatctcaactatctctaaaatccacatgcatacctggataggacagagcctaccctaccacactcctgaggactgggaatctccggctatgccacaccagattgaaacatccaaccataaggca

SEQ ID NO: 662851 - DNA, 330 bp, Homo sapiens
gagcactagaagatgccttggccacacagcataagaattctgcgaggccgggcgcggtggctcacgcctgtaatcccagcactttgggaggccgaggcgggcggatcacgaggtcaggagatcgagaccatcccggctaaaacggtgaaaccccgtctctactaaaaatacaaaaaattagccgggcgtagtggcgggcgcctgtagtcccagctacttgggaggctgaggcaggagaatggcgtgaacccgggaggcggagcttgcagtgagccgagatcccgccactgcactccagcctgggcgacagagcgagactccgtctcaaaa

SEQ ID NO: 662852 - DNA, 990 bp, Homo sapiens
  misc_feature (157)..(157): n is a, c, g, or t
  misc_feature (774)..(774): n is a, c, g, or t
ataacacacaggtcctcatttgtgctgtgtgttgtttgtggggcgaccgcgcagacatcacaatgtgttcttggcggtgtttcttcgtgaggaagttctgcgccggcaatgttgtctccagaagacagagcgctgggttgtcacattaatgatgggnggacgttgttgtccagacccacgccgcagacccgtgcgcgatgtgtgttgtctgacccgatgttgcccctgttgatggcccgccctcacccaggggcctgtgctgttatcaatattgactctctcgtgtggcatcggccttctggtaatctggtactggtagggatcgcaccaagtgtccgtcgcctcaaggccccctcttttgttaatctcacccctctcctgggcgagtgggtcttgtagagccctcccctgttgcgagttgcctcaccacataagatgccccctcgccttgctcatcttttactctagttgcgccgagcgggccgatgattccacgcccccgtggcctcactcttccatcttagagtgcgagggcgactcatcttgttacgccacacgctattgacaggttttccgtgctcgcaccataacacagacacagacgaggggctcacaagagggggaaaaccacaacactccaagtttccgccccgccggtgcttctcagaacgccgccgctcatcggttgtcaacgaatccctctctcgcgccccactcggcgtgttcgtagagcatattactagtttcctgcgaggtcgttgcagcgctacggcncacctctccgcgctctctcactagatagctccctcgccgtgagcaatgatatctctcctggcgaccacatcgggcgttgcacggacgtttctcagcacgcgtgtattcgtgttatttcatgtgtttacatgcggtctttgtcgtcaccaggcagaacaatcaccgaacaatagatcatatatcgccctttattgcggcccatcaatagtcacaaaa

SEQ ID NO: 662853 - DNA, 279 bp, Homo sapiens
tccccgggcttgcgctctcaagtaagaacaggacaagccttgctatccgcttctagtcatccacagtctcagttacttctccttttccctgtcctgggcttatggtgttagcttctgtatatggaatcagtgaggaagttctgtattaccgcctcatttaataaccactgttaaattcatagctaagcagattctgatactttcaggcaggttactttggggattgagatttttccaaaaagaaccattttcggatgcagccgtctatgggctgaaata

SEQ ID NO: 662854 - DNA, 370 bp, Homo sapiens
ccactgcagtccgcagtccggcctgggcgacagagcgagactccgtctcaaaaaaaaaaaaaaaaaaagggggaaaaattgggggaggtggtttttgccccccaaaatttaaatttttatttagggggacaggataaaggtaaaaggggcccaattttcaacacacaggttcgaaggaaagactgacctagggaggctagaaaaacccttggggagaaataaaaggcccctgctgggtttatctcacagcctcaagagaggacccacataaatgctcctgaggacaaatacttgatctccatgggggggggggcccaaggagcccttgtttataatctctcacactcacaatactggttaaaacaggggg

SEQ ID NO: 662855 - DNA, 458 bp, Homo sapiens
cttgaatgaatcactgggaagccagccatggtaagggctggtgaggttggggagaaaggaagagctttatgtttctctgttgtttggaccctacttggcatgaaaaaggaagctcagttccagccccttggatcaacgaaaatcagaggattctggaaaggcagccaacttgcgcctcttagaaggatcagaggcaagatgagatggcagcctgcagagtaaatgcttgaaaaaagaggggtgattttcaatggtttgcttaagtcactggtttcttaaaccccaaattactggtttggaaccgtgttaaatggttggggacccaggtgccatttaaaacatttggaatatggaaaggcagtctcatccggagtgatttgagtagaaccactgatgatgattttataaatggtgtgaagcgattttcccattgggcaacaattcactgatttgccgtg

SEQ ID NO: 662856 - DNA, 502 bp, Homo sapiens
ttcctgcatgacaaagagaaagttcacgagtacaatcgtcctgctggtagaccctgagcaggaccggaagaaatccatcgaggaacgtcattatgcccctacggacctagaggcggacatcgaatgggtcagccgtcctgtcactaggcagggcacacggtagactgtaacggagaagctgggcagcatcaaccagggcctggaccgcctgcgcagggtcagccacgcgagggactgacgagcactggagtgctgagttcgagtggagccctagggtgattgaccatgtgcgggacctgggcgccagtgccggccaaaactctacgggtactaaagggagcctgggaggggcgttccgggggagagagctcaagatcatcgttcgaagtcgcgaaagtccgaggaagtgctcataccatgtaaccgagaaggcagtcgtgggagaattggcgacacgaaaaaaggctgagaggcacgcagagagtcgatgggcgacggcgta

SEQ ID NO: 662857 - DNA, 947 bp, Homo sapiens
  misc_feature (147)..(147): n is a, c, g, or t
  misc_feature (149)..(149): n is a, c, g, or t
  misc_feature (156)..(156): n is a, c, g, or t
  misc_feature (195)..(195): n is a, c, g, or t
  misc_feature (252)..(252): n is a, c, g, or t
  misc_feature (259)..(259): n is a, c, g, or t
  misc_feature (275)..(275): n is a, c, g, or t
  misc_feature (283)..(283): n is a, c, g, or t
  misc_feature (287)..(287): n is a, c, g, or t
  misc_feature (292)..(292): n is a, c, g, or t
  misc_feature (296)..(296): n is a, c, g, or t
  misc_feature (302)..(302): n is a, c, g, or t
  misc_feature (314)..(314): n is a, c, g, or t
  misc_feature (325)..(325): n is a, c, g, or t
  misc_feature (343)..(343): n is a, c, g, or t
  misc_feature (347)..(347): n is a, c, g, or t
  misc_feature (357)..(357): n is a, c, g, or t
  misc_feature (360)..(360): n is a, c, g, or t
  misc_feature (363)..(363): n is a, c, g, or t
  misc_feature (365)..(365): n is a, c, g, or t
  misc_feature (367)..(367): n is a, c, g, or t
  misc_feature (388)..(388): n is a, c, g, or t
  misc_feature (391)..(392): n is a, c, g, or t
  misc_feature (427)..(427): n is a, c, g, or t
  misc_feature (441)..(441): n is a, c, g, or t
  misc_feature (454)..(454): n is a, c, g, or t
  misc_feature (461)..(461): n is a, c, g, or t
  misc_feature (466)..(466): n is a, c, g, or t
  misc_feature (468)..(468): n is a, c, g, or t
  misc_feature (471)..(471): n is a, c, g, or t
  misc_feature (473)..(473): n is a, c, g, or t
  misc_feature (508)..(508): n is a, c, g, or t
  misc_feature (513)..(513): n is a, c, g, or t
  misc_feature (520)..(520): n is a, c, g, or t
  misc_feature (547)..(547): n is a, c, g, or t
  misc_feature (558)..(559): n is a, c, g, or t
  misc_feature (591)..(591): n is a, c, g, or t
  misc_feature (842)..(842): n is a, c, g, or t
  misc_feature (909)..(909): n is a, c, g, or t
cgcagggggtgtgcgaggctgagtccaagagatagcaaatcgagtcttaaataatccggggagaaagacgcccgggtagatttgaggtgcagccttggagggagggattagaagccgctagactttttttcctcccctctcagtagnanggagtcngaattaattggatttcattcactggggaggaacaaaaantatctgggcagcttcattgagagagattcattgacactaagagccagcggctgcagntgggtgnagagagaacctccggntttacttntgtntcgtntgcnccaacngctagcctcggnttgggtaaggngagggggaattaaacggnggtnggagaggggnagnttngngnggggtgcgctcggcctatggntgnnccgaggggcgtctggtaggcaccccgccctctccngcaggtcgagcccnatgatagataagnttagaantgtgntnttngngtcggaaatggcgatcagcaagacggtggcgtggntcaangagcagntggagctgggcaaggagcggctgctgntgatggactgnngggcgcagagctatacgagtgcgtcgcacatngagtcgggcagtcaacgtggccatcccgggcatcatgctgcggcgcctgcagaagggtaacctgccggtgcgcgcgctcttcacgcgcggcgaggaccgggaccgcttcacccggcgctgtggcaccgacacagtggtgctctacgacgagagcagcagcgactggaacgagaatacgggcggcgagtcgttgctcgggctgctgctcaagaagctcaaggacgagggctgccgggcgttctacctggaangtggcttcagtaagttccaagccgagttcttcctgcattgcgagaccaatctagacggctcgtgtanagcagctcgccgccgttgccagtgctgggggtcggggg

SEQ ID NO: 662858 - DNA, 181 bp, Homo sapiens
cccctctggaatgcaaaggtgtctcaattacaaatttggctcctgtaggagtctcagaaaattaacagaagaaaatatacccccctctccaaaagaagtatgacacacgcattttgaagaaaccccaatgtttcatgcaataggtaggcaagatgtaataagcccacccaaattcacacat

SEQ ID NO: 662859 - DNA, 561 bp, Homo sapiens
  misc_feature (272)..(272): n is a, c, g, or t
  misc_feature (506)..(506): n is a, c, g, or t
cgagatgaaatcatacgatccgtccttccacgtccttcatttagcagaatgcatttaagattcatccatgttcttgtatgaatcaatatttgttctggctgtgtttccacgtttttggcaacttatcacgtaggtcctttaaagaatattttcattaacaggtttttctatgacatatacggtttttaagttcccctgggtaaataccgtgggactgtgactaggtgggctatattggtaagtgcactgtttagtttttataacgaaactgnccaaactcttttctaaagttgactgtaccacttttgcatttgctccagcaaggtacgagagttctggttgctccaaatccctgccaacacttggtattcagtttttttttcttttgttggacattttaataaggcgtgtagttgtatctcattgtagtagcttatatggcagaggtttaaggtaattcatttataactaatgtccaggctgtatatattttttaaagtatgatngccataatagctcttcaggctattcacaaaggggggtactgtggtccatatgact

SEQ ID NO: 662860 - DNA, 660 bp, Homo sapiens
  misc_feature (651)..(651): n is a, c, g, or t
atgcattctgtacattatgtcaagggcagttttctacaacatagctttccgatagcaagtgtttacgatgaataaacttaaaagtactcgactgtggaggtaatcgtaccatctatatcgacctcaaatagacttttaaatgcatctgttcctctaaagttagatgtgaaaatttcttcatttcccgcaatatctgcaatattacttgcttcttttctaactccgaagatgtcacaaagtgatattgaaagaagagttttcttgaacaactcattcgttaacaattcatttagcagagtatggattcggtcttggatatcaggactcttaagtagatccaaaagaatgttggataactggctgttataagatacttgtattagtttgagttttctttctggcccccatgttgtatatcttttccataggttttgatcgtctaagatatctattagttgctctatttcatcagaagataaacaatccaaactgttaactcttaggttaacaccattactacttagctctttgatatttgcaaaagagttaattgagcgatctgagagtaatagggttatgttatttggtagaattgaagtgaagtgttcgagaaactcggtctggtcactaatgtcgtcaataacagcaggnaccactcgg

SEQ ID NO: 662861 - DNA, 1001 bp, Homo sapiens
  misc_feature (1001)..(1001): n is a, c, g, or t
aactgcggtatccgcgatgcgtgtcctgggagctacattcctgttcctgctgcgcagctccggtggccagagtcgaaccggtgcgtttcaagtgattgcggtctgtggatggagttctaatgggacttgaatgtgagtccagtgagccaccggccaatgcctgtctcagagtgacgatgacaggaacaactgtatactacgatgctctaccaaagttcaatctgtcacacgatgcaactatcacaaagctatgatagcgagcaaggctggtgggtgcgtggcatctctgatggagaagttggcagagtccacttttgcactggtgccatgaaagcatggagtggtcccgtaagaagtggaaatccactgtgctatctaatgatagacgacctatagttacctgaataaacttagcggtgcaagaagtgatctatccctgctatataccgcatggtgtgctggagggcgcactctcctggaatgattacacaccaaagtgtctccgtgtctgtaagggttccagtagccatatcgttgctgatgtcgtaaggtgcctcatggagttcggggcgtctgggcaactgagtctgctgatcactcgtgacagtacctaccacctccgctgaattcaattcaccggcgcactggcgctccagtggaatccacagccgagccgtcgcagaaggcgggccggtcacacacaccagacgccagaggagctggtccccaaggggtggccacggcagcataagcgggcctacgagagtcagacaagtcgcccctgggtgcccacctgcatataccacacaactgactgcgggcctcttagcctggaaaacctggccagagcaccgtgtggtgagacacagacaacaagacgtgcgctcggccaaacaaaaaccgggcgcgagaagcgagtttgcctacacgccagcacaccacccacggaaacaacgtagagaagaggacagaaaggaacacagcagcagagcacaaagagn

SEQ ID NO: 662862 - DNA, 208 bp, Homo sapiens
ttttaaagggggcccccctttaacccttacttttttttaggtgaaggggaacccttttttaaatatgatgaaacccctggcccccgaagggagggggatttccgaaatccccccttttttttttttaaatccccccatgggaaaatcccccgaaatttgtcctttggccaaatttccgggccctttttttttttaccttttgccttta

SEQ ID NO: 662863 - DNA, 1104 bp, Homo sapiens
cgggtgagtctgggtcgtggctgctgccgggtctgcgcgctccggactgagggtggctgtccctgggcctggacggcggtgtcccggctgtggcgggaagccggcactggagcgggatgcgcactggtgcgcgggacctgggaggctgcagggacctggactggctccctgatgtctgcccagcctgactgtgtacctgagatggtgcgtgcgcccctccgagcatgagcctgtccctggccactcccctgggatcttgacttggctcttgctgtgtcgctgtggcacctgttgaatgccctggggtgttgctgtggctccgtcctgtgtaggcgccctttccctggctgtcctggcttggggtggtggtggcagttgactccagcccctgcctctcccttggagaggagggctccactcgctccttcggcctcctcccctggtggccgcagctgactcgttgccggcttcctgcttccctgcctgcctggcggtcccgctgtgctagaagaagtcttcacttcccaggagagccaaagcgtgtcttggccctatgtgtgaaaagaactggctgtgacctaatgccctgacctggaagggcccatgccttgggctgacatggcatgatccagagcactgaccgtccggtgctgacccacctgcaggtggcatctctatcggcatgggctcatgggactgcggacaagtgggatcttgggtggaagctacctgtggtggtcaaaagatgcttcccacgactcgggattgggacgccctactccccctatcatacacggtcatctgatagattgatagagtacaagaggaaaacatagagtacatgcatgatagggtagacccatccaggatggaagagctgtgacccctagcaaaggactaacacatcgttacccaaatacatagttagtcgaagatggcatttggaatttgacagagaaaagatacgataattgacatataacaaaacgaacacatatgttcacccaaattgagataaccagtgagaaactagtgaacaatctaaaactctggcactagaatagacactcgacatgaagatgcatcaatttacaactacactgc

SEQ ID NO: 662864 - DNA, 437 bp, Homo sapiens
gcaacaacaaaaaatgaacatgaagctgggacctcatgttacagttcgtcacgcctgtaatcccagaactttaggaggctgaggtgggaggatcgcttgagcccgggagcttgagaccagcctgggcaacataatgagacctcatgtctaaaaaaaaattttttaaaaggccagacgcagtggctcatgcctgtaatcccagcactttgggaggccgaggagggtggatcacgaggtcagaagttcaagaccagcctagccaagatggtgaaaccccatttctactaaaaatacaaacattagccaggtgtggtggtgggtgcctgtaatcccagctactcgggaggcagagaatcacttgaacccaaaaggcagacattgcagtgagccaagattgcacccttacacttcagcctgggcgaccgagactccgtctc

SEQ ID NO: 662865 - DNA, 140 bp, Homo sapiens
ggtcgctctcgagatcccctaactctgtactcttgcgcatcaatgtaagtcacttattaacccagcaatcggattttggttttcagtgtgaacttcttgggggtgctgtctgcttaaattaatatttttcgttaacaggc

SEQ ID NO: 662866 - DNA, 158 bp, Homo sapiens
  misc_feature (23)..(23): n is a, c, g, or t
  misc_feature (28)..(28): n is a, c, g, or t
  misc_feature (60)..(60): n is a, c, g, or t
ggggggggggggggggggggggngcccnttctttcacccaattttgtttaaaaaaaattncgggggcccccgggcagctggaaaaaggagtcaggatgttgccccccaaagaccagaaagaaaagggggccggagacaaaaaaaaaaagggggggttt

SEQ ID NO: 662867 - DNA, 529 bp, Homo sapiens
tctgaggcagctgggaaatatgacagttggggctggaaaagagttggtgtagcttcagaggtgtgaaaggaccacaagagatggggtgttaggtttcctttgtttctttcttttttttttggaaacagagtcgttctgtcgcccaggttggattgcagtggcgtgatctcagctcaccgcaacctccacctcctaggtccaagtgatcctcctgcctcagcctcccaagtagctgggactacagggtgcccgccaccatgcccgactaattttggtattttaagtagagaccaaggtttcaccatgtgggccaagtgggtctcgaacctcctgacctcaggtgatctgcccgcctcggcctcccaaaaagtgctgcgataacaggcggtgagccaccgtgcccgggcctgaaaggacagtcataagggaacaaaagaccataatctggaactcacgtcttatggagcactaacttggcacaggccccattgcttatagtaccgtgtttaatcctcataataagctcatg

SEQ ID NO: 662868 - DNA, 115 bp, Homo sapiens
  misc_feature (17)..(17): n is a, c, g, or t
  misc_feature (79)..(80): n is a, c, g, or t
  misc_feature (111)..(111): n is a, c, g, or t
ggctccgaggcggcggnggcgactccctctttccctccctcctcctccgtccgcccgtccgtccgcgcgacagcccgtnnttaaaaaaccgttccgaagcaaggccggcgnctgt

SEQ ID NO: 662869 - DNA, 174 bp, Homo sapiens
gttccttcttagttctccttttcttctccttctccttcttctcttccttcttagttcttcttcctcctctccttcttctcttcttcttctccttcttcttccttttcttcttttcttcttctcctttcttcttccttcctcttcttcctcctctcccccttctgtcgtcttctc

SEQ ID NO: 662870 - DNA, 1745 bp, Homo sapiens
  misc_feature (619)..(619): n is a, c, g, or t
  misc_feature (1401)..(1401): n is a, c, g, or t
tttttttcacagggtttataaaaacccccttttttggttggaaaaaaatggtgtaaatgggctctcggtttgggacacccgtgtgtttattttttaatgagaaaaactatgtagaaagacctccttataaattcttctcccccatgtgttttctgtggtgtgtgtggtgctttattaaacaaccccccatatatttcaagtgtggaggggagaattttcacaaacattttaacgtgaaaacaaatatgtgaaaaatatatctttcctctctcagagagcaagctctctgtgcctattgttgtgcgcacaaaacacttttgtgtggaaagagagagataatataaacacacaccactctcgcgcagggtgtgtggacaccgtgtgtgaacagcgttttatttacccacacctatatatgtgtgcgcgcgcatgtgtgtgtatcatagacacaccacgagttgcgcgccacgacgtgtgtgcgcgccgtgtgaatgatgtgtgtgtgtggcgcacacaacaatacccacacaccacagacacgacgtctctatatacgctcacgacgccgcgcacagaatatatattatatatgagtgtggaacatttttatatacacccncctgagtgagaaacacactgtgtgtgtttatagacatttctgtgtgtatatacgagtatactctatacacagaacagtgtgtgtaccgcgcctgtgaacacaaatattacaacatgtaatgatcgtcgttttataaaacacacatttattttaagcgcggcgccccatcttcatatgaggtgcgccaatatgtaataaccaccggctcctactgatttatacacaagacacctgctccttatattctgatggtggaggtgtaaaagcaacaacagatggtggtgttgtctcattcttttaaaaaaaacaatcttgttgttctaataaaattaaagaacaactctttctctgttggtggtaaaaccacactcatgaggcggcgcgagtgagccccccctgttgggataaacacagcacaaaagaggcgtcaacacaggccgttgtgatctgtttaaaaaccacgtggtcgtgttggcgcacgacccctttttctaataagcgtggtgggggagcgagggggcacacgcaccaacaatcattagatacattatatcgcggcttatttatcaagcacaaaggttattccccccccatgatggtgggggcacaaccacacttatccggcggtgtggccttattaacaaccaccatcagtgactcgttaaatcaacccgacattaataatactgcatgtggtacagacaagaagagagtacgacacacaccctgtgtgtatttgtgtgtggcgcacaaaacactacggtcggttgtgatgagaaacnaccacacttcgttctcggggggagaaaaataataccaaaatgctcctttaaacaataataacaaatgaggggggagggggcgcacacaaacacaagacgccagtcaatgtcatgttgatcgtactgttggtcgcacgccagaaagaaacatctcatgccatccaaggagacgaacaacaagatgtagttcgccgcggcgcctacaaacaaatcaacttggtggcgcaacacatagtatgtgaacgcaaccacgtctgtttgtattccgcagcaagtatgaatgattgacgtgacaacaaggaaaaaaattgtagtcgtcggtgaagtcgaagcatgcacatcac

SEQ ID NO: 662871 - DNA, 284 bp, Homo sapiens
cccgaaaccctgaattacggtgacacacagaccctctgtgagaagagaggcgagggatgggcccaaagtgggaagctctcaacgtcacccctcaattgttgtagaaggatggctcttcccctgaacgtgtgtcaggctcaacacggtggttcaagaactgtttcccaggaatacacagtctacaatctcattggtaaagaaaatatttgtgctttacagagatgtgagaatttaatgtatttggttttataaatccttgccattccaaaggcgtaattagggtt

SEQ ID NO: 662872 - DNA, 270 bp, Homo sapiens
agatactgatgatgatgtcctgctgcatcgctgtgctgctgctgctcgtgaggggcaacgtctcactctgactcagtacatagtgtgtattagtctgtttcacactgctataaagaagtgcccaagattgcgtcatttataaaggaaagagatataattgactcacagtttctcatggctggggagcagcttaggaacacttagaatcatggtggcacaggggacgcagagaggtttaaccacggtggtaggatcacagtcagggcagca

SEQ ID NO: 662873 - DNA, 209 bp, Homo sapiens
  misc_feature (1)..(1): n is a, c, g, or t
  misc_feature (192)..(192): n is a, c, g, or t
nggctcctaccatgcttttaccgcctccaaatttaacccgcccacaaaatgcccattaacctttctcatgcttttagactgattacggaatataaatagcaaagtcaattttaatgaaattagatcttcgacttcacttcgggttaaggaggcctctttttttcctgctattcgatgaacctgcggtaaaancttgggcgagctcgatt

SEQ ID NO: 662874 - DNA, 123 bp, Homo sapiens
cctgtgttaaattgttctcccctaaacaagcagcagtttcttaaccacgttgaaaccaagactgaagactgaacctgacgaagtttccatagaagacagtgcccagagtgacctcaaagaagt

SEQ ID NO: 662875 - DNA, 101 bp, Homo sapiens
ggatggatagatcagtatcataggttacagctgttacacaggttcgttcttggcgcgacataaaaacaagccaatcacatcgaataaatcatggctttttg

SEQ ID NO: 662876 - DNA, 241 bp, Homo sapiens
gtcgacttcctgatgattctttcctgctactatcctgaactctcagcatttccaattcctttgcctggtttggttccctacagggtggtggcagactagaaatttggctttgtgagaaaaatgccttgccgtttctttctttcgttcttttgttttttgagatggagtctcactcttgtcgcctaggctggagtgcaatggcacagtctaggttcactgcaacttctgcctcccgtcgacg

SEQ ID NO: 662877 - DNA, 177 bp, Homo sapiens
ttttgtttttgtttttttgccccccttcatcaaagcattcattgtagtgtatgggaattgtctttgaaagtaacaacctctcttccctgagggctgggtttgcttgtttcaaaccattttttccttaacacccagggcttggtaaacaaaacctattaataaacatttgttgaatta

SEQ ID NO: 662878 - DNA, 421 bp, Homo sapiens
agcggctttcctttcagcggagcgcggcggcaagatggcagtgcaaatatccaagaagaggaagtttgtcgctgatggcatcttcaaagctgaactgaatgagtttcttactcgggagctggctgaagatggctactctggagttgaggtgcgagttacaccaaccaggacagaaatcattatcttagccaccagaacacagaatgttcttggtgagaagggccggcggattcgggaactgactgctgtagttcagaagaggtttggctttccagagggccagtgtagagctttatgctgaaaaaggtggccactagaggtctgtgtgccatttccccagcagagcttttgcggtaccaactcccaggacggctcgctgcgccgcgtctttcctatcgctgtcccgcacgcccatggggcc

SEQ ID NO: 662879 - DNA, 198 bp, Homo sapiens
  misc_feature (26)..(26): n is a, c, g, or t
  misc_feature (31)..(31): n is a, c, g, or t
  misc_feature (91)..(91): n is a, c, g, or t
  misc_feature (115)..(115): n is a, c, g, or t
  misc_feature (195)..(195): n is a, c, g, or t
aaagtctaatcaaataagatcactanaattnccagaacagctctgaaatactgattgcagattcatttcaaagtagatttaacccccttcnggatctggtgcttacatcatgaangtcttcaccaacttcaactctgaacaatataaaaattttagccagttctggctatagttaaactcgtgccgaattcctgnagc

SEQ ID NO: 662880 - DNA, 2049 bp, Homo sapiens
ggcacgagggaggctccgtgagatggggtccagcccatcccaacacaagggtgcagcttgattcgggagttccccacctcctgcccattctccgcgtccttttaccccatggagagcctcagccatggcaagtccatctggagtccaggaagcaggcaactggcctgacccatgagaccgtttggagaccaagcagcagatgcaggtgtggaccccaggaacctacaggggtgtcagccgctgagccccctccctgctgtgtgggtggtgagcaggctgggtctttgtctgtcttcttctacacggcatgtgcctgcaccagccccaacacctgagctggtttagcgcaaagaagagctctgactctccaggggtgctgggacatcacgtggaattggatcccaggctctcttgggcgagaaagaccattctggaggtgggagtgggagagctgcctgtctgcccacgggctctgcgtctccgcagtgggtggccttggatgcccggcccctccctttctgtgcactggggacgctgatggaggctgaagctgctgttcggaggccctctattggtgcctctctcctgccgtcatcactatggcaggaaaacagagatggtttagtaatgaattatcattcccaaacccgtgtccacctggaacatcaggatgggaccatgtttgaaaatcgggtctttccaaatgtaattaagtaaggcgaggccatactgcatttacaatgggcccaatccagtgtccctatgagagacggaagaggagacacagacacaaagcaggaggccacataaagacagaggcagagactgaagtgatgctgccccaagcccagggatgcctggagtccccaggagctgggagaggcaggaaggaccctcccctagagtctctggagggaactggatacaattgcagagtgcactaaacagttgccccagaaagacatgtcttgttttaaagcccagaacctgaaattattatagattttattcggtaataaggaactttgcatgtgtaattacttaaggatatgaagatgagattgtgctggattattaagcaccctaaatgccatgacaggtgtccttccaagagacagaagaggagacacagacacagagcaggaggacacgtggagacagaggcagactggagtgatgcggccacaagcccagggacacctggagcccccaggagctgggagaggcaggaaggatcctcccctagagcctccagggggaactggaggatgcgtaagagacccagaacttccacagaaggaggaaaattaacctcctgcttctctagactgttccaaagctgaaccctagaaagcaaagctgatacagaagcatccaggctgcaggagtacaggtcgcaagtgctgagcgtgggccttgggtgtgtctcatgggggaaaaaaaactgtgaaaaacctcagagtagcatcttcacagtaacgcacggacgatccctaaactgccttgtaaacaaaaatgagagcttgagtcagaggaagccgagacaatatccttcctcgacaacgtgcgagaaccctgacgtcccccagcaaaggaagacgttgcaagcaggcaaaatgcgtcgatttttttttttgtcagtatgatgatttttgcagccacttggctatggagagcagccgacaccccctcttacagccgtggatgtttcctggaagctgactcagtctgttcactggttgagctttgagtgaaaagataacacaggtctattgactcacacacatgttttaagatggaaaactttacttctgttcttggcaggacatggagagagggagggattccaaaaagtctcagcctccatcaaggcgtggcagctcatgccggtaatctcagcactttgggaggctcaggcgggaggactgattgagtccgggtgttcaagggccaacctaggcaacacagtgagaactcatctctgtaaaaaataaaaataaaacattaaaaaaaacatgagctttgaagtgcacagggaaaaaaaaaaaa

SEQ ID NO: 662881 - DNA, 353 bp, Homo sapiens
atagaagatccctgcccatttactaggaacctggttaagcaagcactaatctcttttcctggagatcaagaatgcatcctcaggttgagaaagaaacagggttccctgggcccattagactgttagcagggcatcgctgcttccccctggcccctcgcaactagcaaaaatcgtctttgtctttgccaattatagagggatttgggtatccacagtgctcccatgcaaggttagactgtcttaatccccagttagacccccagaaatgctcttaaaatgcctgccttaagatgggattgggccttttataatttcattatagtgctaaatatatggttggctttgtacatgaa

SEQ ID NO: 662882 - DNA, 853 bp, Homo sapiens
agcggctttcctttcagcggagcgcggcggcaagatggcagtgcaaatatccaagaagaggaagtttgtcgctgatggcatcttcaaagctgaactgaatgagtttcttactcgggagctggctgaagatggctactctggagttgaggtgcgagttacaccaaccaggacagaaatcattatcttagccaccagaacacagaatgttcttggtgagaagggccggcggattcgggaactgactgctgtagttcagaagaggtttggctttccagagggccagtgtagagctttatgctgaaaaaggtggccactagaggtctgtgtgccattgcccaggcagagtctctgcgttacaaactcctagggagggcttgctgtgcggagggcctgctatggtgtgctgcggttcatcatggagagtggggccaaaggctgcgaggttgtggtgtctgggaaactccgaggacagagggctaaatccatgaagtttgtggatggcctgatgatccacaagcggagaccctgttaactactacgttgacactgctgtgcgccacgtgttgctcagacagggtgtgctgggcatcaaggtgaagatcatgctgccctgggacccaactggtaagattggccctaagaagcccctgcctgaccacgtgagcattgtggaacccaaagatgagatactgcccaaccacccccatctcagaaacagaagggtgggaagccagagccgcctgccatgccccagccagtccccacagcataacagggtttccttggcagctgtattttggagtttggatgttgctttttaaagacccttttattaaattttgtaccaagacca

SEQ ID NO: 662883 - DNA, 887 bp, Homo sapiens
agcggctttcctttcagcggagcgcggcggcaagatggcagtgcaaatatccaagaagaggaagtttgtcgctgatggcatcttcaaagctgaactgaatgagtttcttactcgggagctggctgaagatggctactctggagttgaggtgcgagttacaccaaccaggacagaaatcattatcttagccaccagaacacagaatgttcttggtgagaagggccggcggattcgggaactgactgctgtagttcagaagaggtttggctttccagagggccagtgtagagctttatgctgaaaaaggtggccactagaggtctgtgtgccattgcccaggcagagtctctgcgttacaaactcctagggagggcttgctgtgcggagggcctgctatggtgtgctgcggttcatcatggagagtggggccaaaggctgcgaggttgtggtgtctgggaaactccgaggacagagggctaaatccatgaagtttgtggatggcctgatgatccacaagcggagaccctgttaactactacgttgacactgctgtgcgccacgtgttgctcagacagggtgtgctgggcatcaaggtgaagatcatgctgccctgggacccaactggtaagattggccctaagaagcccctgcctgaccacgtgagcattgtggaacccaaagatgagatactgcccaaccacccccatctcagaaacagaagggtgggaagccagagccgcctgccatgccccagccagtccccacagcataacagggtttccttggcagctgtattttggagtttggatgttgctttttaaagacccttttattaaattttgtaccaagaccaaaaaaaaacacaaaactcgagactagttcctctc

SEQ ID NO: 662884 - DNA, 871 bp, Homo sapiens
  misc_feature (207)..(207): n is a, c, g, or t
  misc_feature (215)..(215): n is a, c, g, or t
agcgggtcccgcgcgtcggcggccgcggagcagcgcagggagccaggcgggctgccggcgggtgtgaagaaaaaaatgacactccaatgggctgcagtggcaacctttctttatgccgaaataggactcattttaatcttctgcctaccttatattcctcctcagagatggcagaagattttttcatttaatgtctggggtaaaatngcaacttntttggaacaaggctttccttaccattatcatcctattgattgttctatttctagatgctgtgagagagtaaggaaatatcctcagatacataccatagagaagagctccaccagcagacctgatgccgtatgaacgacacacagatgaaactaacaggtctcaaagaaatcttaacataactggataaccctatagagcaggctcagtcccgagacgtctggttacgctacatgactcacactggcaacaagaacagtcacaaacaaaggtgcactccagaactccagacagacaaagtactaacaagggctgccaaaacaattccatggaacgaacacgaacaaaactaacacaaggataggcaaacagcccacggctcacaggaatgcacgacactgcgcacacgggaacggcccgaacaacctcaaccaacctacgctaagacaggaacccagggacgacagaatggaagacacaatgacacggacacgcggacagcaactacaccagtgaccgacccgaactaagggcacaacaaacagacgacatgcgggaaatgggcacactggacaagaactgcaccaaacagcaacaagaagacagagcagacccacgaagagtagaggcacagcaacacagcggaacaacgaacaaa

SEQ ID NO: 662885 - DNA, 314 bp, Homo sapiens
gaagtctcccatatgtcgaactgcaggcggcgcaaatacactagtagataacagagccaacaagcagtaggcagtgaccatgactgcagaagagcagaggacagactccgatcatggggacagacaggctctgtaagctaactcctcactggtcatggcttagcatggaacctccccaaagtccttagtaaacaaagacactcgcaaaaacccaagtaaactactattaaaactactgatggataacggggagcttatccaatagctaaagaactgagaaactagttgctctagaactgctattctgactcgat

SEQ ID NO: 662886 - DNA, 221 bp, Homo sapiens
  misc_feature (19)..(19): n is a, c, g, or t
  misc_feature (169)..(169): n is a, c, g, or t
  misc_feature (197)..(197): n is a, c, g, or t
caaatatctaatgtaaatnacgagttgatgggtgcagcaaactaacatggcacatgcatacctatgtaacaaacctgcatgttgtgcacatgtaccctagaacttaaagttttaaaaaaaagttaattttgtatatgtatacattaattaggcatgtatgtggtatagngttgttaaaaaaattcaaatataatttncacaacataacatttgttttcata

SEQ ID NO: 662887 - DNA, 303 bp, Homo sapiens
ttatcagcaccagccgccatggccaagcctgattgttccagctccaaagattaaggaaggggcaggggtgggggaaggggttgggttgggctttttttttcagtggagcttaggaaacgttcccattcccaggggccattgagggcccagcagggttgaggggttgaaaaaccgtagccatagatcctgtccccctccactcccctttgaccctcaggttttcccagtttcctccccttgttacagcctttgccctggtttgggttatgtcagatccaaaaacatcctgaacctttgtttgta

SEQ ID NO: 662888 - DNA, 854 bp, Homo sapiens
agcggctttcctttcagcggagcgcggcggcaagatggcagtgcaaatatccaagaagaggaagtttgtcgctgatggcatcttcaaagctgaactgaatgagtttcttactcgggagctggctgaagatggctactctggagttgaggtgcgagttacaccaaccaggacagaaatcattatcttagccaccagaacacagaatgttcttggtgagaagggccggcggattcgggaactgactgctgtagttcagaagaggtttggctttccagagggccagtgtagagctttatgctgaaaaaggtggccactagaggtctgtgtgccattgcccaggcagagtctctgcgttacaaactcctagggagggcttgctgtgcggagggcctgctatggtgtgctgcggttcatcatggagagtggggccaaaggctgcgaggttgtggtgtctgggaaactccgaggacagagggctaaatccatgaagtttgtggatggcctgatgatccacaagcggagaccctgttaactactacgttgacactgctgtgcgccacgtgttgctcagacagggtgtgctgggcatcaaggtgaagatcatgctgccctgggacccaactggtaagattggccctaagaagcccctgcctgaccacgtgagcattgtggaacccaaagatgagatactgcccaaccacccccatctcagaaacagaagggtgggaagccagagccgcctgccatgccccagccagtccccacagcatgtacgacggtctgcgcggcggagcagcctttcgttagtctgggcgctggtgtttacgcccggcgcattggactatgcgctgagc

SEQ ID NO: 662889 - DNA, 826 bp, Homo sapiens
  misc_feature (207)..(207): n is a, c, g, or t
  misc_feature (215)..(215): n is a, c, g, or t
agcgggtcccgcgcgtcggcggccgcggagcagcgcagggagccaggcgggctgccggcgggtgtgaagaaaaaaatgacactccaatgggctgcagtggcaacctttctttatgccgaaataggactcattttaatcttctgcctaccttatattcctcctcagagatggcagaagattttttcatttaatgtctggggtaaaatngcaacttntttggaacaaggctttccttaccattatcatcctattgattgttctatttctagagtttcgagacgtgtggttacgctgtattactcacactggcaaaaagagactgtcaaacaaaggtgtaacttaaaaggtcaagcagaaaaatactaacaaggttgccaaaaaatttatggaagaaaaggaaaaactaaaaggggattttgaaacagccagtggtaacacgatgaagaatgtgttttgaagcaggacaaataaaaaaagtatgtagaagaccaggagaaacttgaaaagtgaagttagaggaagacttcagatgccctttctaaggcacaaaaattgatgtgatggaaatggaagattgcagtcagagagaactttcgcaaacgaattttgatcagttcctgaaagaacactctgaacttcaaggatcgtcagaaaagaggcacccgaaaagactggacttttataaaagaacctgcaaaatctgggtcacactgctactcggtatgtaggctccagaaatttagtcagaaatgcctagacggtgcgattttaaggcccactagctgctggacggctacacaatttgggggtccgtattgccctcgtc

SEQ ID NO: 662890 - DNA, 127 bp, Homo sapiens
ctcaggaggttgacaccgatgaggagaaccaggacgaagaggaaaccaccaacagtcgccttgcccacatcagaacgcttgcgagcacgcttcgagtagatcgacgcaccctcgatcccaataaaca

SEQ ID NO: 662891 - DNA, 131 bp, Homo sapiens
aatcctcctgctgctagcgtctaccttagctccggagggcagcagcttctttgactcaaccagaggaggaacagaagctgcagccagagctgcagcttaaaagtccctggagagcaaggctctgatgagga

SEQ ID NO: 662892 - DNA, 872 bp, Homo sapiens
  misc_feature (17)..(17): n is a, c, g, or t
  misc_feature (26)..(26): n is a, c, g, or t
tcattgtggtacccccncggggttanttgtgatatcgtctgatccacggccgtcgggcagtgcaaatatccaagaagaggaagtttgtcgctgatggcatcttcaaagctgaactgaatgagtttcttactcgggagctggctgaagatggctactctggagttgaggtgcgagttacaccaaccaggacagaaatcattatcttagccaccagaacacagaatgttcttggtgagaagggccggcggattcgggaactgactgctgtagttcagaagaggtttggctttccagagggccagtgtagagctttatgctgaaaaaggtggccactagaggtctgtgtgccattgcccaggcagagtctctgcgttacaaactcctagggagggcttgctgtgcggagggcctgctatggtgtgctgcggttcatcatggagagtggggccaaaggctgcgaggttgtggtgtctgggaaactccgaggacagagggctaaatccatgaagtttgtggatggcctgatgatccacaagcggagaccctgttaactactacgttgacactgctgtgcgccacgtgttgctcagacagggtgtgctgggcatcaaggtgaagatcatgctgccctgggacccaactggtaagattggccctaagaagcccctgcctgaccacgtgagcattgtggaacccaaagatgagatactgcccaaccacccccatctcagaaacagaagggtgggaagccagagccgcctgccatgccccagccagtccccacagcataacagggtttccttggcagctgtattttggagtttggatgttgctttttaaagacccttttattaaattttgtaccaagacca

SEQ ID NO: 662893 - DNA, 460 bp, Homo sapiens
ttaattgaagcccagtgtatttagggaaaatgaagaaggcaagtaggatccgtacacttgtccatggcttaacaccgactaaaacaaaaaaccgatgactacgctaacacccttgattctctttatatcctacggaaaacagggtgcaaggctatgaacggggagggggtccgcctacagccagggggactagcagtaacaagacttttacggtgctacacaaaacaagcctccttatggccagacacccagcacctttggtgggccgggggggcctaatgggtaacagctgctaggggcaactttgaagactcgagccagtgtttcacgagctccacacgtgccgtttgtttcttgattagaagatgcctctgacaaagcgcgcaatatgcgaatgtaaggtgaacgctccagcatcaaactcttatggaacgcttggtgaaccaccaaccagcgcaga

SEQ ID NO: 662894 - DNA, 199 bp, Homo sapiens
tgtagagaagagcctcatagggatgacaaaagtgaaagtagggaaggaagattcttcttctgcagaatttcttgaaagacggagggccgctttaggaaaggtaccttcagaggattgtaaatcatcctaccatgtacaggaccctgacgtcagagagttcttggaaaaagaagagctgccacgtgccgtggggtaggag

SEQ ID NO: 662895 - DNA, 858 bp, Homo sapiens
accaccaagtatagcaggcggtccggatgttagttcagtacacggggctgcgtattcaatgaaaatgacatgggccgtggctacaattacaaagctgaactgaatgagtttcttactcgggagctggctgaagatggctactctggagttgaggtgcgagttacaccaaccaggacagaaatcattatcttagccaccagaacacagaatgttcttggtgagaagggccggcggattcgggaactgactgctgtagttcagaagaggtttggctttccagagggccagtgtagagctttatgctgaaaaaggtggccactagaggtctgtgtgccattgcccaggcagagtctctgcgttacaaactcctagggagggcttgctgtgcggagggcctgctatggtgtgctgcggttcatcatggagagtggggccaaaggctgcgaggttgtggtgtctgggaaactccgaggacagagggctaaatccatgaagtttgtggatggcctgatgatccacaagcggagaccctgttaactactacgttgacactgctgtgcgccacgtgttgctcagacagggtgtgctgggcatcaaggtgaagatcatgctgccctgggacccaactggtaagattggccctaagaagcccctgcctgaccacgtgagcattgtggaacccaaagatgagatactgcccaaccacccccatctcagaaacagaagggtgggaagccagagccgcctgccatgccccagccagtccccacagcataacagggtttccttggcagctgtattttggagtttggatgttgctttttaaagacccttttattaaattttgtaccaagacca

SEQ ID NO: 662896 - DNA, 984 bp, Homo sapiens
  misc_feature (279)..(280): n is a, c, g, or t
  misc_feature (285)..(285): n is a, c, g, or t
  misc_feature (289)..(289): n is a, c, g, or t
  misc_feature (291)..(291): n is a, c, g, or t
  misc_feature (296)..(296): n is a, c, g, or t
  misc_feature (299)..(299): n is a, c, g, or t
  misc_feature (311)..(311): n is a, c, g, or t
  misc_feature (313)..(313): n is a, c, g, or t
  misc_feature (319)..(319): n is a, c, g, or t
  misc_feature (321)..(323): n is a, c, g, or t
  misc_feature (326)..(326): n is a, c, g, or t
  misc_feature (334)..(335): n is a, c, g, or t
  misc_feature (340)..(340): n is a, c, g, or t
  misc_feature (342)..(342): n is a, c, g, or t
  misc_feature (345)..(345): n is a, c, g, or t
  misc_feature (348)..(348): n is a, c, g, or t
  misc_feature (360)..(360): n is a, c, g, or t
  misc_feature (366)..(366): n is a, c, g, or t
  misc_feature (372)..(372): n is a, c, g, or t
  misc_feature (378)..(378): n is a, c, g, or t
  misc_feature (389)..(390): n is a, c, g, or t
  misc_feature (396)..(396): n is a, c, g, or t
  misc_feature (410)..(410): n is a, c, g, or t
  misc_feature (422)..(422): n is a, c, g, or t
  misc_feature (428)..(428): n is a, c, g, or t
  misc_feature (444)..(445): n is a, c, g, or t
  misc_feature (795)..(795): n is a, c, g, or t
  misc_feature (821)..(821): n is a, c, g, or t
  misc_feature (837)..(837): n is a, c, g, or t
  misc_feature (851)..(851): n is a, c, g, or t
  misc_feature (854)..(854): n is a, c, g, or t
  misc_feature (856)..(859): n is a, c, g, or t
  misc_feature (861)..(861): n is a, c, g, or t
  misc_feature (863)..(867): n is a, c, g, or t
  misc_feature (873)..(873): n is a, c, g, or t
  misc_feature (875)..(875): n is a, c, g, or t
  misc_feature (917)..(917): n is a, c, g, or t
  misc_feature (953)..(953): n is a, c, g, or t
agcggctttcctttcagcggagcgcggcggcaagatggcagtgcaaatatccaagaagaggaagtttgtcgctgatggcatcttcaaagctgaactgaatgagtttcttactcgggagctggctgaagatggctactctggagttgaggtgcgagttacaccaaccaggacagaaatcattatcttagccaccagaacacagaatgttcttggtgagaagggccggcggattcgggaactgactgctgtagttcagaagaggtttggctttccagaagnnaatanaaancntaatncanaaaaggatggcnanaaaaanannntanacaattanncaggnanagncantacataacaaanaccaangagggnatgcanaacggagggcnnacaatngagtacagcggaanaacaaggagaanagggcnaaaggcatgcaaaganntacgaggttgtggtgtctgggaaactccgaggacagagggctaaatccatgaagtttgtggatggcctgatgatccacaagcggagaccctgttaactactacgttgacactgctgtgcgccacgtgttgctcagacagggtgtgctgggcatcaaggtgaagatcatgctgccctgggacccaactggtaagattggccctaagaagcccctgcctgaccacgtgagcattgtggaacccaaagatgagatactgcccaaccacccccatctcagaaacagaagggtgggaagccagagccgcctgccatgccccagccagtccccacagcataacaggtatgtttgcnagggcaggggcctcttggggcataanagggtccttccgagtntttctgtaaatacntanannnnanannnnngaaaananttggtgaataaaatttcatttatttgctttatgtgggagatncaagttgaaacctggggtctatttacccttggttcnaatggacaggtgtgccttattctttcagaaa

SEQ ID NO: 662897 - DNA, 1792 bp, Homo sapiens
  misc_feature (451)..(451): n is a, c, g, or t
agcggctttcctttcagcggagcgcggcggcaagatggcagtgcaaatatccaagaagaggaagtttgtcgctgatggcatcttcaaagctgaactgaatgagtttcttactcgggagctggctgaagatggctactctggagttgaggtgcgagttacaccaaccaggacagaaatcattatcttagccaccagaacacagaatgttcttggtgagaagggccggcggattcgggaactgactgctgtagttcagaagaggtttggctttccagagggccagtgtagagctttatgctgaaaaaggtggccactagaggtctgtgttgtagttgcccattatgcccaagtgcaagaaagtctacatagctgatataacaaatctacactaaggagatgtgtggccttgacattgtttgctgtgatgtgtgccttgccataattgtgttgntgcttgctgtgtgttgagaggtagtgtttgggtgccaccggtgagtggtgtgaggaatgggtgcggttgttgtgtttggtgggtgcgtgcttttttgttgccattccaccagccaggatgggggtgacccctccagcctttgtgtttttaaatgggtgctacgtccgttgttttgttgattggtgcggcgtcgttcttggattgattaaataataaggtgttggtgtggggggccacacaccaactttctattaggaaggagcgggttgtttctttgctgatggttggtggcgtcccgtctaccgttctttgtggtgtggcgtcctaccgggtggtccaccgagtaggggtggtactcgttcttgtggtgccggggttttgtcctctctataatactgtttgtctgcttgttatttaggaggatggagaggggccatctgtttggtgctgctggtgtgcgcccgcgtcgatgaagtgtgcgcctgcttccttcggcctggtttattatttttggtggttggtgctgtgcggtctctccgtcaggtgggtgtttcttacatatgccttatgttagggggaagacgaagtatgttttgttggggggccatacaacaacaacagagggtgtgcctttgggctggaagaagtgatgttgtgttttgttgtggtgttgttcttgtgggggggagatagttgtttttgctccagcaagaggagagctacacagtagaggggggtgtttatgattattagctcgtcatctgctgagagtagtggttgtgtggtgtgaggagttgtggggtcatctcttgagtagtgagtggctcagcgcacgcgcggggagagagaccccgctctggtgtgagtagtctagtgtactgtatacgctgtgtgaggacactgctgtgcgctgtgtggtgggcgggccacacggggggtgttgtgtgtctctcagagcacacagcgtgtggtgtgttgctgtgaggggcactggtcacaagtgtgtagaggagttcacttgtgttgcccgctcgggagacgcccacactcgggtgaaagagatttgcgcgccttaaagataagccctctctgcctcgagaccacacggtggagagcactttgtgggagaaccccaaagagatgagagagataactgcccacccaccccccactttcacggaacacagagaagggggggaaagccacagagagccccctgccacatgccccacagccacaggccccacacacgcacataaacagggtttccttggcagctgtattttggagtttggatgttgctttttaaagacccttttattaaattttgtaccaagacca

SEQ ID NO: 662898 - DNA, 972 bp, Homo sapiens
agcggctttcctttcagcggagcgcggcggcaagatggcagtgcaaatatccaagaagaggaagtttgtcgctgatggcatcttcaaagctgaactgaatgagtttcttactcgggagctggctgaagatggctactctggagttgaggtgcgagttacaccaaccaggacagaaatcattatcttagccaccagaacacagaatgttcttggtgagaagggccggcggattcgggaactgactgctgtagttcagaagaggtttggctttccagagggccagtgtagagctttatgctgaaaaaggtggccactagaggtctgtgttcgcccatttggcccgcatgtgcctaggaacgttccattccttggcgtttttaccctaattaacctttccccttaaggggtaggcgtgtccttttagccctaggtttgcccagtgaatgtgtggcccatggacctattagcgttggtgcctgcaggattcaatctatgtgagaagtgagggcacaaaagtgtctgccgaggttgtggtgtctgggaaactccgaggacagagggctaaatccatgaagtttgtggatggcctgatgatccacaagcggagaccctgttaactactacgttgacactgctgtgcgccacgtgttgctcagacagggtgtgctgggcatcaaggtgaagatcatgctgccctgggacccaactggtaagattggccctaagaagcccctgcctgaccacgtgagcattgtggaacccaaagatgagatactgcccaaccacccccatctcagaaacagaagggtgggaagccagagccgcctgccatgccccagccagtccccacagcataacagggtttccttggcagctgtattttggagtttggatgttgctttttaaagacccttttattaaattttgtaccaagaccaaaaaaaaacacaaaactcgagactagttcctctc

SEQ ID NO: 662899 - DNA, 375 bp, Homo sapiens
  misc_feature (374)..(374): n is a, c, g, or t
tcttgtctccttatgtataggaggtgggtgatgctgcagcttgcacatagttgtagtattgccctaagtgacagcctcatgaggtagtgctcgttttataagctgtgcccctggacttctggggaaatatgcaaatgactctgttcttcaccagttgtatgattattaaaacttctttccctgcctactattgctgattatcttagataaaaaaaatggcagcagccatacctgctttaggggactgttgtgaaggatagtttggtctgttattaaatgttgttgttattactattattattattactattactattactgtttattaattttgagaccaagggttcccctgtaacaatcccctggccagcctng

SEQ ID NO: 662900 - DNA, 168 bp, Homo sapiens
cgaggggatgccaaacacattggctgattttttatttttggtagagaccgggttttgccatgttggccaggctggtcttgaactcctgacttcaggtgatccacccacctcagccttccaaagtgcccatatggagatttttaaggtcagaggtataaactgtacata

SEQ ID NO: 662901 - DNA, 1812 bp, Homo sapiens
  misc_feature (471)..(471): n is a, c, g, or t
cacacccgcacgaacaactaggcaggtcgaaggctccgtggttaatcttgctcgagggcagtgcaaatatccaagaagaggaagtttgtcgctgatggcatcttcaaagctgaactgaatgagtttcttactcgggagctggctgaagatggctactctggagttgaggtgcgagttacaccaaccaggacagaaatcattatcttagccaccagaacacagaatgttcttggtgagaagggccggcggattcgggaactgactgctgtagttcagaagaggtttggctttccagagggccagtgtagagctttatgctgaaaaaggtggccactagaggtctgtgttgtagttgcccattatgcccaagtgcaagaaagtctacatagctgatataacaaatctacactaaggagatgtgtggccttgacattgtttgctgtgatgtgtgccttgccataattgtgttgntgcttgctgtgtgttgagaggtagtgtttgggtgccaccggtgagtggtgtgaggaatgggtgcggttgttgtgtttggtgggtgcgtgcttttttgttgccattccaccagccaggatgggggtgacccctccagcctttgtgtttttaaatgggtgctacgtccgttgttttgttgattggtgcggcgtcgttcttggattgattaaataataaggtgttggtgtggggggccacacaccaactttctattaggaaggagcgggttgtttctttgctgatggttggtggcgtcccgtctaccgttctttgtggtgtggcgtcctaccgggtggtccaccgagtaggggtggtactcgttcttgtggtgccggggttttgtcctctctataatactgtttgtctgcttgttatttaggaggatggagaggggccatctgtttggtgctgctggtgtgcgcccgcgtcgatgaagtgtgcgcctgcttccttcggcctggtttattatttttggtggttggtgctgtgcggtctctccgtcaggtgggtgtttcttacatatgccttatgttagggggaagacgaagtatgttttgttggggggccatacaacaacaacagagggtgtgcctttgggctggaagaagtgatgttgtgttttgttgtggtgttgttcttgtgggggggagatagttgtttttgctccagcaagaggagagctacacagtagaggggggtgtttatgattattagctcgtcatctgctgagagtagtggttgtgtggtgtgaggagttgtggggtcatctcttgagtagtgagtggctcagcgcacgcgcggggagagagaccccgctctggtgtgagtagtctagtgtactgtatacgctgtgtgaggacactgctgtgcgctgtgtggtgggcgggccacacggggggtgttgtgtgtctctcagagcacacagcgtgtggtgtgttgctgtgaggggcactggtcacaagtgtgtagaggagttcacttgtgttgcccgctcgggagacgcccacactcgggtgaaagagatttgcgcgccttaaagataagccctctctgcctcgagaccacacggtggagagcactttgtgggagaaccccaaagagatgagagagataactgcccacccaccccccactttcacggaacacagagaagggggggaaagccacagagagccccctgccacatgccccacagccacaggccccacacacgcacataaacagggtttccttggcagctgtattttggagtttggatgttgctttttaaagacccttttattaaattttgtaccaagacca

SEQ ID NO: 662902 - DNA, 462 bp, Homo sapiens
ggtaagaatttggaatcgagtcagcctgcccaagtgcaagtctcagctttgccatttgctggctctgaaagcgtgtagaagctacctaccctctccatgcctcagtttcctggtctgtaaagtgcgattgatagcccctacccttgacacaagtgagagaacacatgtgaggctctttgagcactagcaagtgctcactccctgttagctcaggtttttattagaggctggtaggcagggtagaaggagccatggctttcatggggttcagagcatttcacaccaaaatatgccgctttggcatagtgattattttgagttaaagatacttaaaggccgggagcggtggcttgtgcctgtggtcccagcactttgggaggccgaggtgggtggatcgtgaggtcgggagattgagaccatcctggctatcacggtgggaccccgtctatactaaaaaggcaa

SEQ ID NO: 662903 - DNA, 349 bp, Homo sapiens
ttctttgggccatttgcagccaggccccacgcgcacagctcatggccctgcttcgccagctccacctgtttcgaggctcccagtaggctgcccctgcgggcggcactgcgacttggctgctggcctgcagaagggcagccaaacaggccggcagcggacatctgagggtgaccagctgattagaaagaaaactcaccggcgtgtataggcacacattaagcacacacgttttgaagtaaaaggccctcgcgttggatctcggatctgcagctttccagctgtgcaggctcatttctctgagcctcaatgttcacacctataacacgtggaaatcctgcaagaacacaga

SEQ ID NO: 662904 - DNA, 961 bp, Homo sapiens
  misc_feature (45)..(45): n is a, c, g, or t
  misc_feature (75)..(75): n is a, c, g, or t
  misc_feature (94)..(95): n is a, c, g, or t
  misc_feature (104)..(105): n is a, c, g, or t
  misc_feature (110)..(110): n is a, c, g, or t
  misc_feature (115)..(115): n is a, c, g, or t
  misc_feature (117)..(117): n is a, c, g, or t
  misc_feature (136)..(136): n is a, c, g, or t
  misc_feature (138)..(138): n is a, c, g, or t
  misc_feature (148)..(148): n is a, c, g, or t
  misc_feature (168)..(168): n is a, c, g, or t
  misc_feature (198)..(198): n is a, c, g, or t
  misc_feature (211)..(211): n is a, c, g, or t
  misc_feature (213)..(213): n is a, c, g, or t
  misc_feature (220)..(220): n is a, c, g, or t
  misc_feature (226)..(226): n is a, c, g, or t
  misc_feature (228)..(228): n is a, c, g, or t
  misc_feature (230)..(230): n is a, c, g, or t
  misc_feature (232)..(232): n is a, c, g, or t
  misc_feature (239)..(239): n is a, c, g, or t
  misc_feature (243)..(243): n is a, c, g, or t
  misc_feature (251)..(251): n is a, c, g, or t
  misc_feature (253)..(253): n is a, c, g, or t
  misc_feature (256)..(256): n is a, c, g, or t
  misc_feature (274)..(274): n is a, c, g, or t
  misc_feature (385)..(385): n is a, c, g, or t
  misc_feature (471)..(471): n is a, c, g, or t
  misc_feature (564)..(564): n is a, c, g, or t
  misc_feature (597)..(597): n is a, c, g, or t
  misc_feature (829)..(829): n is a, c, g, or t
ttatctcttcaaataatcgagaattgcgtacaaaaaaaaccttanataaattaagtatatgaatacatttatatntgtaaatgcaaatcgcttnnaattcaaannaattnacagncnatggtgttctgtgccaaananattagctaanaaaggaaactgggtcctatngtttggactttccaaccctgatagacccgnaagacaaaacaantngttcttnttagcntntntntaaatcncatnacactcancnctnacacgttaataccaatanggaacagttaacttcaatacaaggtcaaaatcagcaacaagttctacaatcctatgtgctgatatcagatacaagcttcaaggacaatttcttttcgaaggcttattccantttcgtgaggctagcatgaggtgtgtgcatttgccaggggcaaatttctattctcaattaacccatgtcagcaaatgctacgcatntgtctgagtccgtttagaagcatttgcggtggacgatggaggggccctactcgtcgtactcctgcttgctaatccacatctgctggaaggtgnacagtgaggccaggatggatgccaccgatccanaccgagtacttgcgctctgggggtgcgatgatcttgatcttcatggtgctgggcgccagggcggtgatctccttctgcatcctgtcggcaatgcccggatatatggtggtgctgcccgacagcaccgtgttggcgtacaggtctttgcggatgtccacgtcacacttcatgatggagttgaaggtggtctcgtggatgccgcaagattccatacccaggaaggaaggctggnacacgcctccggacaccggaaccgctcattgccaatggtgatgacctggccatcgggcagctcgtagctcttctccagagaagaggaggatgcggcggtggccatctcctgctcgaagtccagggcgacgta

SEQ ID NO: 662905 - DNA, 105 bp, Homo sapiens
cattatgtatgatatggcctggctgctgtctactacagcgagagatagcctgggctgaaacctcttctacgtcacaggctgcctgtttgtggctgtgcagaactt

SEQ ID NO: 662906 - DNA, 1082 bp, Homo sapiens
  misc_feature (1)..(1): n is a, c, g, or t
ngggcggcgcgcgttgggtgtgttcttcgtgtggtgtcgtttctttcctcgttctggtttgttgtgttgtctcccttcttctttcgttctgttgttcgtcggcccgggtattttcctttctttgctccatgcttgctccaggggtgttcttactaccgtgtgtatgtctttgcactgtatggttccactcctctgcgtgtgtgctggcacctctcgcctttcgtcgggcctgcggtcttgcacgtgcttgcaccccgcgcctggcacaggtgcccaccttctggattttcgcaggctctcggcccttcttgtgccccgagtctgctgacgagcttccccgctgcgtggtccgcctcacctgcccctctctcgtgtgcactctgcttgcccggactcgcacgcctgtccctcgtgtgcgtgcgggtaagtcttcatccggcctaggctcccccggtcctgcacatcacccggtggcatccactactcggcgccctggcccttcccgctgcgctcgagtgcggctggccctctcacccacaaggatcacctgctggagcaccagcgcgcgacacacggggcgagcttcgccctacccctgcacgctctggcgcacaagctgctctcctgctacaacgcacgtcgctcaagataccacgcgtgccggacctcacacggccggagtcgtagcgcgcgtccaccgccgacgcgccggcccggcccaggtagcggcgcaccgagccacacaccctcggaccaccgccaggtcccgagccccaagcagaacagggccgcccgccccccagcccctttgtccgtgagctccccctctcctctcgtccctcatccccaaggacatgggaggacagtgagtaccaggtcaccatatgctgcacgcagtttacccacgggggccccagtggtggtggaggaccgacggacgctggggaaccctttctggtgctgttaatttaccttgacaataaaatggatgaaaccaatcctagcatcggggagcgtgatttgaccgccggccacctcagagggacggtgtagggcccatctagtttacggactagtagctt

SEQ ID NO: 662907 - DNA, 170 bp, Homo sapiens
gatcttatcggttgtgcatcagtgcagggatcttaagtgggtagacacacacgaaggagtttgcagtgggtttacacacacggatcagtttgcagacagatgtgaaggggtatgcagtgggtttgaccactgggtttgcagtgggttacacactgaggagtttgcacaca

SEQ ID NO: 662908 - DNA, 693 bp, Homo sapiens
  misc_feature (328)..(328): n is a, c, g, or t
  misc_feature (361)..(361): n is a, c, g, or t
tatacagcgacggctcgctgtctgcgccggctcgtcgtaggctgacgtgggggctgcatggggcagcgcgtcgcaggtgagcaccttctcgccggtccgagcatcatcctccgtctggaacctggagcatgggctgcgcctggttctctgccagccacagggccttgagattgaggtgggtgagcgcgaacggcagactctgcaggcggttccccgccacgtccagcacgtgcagctctgtcgtgtgggccagctctggtggcaggacggccaggcggttgtccctcaaggagaggacgctgagtgccacacagcccccgatctcggncggcagcgcctcgaggtggttccggtccacgtngaggttggtcagcttagtcagctttcccagggagcggggcagggcctggccaagaagaggaggtcagaggacgctaggggcttgccgggggtgggaaggagatgacagcccctggcaggagggcacagacaccccaggccagctccagccagggtccctcacagcccctggagaccgggacaaggacctgaccacagaagctgtctccaccccacttcgtgccctctgctccccaagctctgcccactaccctcagccttcagtccccaccaccaaaacaccccacgctcatccctgaccctctcccatggtgcctggactgaagctgtctg

SEQ ID NO: 662909 - DNA, 346 bp, Homo sapiens
cggccatctcatgctacagtcgctgcttcttgttaacatagcaattgagttgcctgttaatttacctaccttagctccagattaccctaaacttttcccttcgatataggagaaagaatcagcgaggactcgagaacgtacgactcgagaacgcacgacttgagccatttccaagagctcgatagtaatagggtcaaatcaatgtcctctggtataaaggcgacggcctagctaggtacatacacaagacattgctgtctacggttcacttgaacactaaatcaacaaacgctcggaagagactccgacagttgagcttctatttccgactgtagcatgagtccgc

SEQ ID NO: 662910 - DNA, 170 bp, Homo sapiens
tgtaactacaatcggtagaacctgggaggcataggcttgtagtgaactgcagactgcgccacatgcgacaccagcataagaaacagcgagattccgtctcagaacaaaaaataagtacccattacctacctacctctcctattgtgggtatgctactttaatacctcgtt

SEQ ID NO: 662911 - DNA, 275 bp, Homo sapiens
  misc_feature (2)..(2): n is a, c, g, or t
  misc_feature (51)..(51): n is a, c, g, or t
  misc_feature (92)..(92): n is a, c, g, or t
  misc_feature (103)..(103): n is a, c, g, or t
  misc_feature (178)..(178): n is a, c, g, or t
  misc_feature (189)..(189): n is a, c, g, or t
  misc_feature (234)..(234): n is a, c, g, or t
cncctcggtccccttttaaaaattacttttcagccgggcatggtggctcangccttgtaattccagcactttgggaggctgaggttggaggntcacctgaggncgggagattgagatcagcctgaccaacatgaagaaaccccgtctctactaaaaatacaaaaattagccgggcgtngtggcacatgnctgtaatccagctactcgggtggctgaaacagaaaccaccaacgnctgacctcagggagatgtctaagagcttctggcatgcctca

SEQ ID NO: 662912 - DNA, 1549 bp, Homo sapiens
  misc_feature (306)..(306): n is a, c, g, or t
  misc_feature (313)..(313): n is a, c, g, or t
  misc_feature (669)..(669): n is a, c, g, or t
  misc_feature (804)..(804): n is a, c, g, or t
tcgatcgcaagtagcctagtgccctgtatcttaggtagacctcaatggcctcggatagtgtggtatgcgcctgtgtgatatgattggccttccgttgtcctcctgtccaaggttctaacaacacttataggagacctccgtaaacatccaatgtcaaccatatgatctaatcgtcctcctgctagaatactatgcagactacagtagtctttgatgctccatctagactattcagatacatactcttacgtcagtgatacacgcacctgttacctctataggacaaacactagcctcaggtgcaangtatcangttcgatagacactaatataaccattcatatcctgaacacgtacgtcatattacgtcaacttgtttgatgtcttcgtacacattattcctactggggtccccgtgataacatttctgagcttcagtagtactaggggtgccatgaggcaacatgcgccaacgtttaggaaagacggtctagagctggtttcttgggataatagagcagttttactcccttatacgctgttccataacaagagccaattactactaactttcacagagtcttagctgagaggggactactatgctggaggtaagcccctaagggtgcaatctattattgttgtcttgtatgccacggaagagacctntgtatcccgtgtgttagattacttgtcacggttggtttcccatattcatgcgtacgccttgtgcccccgattgaccattattcctaagagcaaggtaaacaaaacacagacattttgttacacgaagttgaaganttagtttctgtaccgacactggtaaggtaaagttccccataggggttaacgacagtaaggacttaccatcaaacggtacaagtgaaccctccagccacttcttggttactctcagtggctcaccagaggtcatcgaaggtcacacccactttaatcctaggttaaacaactttgttccagtaagtacttccaacccggtttcacccccagttgccccaagtatttcgcacagaatatgccccaatttaccccagtccaggaattagagccatggggggtttcattctgggtgggggccctttctctttggcccacggttacatttacccaattttctgcccaaagaaagccggttctacacactggtcgcaggcaggggaaaataggctgttacaacggcgcttggttcgtacaccaccaaagcaagcacacccctatttcctcgttaaattatcacaagcccccgctgccgccccgcggagaattcctgtgcacactatacgtgaggccactaccgcacattgcccaacttttctcatcatcaggaccgagaactgacgtggttgtatcacagaggggggtataacaagacagaatcgatggtggtagctgggaacacaatcctacgggtgtggaagcaactgcacgagcgcgcaacaacctactttcgtcaacgacgcaggcctaacaagtagactacaagtcggaccgaaggatgtgtgccgacgacaacacagaatatctg

SEQ ID NO: 662913 - DNA, 464 bp, Homo sapiens
gcggccgctactactactaaattcgcggccgttcgacattgaattctgcctccaagaatatatgttgaagtcctgacccccagtaactcaaaatgggaacttatttggaaagagggttcctgcagatgtaattaagatgaggtcaaagtggagtggggtgggcccctaaattcaatttgattcatgtccttataggaagagatccggctgggcatggtggctcaacgcctgtgatcccagcacttcgggaggccgaggcgggtggatcacgaggtcaggagatcgagaccatcctggctaacatggtgaaactccgtctctgctggagatacaaaaaaattagccaggcgtggtggcgggcgctgtggtcccggctacttgggaggctgacgcaggagaatggcgtgaacccaggaggcggacttgcagtgagctgagatcgcgccactgcactccagcctggg

SEQ ID NO: 662914 - DNA, 1371 bp, Homo sapiens
gtgagtaacttggctccgggggctcgctcgcctgcccgcacgcctgccgcacacccagtgagcagcgcacgccggtctaccgacgctagcaaacccttccgacggccctcgctgcgcaagccgggacgcctctcccccactccgaccccgcacgcggaaagttaagtttgaagaggggggaacgaggggaacatggacatgaagaggaggatccaccatggagactgaggaaccggaccccggcagctgtctcgagaacttgtcttggacaatggcaacatcaacatgatggcacaccttgagcggcttaacagctgaaatctgtgaacttagagtacctcagtagaataacatgtaggcttgatcacagatttcaaatcatccccaagcctgcctaaattgacaaaacgcttgaactcagatgaacactacaatcataaggaggtctggcacatgtaagcatgacacaacttccaaatctcacacaatctaacactccaagtggacactacacctcgaacgcatcatccacgcacacctagagacaactttcgcacaccacagttagaactgtctgacacagcctggcaccaacttttcaaactgtagagagattaccaaaccctgcaacatgcactataccgcaaaagcacgctgatcattcacaagacttccttgcacaacaagaaaaacatacatatgagaattcgcatataaacacgaagtagacacacaaagagaaacacctcgacttcacactgcccgaaaagtgacaacgcgactgtgcgacataacccacgaagacagcacataaaacatcgaccaaaacgcaagaacacaaacactgacactccaccacgaaagacaagaaaaaacaaaacgagatcccgcagaacaacccactatcggacaacgacagaactacaaacacacgaacaaaagaacccaaaacaaaacaccaacagcagaacacacacacacacagccaacaaaaaacacaaacaagacaacacacacaaccaccaccaaacaatgagcacaacgaccaatacacacaacacaaccccataaatcaaaccacaaagaatgacagccagacaaacaaaacacaaaacaaaaacaaaaaaaagacacaaacaacaaaacaaactaaacaataacgaacaaaacaacctcacaacaacacacagcaaccgaacacaaaaaccaacaacatcaacgaacacaaaacaacaaaactaaacaaatcaacacacaaaccacacaccacatcacacatacacattcactaaacattaccacaaccaaccaataacaaacacaagacaacacaacacaaacaacacaactccccataacacatcgaaacca

SEQ ID NO: 662915 - DNA, 688 bp, Homo sapiens
ggttcgacgccagctcgggggcacgaggagctggcgtgccactgctgcgactgttccgtggactgtacatctcctctgtgtgacctggcagcgcccagatgcagctgcgaaccagcagaatgtggcgccttccatccgctaagatgggtccctagcttcccacagtccgaagcgtggtagcgagcggctgtccttcgtctcgtgccacagcttagacgcacgtggcgcataggacagcatgatggctatgatggctccagagacgccacgctggccctccacgggctcacggtggatggacgagggcaactacacgttgcgagtttgccaacttccccaaggggtccgtccgagggatgacctggctcagagtcatagtcgaaggcccgaagaaccatagctgagtgcccacgaaggtcacgttcagccagtgacccctagcgaacatgtggtccctctgcatctaccaaagagggccggccacgccttggccggatctcctggctctcatccctggactgggaagccaaagagactcaggtgtcagggacccatgtgcgggaactgtcactgtcaccaggcagttcaccttggtgccctctgggccgagcagatggtgtcacggtcaccttgcaaagtggacgcatgagagcgttcgacggaaccaggcctgatacctgtgacctcg

SEQ ID NO: 662916 - DNA, 95 bp, Homo sapiens
  misc_feature (1)..(1): n is a, c, g, or t
  misc_feature (86)..(90): n is a, c, g, or t
  misc_feature (92)..(93): n is a, c, g, or t
ntatttttaaatattttattttcctgttctttgtgaaaacatcaataaatatcgaaacctctctgctctaacacagagggaaacannnnntnntt

SEQ ID NO: 662917 - DNA, 129 bp, Homo sapiens
  misc_feature (100)..(100): n is a, c, g, or t
ctagcaggatcttacagtggatgaatcacccactggctggccttcgtagcacaccttgttacacagccatgagcaagggaaacttgtctaccaggccctntgtgctggaggatgctgtatagctcccgg

SEQ ID NO: 662918 - DNA, 245 bp, Homo sapiens
aagcagttaatacatgactcaccaagtcacagacttgtcttccacaagcacgtacttaccttagccacgaaggtctcaaagccacaggtactacgggttgaactcaaagatttgtccggggtattaaccaattaccagggggaccagtgacatttcattcacagggtcaaattcatgcaacaaggtctagaatccagggctggtatcagatacaagcttcagggccaattcctttccgaagggct

SEQ ID NO: 662919 - DNA, 175 bp, Homo sapiens
cacgagggagatttccgggacagatgacggtcagaaccacgggatgctgacatgtctcagcagtttgacactaccccacacagatcactgcttggaacttgttatcccgtcattgaatgcacagatccatggataggcgattggctatcacgactacaaattgatcatcaacaag

SEQ ID NO: 662920 - DNA, 265 bp, Homo sapiens
gaggatccccatatttgcagctgctgagtagctgggagtccaggcgcccaccaccacgctcggctaatgtttgtatttttagtagagacggggtttcaccatattggccaggctggtctcaaactcctgactttttcttttttttttttctgaaacagtttggctctttttgcccaggctggatgttgcagtggccgcaatcttggctcacttgcaaccttctgccgcccaggtttcaaagcaaattctctcatgcctcacgcct

SEQ ID NO: 662921 - DNA, 794 bp, Homo sapiens
  misc_feature (34)..(34): n is a, c, g, or t
  misc_feature (125)..(125): n is a, c, g, or t
  misc_feature (129)..(129): n is a, c, g, or t
  misc_feature (154)..(154): n is a, c, g, or t
  misc_feature (298)..(298): n is a, c, g, or t
aaggcacaggggcattggggcttacccctttggntggatcccagaagacgcacatgatgtgaaaaggagatctgcagccagtactgatgctgcattccagtgtaatcatcttgggttggtttggncagnatttcccaggttctttgatgtctgnagtttcttcaccatgtcggggcatcctgcggaggcttagtgtacaggcgtagggtcagcagcaatttgtctggtaagtgatgggatcggtggctgaggtctctaggctgggccattgctaaatgccatggccatgttgatctgnggatttgtccctctagtgtcttgcctcacatgggccatttgcccactgtgcaatatagggaggtgttttcagaagtgtttggccgtggattttcacatccatcatggggttggcattcaatggggaaagggttctgactccagtattgaattgtacataaatcccaggtgttcttggggaacgctcagggacatgtttgttgcctgggattggtgatgaaaggttggtttttgaagcttggaatttcgccattggtttttttcctgtcgtttctgcatatccagcaaggggagtctcgtgttgactcctggcagagttcagtggcttcggtctgtctgtctgttctgaggggaggattgtgttctggatccagtggtcagtttggcaactttggtcgaggttttcggaattccggggagggttgatggagagtgatgatcagttttgtttgctggtggctaggacaagtttgtagtgaagtgttttataatacttc

SEQ ID NO: 662922 - DNA, 318 bp, Homo sapiens
tcccccacagtgagacttgtacatcatttgcgtgaaaatagcttattttttcctcaagacatttttcattgcctgaagtatttaccaagtctttcatcactgtacacattttcttaaaaaccaccattgataccaggctgcaactgaaaaatgaatgccgaatttggaacccattgtgttatcctacctcagggtacccagagttttgtggcaaatatataccacccataggtgttcacaaaaggctcttctataaaggcagcgtgaattgtagtaaactattcttaataaaactcactcactgtgggggcagggggg

SEQ ID NO: 662923 - DNA, 92 bp, Homo sapiens
taatttccaaaaaaaaaggggtttatggggcttacaggtccccgggggggggggaaccccccctttgggggagggggccttgggcggggtac

SEQ ID NO: 662924 - DNA, 929 bp, Homo sapiens
ctgctgcctggtctgccaagaatgtgctctcaagatctctagagactggactcttcctaagacaagtccgagaaggaagcaccctcactatgtggctctacctggcaggccttctgtggagcctgtactacccttctgcagtaggatatccgaggatgacggcacggtcgcgtcgagccactcatcaagacaaggtatgtctttatcacagggcatgtgactcggggcgtttgggcgaacctgcatgccagacagctggcatgcacgaggcttgcagagtgctggctgcgatgctcgtagacggagaagggtgcgccgagccagctgaggggccagacgtctgacaggctggtacgacggcgaccctggatgttaccaatgagtggagagcatcgctgcagctactcagctgtggttgaagtgagcatgtgggggacagaggactctggggactggtgaacaatgcaggcattcttacaccaattaccttatgtgagtggctgaacactgaggactctatgaatagctcaaagtgaacctcattggtgtgatccaggtgaccttgagcatgcttcctttggtgaggagagcacggggaagaattgtcaatgtctccagcattctgggaagagttgctttctttgtaggaggctactgtgtctccaagtatggagtggaagccttttcagatattctgaggcgtgagattcaacatttggggtgaaaatcagcatagttgaacctggctacttcagaacgggaattgacaacatgacacagtccttagagcgaattgaagcaaagttgggaaagaaggcccccaaggcatattaacggagaacttatggacagcaggaatttagaatgccccttaacaatatcactgacaggagggctgctgacttgtggcacaaatctgaacctggata

SEQ ID NO: 662925 - DNA, 397 bp, Homo sapiens
gtcgactataattctaatgcagtagtggtctgcagaaattttcaagctctctggcttttatctgatgttgaggctcaaggaatgattctgtcttaagagaataaagataagaatgatagaatagggcatgccatgtccttagctggccttatctgttatataataatgcatggtcacatgtgtgtgtaacatataaacacacacataaaatcaagtaaattagattgagctgactattcctagggtagaagacattgaaaactccagaggctgtgctggttcctggcccctcaatctctacaggaaatgcctgcggagggctacagtttggcaaactcttcaccacattaaggaaacttggatttggtgtctatcaggcagcagagcgtcgacgcgg

SEQ ID NO: 662926 - DNA, 435 bp, Homo sapiens
tgactgaatgtgaaatacttttagtagctactatgacatgagaagtacatgttgtttatactacaagtgaataaggacaagagatcaagctgagaaatgtcaaaaagtaaacggaggagagagtgtagacagtgctaggatatcagtattataaatgttgcgttagaggaaggctattgcgaagcgtggtccattaactatttgtgagctgtccagaatgatgagaggcttgtgccagaatgaaaatcaattacatcactaatcatactggctcagttgactttttttaaataacaagacttctttgataaaggaagcaatgtgttgatttatattctggcacaagtaccttattactgactagagcaggggtccccagtccccaggccacgaccgggctgcatagaaggtgggcggcgggccctggctcggggg

SEQ ID NO: 662927 - DNA, 122 bp, Homo sapiens
aaaggtgcttgtctatgccagacacattcggatggactcaataactagaaattaagtttcgtctggagcatgctaggaaataggtcttctaatttcattttttttgagaccaagtctcactc

SEQ ID NO: 662928 - DNA, 1035 bp, Homo sapiens
  misc_feature (546)..(546): n is a, c, g, or t
gaggctgaggcaggagaatgcttgaacctgggaggtggaggttgtggtgagccgagatcgcgccattgcactccagcctgggttgacagagaggagaaactcagtctcaaaagaaaataataacaagctcactaaataataataaaataaagaaccacgatctgtggcgtgacaagttacatacgagtgagcaactcacgccatgtagtacagagagacagcgactaagcctattcatgacgggatctggccccattgactcaaacgccctccacacctcgcaacagttgggagatcagcatttcaacgaggacgcatacggaggcggacacgagacagcgccaacaaccatagtcgactattgtttcttcttacctgccggtttggctccaacacttcaaagtttcactttttgcttggcaccccattcgcggcctagatgcggcggttcctgcgacggcgctggctgtctcctatgtcctgttggcgaacacgagacagagcggagcaacgtggtggtgcccagggtctgcctactgttagacnccacgctgagctgggctattgatcttccccaagctgtgatttcgcaacggccctacaccttccttgacgcccaatgcgttcgtttagcttcctctgtactctgtaccctctaccgtggttcactccgcaacgtcttgtggctttcctgccgtctgacagatacttcaccactctgtctttctgtccccagcccattgtccctattcccacccatccatctcctttcactggactgtgtccctgacttcccttccttcagttcacccccattacacctcctctgggggggcgctctaagcaccgttgcgaccctggtcgctcccccataacaacagaactttagcgggcgcctgcgcatacacccgcgttgggctccaccgattccggcgcccggatgcgttcttcacctttcggcgtccctcttttcccaccccaattgccgcttccccggactcgggaccgcttgcgcttttacaaaaaacccgtgca

SEQ ID NO: 662929 - DNA, 574 bp, Homo sapiens
  misc_feature (547)..(547): n is a, c, g, or t
tagtaggcggcagcgctgccgctactactacacaaaaaataaaaatatttagccaggtgtggtagtgtgcacctgtggtcccatctactccagaggctgaggtgggaggattgcttgagcctgggaggttgaggctgcagtgagccatgattgtgccactgcactccagcctagacaacagaggaagaccctgtctcaagaaaaaaaaaaaagagcttggttaatatacatggtttacatatttttcgggtttggaatgttaacgggagagaaacctgagctttggttttattggcttttattgggtttgggtttggtgtgtgtgtgtgcatcctatggtattagtcagggttctctagagggacagaactaataggatatacgtatatatgcaagggagcttattaaggagaatggactcacatgatgacaaggtaaagccatctgcaagtggaggagcaaggaagtcagtggtagatcagtccaagtcccaaaacctcaaaagtagggaagctgacagtgcagccttctgtctgtgggcaaaggnctgagagtccctggcaaaccactgatc

SEQ ID NO: 662930 - DNA, 422 bp, Homo sapiens
  misc_feature (189)..(189): n is a, c, g, or t
agagtctactgcaggtagctatataacttatctctcttttcagatgttaaggaatgggctgcaggaagacagtgaaaatgatgaaacatgtgctcccttaactggagggtggaatgggagaatcccagttattagtgaacaggtaagagaacctgaatcatacaacttcacttttaaactgcccttatntagaacaatataattatatgtaagcatggagtgcgggagatttaggaatttatcacgataggtcagaattgcttttaaaaaaaaaagagggaggacaggctttggctatggtgtccagctggcctctagaactcctgggtgccaggtgatcctccaaccttagcctctggagtaactgggactacaggcaggaaccactgcacctggttgaattgactttatagaagtctgca

SEQ ID NO: 662931 - DNA, 1289 bp, Homo sapiens
caacccgtcatctactctaccatctttgcaggtcacactcatcacagcgctaagctcgcactgattttttacctgaggtaggcctagaagataaacagtgctagcttttgattccagtatctaaccagaagataaagttaaaccctcgttcctacagagagctgccatcaagtatttccgtcacgcgagcaacctggatcgctataatcccttctaatagctatccgtcttcaactagattgattgatcgtctcgcggacaagggaaccataagccaactactacgcagatcaagtgactctatgcattgtaattgaattcagtaagtgggcatagtagccaattgatagaaacctgaggaagtatgcctccgctattccacttcgtgcaggtcccgagaggcattacgccgaaggtgcacccactcgtgcacagtcacggccatgcgtgtcttcctcacaatgcacaaagaacagtaggctcccacattcatcaattacatgatacacaagaatcgtcatcccgtcaggtaaaacgtagagccttactcctacacatctcgtacaatacttatgccatcgatagccagtgcagtggaggtggacttaaagcaaagccaggtacgcagaaatcgtagccatactacctcaatatacccacataggatgcaataatagcagtgtctaccgaacaaaccgtaacataaacatactataatcgaactatatatatattatgcctaaatactaccgcattcctattactacaattaaactcacagaaacaagagcctacctaacttaatctcgcaacctgaaataaggctaaacatgactaacacccattagtttccatacaccgtactcatcctaggaggcctggccctgatatccgggattttggcccaaagcgccatatatcgaagattagaaagaaacaaatgcctcacaatcaccaacatagttagcacatgaccatcgatacattaaatttaacaatgaaataatcataatcaaactaatcgaaaatatacccaaataatgaaacgtgaaagaaatgagggtgataaatataaaaaagacagcaatataacaaatatgtaataaaagaatacgaagaagatccactaatacttagattataacgaaaaaggggcgaaagataacaagaaagaaagaagactagtaagatgaataatgcaataagcgaaaaaaagaagaagtacacagatgaacaaaataatgtagatgtgaaatggagatcaagaagacaataaaaaagaagagaaa

SEQ ID NO: 662932 - DNA, 197 bp, Homo sapiens
ttttttttttgtctttttagacagggtctcactctgccacccacccaggctggggtgcagtggccaaatcacagctcactgcagccttgaaccctcagactccagggatcctatctcagccaagtagctgagaccacaggtgtgcaccaccatgccttgctaattttttaaaaattttatgtaaagatgggatgtca

SEQ ID NO: 662933 - DNA, 153 bp, Homo sapiens
cccgcaggctgcggtacgaggatggtttgagcctgggagatggagtgttgtattgagccgagatcacaccattgtattccagcctggacggtagagccagacccagtctcacaaaaaataaaaatcaaaaaattcatgtgatacagctaccgg

SEQ ID NO: 662934 - DNA, 979 bp, Homo sapiens
  misc_feature (396)..(396): n is a, c, g, or t
  misc_feature (424)..(425): n is a, c, g, or t
  misc_feature (437)..(437): n is a, c, g, or t
  misc_feature (542)..(542): n is a, c, g, or t
  misc_feature (550)..(550): n is a, c, g, or t
  misc_feature (553)..(553): n is a, c, g, or t
  misc_feature (566)..(566): n is a, c, g, or t
  misc_feature (569)..(569): n is a, c, g, or t
  misc_feature (944)..(944): n is a, c, g, or t
ctgtgtgtctctcctgtatcgggtttacttccgtcttcttctggcttccctgttagcgggcgattttcgttgccttgcttctgttattgttcctctttggtgttcctatgcttttgcactgtgtgggtgtctttaacgttctgtgtctgcttccagtgtcgccgccgtctctttcttcccgactgatcttctcgttgcccttatcggctcattgattgggacgggagactttcgaacagcgatagcttccttggtgctgactactagcaacgtatcctgcctctatctctgagtctgtctaggtgctattgatccctgctggcctctgcacctgtctgtcgatccccactgacctgttgggtgcagcaaggccgggccagctgggcccggcgcctntgggaggcctcccgtatccccctgcttnnggtccaaggtgnccgacagtctgcctttgcatcctgtcctccagccacccttgcttgcctactgttcacccatgacgagagcctcctgtctgacagtggccatcctgaggatagggncagagtgnccnagggtggccccanggncttctaaaaccctccatggtctaaaacccacttagaccaccctccatgtcaggtactgagcaaggccccagatccttctctctggaggaagagggaagcccaggggtcctgtttgtaaaacaacgtgggcaacagctcctcttccagagctgcctctgcctttatcctgggagatggggaggaagccccatctctgctgttccctgcgtggaggaagcccacccagcaagctctctcctaccccaggtaaaaggtgctcctttgcctgggtttgaattccagcgctgccacttcctctctgcacctcctggcaagtttcttctattccccacgtttaaagcgatggcacctccgtcccagggtggtgtgagatanacaggtgtagtgctcatatgtgtcttcctttctgt

SEQ ID NO: 662935 - DNA, 352 bp, Homo sapiens
ggtaggtgacggacaagctcatgtttgtctctactcacacactatctgactagaatgtatgtatgcagtttctacaccaaattcttgagggcactggatattaactgggtatcccatgactttattctgacactacctggagttagaacagaccccacaagttaggggctcagtcccacgaggccatcctcacttcagatgacaatggcaagtcctaagttgtcaccatacttttgaccggtctgttaccaatcgggagttcccgtaactgtcttcttgggtctaataatttgctagaacagtttacggaactcagaaaaacagtttatattctccttctctggcgagagag

SEQ ID NO: 662936 - DNA, 659 bp, Homo sapiens
  misc_feature (659)..(659): n is a, c, g, or t
gggagcagtgtctcacacctctaattccagcactttgggaggccgaggtggacagataacctgaggtcaggagttcaagaccagcatggccaacatggtgaaaccccgtctctactaaaaatataaaaattagctacgcatgggccgggtgcggtggctcatgcctgtaatcccagcactttgggaggctgaggcgggcagatcatgaggtcaggagatcgagaccatcctggttaacatggtgaaaccccatctctactaaaaatataaaaaattagccaggcatggtggtgggcgcctgtagtcccagctactcggcaggctgaggtaggagaatggcatgaacccgggaggtagagcttgcagtgagctgagatagcaccactgcactccagcctgggtgacagagcgaaactccgtctcaaaaaaaaaaaaattaacttggcgtggtggtgggcgcctgtaatcccagctactcaggaggctgaggcaggagaatcactagaagctgcgaggcagaggttgcagtgagctgagattgtgccagtgccctcctgggcaacaagagtgaaactctgtctcaaactaatataaattaagcggtctttatatgttggtggatggattttggtcagtcccccaattatttctggtttgcn

SEQ ID NO: 662937 - DNA, 778 bp, Homo sapiens
  misc_feature (64)..(64): n is a, c, g, or t
gtatgtagttagcatatgtgtcactgaactgtttaaaaatctagcatgtagagcaagcctgttntgtggaaaatccttattcattaaaaaaataatcatggcagattttctgcaaaaaaaaaaaaaaagcctttgtgcaagtccagaaatacgtgattttttaaattttattttaaagaaagggctattgtgcgcttggcgggaaaaaaaatactacgagaatccatttagagtgagaaactcttggcaagagtgtattcaattcttaaggggcatcgtgggcatcttatagtgccgtgttgggtctccgtgggcttccttggaaattaaagtgtgtaacatacgttaacctttatacaattatggctcttggctccaaaaattgggtggaccctaggtaacattttcttcccgggctgtcccttctccttttatagtggctcaaaccaggcggaaacccaaaattttaaagacgatctggaacttccaggcaatggaatcctggattggctggaaaggattcccgggattaaagggggatcctcaaaaggggctttcccaattaatctaacgggaatggttagggcacctatactcttgtggcctgtggccctttcattaatacaacccactttttaacatatcatcttttcatcatgataaacgtggttcaaggccccacataaggagagttcctttagtcaagtgatcagcataagatacttccggaaggaataacttagaacatttctattggttgagaaaatccttgggccaa

SEQ ID NO: 662938 - DNA, 321 bp, Homo sapiens
gttttttttctttttttcttcccttttttttccctttggggcggccaaattggttttgctagaacgcctgctgaaggggaaaaatttaaactggcctttgaaaataaaaaaaatctatttttttagaacttcataaaaaaaccccttgattttgtgattccaatttttggtaattgttttcaaaacagccctacaagcacaaaccggggggggtttgtatttttgtgaacacacaaccagcccgtttttaggctttgtttctttgggggcttagttttaaaaacaactttgaagtaaacaatgaaaaaaaaaaggtcccta

SEQ ID NO: 662939 - DNA, 556 bp, Homo sapiens
gcgggtgcattcaagtcacccccgaagttgttcgttgtagtagtcagatagcgatggtcaccaccgtactccaggtggtatcctctcaatgaagtaaggggtcaggtccgcttgcacatcttctcaagggggggcatgcttacttggagcaggtcgtccttgaagttgcctagtgagggtcccaggccctccccctccagcaggacatgataggtgggcaggggtggggggacagagtaatggctcatcaaggcaccaaattcctgcagaaacaacacagagtcgctgatgctatgcagctgctcccgggtctgcttgtcctcatgcaggacctgggctctctcatgcagagcatccatgatcaccttcagtgggtccacagcttcctgctcccggttgctccagggcagccctcatttcctcctttggcttctccaggtcccgcaccaggtcccggaagttcggctccaggatggcctgctcatggggggtgccgtcttgaggcgggcttctccttcggcacttctcaggttcaccctcaattcaatgatcttga

SEQ ID NO: 662940 - DNA, 103 bp, Homo sapiens
tctacgacggagagaatgcgggagctgcgccggccggtggacccgctaaccaacgacaaagcccgcgtcgatgtggagcgcgaaaaccatgggcgcaggacca

SEQ ID NO: 662941 - DNA, 581 bp, Homo sapiens
ccgtgttagccaggatggtctcgatctcctgacctcgtgatccgcccgccttggcctcccaaagtgctgggattacaggcgtgagccactgcccccggcattcaactatctttttatcagctagactccagtaaagaaatctgaaccactccagttattttaatagagaacatttaataaacaattctgtataaatagctattggtagagtgaaatgctaaattagacattgtatataaaaattattaagtagaattatttagtaattctactgtgaaattattataaaaatagaaagacacagagggtttaactacccaaaggagcccccattggtaacacttggagacccaccaggattgggtaagaaaattcaaattcttaaaattttggaaaggccgttcttgcagctgcagctccgactttcaaaaaacatgctgggccgggattttttgaggtggtttaatgaggctggttctaaaagttgggaacgcaaatgaaaaactgtggccaactgatattaggggaatccactctgtgtttcaggtggatggattttgcttgggggatgctaccaggaa

SEQ ID NO: 662942 - DNA, 408 bp, Homo sapiens
aaactaggaatataagcagaattatatagtcgagtagagcatgtattacatacagacgaatttataattatagagtagtgctgtcgtttaacacatttctataatgtatagcatgtgtataaagaaaaataagataagtgatagtaatttatacagaacatagccttctagaatatattagctgtcatttactacagaagaaatatattacacaaaaccacacatattgtctcatattaaatcttttataagtgtcctctttcagctgcttcctttaaaatccccttccttaatatagatgtatatgatgtatattgcaagaacagcagtgaagactatcgcttgagggatttcaccaccagttacacttatatacacaaaaaatacagcaatagtacgttccatata

SEQ ID NO: 662943 - DNA, 353 bp, Homo sapiens
ggggcagcccttcctattatttttcttagcccaagaggtctttcactgatacaagaaaacttgcagaaatgtgatttttcccagatttgtttacatgttccctgggacagatccaggtctgcagatcgacaccagtgggcccaggacctgggggtggctttaaatgaggcttgcagtgttaaaggtcttggataagaagggtcctggggaagaagactctgtggacaagataccagtccccaaaacagcattttcagttccttcttcaattagtttgaaatccagacctgagtttggaagactgattttttgagaccatccctgtgtttggagtggataattgtccctcccct

SEQ ID NO: 662944 - DNA, 740 bp, Homo sapiens
ccgtttgcgtggtagtgctgtgcgttccttcctgtgccgtatcttctctctggttgttggcttgtctgcctgattccagatcgtcggcggtccgggtggcgctcactgctcgcgctcgccggccgtgctgtgtctttttcggccgtctgtctgtttcgttctgtagttgggggggtcgtgctcctcctcgctcccacctcggttgtgtggtgtagtgtggctcggcccgaccttctcttcgctggtggctggcgctcggtgcgcggtcgggctccgccgcttcgcgggctcgcgctcctcgccgcgggcgggcgggtgagggtggaggcgcgcgtatgcggcctcacgctcgctcctgcactgcaggttggtgtggggtgaggatggctggtgtgtgtctgtggtcgatgttgtttttctagctgtgtctgtgtccttgttgcctcgtgctgcattgtgtgtcgtgtgtcgtgcggggccctcgcccaccgcgcggagtgggagtgcgcagggcgcagcggttcacgcccccgttgggtgggtgtctgtcgaggtacactctcctcccccgactgatttgtctatttgtgtgcgtgtgagtggctgtggtggggtcttcctgtagcatgcttaaaatgaacgaagtcttctacattctataacaatacaaaaaaaaacaagaataaaccaaaaataaaaaagacaataaaagaaaaaaaaaccaacatgcacgaaagtca

SEQ ID NO: 662945 - DNA, 132 bp, Homo sapiens
ttcagagacgcggtcaagatgtactgctatttattgatgacatctttcgcttcacccaggctggttcatgaggtgtctgcattattgggccgaatcccttctgctgtggtgctatcagcctatccacaacca

SEQ ID NO: 662946 - DNA, 981 bp, Homo sapiens
aggaaactcatcccgggtaacgcgcaaatccgggggagccccgcgccttgttgccgcacagagagtgcaagaccacaaaggggaaaaaaacaaaagaaatcttcgaagcagccccacgatgtgctgccgccccccatgggcaacgtgacgccaatgggcgtcccccacccccgtcgggtgtcaagtaaggcccagggccacgggtggaaaacaaagcagggggtaactaatacgcggggtgagcaaaaacagcctatagtaggaagtgtgagaacatggggggtattatcgccgggcgcgcaacatacacgagaggccttcacgtgccgcccaagtgactcgcctccggaggttcaacgaagaactagtcacacgccgtggcgtggtgattactagtcggccaagttgcatccccgccgcgttacttataagggctcatttgttacaaaacgccggatgcaaccttcctcccccttgggaccagttacgcaccataaaggacacggtggcttggattcaaccacaatacggcgggcagaaatagtgggtagtcccccacaaattattagtgagcatatttggggtatctattaaacccagtgtcaattaatcacacaaggcgcctctgggggaaccacagtgtaacaacatggtggtccccaataaatctactgcaaggtgccgatcccggggtgagtgatactaccatctttgggctgagtagaccacctatgctgaagtcctcctcataaaggttgccaggcacccacaggtctagccccccacttgtccatgtagcactacatggaggacccacgatatatacaaaaagaccaagtcggtcccgctcgggcacgcacttctccctttgtcttccttaattacgaatgatatgatgtataggtaataatagaaaaggcccgggcacggaaggtttaaggaagaaaaaaaaagggaaacccctaacacaacatgacgcga

SEQ ID NO: 662947 - DNA, 106 bp, Homo sapiens
acctggtcatgccacccatgctaccgcctggctattttggacaagccacggggcttgctgcgggactgatcatgccgatcggcacaacgtggctggaaggacatcc

SEQ ID NO: 662948 - DNA, 109 bp, Homo sapiens
atataggcagtcttgaagaactcccatacgtgtctgctgctgctcccattaactgctgccaccaccatcagatatacataatcaaacctaacctttttgtctaggagca

SEQ ID NO: 662949 - DNA, 110 bp, Homo sapiens
tggggatagtgggataataaagagggtttttaaaccgagtgggggcctttttgggaaaagtggccgacacccctttttgttttttttttaacacctataaattttcctcc

SEQ ID NO: 662950 - DNA, 1447 bp, Homo sapiens
ggtgccccttgtgccccgttcctggttctgcttcctgggtgtgcagtggttcctgccttgtgacccccagatctggtgaactgtgtggacatcaagtgccttgcatagagccccctcattccaccgacccagctattcccagtgtgcacagcatctagagctgagaggggagaaccagaacacataaccaactgccccacgctccatacccatgagagacatgagacgggcccacatacacaacacatgaagccagtcaatgaacataaggaaagaggcaggcgggatgagacatgaaaaccaccatgaggagaacagctgcaagacagagatacaaggtaccatacagagcacaccacaagaaaggcaggaactacaacaccaagaggacacagaaaaaggaaaagaagagagccaaggctacacctcggcatacaatacccaacagaaaaagagaacactccgaggcacactccaagccctcagaaagccaaggaaccaccgggggccgataggagtacaccaccaaaggtccatggacgacggtcgatgaggagccactcaagcgcaagagaacacaccccacatttgatggatagcacaatattaaaacatacttgtccgaattcatcgtcactcactaagacataaaaaaaagcggaaaaagagagaagaacgacgaaccgaggggccacgctgcaacaacaccaaccacccagcatacaccagactggccaccaatgatcacacaatgagcgaccccaaagaccaacacagagcagcggagaagagaggaccggagaacaaagggaataagaaacccgtaataccaaaaaacaatgaaagtaaaactatcacctgagcacaagaaacagaggcgacaaagagagacccaaaggcacaagaccacgtcctgaacacataaacacacccgcgataggaccacaaaatcactcatcattaccaaataacaaacctattacgtatgaaggcacattacacatgttaccccacgtaataattgatatagagcacatccaagacatcataacacgaaatagaacgaacggcacataatacaaacaacgcacacatacgataacaatccttgaacaataacattagaaagaaatccataagagatgcacacagacacagacgaaaccacaagagagacagagagacacgaagaagcaacacgaaaggagaccgagccgatgatagcgaccgaccacaagaacgcacgactcgacacaaagagaggacgaaaaaaagaacaaaagaagacatgacgagaccaaaaacacaaacagaagcaaccagaacacacacatgtaggagacaaagagaaaactgacgagaaacgcgaccacagatgcgagggacggacaagataacagaacagacagaccaaccagtaactgaatgtgagaatacaggaaggaaa

SEQ ID NO: 662951 - DNA, 719 bp, Homo sapiens
tggaaacggagtctctatcacccaggctggattgcagtggccaatcttggctcactgcaacctcttgaagcgatttcttctgcctcagcctcccaagtagctgggtttcacgggtgcccaccaccacacctcgctgttttttttaatttttaatggacacggggttccaccttgttggccaggtctggtctgtgagctctctgacctcaaaatgtgatctgcccaccttcagcctctcccagagggtgcgtgcggatttacagaccttgagccatttgttgcccagttttatacccgtgtttttaaagaagaacaaacaatgggtttagggaacttggcgttaaagggccaaaccaaccttacttgtgcggtggggaccccagacttctaattcaaaggcttatcaaattcccgggggtctaaactcatcatgggcattaccattcaaccaaatttttttttggaccgctgaacactttctattgtttacattatgttacacaattctagtgtttccacttagcctctccagtttagatactctcaaccaattaatatccactcattttttacacgctgaaattccaaccctgtgtcatagaggatggttccagcgctcaaggattccctgttgctaaaactaagtagggctgtgaaactttgggccatgtatacaggacagtgcgacttttaataaggttaacataattggacatttg

SEQ ID NO: 662952 - DNA, 529 bp, Homo sapiens
atcgagtctatcgtacaactgaggagctctatcctcttggatctagatttgtcatcaggtgtttccacgatcgagaatgatggatatattcagtaaccggacagcttccttcacatgtataggtaggacctcatcacagcagtgcatcctgagccatagcttcagagagacgaatcatgctctcaagctgtcgcactgtagtcctccatgaagacttggtccactccagaaccatctctctggcggaaatctttatcttgctccacaatgaagtcctctgactctttggacatcttgggtataaactgtcttgcaaagagaagatatcttctgatatcatcgagggaatagacacgatcaatatgattccatcattcttgaatgcaaatctactatgcgcctggcactggcataatctgtaacctcattacattcatccacaaggataaagcagagatcgaatcgggacatgatgggagctgacacattaatattctgtatcaatgattctgatctgtcatagtgtaca

SEQ ID NO: 662953 - DNA, 193 bp, Homo sapiens
tactgatagaatcgagctggtaccatatagggcaagcgggaggattgcttgaccaggagttcaggaccaatctgggcacgtatgagacccgtctctacaaaaaaataaaaattagctgggcatggctgtgaacacctgtagtctcagctattcaggaggttgagacatggaggattgcttggcccttatcgag

SEQ ID NO: 662954 - DNA, 1045 bp, Homo sapiens
agcgggggtggggaggcgcggcgccacgcgacgcctggctgggcccgcaccggagaggcgtctcggtacctggcaggtcggcctgctactcgtgagcccgtctgcgtgggcggcggcggcggggactatgcacgtgtgagatgcggcagctgggctggtgcaggacgctgaacagtcagcggcggcggcgggcgcggcctcctgggcgcggggcgctgcggtgtccctgaggtgctgggcgcgctgggcgctgggcgattgccgtgcgcgccgcctgcgcaggcgctggttcaggactcacactgccgtcgctgaggcccgctgggcccgtcatggaggcgcccatccgtggagacgctcccacgaccgttcgtcgccgcttcggtcccggctgctgtccatggattccgttgctcgcaccgggatgctggtgcaggactgccgcacgaggagcgctgaagaaggtaggaccactaagctagacaacagaagacacatcgcgaatcgatcggacatgaacggctagagatacgatgacgtaataactgccccacttcagtatgaaagaatctcgagcctagctctttgtccactgatatagacgtaggacgattaataaggtcactacgctgggtgcaagccgataattcgtgaccgttcttagcacacttcagtgcttcacgttggaaaacccaaagattaacattaccttacatgcgcgctcacatggtatacaccatgggagtggacccacctggtcgcgcgaaagatggcttcagcaaaaccgcagcgcgcacgaaaccgcgccccatgcaaaggaagccaacccggcaacacggcagaccgcagcgtaacgaacacacaccaccccaggactgcacaccctacgaccacccacccggggacatcaaccaacgacccgggcaacgtccacgaaccgacgcgagcacgcacgacgacccgactgagcgcgccagaccacacccggaagccggcccacgacggccaccaacggcccacaccacacaccgaacacaagccacaa

SEQ ID NO: 662955 - DNA, 110 bp, Homo sapiens
ggagcgagagactcactgctggggagtcctgtcacactcatgttccccagcacactgaatctccctctctacagttgcatgtagaccccttgaagaggggaggggcctag

SEQ ID NO: 662956 - DNA, 399 bp, Homo sapiens
  misc_feature (2)..(2): n is a, c, g, or t
  misc_feature (6)..(6): n is a, c, g, or t
gncaantagccggagacgcccataatgatgatgcagatatcgactacttatgaaggatgccaattccaacagaagctgaagattctatgggaatacacgctgaattaaacgaattggaaggggaacgctgtctaatcccttcagaactgtttatagagcttgagaatggggtaaaatttctgctagcaaaatcaagttctgaaattttatcagtaatccagaatttagtagtccatgccttctcactcagcatttagaaataaaaatgtggtttcttaaacgtatatcctttcatgtatatttccacatttttgtgcttggatataagatgtatttcttgtagtgaagttgttttgtaatctactttgtatacattctaattatattatttttctatac

SEQ ID NO: 662957 - DNA, 345 bp, Homo sapiens
ccggtaactaacacaataacaagaccttttccttggacatactctgaattttgttgtttggggggagggggtgtgtgtgtgtgtgtgtgtgtgtgtgtgtgtgtgtgtgtgtgtgtgtgcgcgcgcagtccccatcattctcagtgtctggctgagttgggtctacctggccaggtacatctaacgtctgtatgtgtgtacttgcgcttagtgtgtacccttcatcagggtgagatgaatatggctgtatataggctgagcaagagggggtgaggtcgatcggggtctatcgagtacagaacaggctcctctagaggggtatgaaacaccggcgggtcctttgag

SEQ ID NO: 662958 - DNA, 109 bp, Homo sapiens
ccacgatccccacacacacgtatatataatggtatctctagccaacccaccctgtaagctctggccaaggtttgatttggacaggtacctggtgatcgtggggttgtaa

SEQ ID NO: 662959 - DNA, 555 bp, Homo sapiens
  misc_feature (439)..(439): n is a, c, g, or t
ttttaagaagccgtcttgttctgtcacccaggctggcatgatctgggctaactgcaacctccaccacacgggttcaaagtgattcttgtgcctcagtttctcagcctcccaagtagctgggattacaggtgtgcaccaccacacctcgctaatttctgttatttttagtagagatggggtttcactacgttagccaggctggtctcgaaatcctgacctcaagtgatccacccagccttggcctcccaaagttcggacattacaggtgtgagccaccatacccagccagaacagctttatttttaatagccaaaaattggagacaactcaaatgtccatcaatatttgcatgaatggataagtaaactgtgttatatccatacaatcgaatatacctcagggggagaaaaaggaacaacatggatgaattgcaaactancatgttaagtgaaagaggcagacacaacaagtactcactgtaggattcctgtatatatactctagaaacacagactataggccagaacttgactccggtgcgatgggatgtaatga

SEQ ID NO: 662960 - DNA, 313 bp, Homo sapiens
  misc_feature (12)..(12): n is a, c, g, or t
  misc_feature (106)..(106): n is a, c, g, or t
  misc_feature (171)..(171): n is a, c, g, or t
  misc_feature (173)..(175): n is a, c, g, or t
  misc_feature (180)..(180): n is a, c, g, or t
  misc_feature (189)..(189): n is a, c, g, or t
  misc_feature (244)..(244): n is a, c, g, or t
  misc_feature (264)..(264): n is a, c, g, or t
  misc_feature (306)..(306): n is a, c, g, or t
ttaccctctaantcaaatatgactaatgctaacaacaacaaaccaaaaccgagggtttggttttaacatgattgggttaacaggcctttgaagaaaaatgtttaanacttgtcttcaagtctactaattgtacggcaatcatttaaaatagtaaaactatttaaatctaanannnatgtngtgtgtggnggtggggagaaaagggatcattaaatgcaatgcaagaacaccaagcagaattaanataaagaaataatgtaaacnggataagatagcaaaagctttttctaaggaaaactgtttcanagcatgc

SEQ ID NO: 662961 - DNA, 103 bp, Homo sapiens
aagcgtcagaacaccagtaactctgtaaaacaagcatatggcacttctgtctgattccttcttctccattatattttatatttcccttttttctttgagatgg

SEQ ID NO: 662962 - DNA, 252 bp, Homo sapiens
gccttgcataataaagacacgctgcttcaatcaaatgcaccatcacaacaaatgcagtaacagcattgctgcctcactttccaagccctatatgccaatttcattcctttcactttatgttccacaagtcccacagttgtggtcatcaatcatgccctcatttcattcctccagcagtgcccacacaatttcccaatcattcactcactcatgcaatctttacccctctgccacattcactcaacatcagca

SEQ ID NO: 662963 - DNA, 141 bp, Homo sapiens
tacaagtgccctatgtagtgttagggatgagggaggttactccttagcccagtgagtggttagagacagttgtgctggtagagatgcctgtttaatgccttgtgcctctagtgagtgtgtaagacgatttgcttggtgttg

SEQ ID NO: 662964 - DNA, 1022 bp, Homo sapiens
  misc_feature (661)..(662): n is a, c, g, or t
  misc_feature (751)..(751): n is a, c, g, or t
  misc_feature (760)..(760): n is a, c, g, or t
  misc_feature (762)..(762): n is a, c, g, or t
  misc_feature (808)..(809): n is a, c, g, or t
  misc_feature (901)..(901): n is a, c, g, or t
  misc_feature (928)..(928): n is a, c, g, or t
  misc_feature (969)..(969): n is a, c, g, or t
  misc_feature (1005)..(1005): n is a, c, g, or t
cggtggcttccccccccggctcacttctccgacgtcgtcctatcgctgttttctcttttatgccgcttgtccgcgcctcttttcctctgtactttctctccctcccttggttttgcgctctccgtcgaaagtctgcccctgtcctcctagtcctcctttgggtttcttttatcctcctccttcgtattctatcttctgtctgcgctttgttcctcggttctttcgtccgcttgcgattacttgtttgtgcgaagtcccccctagtccgcctcccctcttgtgggcgtgcgagaacctctatatggtctgatagccgcgccttcccgcccaaagggtcctcaatttggcccaatgctcgtgtttctggtccttccaacatctcccctctgggtgtagtaggtgccacctcagggcacgctctcttggtggacgtgtcacagacgactcgcgcaccggtaagtctgcgctttggacgtgttccgcgtgtatgctcttggaagtgcccacgtccccttggcctccagttcaactgggcaattcatcgcaccagctacttctaacgtaaagagctacctaaatatgtagccgtggcttggtcggcggctcgcctggtaatgcccgagctacatttgggaggctagaggcgtgagaatctctgganncccatgcgagatggaggttgcagtgagcagagatcgtgccactgcactccagcctgggttacagagggagactcctccgtctcagaaanatagaatanantaaacttgtgagctggccccaacccctcctaggaatcacagctccnncgtactggtgccgaccgcagtggccaagttgcgacagctgcccacggcccctccctctgatgcagattcagggcttctcttcgatcatgatngggtatttgattctgtttttccatgantgcaaaaccctctttcctctcctctatttgggacaagagcntggttttctacgctgccttggccaccacactgatanccccacgagctggatga

SEQ ID NO: 662965 - DNA, 873 bp, Homo sapiens
gacagctctatgaattcattcaataagcatgtgtcaggttgcactgtaagttccctatgtaatacgaaccccatggtgattgctgacattacatgcgcagactggcttcagtgtgtggcttggtgtttagtttagacaatttctggaactggaatggagattatgcaaggtatctttagtaacataatatggtgtatacttgcgttaattattgtgcagtactgattactaccccatcagagaggggtattggtatagagtagggcatagagtacggaaggtctggaagctgttgtaaatatggttaatcaaacagggaaaatgttaattgcctccattaatagtgtcaattgttgagacggagattcatatgatggagagtttgcagggcctaataattacaactacgatacggttcaactctcgaatgcctagccatacattattaacttgtttgaagctattacaccaagatatataagggcgaccttcctcgcgttattgttctacccaaagttctcttgcggtgtgggggcaccctccatcgggagatccaatgcggcagggggcgagtcctggaaacacactttaatggttggggcctctattagttgtccacttgcacacgcgagctgtatttggtgcatggtaatcgcaactgagtggttgcaggtgccgctctggactgtcgtaaagtgaaataatgttggactgttatcttgtttggtcctaatgaaaatctggaatttcaatatgtctctaggctaaataattacttcgtggcaggatgtttttggttacaaagcacggatacaatcttgtttccgtcgtttgcacaccaaaggaataaggtgaatttatttcccaataacc

SEQ ID NO: 662966 - DNA, 145 bp, Homo sapiens
ctggttattagtgctgctgaacttagtgacggatcagacgaagaggggcgtttggtattgggttatggcagtgtggtaatatacttgataatatgtatgtgattgaaatttgattggcccctaaagttacagcagccagtgtgtg

SEQ ID NO: 662967 - DNA, 105 bp, Homo sapiens
accagacagagggattctttagaactcataaactacgggaagtataagattcggaacaaagacctggtagggaccatctgtctgacttacgagcaacgtctggag

SEQ ID NO: 662968 - DNA, 497 bp, Homo sapiens
agctcccatcacacacataatccataaacttatacatctatatgtggttctgccatctgttcaagccagtacgcagatgcacacatcagccaccgttcgtaatgcatgtgccccatcgtgctcatcaaagccagctaatgcagcagaccagtccaattcacaagtggataagcatgttcctatgactgtaccgtaatgtcactatgatcagctgcaagaatccacttagcactttggctgttgtaggcgttctcgtatctggggcgtgtgagttcctatgtcactctctaagacatacgtctatgaatcagttacgttcgccagacaccacaggaatattgctacttacagtgcatgatcgtgtgccgatagtccatctgacatgatacatcagattctaacattaggactttgcgtatcagggcacacagcattgaccatagcacaagtaggcaaggtgtcatactactattcacagtctcatgtatatataacag

SEQ ID NO: 662969 - DNA, 624 bp, Homo sapiens
tggtgcagacgcacgtgagtctatgtttgacatcagaatcttcacattcatctctaaggttcatgaagctgtgacatcaagcaagcaatgatatgcagttccggggcattaaagtaagcacgtctcatggcaatgccatactagtattatttcaagaatgtctattcattgtcatagctagcagtgctcatcgcaacatatggtggtcgcaacaattggatcaattctgggttgtcctctttgtattacaagaagcatgtcatgtctcaaagattctcgtggtgcacagcattaagcccttgctatatacgattcaggatgagggccaattgtgcatcatttgtctccatagatggtatgaagtgatctgtaacaattctcagatgtctcaagagcaacacatgtcgatgcaaacacagctactccattcactcattttacagtgatcttagaatggacactgttgaagattggcagcaaaggcaatctacaccgaggctttgaaattttctgtctaccagatctttagtccgatatgcaacagagctcatgtgtgcatctaagcgatacaccaccagcgaataagccaagctcaatagacacagcaggtaaatatgggtttcc

SEQ ID NO: 662970 - DNA, 384 bp, Homo sapiens
agaagttgaaatgaaggaagtggccgggcacggtggctcacgcctgtaatcccatcagttgggaggccgaggtgggacttcaccatgttgccaggctgtttcaaactcctgacctcatgtgatccacccacctctactaaaaatacaaaattagctgggtgtggtgtgtggtgtgcctgtaatcccagcgactgggggaggctgaggccagagaatcacttgaatccaggaggcagaggtggcagtgagccaagatcacaccatgtgctctccagtctgggccacggagcaagactccgtctcaaaaaatacaaaataaccataaaataaattaaagtaatcaagaagaataacaacaacgagcaagaaacacaaacaaaaact

SEQ ID NO: 662971 - DNA, 215 bp, Homo sapiens
ctgtgggatcgagtgaagatgaaactaggagagggaaagagagagaagtggggagagggaaagatgacaagaccctgaaggaaaggggacagtggaccctgatgacaggcaaacgggagggagccctggatgagtagacggcgggaggttctgtgagcccactgccatgagggcttggaagacaccccccacccacgtgctgcacctgagacccc

SEQ ID NO: 662972 - DNA, 342 bp, Homo sapiens
gtggcgtctagaggatccctgcaaacgtatagaaccttatttcttcctatgaacttaagctgctgcgcacaaaaaaaaaaaaaatttaccaaaggggagatgcagtagagtccataggctgtagaaaactaaaagaaaggggatgcagggggaacaagttattggtccggagttacggtactggctggacagggtggtggggtactaaatcacaaaagaatccattccaggtatgcatggtctggggggtgggcgctggggtctacagatcaagaaactggggttggcgaagctctggcatggatgggcgagagctgtccttctccttctaatcaagctggc

SEQ ID NO: 662973 - DNA, 234 bp, Homo sapiens
tagggtgctttgaggtcaataaagcaaagccaaggccccccagttgcctttttgcctttggtaacataactttgggagttttggtttatcctgtgtgtcaaagagtgggcagaaataacggcctgaaggtttctgaggaaaaagccctggatgggagactgaaatggccagtttcggagcctgttaatcagctgatccccttacccatttaataataaaagagctggccctcca

SEQ ID NO: 662974 - DNA, 431 bp, Homo sapiens
tgacacatgtcggtagagtagatctggatcttatagtcaacagctgatgtgcatgctcatctgtacagtgcagtgattcaggagagtgtcttctctccattgatacatcttgatctgtctcaaaggacgtctagtccatagcgccataagctcgggtctgtgagtgcagcatgtagtggaatgagagggcggtctagagatggctcctctctctacagggcttatgcatataggtcttctatgtagattcttactcgttatccagctaagagtgggatcttgtatatatgattcacggagagcagctgtgatagcatacgtgtcgcagaactctctccatagatcacctgtagacggcacgccgcgcatactatcggcgatgctgctcgtactctcgctacaggtatcgagtagctaagttgagctcgtgc

SEQ ID NO: 662975 - DNA, 251 bp, Homo sapiens
gctaacatggagaaaccctgtctgtactaaaacagaaatacaaaaattagtcgggcatggtggcaggcgcctgtaatcccaactactcgagaggctgaggtaggagaatcgcttgaacctgggaggcagaggttgcagtgagccaagatcgcaccattgtactccagcctgtgtgacaagagtgaagactccgtctcaaaaaaaaaaagatttaacattaatttatttggaatttggacagcactctactg

SEQ ID NO: 662976 - DNA, 202 bp, Homo sapiens
tttctgcgggcaggtcccagcatttgagggtgatgatggattctgtgtgttgagagcaacgccattggctactatgtgagcaatgaggagctgcggggaaagtactccagaaggcagcagcccaaggtggtgcacgtgggtgaagctttgctgagttccgagtatagtggccccaggcaagtacctgggttgttccccaaac

SEQ ID NO: 662977 - DNA, 153 bp, Homo sapiens
ctgatcccgaacgtaagtcagccgttcagcaccccgtgtgtgccgtgtcagggttcaaacacgtttgaagtgcgtgtgagaagtggggttccgtcaggggttccgcgtcccgtgtataagggttcgtccccaaaacaggttgttaaggataca

SEQ ID NO: 662978 - DNA, 175 bp, Homo sapiens
  misc_feature (15)..(15): n is a, c, g, or t
  misc_feature (43)..(43): n is a, c, g, or t
  misc_feature (116)..(116): n is a, c, g, or t
  misc_feature (147)..(147): n is a, c, g, or t
gatgggccgctgctncaatttcccaccatcgggagcccctggnctcaaaacctcctagaatgagtcacccgtagatcagggtctggggaagaggctgatccctggcgctgcccggntccctcgctgccctctggagctcagggcagnccggaatagggctctttgaagaggaagt

SEQ ID NO: 662979 - DNA, 160 bp, Homo sapiens
ccagtctcgctcgtctctaacacgctatagcggagtgttccaggctgccccaacactccaggcctgcccctcccactcttgaagaggagtgccgcctcctcggggctcaggctggcttgcccggctctttcttccctcgtgacagtggtgtgtggtgtcg

SEQ ID NO: 662980 - DNA, 274 bp, Homo sapiens
gctctgaggaccctatcgccaacacagaaaacacaacaacaataaataaggtataggcattacatatatggatatatgatgcataaacaaataattttttttaccctacttcaggttacttgaaagccttcttttgagtgactagatttaagttttgttgaacccgggtttccagaagttttgggttttcattctcctcagacaattttgggctttcatttatttcaaccaaaaactttatattggactggtttaattttaggcagcatattta

SEQ ID NO: 662981 - DNA, 493 bp, Homo sapiens
ggcatttggggggctcagaaggaaattagctcggcttccatacctataaggactgcctaacttttaaactcccggcactcaaagatgtggacacacacacgtacaggaaatacagccagactccatctcaaaaaaaaaagaacgaaagaaagagagcagtgtaattggagcagggaaaatgcagcatcgtaataggaggtacaggttaggagctctggctgagaaatcccgtctgtaccatgtaccagctgtgtgacctggaacagaagaataaattcaccttcctgaggctcagtctcctcatctgtcaaatgcaggtgatgtaggacctcctgggaaggatgtgagcatgcaggagatggtaaatgaaaagcacttagcagagtgtctggtgcataataagtgctcagaaaacactggcctacgctgttcattatagtaatactcagatgagggggacctctgagtcaattaaacagttgctaagctctta

SEQ ID NO: 662982 - DNA, 320 bp, Homo sapiens
ttgcaaaacaaaccccgaacccattaaacaatttttcatttgccattttccagccagccttgggaacccccattttagttctgtctctgtgaatttgactgtgtaccccgtgtaagtgggatcaaacagtatttggatttttgtgaccggcatatttcacaaagcaaaatctccttgtggtttatccatcttgtagcatgggtcaaaatttccttcccttttaaaaataaaaaaaattcccttggggggataaaccccctgtgttatttcccccttttggttattgtgaataaaactgcttccaacatgaaaaaaaaaaa

SEQ ID NO: 662983 - DNA, 1080 bp, Homo sapiens
atcaacgcacagtggccatatacggcctgggggacttgtgactccctgctccgctgctgccgcttcggcccctgacacgcagacagactgccagccgccctgcaccggaccagctcccgccgcggacccttgccgaggtccctctcctggtcccctcccggttggtccgggggtgcgcagggaggcagggacgggcgcccagtgggaagctcagagggacgcagcgcgcgaagtgctccttatgatggacatatcacggcacgccaacatcttggtgcgcagcagacgggcacaccgctggcacagtcatcgccagccgaagtcagccctatgagggacccggagggggcatcacgccacccaaaggaccggagactgcgattcgcggacacagggccacccgggactgacggaagacggacgatgatgcgggacggaccgagaagacacgcatgaccggacgccagacgaagcaagaatacaccgactgggcctcccgatgcagccaattgggatcaaaccacacacaacgccaagaggatagcacccggcaccgacccgggggacatgaagagcccggaacgcacacgtgggaacaaacgagggccgttgaggaccagtcacaggaacccgcaccaagacctcacacaggaaagcagcagggtaacccagcggcattgggagtcggaatcgaagacgggagaaggagacagcaaaaagcgcgggcacagcgggcagacacgccgggcgacaatacctcacgcatggggaaacagacgacgccaaggtgggaacaaccggtgacagagagcacgaaaggccaggaacgagcccgtgggaaggtgccaccaagaatggcacagggatggccaacggacgcgggaacaaacgcaagtatacagaggaatttaaccgcaggaaacacgacgatcggagaaacccagagcatgacagcacaccatgactatacccagcaaggccgacgcagagggacggagagggaaacacacaggagcgatggaggaaccacaaaagagaagccacaatggcgaacgaacagacaagaacgtagtgacgagg

SEQ ID NO: 662984 - DNA, 622 bp, Homo sapiens
gtcctacaattcttaacattctcgagggttagaaagaaacacagaaaaattgcatcggtacatgagtacagtttcacaaataaatacatagactgatgtttcagacttgtgcagaatatatatatccattgcagatgaattgcatatttctgtgataacctggagaaaggcgctttcatgctgacagacaaactgtttttgaaatcgaaaaatgtttcatcattactaagcaggatatgcctcgtgacattgctgtctgtacccataatcttcatgtgtcgtgggagggacctggtgagtaagtaattgaatccatggaagcagtgactcccatgatgttcctcgtggattggttacatacgagtgaattagacaaattgagtcgtataccgttgatcgagtatacatgtagacaacatccaaaccaaggtgcagaatatttactcatatgctatgtaagaatcctgtgtactttgccccttgacaggtgaggatgatgccatgagttttgaaccaaaagatctgttgagcatcagggctgggaccctggcgccttctctttacgttaagtaaagagtgatctctctttaaccctgttgacctcagaaaaagtggtcagatt

SEQ ID NO: 662985 - DNA, 395 bp, Homo sapiens
ccggtgggacgcagcagatgacatccaccgctccctcatggttgaccatgtgactgaggtcagtcagtggatggtaggagttaaaagattaattgcagaaaaaaggagtttgttttcaaaggaggcagccaatgaaaagaaatttgcagccccagctgagaagaaccataccataccagggttccagcagggtttattattcttgggttccccagactcaccggaccccatttcctatgccttggagaccttttgtcacttgggtccctttttaccccccccaagactgtccccctgggcctgacccccctatgagggaaaaagtcccccctgggccaaagggagttcatgtgttactcataacatgcatttcaataaaaacatttttgcggtga

SEQ ID NO: 662986 - DNA, 113 bp, Homo sapiens
gcggaatgaaagtttctattccaactaaagccttagaattgatggacatgcaaactttcaaagcagagcctcccgagaagccatctaccttcgagccttccatttaaatgcaa

SEQ ID NO: 662987 - DNA, 739 bp, Homo sapiens
  misc_feature (9)..(9): n is a, c, g, or t
  misc_feature (19)..(19): n is a, c, g, or t
  misc_feature (54)..(54): n is a, c, g, or t
  misc_feature (61)..(62): n is a, c, g, or t
  misc_feature (69)..(69): n is a, c, g, or t
  misc_feature (98)..(98): n is a, c, g, or t
  misc_feature (109)..(109): n is a, c, g, or t
  misc_feature (121)..(121): n is a, c, g, or t
  misc_feature (131)..(131): n is a, c, g, or t
  misc_feature (166)..(166): n is a, c, g, or t
  misc_feature (186)..(186): n is a, c, g, or t
  misc_feature (211)..(211): n is a, c, g, or t
  misc_feature (242)..(242): n is a, c, g, or t
  misc_feature (265)..(266): n is a, c, g, or t
  misc_feature (288)..(288): n is a, c, g, or t
  misc_feature (321)..(322): n is a, c, g, or t
  misc_feature (331)..(331): n is a, c, g, or t
  misc_feature (357)..(357): n is a, c, g, or t
  misc_feature (373)..(373): n is a, c, g, or t
  misc_feature (379)..(379): n is a, c, g, or t
  misc_feature (381)..(381): n is a, c, g, or t
  misc_feature (385)..(385): n is a, c, g, or t
  misc_feature (393)..(393): n is a, c, g, or t
  misc_feature (397)..(397): n is a, c, g, or t
  misc_feature (401)..(401): n is a, c, g, or t
  misc_feature (416)..(416): n is a, c, g, or t
  misc_feature (420)..(420): n is a, c, g, or t
  misc_feature (423)..(424): n is a, c, g, or t
  misc_feature (463)..(463): n is a, c, g, or t
  misc_feature (481)..(481): n is a, c, g, or t
  misc_feature (607)..(607): n is a, c, g, or t
  misc_feature (629)..(629): n is a, c, g, or t
  misc_feature (639)..(639): n is a, c, g, or t
gcggcgcanggcggggcangggcactgtgtgctttctccgacaggatgagctcnctgcatnngggctgncgagctgcgatgccccgtcaacctggccngagagaacatnctcaaccctctncgaaggtcancccgggccctaaagctgatacccactagagcacanggaggacagtgccccactgntgagaacctgtgagctatgggtaanggagctcccagattccgaactaaccgatatnccagactactcattctgctccanntcttcacccccacctgcttctncacccagtcaggcaattggcttaagtcctcacnnataactcangatgcccaagaaatgaatgccctttncctctacaggagacgntgactngntctnttaagccnaaantcanggctttacaagaaantggnatnnaatagcctcccaagaaaagacaggaaagaggggtaatgngcacctaatgattttaangggcttttaattttccatggtttttcctggagaatggatgggaccctcccagaaggtttttcggaagcccgccaggcctgggtcttaggaaacagtgtagcttactaccaggccaagctgactggngaggatgatgaagacagcccangaggggactntgactttttctccaacctcggaaccaatgggaagctgcagccggcttccctgtctacagccggtggtggtgccctgggttgtcttgccgtgggggggggg

SEQ ID NO: 662988 - DNA, 119 bp, Homo sapiens
gtatctccctctacatccctcccgaaatactaggaatacttattctatatgagacatatataccacccaagttttaacaccatatcccatcggctgttagtgtatataaaaagaaataa

SEQ ID NO: 662989 - DNA, 594 bp, Homo sapiens
  misc_feature (9)..(9): n is a, c, g, or t
  misc_feature (19)..(19): n is a, c, g, or t
  misc_feature (54)..(54): n is a, c, g, or t
  misc_feature (61)..(62): n is a, c, g, or t
  misc_feature (69)..(69): n is a, c, g, or t
  misc_feature (98)..(98): n is a, c, g, or t
  misc_feature (109)..(109): n is a, c, g, or t
  misc_feature (121)..(121): n is a, c, g, or t
  misc_feature (131)..(131): n is a, c, g, or t
  misc_feature (166)..(166): n is a, c, g, or t
  misc_feature (186)..(186): n is a, c, g, or t
  misc_feature (211)..(211): n is a, c, g, or t
  misc_feature (242)..(242): n is a, c, g, or t
  misc_feature (265)..(266): n is a, c, g, or t
  misc_feature (288)..(288): n is a, c, g, or t
  misc_feature (321)..(322): n is a, c, g, or t
  misc_feature (331)..(331): n is a, c, g, or t
  misc_feature (357)..(357): n is a, c, g, or t
  misc_feature (373)..(373): n is a, c, g, or t
  misc_feature (379)..(379): n is a, c, g, or t
  misc_feature (381)..(381): n is a, c, g, or t
  misc_feature (385)..(385): n is a, c, g, or t
  misc_feature (393)..(393): n is a, c, g, or t
  misc_feature (397)..(397): n is a, c, g, or t
  misc_feature (401)..(401): n is a, c, g, or t
  misc_feature (416)..(416): n is a, c, g, or t
  misc_feature (420)..(420): n is a, c, g, or t
  misc_feature (423)..(424): n is a, c, g, or t
  misc_feature (579)..(579): n is a, c, g, or t
gcggcgcanggcggggcangggcactgtgtgctttctccgacaggatgagctcnctgcatnngggctgncgagctgcgatgccccgtcaacctggccngagagaacatnctcaaccctctncgaaggtcancccgggccctaaagctgatacccactagagcacanggaggacagtgccccactgntgagaacctgtgagctatgggtaanggagctcccagattccgaactaaccgatatnccagactactcattctgctccanntcttcacccccacctgcttctncacccagtcaggcaattggcttaagtcctcacnnataactcangatgcccaagaaatgaatgccctttncctctacaggagacgntgactngntctnttaagccnaaantcanggctttacaagaaantggnatnnaatagctcccagggacagagagagggatatgtgcacttatgtatttagaggctttttatttcccatgtgtctactgcagatggaatgaaacctttcatacccaaggctcaccccccaagacctgggtcttagtcacaggggtgcttactaccagncctctgctgtggggg

SEQ ID NO: 662990 - DNA, 312 bp, Homo sapiens
gtcgtatgacacaagtcattactaagttgagcaaaagagtatatatctattagcagaaagggcctctctggcagcagagattaaaaactggtccaacttcatttccatacttcagaggaacagcaaattgaggatttactctatctagtgacttaattccttactttgggaccaagttacataaaagaccacgaaactcctgattaaactggataatgacaggattctgtagacagggctgcacgtatcggatatcagaaagacttctctattctcagttaacatctcagagctagaacattccacattccc

SEQ ID NO: 662991 - DNA, 307 bp, Homo sapiens
tcttttatgaggcatgacgcaccaaagggtttgggcttccttcccccacctccaacctctaagcttggtatcccattatttatctgcattacttcttaaacctacatttcactatgtagacaagccaagacaatgtttattctacatgaatgaatcaaccctggtgcagtcaatttatttctccttagtaggataaaaagacaattgccatgtgatggattggatgaaacatagagcaatcggaaataatggtgaagaaggtaaagaccagcaccctgacagcccaatgttatttttctctctaaac

SEQ ID NO: 662992 - DNA, 1644 bp, Homo sapiens
  misc_feature (25)..(25): n is a, c, g, or t
  misc_feature (78)..(78): n is a, c, g, or t
tttttctatatatttttaatgatcnaaacaaagcatctaaaaccgcagtttctggaagaaccacttgtcttgcctgtnttgtatctctcttccgcttgtcctggctggacgctactaccggaccgcaaagcacgtcatcgctcgcaacgaacactacgacagataggcaccactcaagcatcgccccacacagaacaagacaacacgaacgagcaggacaacccgacacgctagcacccagacaaacagaagacaagacaagacacagtggagcacaacgagagaaagcaataccgaccaagacagatacaaacagcactagaaaacactacaagacgaacagccgctactacaacctaacacacaaacaacactaacagacacacagcacaggcaaactcctgaaggacaaatacaccacaatgagaacaaagacacaaagaacaacaaacgaaaccagaacagacactgacagaccgaggactaccagacacaaaccacaacgacacagagaacccgacagaacacaagcgaaacggaaccaacgataaggcagagaagcagcgaaaagcacaagaacaagagacgcaacagaacaacagaggggaacaaagagcaaagaagagcacagaaagagacaaacacgaaagagacagggccaaccacagcgcacgaacgcaaagccaaccaaaacagcacaggacaacagaagcagaagaaacaagacacaacggaagacagaaccacacagacacaggaacggaagagagcaggacaagcgcaccgagcggaacgcgagagaggacaagaaagagagaacgagaagaggaaaagcagagagaggaagcacggacagaagagaagagaaccgacacgcagcgcagacgagaaacgagaaagaacgagaagagaagaaggacgagagagagcagcgacaccaacagcgaaggacgccagccgagaagacccacagcgcggggaaaagcaagagaggacagacacagagaggacagcaagaaagaacagacagaaagaggacagcaagcaagacaacaagccgcaagaacgcacacgaaacagcaccgcgcacagaaagccagaaacgcagaaaacagaagaacagacaacagagcaaggagcagatgacagcacagcaagcaacgcagcgcacagcagcagagacagaaacgcacagatgaataggcggagcgagcgaaaagaagagcacgagaagaggtcaaagaagaagagggaagagaaagcaaggagagggcagtggaggaggccagaagaggagaaaggagagaggggcgaagagaggcagacaacgggagcgcgccggggcgcaggcaggcaagagcagcagacgagcagggccagaggaagcagaagggagcaagcaggaggaggagatagaagagaagaagaggggaaggagagagagagagcgagagggaacgaggagagagcggggaaaggagaggggaggaggcgagcgaggcgagagaagaagcaaggagagaagcagagcggagctcgatccacgatcaggcagcgacagagaagagcgaaagcagaggaagaagggagacgcgagctcgcagcaggcgcacgaggacagcggccgcaggagagagaaagcgg

SEQ ID NO: 662993 - DNA, 960 bp, Homo sapiens
  misc_feature (796)..(796): n is a, c, g, or t
gtgctccccccacggagcccgcggcacataacttctcgcagcgttgtactcatgcacagaagaacggatgtgaagacaccaagagagcaacgcttttcatagttggatatattattttatgaattttttctaatttttgcttctttgtgagatacaatagcgacctactttttataatacgttggtgattcgctcacgtgacctaataccttagacgtgaatatcgttctacagaggacatacaacttcagctcttgaagctacaaagaagggggcacaggatcattaagatcagcacactgatgggagtaactctataccgctaggacggactctggaatattccgctagggccacgttgcccattaaaggcactgaacaattcctatctccaggcgtcccgacaacacgctaaggatgcaacgggactcagcgcggggaagaaagtgctcgtagacaaacgggacccctgtctattccttaccgcgacgcgactatccacgtggtcctgcgtcccttgcgtgaacggtagccagccacggttccactcgcaccgagggagaaaagaatggatggagactacgttagtttcacttcatacagatgtaagaatagatcatatcctcaacgccgctacctgacgcttagcgagcctagtcacctgtgcccagagggtggcccggattcttacacttaaggccgctgagacacccgcgcgcaccctcagcccttctctaactcgccctccttgtatggcgtttggccgttcgtcgcgaggctgccgctccgacgctgntctaactattgcggagtgcgtgcgccgcgcctgtcacaccgtaaactctttatcatgtcgggaaatacgactaactcaggacgagcagacagctgcgaatttacgccacacctttccgccgatattgcatgcctcgcttaaccatcacctcgcgttagagggcg

SEQ ID NO: 662994 - DNA, 204 bp, Homo sapiens
gcatctattgaaccgataataggaagatgctgaatatgagccattaagaatctgtctccccacctagacacacttgcactgtctagaatctaactgttactattttggaactctggagactgtttaatgcttacagatttccaagaataggcttcagattactaaatgtatgttcagttatcggttcagtacacatgctcccga

SEQ ID NO: 662995 - DNA, 188 bp, Homo sapiens
tagtggagcttacttcagctgggggaatcaaaaataaataagtaaatagagagcagtgagtgctgtggagagccatacagcagtgaatgtggggacgggagcaccagtggtggacatgggtgattagaggaaggccccatatgagaaacatgggatgacagcctgagacctggcagaaacgtgaggtg

SEQ ID NO: 662996 - DNA, 452 bp, Homo sapiens
  misc_feature (25)..(25): n is a, c, g, or t
  misc_feature (78)..(78): n is a, c, g, or t
  misc_feature (127)..(127): n is a, c, g, or t
  misc_feature (131)..(131): n is a, c, g, or t
  misc_feature (135)..(135): n is a, c, g, or t
  misc_feature (153)..(153): n is a, c, g, or t
  misc_feature (164)..(164): n is a, c, g, or t
tttttctatatatttttaatgatcnaaacaaagcatctaaaaccgcagtttctggaagaaccacttgtcttgcctgtnttgttttctaaaaggaaaaaaagtagaacaccatggagaaaggaatggnaatnatgnaaacctaatcccaccttncacgaccaaanctaattaactttttttaaattgaccttggcctcccgtcgggccttgcgtttaagagcaggatctctgaagacatccttattgacgacagttttgtccaaggggatatccacagagtacctggggacaaaggtggagaggcaggattagcccacatactgccggggcccctatacagcccaaatccttgtgggacactagggaatcagagtctgactccttagaagcaaccatcaaaagccatgtcccgatgacattatctgaaaattcacacttttttttttttgaga

SEQ ID NO: 662997 - DNA, 510 bp, Homo sapiens
  misc_feature (19)..(19): n is a, c, g, or t
aaattttgccctggggccnagaattcggcacgagtttttttcaaagaagaaatacaatttatttcaaagaagatatacaaatggcccaaaaagcacatgaaaaggtgctcaacatcattagcccactggggaaatgcaaattcaaaacccacattgaaaataccccacttccgtaccccaacaggatgactaaaataaaagagtcacaaatgctcataaagatgtggaaacagccaagtgtggtggctcacacctgtaatcccagcattttgggaggccgaggtgagcagatcacctaaggtcaggagttcaagaccagcatggccaacacagcaaaaccccatctctactaaaaatacaaaaattagccgggcatggtggcgggcacctataatcccagctactccagaggctgaggcaggagaatcgcttgaatccagaaggcggagattgcagtgaaccgagatcgcgccattgaactccagcctgggtgacagagcgagattccaa

SEQ ID NO: 662998 - DNA, 241 bp, Homo sapiens
cccacaaaaaatttaaaaaaaaaaaaaaaggtcaggcttggtggtgtgcacctatagtctcagctacttgggaggctgttgtgggaaaatcatttgagctccaggtttgaggctgcagtgagctatgatcataccattacactccagacgggtaacagagcaagaccctacctcttaacaaaaaacaattaaacaaacaaaaaagatttgaacctaaaatttcaaaggttagtccgggcgc

SEQ ID NO: 662999 - DNA, 394 bp, Homo sapiens
  misc_feature (55)..(55): n is a, c, g, or t
cggaaccacaaggtcgggaaaatcgaaaactacccctggcccaacatggtgaaanccctgtctctactagaaatacaagggttggctgggtatggtggcgcacgcctgtggtcccggctgctcgggaggctgaggcaggagaatcacttgaaccgggaggcggaggttgcagtgagccgacatcgcgccactgcactccagcctggtgacagagtgagactctgtctcaaaaaaaaaaaaaaaaaaagagaattgaatgttttcattcaaatgtgaatacaacattgtatttaacttggaaattctgaacaaatgtaagatggcagtgttggtggcagattcttttttcaatggcatagtgtcatattttagtttcattcatattggcctggtt

SEQ ID NO: 663000 - DNA, 874 bp, Homo sapiens
gagcgggtcgcccgcgcggaacggcagcaccatgctctacgtgggcgtgctggcgcagcaagctggggctgcaggtggtggagctgccggccgacgacgagccttccggcactgcgtcttcgtggaggaccgtggccgtggctgtgcgacggagcacggccctcatcacccgacccggggcgccgagccggaggcaggcaggttgacactgactgaacacgaagcacttacgaacaaacttcagctcaaatatacgtacgagcatgaacagatgaacaatgcaactttagatggcggcagatgttttattcacaggcagagaattccttcgtgggcctttccaaaaaggacaaatcaaacgaggtgcctgaacatcttggcctgatactttttaaggactatgcagtctccacagtgccagtggcagatgggtatgcatttgcaagagtttctgcagcatggctgggccctaacctgatcgcaattgggctctagtgaatctgcaccagaaggcccttaagatcatgcaacagatgagtgaccaccgctacgacgaaacctcactgtgccctgatgacatagccagcaaaacctgtatatatctaaatattcccgcaacaaagggcaccgtctcggctggcaccgaaccccggaagagtatccagaaagtgcaaagggttcactgagaaagctggaacggcaccaatatgcttcgataccccgctgaagccatggtctgaaacttgggaacaaagtgtaggatgcaggctggctcaccttgccttgattccagagttccaattgaaagcacggacacggctaacaatcccttggaaccttggcaaaatccccctaccggcatcccgagcacaca

SEQ ID NO: 663001 - DNA, 149 bp, Homo sapiens
gaacttggcactggtgtgtttgggcccttccatcttaaccctcctaccttgtgtccccatgctagttctgtctttcgtgtgctcgcagaatctgtctgcctcttgccccacctcagaggcttcttccagcctgggcaacagagtgggac

SEQ ID NO: 663002 - DNA, 89 bp, Homo sapiens
gtccccgcctctatcctccgcccacaggggttagtgggcacagggcttatggggactccccgcgtgataaattattaatgttccgcagt

SEQ ID NO: 663003 - DNA, 129 bp, Homo sapiens
attccagggcccctttggaaaaattctttattcttttgcttttttaaaaaaaaattttgtttcatatttaaagcccctgtattagtcaatgtttcgtgttccccattatttgaaccctttgcccctaca

SEQ ID NO: 663004 - DNA, 919 bp, Homo sapiens
tgtggcagcggtgaccgcctcctgggttattttcttttctcccccagctgccccaggttctggtttcccgaatcacttgtgcaaataaccagcaggtgggcagatgtcttttttgcgttcctacggacgcgtacgcgcaagttcgatgcgccggagtgaacagccaggtcccatctctcagccggctcccgggcggtcgctacgcagggaacgagaggacgcgccggccactgaaacactactagcccggaaagccgccctggaccttccaccctggtgcagcgagtctggcaggcccctcgccgcacgacccctccgaccagaacagtactgcgctgcgagccccgggcttccgccgcagcgcgcagcaatctggaggtgccatgaggacaccagtcagtcaagcaacttgatttaggctgggctgcgggcaattcctgacgctgtactactgttcccagatagcctgactctctccatagtcctgcgccctaggtactcgatgccccggcttccaggttgacccggagcgcgcccccttcgtgctctcgtgccgcgttcgaccgtcgcgaggcctccgggtcctgtaaaagcccgaggcagcacaggccgctgactcagcatccagcccgataggccacgtgttggccaagccggaggaaggggtggagtgaacggcccgcgagacctacgtggcgacactcgtgggccgctcttgggcccttccatctggtgtgccgggaggccccttaggccctccggtccatggccgatctgacggcgaatgcctgctccaggttaccgaggccccctgcgtgggaacccgttcggctcaggcaaaccagcacgagggcacacagccatgggcaaggccgccactagcgaaggtgccccggcttccccgccccaaatcccggtc

SEQ ID NO: 663005 - DNA, 221 bp, Homo sapiens
gggggtaaaaccggggggcgcccccaaaggtttttttttgggccccttccccccccgggggttttttgggggggggggtttttgcccccccccccccccccggggtttgggggtttggggggtttttcccaaaaatttttttcggggggggggggggccttttgggggggtttttggtggttgggcccttggcccattaaatccccccgtttttttgggga

SEQ ID NO: 663006 - DNA, 925 bp, Homo sapiens
  misc_feature (226)..(226): n is a, c, g, or t
  misc_feature (250)..(250): n is a, c, g, or t
  misc_feature (510)..(510): n is a, c, g, or t
ggcatggttggtgagtgccgctgccgtgcgtcggtcgcttcgtcttggaagcagtgttcgtgtatcatcatccgattcggcgttactcctcctaccataacgtgcgatgcggccatccgcagatgcgcatcgactcgcgattggaacactggagcagtaacgactcctccttagggccacctatacatgtatccttggcaggcttgctcgaacatacagggccganctgagatgtatgttattcatcttnttgaccggatgcaatacacatgtagatgacatcacctagaagctaccgatgatgatctttataacgaaaccggctcatggtataggcgggctgtgctgcaaagacggtagtgacgattgcagctatccgttgcgagaggccatgagtgacaactgtaactttatgcatcaggggggcttctcatatttatcgagatgaagccagttggcattgatggtgttgcatagagatggtggtgtgacaggggccaaatatgggtntcctggccgtatgttggggggccttatggaaagaataaacggacgaaaggcgaattagggtagtcgaaggggtctgcaaaggtgtgggatataaacgggagcgatggtgcggagtatgtaggttggtcactagccaagtgtaagatcagacaatgggtggagcagggaaaaggattgccgtagggtgcgtgaaaagaattcgcaaaggaaggaacggaatgggaattgttcgtaggcacatttgtgttacactgtgattaagtaatcagaggacgactgggacggttcacttggaccccctttgggagagaggtggctgtaacagtaggcgggcttggccgaattaacgtagaacaacgagagtaaggaactttgggatttgcttgctagtttgaaacttaatttggattggagc

SEQ ID NO: 663007 - DNA, 623 bp, Homo sapiens
gacagatagcactgggcgctagtcatggttctggaatgcttaaccgactgagtatgcgtgagatgacagcgcatgtgttcatccttaaccttttccttgccaatgatacatgtttgccgttgacgaatgccttacccccataactatggcgcagtactggcatctgaactcatctacccgcactagacgctctcacgcgattcatgtcccatgctaatgccctgtgagtatttggtttgcctgcactccggccttaatgcagaacgcgctgcaaggcattgtaaccctgtgcagcctttatgctgacactgttgaggatgaccttgtgtgctcatgtgtctatattcttagatcttctactcgtaactgagatctattggaagtcatcagagcctgtaactccatggctacattgtgttactgtagacatgatattgtattgtaacatctggacaatctgtcgagagtagctagagcatcctgagggctgagatcgatgatactcatatcgactaatacccgtgtttaccagcttgggcttcatggttcactactgcggcaactgagccgaatggttgccctccctgcagagaaccaattatgaagtgatccgggctgggccc

SEQ ID NO: 663008 - DNA, 237 bp, Homo sapiens
ccgatcatagtcaggaggtcgagacatcctggtctacattgtgaatccccgtctctataatgaattctgatcattagcctcgtgtggtggcgacacagctgtagtcccagctacttgtggaggctgaggcagaagaatcatttgaacccaggaggcagaggttacagtgagccgaggatcgctgctcactgcattccaacctgggccaacaagagtgaaactcttgtctcaaaaaaa

SEQ ID NO: 663009 - DNA, 827 bp, Homo sapiens
  misc_feature (281)..(281): n is a, c, g, or t
  misc_feature (399)..(399): n is a, c, g, or t
  misc_feature (426)..(426): n is a, c, g, or t
  misc_feature (768)..(768): n is a, c, g, or t
atgaaagtcagacagaagaagagaacgactacacaaatctggatgcctcaccaacttataaaggcgcttttaatgtgattacacgaatcaactcaaggagatcaaaatctaagatatgatgcactttcaagtgaaaagctgaacctctcaaaaagatttggaaaccaggcctacgcagcatgagattaagactttataaacacgcaggtgaagaagctggaaaaagcgccttaagagaagaaagatgagcccagcaaatataatcagcaacaggccctaantgaccagagatactttcaggtgctgtgtagcatcaattcaattatccacaatccaagagctccagtaataatttataaacagaccaaagggggagtccaaaattttaataaagatctngttcaagattgtggatttgagcatctngttcctgtaatagaaatgtgggcagatcaactgacatccttaaaggatttgtataagtccttgaaaacactatctgcagaactggtaccttggcttaatttgaagaagcaggatgaaaatgaaggtatcaaagttgaagatttgttgtttatagtagatactatgctggaagaagttgaaaataaggaaaaggacagcaatatgccacactttcaaactttgcaagctattgcttctcacttccaaaagttatttgatgtgccttctttaaatggagtctatccccgaatgaatgaagtttatactaggcttggagaaatgaacaatgctgtgagaaacctncaagaactcttagaattagatagttcatcctcattgtgtgtgctagtaagcacttgtgg

SEQ ID NO: 663010 - DNA, 198 bp, Homo sapiens
tccccccgggggggggggggggccttcctttttaaacccggcccccccccaggggggggttttttttaaggggggcggggggcttttccccccccttggggggggggggcccccccctgggcccccctttttaaggggggccgggccgggggggggttttttctttaggttttttttttttaggggggggtttgggga

SEQ ID NO: 663011 - DNA, 258 bp, Homo sapiens
tcctcctgagctcaagccaacaaagcacgatagagaaacacagctgaagcatggtcagatggtctccctgcatacgtgctccatgggtagcatctatgtgccagccttcgtaacattacccagcatgaagtgtaatttacagatttgtctcggatgtgactggagtcatgcaagtaattgatgaactgtattgtctaagtgtaaagatatgtctgccgttctccgcgtggcgatggtggggatcactcatagagtcga

SEQ ID NO: 663012 - DNA, 124 bp, Homo sapiens
gggggaaccccaaaattttgcctttttccggggttttgtaccccaggttttccctttgggattttttagggttgtttattattccgggggttttgggaaataaacttttgtttcccgcccccca

SEQ ID NO: 663013 - DNA, 229 bp, Homo sapiens
aagaggaaggttttcggtaagaggcccaaaaagaggccttaagcaaaaccccccttccccccgggttttccggttccctaaccgtttttatccaatggcccctttccttccccccaaaattggggtttccgcccctattctggtttttggtttttttttttggggggggttaaaaccaggcccgggccaaaagaagccccccaataaaacctggttggttgaaaaaaaa

SEQ ID NO: 663014 - DNA, 391 bp, Homo sapiens
ggcctgtacactgtgatatgcccagtgagtgagactggagctctgatctaatacctttgacattaaagtttgtgcagtaaaccagatatgtgagtttgccacatttgtgatagtgtgtcaataaattttcacttaaagggttaatattaaagtgggagcaagaattcatataccttaattggctttaacaggttttcttttcctggaaacacgatgcatatgtacacatgcacacagattggttacaatatcagcacgtgaaagggctttgcgacattgaagtcggcactggtttggtgccttttttgtgtttttggctcggtggtttgactgcgaggctttttggatagttttatatggtaggtggcttacacttgggttttataggcac

SEQ ID NO: 663015 - DNA, 854 bp, Homo sapiens
gcttcagtatgggggctggtcaccagaaacaccaaggcaggattaaagaattgaaagccagacacagtggctcacgcctgtaatcccagcactttgggaggccaaggcgggcagatcacttggggtcaggagttcgagactagcctggctaacatagcaggactccgtctctactaaaaatataaaaattggccaggcttggtggcgcccacctgtggtcccagctgctcgggaggctgaggcaggagagtcgcttgaacccaggagacggaggttgcagtgaacaacactgccctccagcctgggcaacagagagtgggattccgtctcaaaaaaaaaaaaaatttgtggggactttcagccccactgtaaacctaccaaaccctggggaggagggaaagcgttagggttaagctgatcaccaatgggcaatgatttatcaatcgtgcctagatgatgaggcttccataaaaacccagaaatgggttcagagatcttctggatagctgaacacatggggtcctggagagtgacctgcccgggaggacctggaacgcctctgtgtctttctccctaatacaatctccttatcgggtatcactggtagttccctttttggtaccccgtcaggtggcagtttgtgtttccccaggtcctggggttcctccggcaataaaacccacaagtgggtcctggagcccacgtgtaacgcgttttcgaggtcggaaccttcttgacggcggccacgccggctttgggcgcccccaccgcgggctgaggttccgcagcgtggcgtgatgggggcccccgtctgttgcactgtcgtcgggggggcgccctggctggatgtcgtc

SEQ ID NO: 663016 - DNA, 1143 bp, Homo sapiens
ggattgtgaggcctccccagtcatacggaactgtaagtccattaaacctctttcttttgtaaattgcccagtcttgggtatgtctttatcagcagcatgaaaatggactaatacagtaaattggtaccaggagtggggcgttgctgaaaagatacccgaaaatgtggaagctactttggaactgggtaacaggcagaggttggaacagtttggagggctcagaagaagacaggaaaatgtgggaaatttagaacttcctagagacttgttgaatggctttgactaaaatgctgatagtgatatgaacaataaggtccaggctgatgtgttctcaaatggagatgaggaacttgttgagaactgaagtaaaggtgactcttgttatgttaaagagactggcggcattttgcccctgccttagagatttgtgaaactttgaacttgagagagatgatttagggtatctggtggaacgaaatttctaaagcagcaaagcattcaacaggtgacttgggtgctgttaaaggccattcagtttcaacaaggggaaacactataacaaaatttgagggggtgcattaaagtttggcaaatttgcaggctgacaattgccaatacgaacagcaaaatcccattttcttgaggtgacttggggtgctgtctcaacggcctttcagtttcccaacagggcaacattctgcgtaaacaaacatttttggacgagtgcatttagaggtttggcgaaacattttggacagccctgtggcacatgccaagttcgaaaaagaaaagatccaagtgccacggccaccggctgaactcagagcctgtttaagtccccaggcacctttgtgaaaggccaaggccaagcgggatcacatttagggtcggacagttcacgaacacgtccctgtagcacaagattgtgagaaaaacccccgaattcttctttgaagaattttcaatatgatgcccaggaggttgtgtggcgcattgcctgtgaaaccccagtaaatcacaggagagcagttaacacgggagaaagtgttggaacccccaaagagcacaagtgtcgcgtgtgacttgtgatacatgcccatggagccctctgccctgggacacagagagtggaaatcgcccgta

SEQ ID NO: 663017 - DNA, 281 bp, Homo sapiens
tttatatgagacagggtctcactctgtggcgcatgcttggagtgcagtggtgcgatccttgggctcactgcaacctctggcctcctgggctcaatttattcagggatttctaagtctttctctctcaggtgctgtccagaagtacccaagatacaattacctgcaacagcttctgatagtcctgtctgtactcagttctcagccattggccattttcttcccccaagtctcagaactcttaactggtgccctccccctcatttctatctttgcatgcagga

SEQ ID NO: 663018 - DNA, 228 bp, Homo sapiens
  misc_feature (1)..(1): n is a, c, g, or t
  misc_feature (3)..(3): n is a, c, g, or t
ntngaggatacatttgcgtaactgggtttggtttagtctacctcaatttgcctgctatgatggatatgattgagacgagtgaggagaagcgcttacggtttagtcgagggacagatttggtatattgattgagatgggtgcgctactttatagtcatgtagagaagcatcaggccgcgtatgtcagagtgggtgccttgaggtaactttctgggactcacgaagtgaa

SEQ ID NO: 663019 - DNA, 107 bp, Homo sapiens
gtatgtaggctgacgtgtattcaccacgtgcggtgcttgcctcctgtacaagttccgtcgacaagtgagcaccgtgctgacctccaaatatcgttcagctggagcct

SEQ ID NO: 663020 - DNA, 1586 bp, Homo sapiens
gcattgcatgccctagaccagagttggtggctggacctcctgcgacttccgagattgcgatgctgtacttctcgtttgtttttggtgctggctctgagcctctgcagagatgtgggcagctggtcaggatggccattcggtgctcagcacagcaacgcagcccagactcagactggggaagcaaacagtggctggacaggccaggagagcctgtcggacagatgatcctgagatgtgggagtttgcatgcagagggagaaggacaggacagatgtcgctggcctggagctcattgcctcagagcaacttctgcaagccgcagctgcagcctggagtgccctggaggatccatgtactggcaacaaccaagatactacgagagaggttatcctggccaaaaagatcactatggcgtgagcagcagcagagtggtcggcatcgaaatatgaggctgcattgtgccaagacagcccggagccataggacaaggacatgatggacacattggaatacctgaaacagaagcgggaagatcagacggtcccagacacactaactaccggggataacaccaagaccaaacctgggagcagacataccaacagaaccatcacatgcaaaccccatccaacgaaacccggaaatccaatgaggagacatgatacgaccatggaaccacggaaagagagcagaaccaatcagacaaagaacaacagagacacaacacatggatcatggaccggtcaaaagaagcgcgaaagtactcaagaacacacatatagacaaacctaacgacagcaacgaaacaaaaatgaaccgactaaataacaagcccacaagcccacccgacaaacaaggcgaaacagcagcaatgggcagacaagccaagcacgacatggggcacaccaggaaccgaggcgccacgaacgtatccaccgggagcacaaatgagaatccagtacacgttagacgttggacagcacaagaagcagccgctaaggacgacagcgaagccacatggacaccactccgccctcagcacagtgacgaaacaaggagtcgagacaagagacaggacgcaagggcgagacaacatcgtacgtgcacaagcaaaagatgaggagaccagaacacagcaacgtcgacgatcgtgacacgagacgaacacacgagaacaaaagcacaacaacagatagaaagagcaagagacaaacaagaacaacagacgaagagaaagtcagaggagcatactcggctgaggcacccgcccaccgagccaccgctaacagacagacacgggacaagaagatcagccacaagcaggaagcacaacaaacgaagataccacgcacaataggaagaacagaaaaagaagagagcaacaaaaagaacgaacacaaacacacacacaaaaacacaagaacacagctacagaaaagaacaacaagcgaagcgaggacgaaaaagagcagagaagacaaaaaaagagagatacaaacacagcaagaaaaaacagaaaaaaaaacacgagaagaaaacagacagaacacagaagacacacgacgacgagaaaaagcagcaacgaa

SEQ ID NO: 663021 - DNA, 252 bp, Homo sapiens
  misc_feature (115)..(115): n is a, c, g, or t
  misc_feature (129)..(129): n is a, c, g, or t
gaaaaataccatgaactatgattaaaaaaggaaaaggattcaagacctagcacaaacatattgagtgatgaaatatttgaaggtcaaggataaggcaagggggatctgggatggnggccacagccaatnactggctggtagaagtagaacaggtgggctccactgcttccaggagggacagctgtgagatgccagtcaggttccagctccctgtggggatcgggctgtggccaggtgtcaactcaacccaca

SEQ ID NO: 663022 - DNA, 342 bp, Homo sapiens
tttttattttttatctggtgagacagagcttgctctgttgcccaggctggagggcagtgtctcgatcttgactcactgcagccgatgcctcccgggttcaagcgattctcctgcctcagcctccaagcagctgggattacagacatggaccaccacgcctggctaatttttgtgtttttagtagaaacggggttttgccatgttggcaggttggtcctgaacacctgacctcaggcgatccacccgccttggcctcccaaagtgctgagattatagacgtcagccactgtgcccgaccagctcccacggtcttgagtcctggcacccacacatttttttttt

SEQ ID NO: 663023 - DNA, 157 bp, Homo sapiens
ccagtgactcttttaccagtgcaactcccaggaacatgagagagtggctcaacgtggccatcacccggaccctgcaccagtgcgaggagagccttttatgagctgacgcaaacagatctgctctttaccagcagacagcaccagagcagttcccctc

SEQ ID NO: 663024 - DNA, 114 bp, Homo sapiens
atcccctgaggtagaacagcatcgacacatccccaaccagctcttcatcaacctcactgacctactatacctggacctctgcaatgaacccacgctggtacctgagctcgaatt

SEQ ID NO: 663025 - DNA, 375 bp, Homo sapiens
actgagtggctgcattgtccactgggcgttctctgtgagaagaagaccttgcttggccaggactcgcagtgggtaatctgtttcatcgtcctcgggctaccgtcatggtgactggtgacagggagtgaacaaagctggctctacccccaggcagttgtcagtttcgtacccttgggagcaatgcagttcctcttgtagtctgtgacagtgttgccaattccattgcactccttattttctgaggaaactcctgtagtattgcagtaggctcccagtgaggaacagagtgtatatggtagggaaggcaaactcacgtgtgtgaagaacctttcagtcaccattgcgccagctccgtattcgcctgtttccggaaaa

SEQ ID NO: 663026 - DNA, 112 bp, Homo sapiens
ctcgagtagataaaactatacaaatcttccaagtgatcatacaatcagtgttctcagtacaggctactttaaagcgaactctggatgataagtcagacaatgactcttataa

SEQ ID NO: 663027 - DNA, 356 bp, Homo sapiens
ggactggcacactacacccattttcagtttttcttcgtcttaagacactcagccaagcgtggggctcatgcctataatcccagcactttgggaagctgaggcaggaggattgcttaaggccaagagttcaaatcagcctgagcaacctagtaagatcccctttctgcaaaaaatttaaaaattagctgggcatggtggtgtgcacctgtagtcccagccacttgggaggctgaggtgggaggattgcctgaggccaggagtttgagacctgggcagcatatgaagaccctgtctctaaaaaactaaaaataaaaaatagccaggtgtggttggtgtgcttgtggtcccagctactc

SEQ ID NO: 663028 - DNA, 333 bp, Homo sapiens
ggccccttccccggccccttttggggggggggaggggccaatatgggttttcccgggggggggcctttttttaaaacctccccaagggcccgggggggggggtttttttttaaaatccgggatttttttcccggggggggggtggggaacccccacctttttgggggggaacctttttgggggttttttaaaatttggggacccatttttttccacccccccggggggccgggttttggaggggggggggaaaaaattttggtttgggggtttgggggcccccccaaaaaggttttaaaagggggccccttttttatttttttcgccctttga

SEQ ID NO: 663029 - DNA, 126 bp, Homo sapiens
ccggagaaggataccccaaatcagtaggtcaaaaataggcataatttaaatatcacaagtaggtctaaagtgtcatctaggcatcttcttatctagtagccaggtacctcttagatcttatacata

SEQ ID NO: 663030 - DNA, 401 bp, Homo sapiens
tactcaattcaaggaagagagatgctgtaataggcttacttagagagtacaactgatgagattagaaattatgacaaatgtctcatagtatcatcaagagtgagtgatgaaaacactgagaaaggtcttatataacctagagaggacaaataattaacagcgcaataggcctttcaaactcataggttagagaatggaggtaggtcgtatgtatacacctcttaataactgaccctgggcctagttgtctacctgatactgattctctccttcattcttactaatagaactctgatcttgttaaggaaagcaatgtatacaggtaacaatacatttactggccttatatgcagataaaggggccataaggcccaaatgactaagggcaggtcagtacaagt

SEQ ID NO: 663031 - DNA, 788 bp, Homo sapiens
  misc_feature (499)..(499): n is a, c, g, or t
  misc_feature (506)..(506): n is a, c, g, or t
  misc_feature (533)..(535): n is a, c, g, or t
caaaaaccatcattgcagctagaaaccttgaatgcagtcggaaactactggagtcttacactctatgctcattatgagctaatcagtaatctgtataaacagatgtaggcaataccttgaaagatactgtagactatatatgtatagatagatcatattacccattaaagtctgggggacaaaagtggaattccactcttcttatgtactgaaaactttactgacaaaaggtgatgatgaagtgcattctgtagcagacagactgcagcatatgctttaaacccagcacaaaaggctgtgtccaggtgcagcctccttcacccttcctgcccacggtgaggattgaataaccaggacttggggatattgtttgttgtcagggttattctgtgtggtaaggaatattgtttcacatttatacattttctttttccactcacgtaagtttctatcttgagagcatagtccaaagtgcaaaacttggtgtttacaaggaaanttgtctnccagaactccactgtcatcactttcannnaaagtggaagtttgcatgaatatgctcagaatctaatattcaatgttctgttacattgtaagtgaagtccagctcaaaatagatttaataaattggatttatttggaccaaagcaaaggacgggaattccggaaggaatttgccttaatcccaatttttcccactttgaagaggaaaaaaattaatggggtggtaaggaaaatccgaatattggcttcataagaagattattattgaaattaaaccttaaacc

SEQ ID NO: 663032 - DNA, 150 bp, Homo sapiens
ccctagccctgccctttttctaaggccccgacaggtcagagtgcgcaactttctcaccccgtttgcccaaacaatcctctcaggaagggaggtaggggcctatacaaattttccgagaagaaattagagcctaggcgtttgccccccaaa

SEQ ID NO: 663033 - DNA, 370 bp, Homo sapiens
  misc_feature (4)..(4): n is a, c, g, or t
  misc_feature (49)..(49): n is a, c, g, or t
aatntcaaagagaccatggcccctctccgaccagagatttcaagagcanccacagtggaatgctgtgatctcaaaactcataacgtttggtaaaaactcagtaggctttccaggtcgatcaacaaaaatgaaacttaaagcagcttttcacttaacatcaaagcaagaagaaatccatcatgtgaccttacacttcaatacttgaaataggagcatgttacagataatatacaggtataataaaacggactatgactctttacattgaattatgcattagagtgggttactataaattgaatccaagccatgtaactccatgaaaataaagtatatggcgacgctcagaaatatcatagtaaaaaaaaaa

SEQ ID NO: 663034 - DNA, 158 bp, Homo sapiens
catgagaatggctcactgatggtggctgctacatacctgggctgatgatgccaatgtggttctgtgacctgtgacctcgaggtggacaccactctcaatgagcctagagccagacagatcgatgaacatcctgtgagcccagatgggcagcctgcaag

SEQ ID NO: 663035 - DNA, 334 bp, Homo sapiens
gtggtgactttgccagcatgttagtgccacgacgttgccaaaccaatgggtcaggttttctggcgtgcaaattgatgtgccattccgatttaaaagattgtgatactaccgtaacaaaaaatggcaacgttcacctgtaatggcactgcggagtactactcagtatgacaggcgtttgcttaaccaaggccttgatcctgattgctgcatacaaacgtggccgctgcaaatgctatatgaatgatggtacagcggccatcacgccagagcacagaaaccgggaacatgttgttgcaggatggggatcagacgttgactttaaagttgattatat

SEQ ID NO: 663036 - DNA, 872 bp, Homo sapiens
  misc_feature (778)..(778): n is a, c, g, or t
ttggcacgaggcctccgccgccgggcgagcgacacgtctgcggcccttcccctcccttcccttccctccactcccatcccccggctcccggagacccacgtaccccgaacccagatggccgaaacgggctccccgtcttaactgattttgtgtgtctccctcgaccaccacctctttgtgcagcagccccgggcagacctgttccgagggcaacgcgtcccacagtcggcccccaaccacacgaccccggaatcatgcatcggactacacggatcaaaatcacagagctgaacccccacctcatgtgtgcccttcttgcgcgtggtacttcatcgaggccaccactatcgtgcagtgctgcacttccttctgcaaaacctgcactcgtgcggctacctgtgagatccaacaaatactgcccatgtgtgacgtgcaggtccataaaacccggcctgcagctcgagcaatcaggtctgacaaaacacgttcaagacattgtctacaaaattggtccctgagctattaacagactgagatgaaacggtggagggacttcctatgcagacgtaccccactgaacggaggttccccaaggggttcaattggagcgcaccggaggggaggttcatgcgagcaagcagaaagggggctctgagtgatgaatgagattgctcagccatcttccattcgaaattcctaccaaggtctccaggaaccgggacaactatgaagcggcccccgtgagcacttgcgatttgcggacacagggacaacacgncggtactgatctgtcacgttcccataatcgagtgagcgcactcactttgccggattccccagaagtattctcacatatcaaggtagtccgtgat

SEQ ID NO: 663037 - DNA, 123 bp, Homo sapiens
  misc_feature (13)..(13): n is a, c, g, or t
  misc_feature (25)..(25): n is a, c, g, or t
  misc_feature (77)..(77): n is a, c, g, or t
ccggaatcacatnatttcgctgggnccctgggtcctgctggcacatggaaaccgtggtgaatctggtccttctggtngtgtccgtcctgctggtgctgtaggcccaagaggtcctagtggcca

SEQ ID NO: 663038 - DNA, 254 bp, Homo sapiens
  misc_feature (41)..(42): n is a, c, g, or t
  misc_feature (199)..(199): n is a, c, g, or t
gtgaactgtgaaggcctctgtgtggtgtcttcctccactgnnttcctgggggctgtttagctttaatttttctatgaaggacaacctggatgattggttaatcccttactgtgggtgggatgtcatctctggtctggcctcggcctgttctcggtagtggggggcttgatggggcagcaggagctgggcaggccatttncccctggtatgggggagcttgttcctaaggctctctgggcagccttcaatggtca

SEQ ID NO: 663039 - DNA, 114 bp, Homo sapiens
cgtttcagcatcactgacgagtccagcgccatggcaatatgggtcacgtggaagccaaagaggcgaatggaggcaacagtggacagcacaatggacaggcaggtggcaaagccc

SEQ ID NO: 663040 - DNA, 273 bp, Homo sapiens
actggttttctcctttgtcctctcgggtcaagcggttctcgggcctcagcctcccgagttgctgggaccactggtgtgtgcctccacgctcagctaatttttgtatttcttgtggagatggtgtttttccgtgttgcccaggctgatctcaaattcctgggctcaagcaatgcttctgtctcagcctcccaaagtactgtgattacaggcatgtcccaccatgcccagactaatatttacttttaatcagcagtaagatatggttactactta

SEQ ID NO: 663041 - DNA, 348 bp, Homo sapiens
  misc_feature (183)..(183): n is a, c, g, or t
tcagagtccctgtgctcctcttcacatctgatcagagtacgtctcatctcttctcatcttctcttctctgtgtctctcctggcaataaccaggctcaggaaggacttggggggggaatcaggaggacactcagcttctccatccttctcagctgcccccaaaggcttgacctcactctcctcncatcactgggttggaccaccaggacttgagctggggcctctgggctggggctgaggattgcggccctggggcagcttctcctttcccagtttcttcgtgtgccttttcctccttctcctcgggcgcctctcctgaacgatactcccaggacctggggtcggagcc

SEQ ID NO: 663042 - DNA, 460 bp, Homo sapiens
ttaaagtacccgccgcagctcctgagtagctgggaccacaggagtatgtcactaaaccctgataattctttctttctttcttttctttttattttcttttttgttttttgttggtttgtttgtttgttttagagacaaagtcacattacgttgcccacgctggtctagaactcctaggctcaatccatctatctcagcctcccaaagtgttgggattacaagtgggagccactgcatcaggcccagatttttttttttttatcctatttggtctaggcccgtttttcccgagactacacattttaataagaagactgggaatgagtcagaccttttttcaaaaactcctacatataattccattaacccgttagaacaaacatctaaggggaacggcagtcacctccattcacaggtgaaagggggaaatccagtggcgggtagctataaagggtaccga

SEQ ID NO: 663043 - DNA, 108 bp, Homo sapiens
caggcaggcagcttaagctcaggagtttgagaccatcctggttaacacagtgaaaccccatctctataatacaaaaattggctaggcgtggtgttgggcgataaatca

SEQ ID NO: 663044 - DNA, 707 bp, Homo sapiens
  misc_feature (388)..(388): n is a, c, g, or t
cttgactgacaacctctacaaggacctcttatcatctcctccgtcaccaaccacatctagccatgtggtaagttgggaggatcgctgtcccattctgacggtgacggcgtgggtggacatcttacaccctgaaggaggatgctcgcaccgaaagcaggagtcgcgcttctgcgtgctagttactgcaactccgtgtgggccacctcgcaaggtagtctcctggccattctctgtgtggtgaagagcaggccagaagccatgactatatgcaggccctgcagtgctgggtaccgtccgcattatgctcaacggagagaactcccgggacagtgtaactcgggaacataacagatggacccttgcgttaggtagcatgcctcccttagcncagtgtgcaggtgcccgagctcctgtgagtcgccttttgctaagagtacgagcttgtgctcggacatagcagatcccatcaggaaccgtgactcgcgagataggtccaataggtcaactgtccccttaggggctgttctgggatatgtcatgttgaagataaccatgcatctcttcggatgatcctcgcgggagctcgcgcgtgaacgtgaccattacgtgcaatcgaccagttggcgttgcccggccgtaaggggactgaactaagagaagtcacgacagagggaactgctgaattgcaggagccccaagaagggtct

SEQ ID NO: 663045 - DNA, 189 bp, Homo sapiens
  misc_feature (26)..(26): n is a, c, g, or t
  misc_feature (167)..(167): n is a, c, g, or t
  misc_feature (173)..(173): n is a, c, g, or t
tcccatttatttggacttttttttgnctctattttcagggaaaatttctatcatataaaagcttatttcagttattataagtgcttattctctggttatttcttctttttatatcatgtcatgtttcatagtagcagtatctctggctatctctctgagtatattanacttanttctacttcagctctg

SEQ ID NO: 663046 - DNA, 1021 bp, Homo sapiens
tcaagggggccccgggggttttttttttggacaaaaaaaacccgccgggggatttctccccgggggcccccccggaaaataacagcggggccccatgtgatctcaaaacctctggggggaaaagtggagcgggcgaaaaaacaacaggtgcctgggggcccaactacacccgccgagctgcaaactcataaagccgtgccaagagggccccgaggaagacctgggctctcgtgaaaaagctcacataaggaacagcggtacacaacaaccccagcggggagggggaggccgcccaccatagcgagggacccccggccagagtgtgtttgtgacgcggggacaccactacaagcgcagcgccctgtgaagcgtgtaaccccacgagaagggagagagggggggtctcttgtggtttccccccagcaggggtgtacccccaagagagttccatggcccctcgcccccaaaaaaaaacaataatagcaccccagaggggtctgtccaagacaagattccccaggcgggagaaccaaaaattataacccagttggatgtggcccacaaacatcatcccctctataacaacattccgcgagagaagaacagcggggagtacgaaaaaactgatgcgcgccgcaggaggcgcccaaaaatcattcagcacagaggtgggccgctccattttgtatgatctctgtacgccccaggatcgagagagtacgcccccaaaaaaacgcgagtggtggacagcggagaagcagagaggagacatctcacagaggatctccccccccccgaagaagtgaatgagaaagaaccctctgtatgaatgcgcccaccaacacatctgtggtcggcccgggggcgccccattttgtgaccgcctccttagaaaagaaaacatcgtcgggccacgaagacgacctccctcctcgtgttgtttgaatctctggaaacaacgaaagagacacaggcagacgaggcaacacactactagtacaacagagcgacgtgtgagaac

SEQ ID NO: 663047 - DNA, 748 bp, Homo sapiens
  misc_feature (35)..(35): n is a, c, g, or t
  misc_feature (70)..(70): n is a, c, g, or t
  misc_feature (96)..(96): n is a, c, g, or t
  misc_feature (105)..(105): n is a, c, g, or t
  misc_feature (107)..(108): n is a, c, g, or t
  misc_feature (121)..(121): n is a, c, g, or t
  misc_feature (134)..(135): n is a, c, g, or t
  misc_feature (166)..(166): n is a, c, g, or t
  misc_feature (171)..(171): n is a, c, g, or t
  misc_feature (174)..(175): n is a, c, g, or t
  misc_feature (182)..(183): n is a, c, g, or t
  misc_feature (197)..(197): n is a, c, g, or t
  misc_feature (204)..(204): n is a, c, g, or t
  misc_feature (206)..(206): n is a, c, g, or t
  misc_feature (208)..(208): n is a, c, g, or t
  misc_feature (210)..(210): n is a, c, g, or t
  misc_feature (215)..(215): n is a, c, g, or t
  misc_feature (218)..(218): n is a, c, g, or t
  misc_feature (225)..(225): n is a, c, g, or t
  misc_feature (235)..(235): n is a, c, g, or t
  misc_feature (246)..(246): n is a, c, g, or t
  misc_feature (250)..(250): n is a, c, g, or t
  misc_feature (275)..(275): n is a, c, g, or t
  misc_feature (279)..(279): n is a, c, g, or t
  misc_feature (281)..(282): n is a, c, g, or t
  misc_feature (309)..(309): n is a, c, g, or t
  misc_feature (316)..(316): n is a, c, g, or t
  misc_feature (328)..(328): n is a, c, g, or t
  misc_feature (337)..(337): n is a, c, g, or t
  misc_feature (353)..(353): n is a, c, g, or t
  misc_feature (381)..(381): n is a, c, g, or t
  misc_feature (390)..(390): n is a, c, g, or t
  misc_feature (419)..(419): n is a, c, g, or t
  misc_feature (421)..(422): n is a, c, g, or t
  misc_feature (431)..(431): n is a, c, g, or t
  misc_feature (451)..(451): n is a, c, g, or t
  misc_feature (459)..(459): n is a, c, g, or t
  misc_feature (465)..(465): n is a, c, g, or t
  misc_feature (474)..(474): n is a, c, g, or t
  misc_feature (480)..(480): n is a, c, g, or t
  misc_feature (539)..(539): n is a, c, g, or t
  misc_feature (598)..(598): n is a, c, g, or t
  misc_feature (600)..(600): n is a, c, g, or t
  misc_feature (634)..(634): n is a, c, g, or t
  misc_feature (637)..(637): n is a, c, g, or t
  misc_feature (643)..(643): n is a, c, g, or t
  misc_feature (646)..(647): n is a, c, g, or t
  misc_feature (649)..(652): n is a, c, g, or t
  misc_feature (654)..(654): n is a, c, g, or t
  misc_feature (682)..(683): n is a, c, g, or t
  misc_feature (726)..(726): n is a, c, g, or t
tttgtggagaccttaggaggggggggggggggggncgcgcgcgcaggcgcgggaccaagtgcagagtggnctctttctggatgttgtagtcagagngggggcggncnncggccgagcggtntcgccagcgaagnncaaccgcgggcggggcttggagggatgcctnccttntcnngggtctnngccttgacgattcncgggggngngncngggcnccnccgtcgngggtgagggnctgaccagtgngggncttcacgaagatttgcatcccaccnctgngnnggggccccaggggcggggggggctctntctgggnggggtgtgaganagggtgcgnccatcgttccagctgnttcccggcgaagatcaacctctgctggncaggggggntgccgttccttgtctctgggtctttgccntnncgttctcgntggggttactgggctccacntcgggggngggggnctggccagngggggncttcacgaagatctgcatcccacctctgagacggagccccaggggcggggtggactctntctggatgttgggtgtgagggggtgcgtccatcttccagctgtctcccagcgaagatcnanctctgctggtcaggagggatgccttccttgtttnggntctttnccnngnnnntnttaatggtgttactcggctccacttcgnnagttatggtcttaccagttagggtcttcacgaagatctgcatnccacctcttagacggagcacca

SEQ ID NO: 663048 - DNA, 210 bp, Homo sapiens
  misc_feature (13)..(13): n is a, c, g, or t
  misc_feature (32)..(32): n is a, c, g, or t
  misc_feature (117)..(117): n is a, c, g, or t
  misc_feature (128)..(128): n is a, c, g, or t
  misc_feature (161)..(161): n is a, c, g, or t
tgaaattgtggtntgtgatgaattgtgtgaanttgagtgtggtgagtttgtgattttaagttttttaagtatttttggtaaggttttagaggttgttaggtgtaattgagttattgntaaaatgtatngttttatgtggtttttggggattggagaaaganaaataatagtgaatgttttgatatgaatattgaaagtgttttttaatat

SEQ ID NO: 663049 - DNA, 299 bp, Homo sapiens
ggcccccccagggggtccccccacccctggttaggccttgagggttttggacgggctccaggaaccctgggtttatgggaacagtgaggggggtcccctgccccctgccctgccttggaccaggagtttggaaatgcctggggagcccccagcatttggaggggaacctgttcccgtcggtccccaaaaatccccttttttttttggggttaaggaaggggccgaaagatcaaaaagttgtttttttgtaaaatgtaatgtaaatggggtttttagtaaaaaagggcccctttttccca

SEQ ID NO: 663050 - DNA, 620 bp, Homo sapiens
  misc_feature (501)..(501): n is a, c, g, or t
  misc_feature (503)..(503): n is a, c, g, or t
  misc_feature (516)..(516): n is a, c, g, or t
  misc_feature (520)..(521): n is a, c, g, or t
  misc_feature (559)..(559): n is a, c, g, or t
cggctcgaggggagatgagtgtctgcctatgggtagcttatgctagatgttgtaatttcatagtctgttttcttgcccctgtagaaatttgggattcaactgaaagaaattgacaaagaagaacacctgtatattctcatcagtacccccgagtccctggctggcatactgggaacgtaagatgggaaagaaggtggaacatggcctttctcagtggtgctttttttctaggagtttcacgtagatcagggtccagggttcagggtcacatagcaggtcatgggcagagctggggtataattctcccctagctgaggaatattggggaggctagatgggcaagctggttggggtctctcatgcaaatggctactgtcctcttggtgattctgggtgtcatcttcatgaatggcaaccgtgccagtgagggtgagtggctggacctgcagcttggggttggccacagcctgatttccatgctttatttccgtcccttgtctncncttgcctaccatngcannctgtctcttggaggcactacgcaagatgggacttgctnctgggtatgattgggctctctcatctcttgcctgtttgtgccatccctttgcaacagtgga

SEQ ID NO: 663051 - DNA, 342 bp, Homo sapiens
tctcggaacaaatttttttacttcctcctcctgttcctccccccccccccccttttccagttcaggatttggagttcaaccctgtttttcaaacagatcatcttgatttttttttttatcccccctccccttcctaagtcccattttttggtcataaaaattgcattattccccctttccaactgggtttttttttccaataaaaaatgatgaaaaaaaaaaaggcttttctttttttgcatgccctttaaaaacaaaacaaaacatttttcaggttccaaggaaaagcatgaaaacggtcaaagcttttaattatttttgtaaataaaagggttcccccca

SEQ ID NO: 663052 - DNA, 486 bp, Homo sapiens
ttcacgcagtgatataatatcaaacgcaaaaaggctgtaacaaaaataagatacttacaaccacagctatatgttgagaaatttaattaaggcagtgtattacaccaaatttttaagaaaaaaaatgtatttacacataaagcttacatttcaagaggtagaaaactgaatcaacaggataaaatagacaaaattgtttatcaacaataggagtaactatagttaataccagtggcaaattacatatgtatgttgtttgtttgcttgtgtaagagacagttcactgttgctcagggtggtgtgcactggcgtgatcatagttcactgcagcctcaaactgccgggatcaaacaatcctgctgcctgagacttctaaagtgctgggattacaggcatgagccaacgagcccgatcctaaatccagattttaaaagaatcataaatttcaagccctgggagaatatgaagatgaacatactacccaat

SEQ ID NO: 663053 - DNA, 541 bp, Homo sapiens
ctggtccattctgtacgttctgctcccagggtgcctgcgctgcctcactcaaccgacagtccctctctgcttgtctctctctctctgtgtgtggtacggctgacacagtcacctcttttgcctttgttggctgatttgcacatcatgccagcgtcgttcagtcttgaagggcggggagtgaattgcgctttacttttgtatctcctgcacccagtctcaggatctgttggctcagagtgagacctcagtggttgttaactaactgaatcaaaaaatagcaaaatacttatgagtaccaggctgaggctcagaagaattaagacacttcacagaacaaacattaaggggtgaaaaaaaaattggagagatagggtagataaggaataggaagagaagatgccaaaaaaggggcaaattaaatttccttatatggaagaaaaggcaagttcttgcttttgctttgattttagtaaataaattcagaaaaatatgtttagcactaagagaattgacagattgttcacctttaaaatttgtttaa

SEQ ID NO: 663054 - DNA, 144 bp, Homo sapiens
agtttgggggggggggggggtaagggaggggatggtttttttttaatgtttagttttttttttgcctgaaacgccctgttggggggtttttaaaaaacttcctccgggtttaataaaaaaataaaaatttttaaacctgcttta

SEQ ID NO: 663055 - DNA, 1073 bp, Homo sapiens
  misc_feature (1030)..(1030): n is a, c, g, or t
gcacgagcaggactagtgcgactactactgaaagtaccaactccagcactaatgctactaccactgccagcaccaacgtcaggactagtgctactaccactgccagcatcaacgtcaggactagtgcgactaccactgaaagtaccaactccaacactagtgctactaccaccgaaagtaccgactccaacactagtgccactaccactgaaggtaccaacgtcaggactagtgctactaccactgaaagtaccaactccaacactaatgctactaccactgaaagtaccaactccagcactaatgctactaccactgaaagtaccaacgctagtgccaaggaggacgccaataaagatggcaatgctgaggataatagattccatccagtcaccgacattaacaaagagtcgtataagcggaaagggagtcaaatggttttgctagagagaaagaaactgaaagcacaatttcccaatacttccgagaatatgaatgtcttacagtttcttggatttcggtctgacgaaattaaacatcttttcctctatggtattgacatatacttctgcccagagggagtattcacacaatacggattatgcaagggctgtcaaaagatgttcgagctctgtgtctgttgggctggccagaaagtatcgtatcggaggatagcttgggaagcactagctgtggagagaatgctgcgaaatgatgaggaatacaaagaatacttggaagacatcgagccatatcatggggaccctgtaggatatttgaaatattttagcgtaaaaaggagagagatctactctcagatacagagaaattatgcttggtacctggccattactagaagaagagaaacaattagtgtattggattcgacaagaggcaagcaagggagccaagttttccgcatgtctggaaggcagatcaaagagttgtattataaagtatggagcaacttgcgtgaatcgaagacagaggtgctgcagtactttttgaactgggacgagaaaaagtgccnggaagaatgggaggcaaaagacgatacggtctttgtggaagcg

SEQ ID NO: 663056 - DNA, 293 bp, Homo sapiens
cgcgggcgcactgcccctcccttgctccctcctcttccctccttcctactcctagtttcttccctcacttacacgcactatgcttacacgaagacccgaaaaaaacaacaaggagagaaccatagcaaggacggaaagcgaaaaaggaccggccagtggcacggaagaaaagtagagaagcaactgaccgaataaaggagcaaaaaatgaaaacaaagacaaacagcagacagaacagcaggaaaagaagagagagaaccaacagaaaaggaaatagaagaaataagaaagag

SEQ ID NO: 663057 - DNA, 379 bp, Homo sapiens
  misc_feature (121)..(121): n is a, c, g, or t
tttgggggatgagaagttgggcagggattaaaagctttctcaaattggcccacaacccctcagctgtatgtgaaaggggagctggtgggaggattggattttgtgaaggacctgaaaaaanaatggtggattgctgcctatactgaggggagaaaattaataaattttaaactgggggcccccctatggtaagaaatatttaattcccttgggggcggttcatgatttggtccccagaaatgggctaggaatagaaaattcctgctttttcggttacatgttttggggttttcccaatgtgggggtaaataaagggatggtccctttttttcccccccaaaataggatgccataaaccttttccaattttttcccatta

SEQ ID NO: 663058 - DNA, 867 bp, Homo sapiens
ggcgagtggagtgtccgttgtgcccgggactgcctcatgagcgtcccgggcttcatcgaccatcattgaataacgatcacgctgctgagcttccgtgcttatctgacatctagaggagctgatattgctccaagacaaactcggaaggctggacttcatgttgatgttagctcaaattattgaacgcctgctgatgtgtgctctgaaggaggatgataaagattgtcgcaacagtgtgagtgaacagctgtggtatccctactcttgatcctggcaaccaagtacaagcaagaagcgttttgattagaaagcctatgctgaacagctggctcgaaacttgtcgaagtaagtgtgaagcgccctggtcctcttgatgactgccagtttgttgaaagcaaacctatttgccactggggatgcgataacgagagtatctcctgatagatgatgacacaggtagtatctgcacgccctatatgtgacatacgtggccatgccatcttagtgggcgccatccagatacgagtccccaaactgagactgggatcagcgggttaaggacaagaattggcatgtttctggcaccatggaagatcctgcgagcctacttgtaacaaaggccaggcacaagccgctttttctgagacgacctatcctttgattgcatggccagctgttggtggcgaatctgtccacgcgaaagaccgtgaacgccccgcctttcccaacagagctcccttgcgcggcgaacctctcggcctccgggaagctgcaaccccagaaagcggaacccaatgcattcccccagcgccgcccacgctcgaatcccccacaccgctgtatcttgcgccccaccactcgcacaca

SEQ ID NO: 663059 - DNA, 1484 bp, Homo sapiens
gaccgctgcctgaaagacctttctaggccaggtcggggtccggcacccagttgacgagacagcgcggcgctttcagagctggggagaggcgaaaactcttccggcccccgataccccggcagccgtccccggactccattgccgccttctcgcgggtctggggccgcccagaccgttctcggcgcatgatcgtcaggctgatctcgggggccagtcgcagccgacgatgtgacgccgcgcgccccggtggtcgtcggatgcactgcgccctctcctagtgatgccagatggccgacgaccgcggtctgctggacagcattagtacgtggctttctgcctggctggtgtgtatctacttcgcttcagactagaagccgtcagccggctctcgtacaggcctccccgccagagcgcgtacatccgttaagcagcctgaaacacccatcgcctatcaactccaagtctgccccagttctgagtggacgacgatatttctgaccacgctttcgacgcgcttgggcccgaatggcaccacaacccagcgcccgtggacgcacgtaactatacaggaagcccatcgctcgcgcgcaacgcacttacgagccgcaaaagcgacgtggcactgccacacggcgagcacacaatcgcaacacaccagcaggcacgcgcaagcgcccaacgcagccaaaactgccccaccagacctagtgcagacacacaagcgaaccacagtatcccggcgcggccggaaaccggcgcacacaaccaacaccggaaattggaaggccaaaagcacagccgcacgtcgagcgccaaaggcagcgcaaacgcgcaatacgacccaccgagtgacaacacagcgcgcaccacgacgcacctgcgcagccaccccccccactgcacatacgcgggcacccaccacagcacacttcccccgtcacacagacagccaacccaacgcgacccaccgcaacgcaccgtcgggccgcaccccagcgccccgaccccatcgaaaaccgtgcgaaaacgaaaagaaaacagagagggccacacgccccgaactggaaagaagaatcgaccacagaaccagccgggccgaacacgccggccgaaccaggcagcgacacaaaccgatcacagaaagcccaacaccaatcacagccaaggcacccgagcccctacacaacacacgacacagagaagccaattatctggccaaccacgacccaacgaagaacggaccaccacaagcacaccgcagcccaccgcgccacgcagagcgccgcacgccctatcgacccaccgccgcgaaataacaaacacaagacagacaacggtgcgacgcaccccacagaacaagcaagacccgcacgggcgagaccaccagaccgagcacttcaacacacgcgcatccccactcgatcagcacaaacaagagatcgacgacagacaacagaaatacaccgccgcagacacacaacaac

SEQ ID NO: 663060 - DNA, 135 bp, Homo sapiens
  misc_feature (22)..(22): n is a, c, g, or t
  misc_feature (118)..(118): n is a, c, g, or t
aaactgacgtaagaagaagttntgtgtttgagcccatgtgtttctaaccagagtgctcttttccatggaataaatgtttcctaacactagtgtgaagatttaatcaacatacacaatntcctcatccttgggcag

SEQ ID NO: 663061 - DNA, 465 bp, Homo sapiens
aattcctcaaaacgtaaaacggaattatcacccagtaattctactcttaagtatataccggattagtttgactgtttgttcctatgcaaatctcatgttgaaatgtaattaatctccggtgttagagttggggcctggtgggaggtgattggatcacgggagtggtttcccatgagtggcttcaccatctctagctgtcatcaagattgtgagttctcacaagatttgattgtttaaaagtgtgcagcacctccccacttcctctcttgctctggcttttgccacgtgacatacctgcacccactttgccctccatcatgattggaagcttcccgaagcctccctggaagcagatgctgctatgcttcctgtacagaccgcagaaatgtgagccaaccaaaccctcttttctttggcacttacccagtctcaggcatttctttatatcaatgcaagaatggccta

SEQ ID NO: 663062 - DNA, 379 bp, Homo sapiens
  misc_feature (284)..(284): n is a, c, g, or t
ggaatgttgaccttaaatgtcttgcaaaatgtggcacatgataaatggtattaatatttgcaaaggctgtgtacacgcaaccacccatgtggttgaattccatcgcagtcttcatatattcagttggttatcaacttaaagtattttttattatatggaatgccgagtaaatattggtgtcttacgaaaatatagtacctgtcctatatagagttcacattcatgtgatttatacaatgtctaagattctcaatatgaagagtcacatgtatatagttgtgcancacatatacatctcgagttttactcaacatctcccacaggtatagctgtgtatatagtagagtgtgtgtctatactctcgtgcagtattcgtaca

SEQ ID NO: 663063 - DNA, 913 bp, Homo sapiens
ttaattccctcaactctgtgatataagcagtggccggatgtccagctgcctactttctgcccggatctctggctcctcatctctccggtctccgcagactaaagccctcgggatatgcagcagccatgcctgtgcacacgctgagccccagagagccccgctccgcaccccgccctaccatatgccgccatgcagagaccagggtccctggcatacactgcatacgggggccggcagatggaggagcccggaaaccgagcagcatgtggagcaggcctggaggccagacaaggccaagtacagtcaagagcctgcacgtggacaacaccacgcacaggagaccatgtgcagccgcctgcatgtccaagacaagccggctcattcagacccatagagacatctgcacagacaacaagatgcatcacagcccaagccagccagagcccatgccatggccccgtgccgaaggacccagactaggaactggacaatcctcagacagacatcatcgacttgtgtagacaggcccacgatgatccccatgacgaaggccaagcacgcaactccctggaacgtggaccgaggggacgcaggacaggacaaacacacagcagaacaaaacaacaaccagagaaacaggacaagcacgcaaacgataaacatcacagagaggagcgagcccagggagtggaacgtccagacgcaacgggacaaagaacaacagacagggaccaaggaacttgacccaaacgaagacggaacaatgcagacagacatacacagcacaaaaacacagcagcgacggaataaaggaacgagacaacgacgaacctggaccgaacagaacacagagaagcggtaacgaaagcggttaaacaaaagcggagagacaaaaagaggaaggagaagaaca

SEQ ID NO: 663064 - DNA, 407 bp, Homo sapiens
cccgttctcccttccagtcccctaagtatgtgtttagttgtgccttatccaccacatagcccagtaagtcttcagttttggctgggcatgatggtgagcgcctgctgtcccacctacttgggaggataagcccggttcaaggcttcagtgagccacgatggtgcccctgcattcccccttgggggccagaatgttttcctggctcaaaaaaaaccaaaaaaagtagccaggcatggtggcgggagcctgttgtcccccctgttccgcaggctgaggcaaaaaattctcttcaacctgggaggtggaggttcctgtcagccgacgccacccctttgcactccagcctgggtgacagtgaaactttgtttcaataaataaaaaataataataaattgctcaaaaaaaaa

SEQ ID NO: 663065 - DNA, 545 bp, Homo sapiens
tgccagtttataagtaatttctagataaaatgtacaattgcctacaaaatgggatcagatgctttgtaacggcgttgtttcccaagtaggacctttgaatgcactgttcttgtggaccacaacaacttaaagggaaacacattgtcacgaagcgctcggtttatagtttcgggggatctattacctcgaaggcgtaaattgtcttttcccttgttgagaaaggttgttttaatacagaacaatgcgggaatatgtaaaggtgaaactacttacacactcttttgttaagtaggaggagttaaacaatttacaccagctgtgcatgtgtcactggggatggcaacagcattagtacttacaagcccatgcacagaaacttcggacaggtggcattttgactttcgtgcttattagcctacatctcaattgatgtataggaacaagggattgctaattagccagtgctgctagacactatggacatggtgtctatatatgtccgcatggcttctcggcgcctaatcctagaggttgatctcctgttt

SEQ ID NO: 663066 - DNA, 147 bp, Homo sapiens
catggatttgctggtgcagtacaactaggcttaatagggacatggtactggagccgaaacagatatatagaccaatggaacagaacagaggcctcagaaataacaccacacatctacaaccatctgatcttcgacaaacctgaaaaa

SEQ ID NO: 663067 - DNA, 383 bp, Homo sapiens
gagagagagagagagagtagagagcactagagagtgcatgaccaaccgactacttcacagaatacaaatgttcattgatgtacttaatctctgcaaggccacagcgcctcatacagaaattccgtaaacactagtctaaatgtacacagaccacactcggatgtcatctatgcattcggattcatatctcatttcggtggtggcatgactactggctctggcatgatccatgattccctgcattatgcatagtctaatgaacccatacatacacttgccagacatggcctgtctagacaatataactacctcaatattgcaacgaaaggaacgcacgaccacaatgaagatagtcatggggactgcggcctgttggtgctggc

SEQ ID NO: 663068 - DNA, 244 bp, Homo sapiens
tagagatcccgcctacgtggaactgccgaagtccagattcgagtctggactacctggacaatgtacacaaggattatctggacattactggatttgttcttgcttaacagtagggaaccccaaaaaaaggggtctcccagacgaaacacaggtggaggattccatccccaacatgtgctctgcagtcatcctgtaacaggaattgctttcaagaagaatgtggcgctcagccctatactgaagc

SEQ ID NO: 663069 - DNA, 248 bp, Homo sapiens
caatcctctctcttgggctcatcggacccgcgtttctaccttgccccggacagaatgccgggaatctataaagaaatagaaaagcttgaagtgatgggatcgttacggtataaaccccagccaaattatcctacagaaagaaatgtctgctgcagaggcattgtctattcctgctataagttcaaacagccggaataccagatcaatcctatgaagataaattgatcctgagccacagagcgaaatta

SEQ ID NO: 663070 - DNA, 1349 bp, Homo sapiens
  misc_feature (710)..(710): n is a, c, g, or t
  misc_feature (754)..(754): n is a, c, g, or t
  misc_feature (785)..(785): n is a, c, g, or t
  misc_feature (787)..(787): n is a, c, g, or t
  misc_feature (790)..(790): n is a, c, g, or t
  misc_feature (806)..(806): n is a, c, g, or t
  misc_feature (828)..(828): n is a, c, g, or t
  misc_feature (843)..(843): n is a, c, g, or t
  misc_feature (847)..(847): n is a, c, g, or t
  misc_feature (882)..(882): n is a, c, g, or t
  misc_feature (919)..(919): n is a, c, g, or t
  misc_feature (999)..(999): n is a, c, g, or t
  misc_feature (1015)..(1015): n is a, c, g, or t
  misc_feature (1043)..(1043): n is a, c, g, or t
  misc_feature (1334)..(1334): n is a, c, g, or t
  misc_feature (1340)..(1340): n is a, c, g, or t
ctgtgattggtccagtatgcagctgactgtctcctgtatcgtggagcagtctcattcaattcaagtgactggttcagaggacaccagtattcccagatagagctaccatctctacctcaccatgctccagggctccggtggagctacacactatcgccccgctagagtgaagctctcgtatcgtgacctaagtactatgcggtattgagataccgaatacaaaccgtatactgattggcctcgtgctaggaccactctgtcagtgtcctcgtgcatagagaggtctagcggaatgtcgtagtagtgcgtgtgccctgctcatacactatcacgagagtgacatgtgctagctagtctccgtgggaccaccggaggtgacacgtggagtgcactgcgggattgaggtgcatgatgaatgatggcgctctcgcccctcgcaggtgtgtcctgcaatgatgcttgtctgcacttgtgtcatgtgctgcctcattgcacgggtaacttatgttcgcactatacatgctcatgctactgtttgtctggtcctatgcaactaatcatacgccactcagtatgtcacgcgcctgacactctacaaatgtgtgcactgttgccactcttccctcttacaataccagctcaagacacaagtgccgagacacaatagagatctcatacacgcctagcagcgacatgctctcagacgctcntttaatctatcttctaaaggtcaggactagagccacacgtgtgngacccaatctccggctgggcgatgattgttncnagntacgcgggaaagcctntcccacagtcttcggctctgtnagccttcgtaattanagcntaatgtgcgaaccgagaagcagcgtccagggcagngctacctattgtggcttgcttgtggtggtcgcctcgntggtccgctgttgcaccctcgtttggtacgccatagagtacaagctccatgtgctagtacacactgtccggtttgctcgntgtattcgtaccacgnaagtcggccgtacgtagaggatggtacngataaagaggggcacaggtgtccctatgtcagcgccgcaagggggcccccttgggaacgcgggcggccggggcttggggataactcttcctctcatgggggggggctcggaccattgtggtggcccgcacccctctgctttacgtgggcagccgggtggggggcgcccaacagggcggcagggggcgtctcaccttcacgggagggcggggggacacaggacctcctataagatgcgagcacgccgccggacaggggcggggtggcgcgccacacatctttgtggcgtgtngtggtntgtgcgccc

SEQ ID NO: 663071 - DNA, 179 bp, Homo sapiens
agtcaggtcttaccgtctgagcagctgggaagcccagagaacactggattggaaagagctcatccaggacatctcacggctacagaggcgcaccgtgggcactcggtcacctggaggtgcccgggccctattatgcagctcgctactctgtgctgccacctatgttcgatcccggggac

SEQ ID NO: 663072 - DNA, 497 bp, Homo sapiens
catcctctgcccaccaaaatggcattagtgcttcttactcagagtgccgaccaaaaaaacagcgtgcgttccagccatctccgggtcaaggcatggacattcagaaatggctgcattggtgatacagtagtgctggtctcttgggggaaaaaaaattgatggctttgtaattcttttaaaaaactttaatttgctacaacaataatgcacacctttatgaagaaaagaacaacggtgtctcctctctctgagaggcggtaactgcttttaatggtttggcatatataccttcagacttttttctatggttttaaatttatacatgtaggtagttttatttttataaaaggtatctttcaatttagtacaagtgggtatacctcgttatttttaacacatgcgtaacctaggtaagactgtcccgtaattggtaatttacctcttaccgatggatttttaagtcatttcctcctgttaccaataaggctataatggcg

SEQ ID NO: 663073 - DNA, 114 bp, Homo sapiens
tcccgattttctcctgctgctgtggcccggacatggcgacttccggcccaaagattccggaggtcccctttgaaccatcgaagcctccagtcatttagggggctgagcccaact

SEQ ID NO: 663074 - DNA, 159 bp, Homo sapiens
gcggggaacaatcacttgataggcgtagatgtctcacagaaagtactaccgctacccagacattgggtcccttcggctgactagcctcaggaagcgcagccagcaggccatcgtagggcaaggtgacgagctataccctcaaggatagacccataccaa

SEQ ID NO: 663075 - DNA, 169 bp, Homo sapiens
cacacgccgataggtattatactaagttgagatgcatatcatttacgggggaaggcgcttggtgaagtacgccttatttctcttgtcctttcgtacaggggagcgaatttgaagtatcattgaaaccgacctggattactccggctctgaacctcacgatcacggtagg

SEQ ID NO: 663076 - DNA, 321 bp, Homo sapiens
gcatgatcaggactcactgcagcctctatctcccaggctcaagtaatcctcccatcttagtgccccaagtagctgggactacaggggtgcactaccacaccgggttgaattttttttaattttagtagagatgaagtgtcactatgttaccaaggctggtctcaaactcctaaactcagatgatcctcctgcctcggcctcccaaagtgctgggaattagccgggccaatcttgggatttttaatgggaatatgtggggcacaaaattgacaggaacatagggacattcttaaagtttcccttgatttggatccattataa

SEQ ID NO: 663077 - DNA, 691 bp, Homo sapiens
ccatcagctattactaggtcgttctccgggttgttatttcgtcacggggcttggcgttttcgattctcggtttcgtggagcctcgtttgtaccgatacataccgccgcgtacgctcccggtccctggcccctcagcggcatggcgtgcggggcgacgctgaagcggcccatggagttcgaggcggcgctgctgagcccctggctcccctgaagcggctggcgctgcgccccttctgccctggccccactcctgggccttcaggcccccaggacgccgagcacgccgccgccgttttcagaacgccagaccaccacctgcagaagtctagcagcgagcccagcccctgcccggtcagacgagtcggcgcctttcgcaactccgagagcagaatttttcaggaacataaaacaaggaatataggtcgtatatcacgaggttggagacattttagaaagtggtacttaactcagagtgaagctttgtgcttccgaaaagtcaaacctcactccttcagcaacttcacaggcaccatagctactccagggttccctcattggattgacagaagtgaccgagcccacaattaacgcctccagacaagtttgggcataatatagtgaggcgccatcttaaacagactattgacagattaaattcgggaaggacgtatgagcaaaatcctcaaatacg

SEQ ID NO: 663078 - DNA, 769 bp, Homo sapiens
atggccgtgtgcagtggctcacgcctgtaatcctagcattttgggaggccgaggtgcgcggatcacgaggtcaggagattaagaccagcctgactaacacggtgaaactccgtctctactaaaaatacaaaaaattagccgggcatggtggcacacgtctgtagtcccagctactcgggaggctgaggcaggagaatggcgtgaacccgggaggcggagcttgcagtgagctgagatcgcgccactgctctccagcctgggcgacagagcgagactccatctcaataataataataataatctctgttctacaattataacctaggaccaggccatacagagataggagctgaagggacacagtgagaagtgaccagaagacaagagtgtgagcctctgtcacgcccggacagggccactagagggctccttggtctagcggtaacgccagtgccctggaagacgcccgttacttagctgaccttgctctagcagtaaccccagcgccttgcaaggcactagcttacatagcagacctgaacaggcagcttcctttcccacggtacgcagacagactctcgtcaccacttctcggaaggccgacatcagcaactcccccaagccacctgagccctgccggctcctgacacgcgtcgtcaagcgcacggcccggcctccttcaatgtgcaccctgccaaccggtctgcctttcaacccgtgctccccactcccgcagccctgctcctcactgccgccaccatgcgccttc

SEQ ID NO: 663079 - DNA, 280 bp, Homo sapiens
aaaagcaagctgaggcgctgctcactgcccctcggagcctgcgagatccagctgcttcgggggcaggatggacaggaattggagcccagagcggactggctgtacagcttccggtactgagatacagccagggaggacagcaggctggcctagggacagactcagaggctctgtccctgggtctctgctgcattgtgtcacttgtgcatgagtgtgatcatccatctagctgcagctctgtcacatctacactatgctacttagataagtgggtgatggg

SEQ ID NO: 663080 - DNA, 398 bp, Homo sapiens
  misc_feature (71)..(71): n is a, c, g, or t
acaaagtcacaggctttggggactgtccgtggaatctttgggaggccgttattttgcccaccgcaccctcngtttatcccctgccctgccgggcaccttgttttaccccaggaaaatgtgagcttgttttcctgctcggcatgtgctccccctaagggtttgctcccccctgggcctgaaagttccttttcagcctgaaagggggccctttggattcaggcatgactcagcccggctgatgcctttccagtgttgagtcaggatttggggccggctcttttgggtccgtccccttttcccagggaatcccttacaaaactgtggccaggaagtggccggtataaaggatgccccaggtctttgtacgtgtgtaggagttagggggtttgaaattgtta

SEQ ID NO: 663081 - DNA, 432 bp, Homo sapiens
  misc_feature (193)..(193): n is a, c, g, or t
cattcgagttaaaaataccctccctcaccccaccctttcctcagcagatgaaaacagcctggacctattctggaaaatataatatccctgccacattcaaccccaattccctgcctcattgagaaatccagagatcctacggtttgggaactgaaagggacgttagagatatccctccccaattcaaagatgnctaacagtgaaattccctaattcaaaaaataaaggagtgaatttctacctagctgcactgtcatatgttattatcccaaatcttgtcaaatgcatcagtaagcaggagtgctgccaccagatcggcagggagagccaatgtttccacttcaaacctctcagaccagagaaaaatgaactggagatttggcattggaagacctccctctcgattggaagttaattttcttaacagttaaa

SEQ ID NO: 663082 - DNA, 433 bp, Homo sapiens
  misc_feature (193)..(193): n is a, c, g, or t
  misc_feature (236)..(236): n is a, c, g, or t
  misc_feature (249)..(250): n is a, c, g, or t
  misc_feature (299)..(299): n is a, c, g, or t
cattcgagttaaaaataccctccctcaccccaccctttcctcagcagatgaaaacagcctggacctattctggaaaatataatatccctgccacattcaaccccaattccctgcctcattgagaaatccagagatcctacggtttgggaactgaaagggacgttagagatatccctccccaattcaaagatgnctaacagtgaaattccctaattcaaaaaataaaggagtgtgantctcccaagggtnnaatccatgttttaattaatgaattataagtacattataaattgcaggtngagtgctgccaccagatcggcagggagagccaatgtttccacttcaaacctctcagaccagagaaaaatgaactggagatttggcattggaagacctccctctcgattggaagttaattttcttaacagttaaa

SEQ ID NO: 663083 - DNA, 173 bp, Homo sapiens
taatttcacgagtactgtctggaacagcactctccaaacatggctgattgctggtcagcaatcatatatgtcccagcgcactcaggaggctgaggcagaagagtcacccgaacccgagaggcggaggtcacagtgagccatcggtgagatcatgccattgtactccagtctgt

SEQ ID NO: 663084 - DNA, 424 bp, Homo sapiens
  misc_feature (16)..(16): n is a, c, g, or t
ctctagaggatccggnctgaatggtattctagcgtcaggttggtttttgagatggagtcttgctgctccaccgaggctggagtgcagtggcgtgatctcggctcactgcagcctccgcctcccaggttcaaggactcagcctcctgagtagctgggattaggcaccctctaccacacccggctaattttggtatttttagtagagatggggttcatcatgttggcaaggctggtctcaaactcctgacctcaagtgatctgcccacctcagccttccaaagtgctgggattacaggtgtgagccaccgtgcccagccttctacggttacttctttaaggaatctccacactacttttcatagagcttgtactaatttacattaccaccagcagtgtataagcattcccctttcaccagatctgg

SEQ ID NO: 663085 - DNA, 151 bp, Homo sapiens
atacgacctcgagtgtcgacccctccagctgcggcagaaatatgaggacaagatgtaagcgcatggggaacggtgacccacatgtctatcaagaacttttcagtatactcctgccccgagttcctgtcgcctgtagtgccccactatgata

SEQ ID NO: 663086 - DNA, 1313 bp, Homo sapiens
tctgaccaacaaaaaaagttttattggcggggggcttctgaaacaccaaaggtggtccccaaaaaaaatcctgcccgtggcagataaggagaggagattccggtgaaactctgcaggcacgccactcttttccatctcctctcggaggtgtgggtgcgccttgtggatgtgttcgcagaatatcaccaacgcacaacggagaagcgcaaacacaaccaacgtgggttagacaattgtgctctccacctatgcagtgccaaatttgcacaaatatccacacctcgtgcacacccttttaccactatatcaccatataaacgcaacaagagacaaatttctcccagatataacacttcgatctctaaacaccaaaaattgagccctattatacttgtcgttttacaacccaccaacgtagaattgtgagatatatctcacagaaaaacaacctccctatagccctatatatatcatataccccctctccctcttattgtgtgccagcatatacaaacacaagttataagagaaacacgactcctctcctaactatgttcatccaacccctattaaccaaatgctgtcctatcctttcctctacacacatttttttatcaccgacaacaaaatatactaccaatttattctcctctgatgagaaccacccccacaacacataacaactaaactcgataacatcaaaccacaactagttgatgtcatatcacacaactagtggtatatacctaccaagcgcagtagaagaaacacaatgtagaacggaagggaccccacaagcacccatatagtagctgctactacccagcccgaagaacgtatgtgatagtagatactacccccgacgtctgggccacacgtggcatacagtagtgtgtcgcgagtcctattagattcagagaagacatcacgccccaattattattatctcataccgatggctgggagccatctatctatctaccacggagcaggactaatacttacatgtagtatgtagtctgaatggggaaggacgtccacaccaaacgaggtggggacgatcaatatctacccgaatggagtaagtagactggaacttacttcctaatttatacctaaaaaaaccacgcaccctttctacaaccacagccgcccgccattattgtagttaagcacgcactcaccctaatcagtatgaagaatccacgacaaaactacaagtattatccacaagcagcaagagcacgcctgtgtatggagtgaagacaacccccccccgcaaaatactaataattatatttagcgccaaccga

SEQ ID NO: 663087 - DNA, 867 bp, Homo sapiens
  misc_feature (56)..(56): n is a, c, g, or t
  misc_feature (120)..(120): n is a, c, g, or t
  misc_feature (151)..(151): n is a, c, g, or t
  misc_feature (166)..(166): n is a, c, g, or t
  misc_feature (172)..(172): n is a, c, g, or t
  misc_feature (242)..(242): n is a, c, g, or t
  misc_feature (309)..(309): n is a, c, g, or t
  misc_feature (313)..(313): n is a, c, g, or t
  misc_feature (316)..(316): n is a, c, g, or t
  misc_feature (325)..(325): n is a, c, g, or t
  misc_feature (604)..(604): n is a, c, g, or t
  misc_feature (854)..(854): n is a, c, g, or t
aaaataattaactaaagcaaaaaacaacaaaggcacagaaaagagactaaagaagncattcttaaggcaaaaaaaacggaggaagaatggacaagaaagaaaaaaaaaaaaaaacaaggnggcggaggggcgggagggggggagggagaanctaccaaaatgtganggagcnaaaaagaaaacatgcagcaacagtgctcctgcttaaacagcaccctggaaaataaaccagtaaccctggnagtgcagtaaccatttggttaacaggacaaacttcctgaaggacacagatagtaattcactgcattncccnacncaaactgcnctcttcacaccaataccgttgcgttcctttaagatggggttcaacctgttgacaaaagatttgggtttatttggaaagtaaagcagataatatcctgattgaagtattcaatgattaagatgaggaagcatggggatcaaactttggaaaaagggcaatgaagcgagggagcagagacgaacagtggcagcagaaaaaaaattcggagaagaaggatgtgaaaaagacaaaaagaataagcggtgaaaaatcctagggattactgtgacctagacaatnaaaagcagataggtgacctttgattaaatccatttacttgtggagtgagctaaaaggaggctccaagacagagtttggttcccaacagtgtccgtggccaaagggcacactcagaaggtctcctcctctcgtaggaactggaacacggatgagaagtctttctttgagtagccctttgcacacatcatcctgtagatctgatgggccagactgccaagaaggattgggctctttgtgctgggagcagagncttgtgccaatcc

SEQ ID NO: 663088 - DNA, 214 bp, Homo sapiens
tgaaagctaccttttgcctgccatattctcggtgtgaaaaagaatccatcgtccccattatatacaaccctgggtgtgatcaccaaaggtacagttattgaagtgaatgtgagcgagctgggccttgtgacacaaggaggcaaggtgatttggggaaagtacgcccaagttaccaacaatcctgagaacgatgggtgcataaatgcggtcttgc

SEQ ID NO: 663089 - DNA, 129 bp, Homo sapiens
cctgtttctgccgttctgctgcttctgcttctgctttcacttctgcatcaagcagcctctgcttaacaattcagaatctaactgtgtcccctgtattccatcctgggggacttggtgacttgctgggtg

SEQ ID NO: 663090 - DNA, 1372 bp, Homo sapiens
  misc_feature (1266)..(1266): n is a, c, g, or t
taagggaaccatagtgggtattaggattaggatggtggtgaagtatagtccggatgctaactggtccaatgtagtggttaaaagggtagctttacgtggtgtgtgctccctcgcgaatttcgaggtttagaaagtgagggaggtcgtggcggcttaggaagttcaataaaggtaatgtggtttaggtggggcgaaaatattagtgccttgaggtgtgttgtggattattatggagaggatagtggggaattatggctaagagaatgagagagagtggatcagtcaataaggcgccaaggagacgccctccttcaatgtgggtacagggcacggaatcggaagaaatgtggtgtaggcggaaatataggaaaattattcatattcggagccttgagagtgtgtgaggagaagggggtggtttaaaaggggggttgtgggcatagaggagtattaaatggtgtcgtggggttcgccctagagagagagtgtcgtggagtggagaacatagtgtgtgtctaaatctatctcatctagagagagagacagacagagtgcttcagccagacagagtataaagcccggagaggaggcgcatcttatgtgagagagtgtggttgtctagcacaagagggggggtgtgggccaagggtgtggacacttcttatactcgggggcatagtgggggagagggggctggacaatctcccccactaaggagggggcgagcatgtagacctacgtggaggaaccatcccccccgggatacatcatgcggcggaggcccaagagacaaacaacataaggagcagacgcaggaggttgcgacagacagtgcggccgtgggacataaaggagggggcctgttgaaccaaccaacccaaaacgtgcgacaacgaaggcgggggccacaacagacgcacttggcaaacaccggcccgtggcaacacgcaggggggtgtccacacggacacggaacaacactcccgccgggtgtgcctctacgcaaacgggcgggtggccggggcgcagccaacccatgggggtctcaatcaaactctgcgggcgaaggcgacaaaggccccatccccctatcccaaaagcaatttcccatatgttgagaaaaccccacaaaagaggcggtctctggagggcccgccccaaaggttcgggtcatacatcgggcggacaattaggggaggaagagcaaaccaagaatcacaacagggtgttggcggcaccacaatataccattggcggaggagggcncccccccgacgacagcaacacaagagggacaccagttcgtagggccgggccccaccacgaggggagaaagggagagcaataacgtcggccctacaatagaacagcg

SEQ ID NO: 663091 - DNA, 651 bp, Homo sapiens
caggagctgttgataaactaaattgactttaagcaagtttcaggactcctctttatttttatttgtgagagacaagagtctggttctggtggcccaggctagtatgcaggtgtgtgatctcagctcacagcaacctctgcctcccaggttaaaaccattttcatgcctcagccccctacagtagctgggtttataggcatgcaccaccacacctggctaatttttttatttttagtagagatgggatttcgccacatgggccaggctagtctcaagagctccgggcctcaagcgatccgcctgcctcagcctcccaagagggctgggattacagacgtgagccaccaggcgccgggccggtctgtataacctcagaattacttggtacctcacaaatctcaagtactaagtactgaatcttggttctccccctcaccaagtcctttggaagtcacacagagaaatttcttgaattttagagagaggcgtatagaatattaataactaatgtttatggactggttattctgtgccaggtacttggagtactttatgtaccttatttcagttactgtctaggacaatctagtgagataagtaatatgatctccatttattaaaatattcccatcttagacaaagggaaagacg

SEQ ID NO: 663092 - DNA, 957 bp, Homo sapiens
ctcatcggtactcttactgcatttccctcgtgctgtgtcccgctcggcgttccatatggaacagtgatcgaggtgcttgttatgactgtcatcgtcttatcaggtttgtcctttcaggttcgcacttgttatacaatgtgagttgttaacctgcctcttgaaagattcaaccgggtgtgttggctcacgcctgtaatcacagcatcattgggaggccaaggcagttggatcacctgaggtcagcgagtctccgagatcagcctggccaacagtgggtgaaaaccacctgtctctactgaagaaatacaaatagaagtagcctaggcagtgcgctggcgtggtgcctgatatgatcacagcctatctgtgtgggatggctgagtgcaggagtaactacgtcttgacaccgtgtggaggtggaatgcgctgaatgtctaggttgcacgaactgcagccatttgtcaactccatgccctggtgtgacaataagtcaggactccgtctcctaagcatagaacagaggaacgatgtcatgatgctggctggtcccacaaggttggctggagtgtgtgaacatagggaagtctgacttgtgtgcactacaggttcgttcatccagtgctctgtgattcagcctcctagctgtgtggccggcccagtgatttgtgtagcaaggaatgttgtgaaattgagtgcttccttagtaaatcggactgtccgctgagagataattggctcgtgctattccaaggggccttcttgaagttgtttttggggcccccgaggaatccttaaaggcccccatcgattgcggaggcctccgtggcttaaattctgtagaagtggtggccaagtgggctcccagggctctgggctgggggcctgcccccccggggggtgttggcctcgcgtttcccgccttggcgctggggcccccctcttggcggccgggggacc

SEQ ID NO: 663093 - DNA, 785 bp, Homo sapiens
  misc_feature (455)..(455): n is a, c, g, or t
ccattctgatcatcctcactgacgccacagcgccaagagggtggtttcctgaagcagctgctagtgctaataacttgtgaatgacctctgttcttcaatcgagtcctctacgaagaacacaccagaatttgtgtcatgtgccattcaaccaaaaatcgatatcagcaattgtaaaattcccaaaactatcttactgatgcttacttcaaagaagaagagcgcggcggaagcccgagacaccaggagggtggaagcatcttcgaaccacagaagggagaggcaattatggagatacagggagcagcgcagggaattggcttcagaaacgtggtggcccccaccaaattttttacccaaaatatttcaaaagggtttattcccctcaaaggtcccaagggcaaaacccttggagatcctgggtgtttgggcttctgagccgagatttgggatttttntctccctccaacaaatttggggtctgtctctaaggtttgtcctttaagggaccctaattttaaaaattgacgctggctttaaccagaaaaagcagccgaccacatacccacgcagcagcagagcaaaacaacaaagacgtggttcgggcgcccggcgcccagaagaagagtttaacacacaacgtgtggggggcgggcccaaagtgagaacaccgcggcacacgtgcccaaaacactccgaagcagaggggtgcgctcccaaaaaaaccggcgcagcggttgacacaccaggcgtcggccatggacaaagggccgggctaccgcccgggg

SEQ ID NO: 663094 - DNA, 611 bp, Homo sapiens
ctgaggagccacccaaggaaaagctgcacaccctgtgaggagttctcctatgagttcttcagtgtgccaggctagacccagttacggcctactttaggtgaactagtaacgcgtttgtccaggaaggctgttacgactgaattgcctgtattaggtacgcacatcacctagtatagaagcctacgttatgctacagaagacaagcgtcgtcgctacctcgaagttcgcttagggcgccgtcagagggatacctacatagacgcgagcaggcacaaaaaagacaaagagcgacagagaaataacaaacaagaaacaaaaaagaagagcaaacatcaagaaaaaaacagaatagaaagaagaaataaacgacgaaaagaaccaaaggaacagaagacgcacaagaaaccaaaagcacagaaggacaaaaaccacgagacaacagaagacgacaacaaaaaaaaaggaaaagaagaaaaaaacaaaaagataccgaaggagcgaacagggaccaaaacacaaagaaaagaaacaaataagacagagcaaagaagaccaaaacaaacagacgacaaacaaccagaagcgaagcacagcggcaagagcaagaccca

SEQ ID NO: 663095 - DNA, 1067 bp, Homo sapiens
gatcacagccttgtctcctgtagcctctgtaagtaatgcattaacatcaccagttaagactagccaaagtgaagcaggaaaagtcaagagtaccgcttcatccaccacaatcgcccgagcctatacatcttacacctgacaatttcatcaaacccgttgcagtctctgctagctagaaaacatcacgtaaatgaaatctactagatcctggtcaggcctcctatccccatggagctcacagacaaattgttgacttcttctgaggtaatatcaaaatatctacgaatgttgtatgttgtacgtagatatccacgggttcaagttcttgttaggactccaggatgggaagacatggagtgctatcaagtaacaaatataagtccggaagcaaatgttcaacccggtgaagttatatcttcaagtacgtagtctggcatctttcacaccctcaattaaaggcatttctggtgccaaaaatcaaccatacatggctcagttaccgtcatctaggtgagctgcgggagtgagctactacatctagtgtctactatgcttttcaaggcaatagagtactcacggttctgtgctctatagttcgccgctggtctttgcgtccaccccactggggaaacagatcgtcaaaatctacacaagggtcaaagcttgaggcaaagtgttatgctaggtccccaagtatatgaccagtacgtgcttacatgcactttgtccccctgaagtccgttagtatcgtgccacattaccgtggcatcaaggaccactaggtctacgtgcagtgtcactagcatatcaacaagcattgtgggtcaccccatggctgagtcatggctagctaatctagccacgagtagttgatggtccgaaaggtacccctaaagtcaaaacgccagggaaagggaggggcgaagaccgttcaactgaaggaggggcaacaccgcacgtctgcaggggcagaaggccaacacactaggtgtcaaagcccacgcagcgggggccttaaaactacacacgaaagagagacacaaagcatgactataaaagggaagcaa

SEQ ID NO: 663096 - DNA, 287 bp, Homo sapiens
tctccctactgtatcctagcagtttgggaggctgaggtgggcagatcacctgaggtcaggagttcaagaacagcctggcccacatggcaaaaccgcatctctactgaaaaaaaaaaaggaaggaaggaaactccaaaatttggccgggggggggccaggggcctgtaatcccaactacttggggggctggggcatgaaaatcgcttgaacccaggaggggggggttgcagggagctgagataatgccatttaactccagcctgggcgacagagcaggactttgtctt

SEQ ID NO: 663097 - DNA, 1151 bp, Homo sapiens
  misc_feature (10)..(10): n is a, c, g, or t
  misc_feature (79)..(79): n is a, c, g, or t
  misc_feature (200)..(200): n is a, c, g, or t
  misc_feature (211)..(211): n is a, c, g, or t
  misc_feature (214)..(214): n is a, c, g, or t
  misc_feature (320)..(320): n is a, c, g, or t
  misc_feature (337)..(337): n is a, c, g, or t
  misc_feature (355)..(355): n is a, c, g, or t
  misc_feature (369)..(369): n is a, c, g, or t
  misc_feature (399)..(399): n is a, c, g, or t
  misc_feature (403)..(404): n is a, c, g, or t
  misc_feature (441)..(441): n is a, c, g, or t
  misc_feature (448)..(448): n is a, c, g, or t
  misc_feature (457)..(457): n is a, c, g, or t
  misc_feature (465)..(465): n is a, c, g, or t
  misc_feature (473)..(473): n is a, c, g, or t
  misc_feature (493)..(493): n is a, c, g, or t
  misc_feature (501)..(501): n is a, c, g, or t
  misc_feature (506)..(506): n is a, c, g, or t
  misc_feature (508)..(508): n is a, c, g, or t
  misc_feature (536)..(536): n is a, c, g, or t
  misc_feature (553)..(553): n is a, c, g, or t
  misc_feature (588)..(588): n is a, c, g, or t
  misc_feature (614)..(614): n is a, c, g, or t
  misc_feature (619)..(619): n is a, c, g, or t
  misc_feature (623)..(623): n is a, c, g, or t
  misc_feature (629)..(629): n is a, c, g, or t
  misc_feature (639)..(639): n is a, c, g, or t
  misc_feature (653)..(653): n is a, c, g, or t
  misc_feature (656)..(656): n is a, c, g, or t
  misc_feature (661)..(661): n is a, c, g, or t
  misc_feature (673)..(673): n is a, c, g, or t
  misc_feature (684)..(684): n is a, c, g, or t
  misc_feature (692)..(692): n is a, c, g, or t
  misc_feature (713)..(713): n is a, c, g, or t
  misc_feature (716)..(717): n is a, c, g, or t
  misc_feature (725)..(728): n is a, c, g, or t
  misc_feature (744)..(744): n is a, c, g, or t
  misc_feature (760)..(760): n is a, c, g, or t
  misc_feature (773)..(773): n is a, c, g, or t
  misc_feature (775)..(775): n is a, c, g, or t
  misc_feature (788)..(788): n is a, c, g, or t
  misc_feature (800)..(801): n is a, c, g, or t
  misc_feature (804)..(804): n is a, c, g, or t
  misc_feature (807)..(807): n is a, c, g, or t
  misc_feature (812)..(813): n is a, c, g, or t
  misc_feature (835)..(835): n is a, c, g, or t
  misc_feature (839)..(839): n is a, c, g, or t
  misc_feature (850)..(850): n is a, c, g, or t
  misc_feature (852)..(852): n is a, c, g, or t
  misc_feature (856)..(856): n is a, c, g, or t
  misc_feature (863)..(863): n is a, c, g, or t
  misc_feature (885)..(885): n is a, c, g, or t
  misc_feature (890)..(890): n is a, c, g, or t
  misc_feature (893)..(893): n is a, c, g, or t
  misc_feature (897)..(897): n is a, c, g, or t
  misc_feature (903)..(903): n is a, c, g, or t
  misc_feature (912)..(912): n is a, c, g, or t
  misc_feature (914)..(914): n is a, c, g, or t
  misc_feature (934)..(934): n is a, c, g, or t
  misc_feature (943)..(943): n is a, c, g, or t
  misc_feature (953)..(953): n is a, c, g, or t
  misc_feature (960)..(960): n is a, c, g, or t
  misc_feature (963)..(963): n is a, c, g, or t
  misc_feature (965)..(965): n is a, c, g, or t
  misc_feature (971)..(971): n is a, c, g, or t
  misc_feature (973)..(973): n is a, c, g, or t
  misc_feature (992)..(992): n is a, c, g, or t
  misc_feature (994)..(994): n is a, c, g, or t
  misc_feature (1005)..(1006): n is a, c, g, or t
  misc_feature (1025)..(1025): n is a, c, g, or t
  misc_feature (1027)..(1027): n is a, c, g, or t
  misc_feature (1039)..(1039): n is a, c, g, or t
  misc_feature (1050)..(1050): n is a, c, g, or t
  misc_feature (1057)..(1057): n is a, c, g, or t
  misc_feature (1076)..(1076): n is a, c, g, or t
  misc_feature (1078)..(1079): n is a, c, g, or t
  misc_feature (1083)..(1083): n is a, c, g, or t
  misc_feature (1086)..(1086): n is a, c, g, or t
  misc_feature (1090)..(1090): n is a, c, g, or t
  misc_feature (1130)..(1130): n is a, c, g, or t
aaacaggganacatgggattgtgttttcatttaataaatacaaatgaataaaaatactttattttgtcaagagactgcntctcctccctctcccgatctcacagaagcgtccagggaattgtgtgcgcctccagggcctgcacccacagaccccgtctacttgcacaaatgactctgctttacagagagggctccatctnatttgcctgcnaanacaactaaggtataataccgctcctttcccccatctccttccaaatacgagttcttgccctgcgttccattttttttttttttttttttttttgagaaagagtttnactttgtggcccagggnggggtgcggtggggggancgcagcgcagtggnagcgccgcctccggggttcacgccattttnctgnnttagttttcagagtagcggggactacaggggcccgcnaccacgnccgggtaantttttgtntttttagnggggaaagggtttcactgtnaggcaggntggtngngatctcctgagctgatgagcggcccgcnttagtttcccaaagtgntgggattgcaggggtaagcaaaacacccacgcctncaaattttaaatgagctccttgtganatggnaaanaatttnctgttcacanaagcccagcgtggngcnacttnaaccagaaactnttacccatganactttgtntgggttcagttacacagaccncgnnccattttnnnngggggggggaaaaggntcaaaaaaaaaccacngtatgcctaaaanancaacccccaaatnaaaaaaagaaannccnatnaaaannccgcccgttttctatagggctnaaanttgctttttcntnttgnagaactnttattgcttacactgtggcctnctggnctnttcngctcanctggccctntnagagaacatgggaacacaanaaaatcctnagttacaaanaagggcnctntnccagcntnggcccaggggccacatgcncncttcacagccnntaagttttgggatagggantntctttccctcancaaaaaatagnagattcntcttattttgagtgcaaanannattngtncaanaattccagtcatcaaaagtcaaaacctagatttcagtttngttgaaaaaaattttttttgg

SEQ ID NO: 663098 - DNA, 101 bp, Homo sapiens
gacctgatgaggtactcatgagaatcaacatagcccttatgaaacttaagggtcgaaggtggatttagcagtaaactgagagtagagtgcttagttgaaca

SEQ ID NO: 663099 - DNA, 184 bp, Homo sapiens
  misc_feature (75)..(75): n is a, c, g, or t
  misc_feature (84)..(84): n is a, c, g, or t
ctataattcattaaccttaaagagtctaataattaaatccaatgactattttttagtcggagtacagagcagctnttaaagcanatgatattactaagtatcttctaacgagtagtaatatttcaaagtaaaacatgagagattgattaccaaacacatttttaagactgtcttcaagcgaaag

SEQ ID NO: 663100 - DNA, 94 bp, Homo sapiens
ccccggggggggggttttccccccccccccggggggtagggcctttttccggggccccattaacccccccttaattttttttttgggcccccca

SEQ ID NO: 663101 - DNA, 827 bp, Homo sapiens
gaaaagtgagtgattcgggtggtttccagtcagccccgctccgagtctcagggggacggccccgcacacagacggttcaccaggcctgcagcctctcggacagcaccaccgggtactgtgcagggctccgcagccgccggtgctcagggctgagtcgggctcagggacatgctggggccaaggctctagactctggccagggatggggagcgggctcacacagctggtccctgctgggaggcagagccgcagtagtgggctccacctggggctgggcctcacggtggcagggctcctggggccccgggaggccacaccctcagctccggcccatgcctggtggcacggggctcttctggctaactggcagcatgtccatgattgggagacccgtcagagcccaggagcctggaaagcagccttgctcccaggcaacgtctggcttctcggggtcctcggtcagcttcattcgggggttgggccccccagtggccaccagcttatagacaccacccagggaaggctgtgtgggggcaggtgaccaccttgggtgccatggccattgacattcacctcatggcctcctgggccagtcgggccagagcctcctcgtcaatgtgtggcggactacgatagaagactgactcccagcaggcacctgaacttgggtcgcaaacttcggaaaacctaggcgaaatccaaagacgtgtataacaggcacactgtgcaactaagccaatggcggtaacaattcacagggcaggaagtgaagaatgggggaacccccacactttttcaagagcaaagcggaaacaagtaacaagtcc

SEQ ID NO: 663102 - DNA, 270 bp, Homo sapiens
  misc_feature (118)..(118): n is a, c, g, or t
tgtaggtcagggttgacctatgaaacgtctttaaggaaactggctcattttctcagtcaaggcagaagttcaaaagcagctgccggaatgctcagagaccagcatgtcaaggtttctnttctgcagatggagaatctgaggccagaaaaggggacgggggtcgcagagcttggatttggagtcaggcttccaggctccccacccggaggtcaaggtcaggccctatagactctgaccctgccctgatcagctggccaccctgggattggg

SEQ ID NO: 663103 - DNA, 412 bp, Homo sapiens
  misc_feature (8)..(9): n is a, c, g, or t
  misc_feature (18)..(18): n is a, c, g, or t
  misc_feature (20)..(20): n is a, c, g, or t
  misc_feature (69)..(69): n is a, c, g, or t
  misc_feature (73)..(73): n is a, c, g, or t
  misc_feature (79)..(79): n is a, c, g, or t
  misc_feature (96)..(96): n is a, c, g, or t
  misc_feature (118)..(118): n is a, c, g, or t
  misc_feature (149)..(149): n is a, c, g, or t
  misc_feature (171)..(171): n is a, c, g, or t
  misc_feature (348)..(348): n is a, c, g, or t
  misc_feature (388)..(388): n is a, c, g, or t
cgcggccnncgacacggntncgagaagacgacagaaggggatctcccggcgaggtgcctgtgctgtacncggntttgtntgctgtgcccgctcttngcgctctcgcgtcatattctgnagcgcgccagcaggatggcccacaagcaganctactacttggacaagtacttngacgaacactacgagtaccggcatgtgtatgtgtacccagagaactttccaaacaaggacctaaaactcatctgatgtctgaagaggagtggaggagacttggtgtccaacagaggctaggctgggttcattacatgaatcatgagccagaaccacatattcttctctttagacganctctttcgatcaaccgtatataagggagtattcagtgagnacttgagtgtgcacctttattcat

SEQ ID NO: 663104 - DNA, 1506 bp, Homo sapiens
  misc_feature (1227)..(1227): n is a, c, g, or t
tccacgcttaattcacttaatttttcttgtataaaaaccctatgttgtacccacagttggaccctgatcccgctgcacggaaacctctgtgggtgtgtgggtctcttgaacagaaggtgtggctcaggtgaacactctcctgtgaaataggaaaacatgtgggtgaaatcacgagctcctccttctccagaaggtctgcgggggtctcgaggttagcgtgataggtctcttataaaagagtggctcttcacaagaggtgtgcgcctgtgtggcgacaaaagtgtgtcgcccgaggtgtgtgtgcgagtgtgcacagcccccggggctgtgagagatgtgtgtaccagagtctcacactcgaactcaccacacgccacactctgtgtgacacgcacaagacttctctcttgagacgccacagaggtcgtgcggtgacagacacaagaatgtggcccagaagttggtcgcccctctgttgggtgtgttgccacgaggggggacaagtagagacgcgcgggtctcacaccacacgacaaccacatgagagaagcacccctgacagtagaacgtggtgcccctagtggtgtcaccacctcctgttgttgctgcaaaggagggggcgaccaccacgagttgtgtgtgttgcggcagcgcacttttgtggccgcgaagaatacttctgttgttggtgtcttccccccccacaagagtagtataaggccccttcttctgttggcgcgacccaccgggggggggcgacaaccacgacaatgttggggagacgacaacgtcttgttgttggcgtcccccaagatgtcgtcatgttgtctattgtggcgccgccccccccagaaggaggcgatgatgtttgggggcgaggggtggtgggggcaccaaactcctcttcccctgttgttggggagaacgaccacatcattatttataacaacaacacccccaaccaatgagaaagccgctggagaacgtctggacggttggcggcccccacaatcgtttgtggtggataaggatgtctccccccccgaccggaagaaattatagaaggagcaccaacaaacgaccaacaatgaattggttgtggcccctctttggtggagaacaacccccgccgtgtggtggtagattgccagcaggcgatcggttggtagtcacagcgcaggtggtacacacaagcgcgaggaggaggatactaccatgtagggatantattcattctagtattgggcaaccaacctcgtgtgtgggcgcaccaataaataataatacattccctttttttccaaaaaaaaaaaccactcctgttatcaataaatatatccctcagttttatgtgataagacgacaacataggagagggggcgtgcgccccccccccccacagatgggggggaagaagtacagcagcaccaaacatctctctctcaccaagagtgtggagaacaacactatcccgcttcgctgatgagaagaacatattctaccgat

SEQ ID NO: 663105 - DNA, 80 bp, Homo sapiens
gcagtctgaatgccagatgataaccgtttgctacagcatttgtattgcttgtgtgcttagctcatttcaccatctacatg

SEQ ID NO: 663106 - DNA, 151 bp, Homo sapiens
atcgcaaagaccattgaaaattcagaggagctctaatggaaggctctcagatgcctggctgatactgaagctagctacgtgtcaccatgaattctttgaaattaacagcagactttacattatgcccagacaaggcttacaaacatatcag

SEQ ID NO: 663107 - DNA, 661 bp, Homo sapiens
ctatcctcatcctcttcagattctgaaataactacaggagccattctactgcacaatccttccgcacacacgcaattaactgccgacttgccccactagtaatcacctgcatctatataagataagatgaagaccttttacgtatcttgaaaaactatacaatagcaaagaaacctaccacccagaccctgtgcggagtatctcgaacttcccagtatattactctcaagtagatgacgcgtaatagacaggttttattggcaaatttcgagtcgctatcattatcaacattaattatagggtggtgtttggttggttcgagtgccgtcataactatttgttttttttgcatatctggttgatcctccttagttaatatagtctctttgagtttcccttaaggaactgtcatttggtccggccgaaaacatggtggtgacagacagccttttcagaggtgatgagcaatctcgatgagcatctcagcgggtgcatatatacacgtatataagatagttcaaagtatgatagattaaagtttactttgttgttgctgagaagtagtgagagtgtcagcaaatcaatacaatgaaaaacatgtcacaacgatccatggacgtggagaagaaggcagctaacgctgatagttgtgccgtaagta

SEQ ID NO: 663108 - DNA, 135 bp, Homo sapiens
gtacacgcagcggagcatgtggactgtgagccccaccagccagcgctgcagctcctggagccttttgacaagtgggatggcaaggacctggaggaccttgcagatcctcactcacggtcaacagggacagtgtac

SEQ ID NO: 663109 - DNA, 120 bp, Homo sapiens
cccccccgctctgagcagattctgagccagttcttctgggctatctttttcttctgggcaacctcctcttctggtttaggaaccatcttgtcctttccgtaatactcatctccaatgtgg

SEQ ID NO: 663110 - DNA, 870 bp, Homo sapiens
gactcggggaccgtgactgtgctcaattcactcttccgttgtccctgtggtgttgcggcccagccggtccatcatgttcctttcaagtggcgtggaccgagattgctgaattcgatgggggcatttcgtccgtgtttgactgacacaggttgcattccaggatccacctttaatgcccagtgtcgatcgatgtcctttcggagctctggtggcacggggatcctcgaactaatcgtcacgcatgcttccaggtgccaccatgctctcgtgggacatagccctaactattttgtactgatgctgacttgtccacaagaccacgctttgagatcaggactctccacttccgctggtccctcagtgaattgccacaggacctaatattttccaaatctatacagagggaaacccaagtgtcccaccattaattgtagacgcaacctttggttcctggacgctggttccttggccgttggttcctttgtggtagcgacagggggataaagagtcaggattagtgccaactaggttcaaggttgaggctgtcatagtaaagtgcccggccctattggttccgtaaggaccctagcccatgtgggtcgaacacatgcactggataaggacgcgtagatgaatgtgtagcagccccctttgattgggccctggtgtccatcgaaggtaagctccccaattgggcatgactttctaggcatatctggaaacgacttttttgttcactcgtcaccattctcactgtgtcttacttccttgcaactgggagcgccgtcttcgtagcgaagcccatgtcagtttgggtcccaagggggaaacgatcctcgggcttggcataaacttcatttccataggctc

SEQ ID NO: 663111 - DNA, 1075 bp, Homo sapiens
ggtgagaggtatcggcagtgcgcacgtgctgccgtcggtgcctggcggtctgacctcgtctgacttcccgtaccgtgcttgatgcccactcgagccgctgcgatgtctaggggcacggcagatcattgttagatccttactatgcagcagagaagacgaaagaagaagaagaagccttttatgtatcgatgcaggcaagggtggataccctaagacgagaggaaaccctaggctttcagtaaacaagaagaatgtggagcccagcagtcgcaacttgatgcgacaggagcgcatttctgtgacatgcctgattgcataagatgcgagcactaggggaccaacaatcgcatgctgtcttgaatgcgatctaggattcgatctctggaagcatttcctttgtaagtgcaataccaggacccacatggacaggaatacacaaaagtcttgaacatatgaggaagttactcattgcacgtaatttcgagatggccaacggcttggaaacgcaaaccgcggtgattagggaaggcgtaactctttagcagtacttgtggctgccttctgccgttgctgaccaccacgggagaccctaatgcgtggagagcccgaagtaagcgcatggaacccgtttgaacccgttaaaagtgccttttgcgacacaacgtaaaagtacgagtgaaacacacaggaatagaacactgatgttaaaggttctccaccgagtaactgaaggacatggcaactttacgtgacagagcagacaggatgacaacccttgtcagaatagcagtgccatgcatccagtcaaacttgaagagtgaatgggtattccccaaattcagagtaaagtcgaccaggattggtctccttgccttttgtcgcgaggggcgcttcctcgaacacatggagcaacttaacaacacttacagccacggaagcctgacctgcacattcgcacggttgttcgacaccgagtccatttcacgtgggaacaacgcacaatcccaagtaattagctggcttgactgtgaaggaccaaacatagggaccaatttgtcccttgaaaatctaccat

SEQ ID NO: 663112 - DNA, 761 bp, Homo sapiens
gtgctgattgtcgtattcggcggcgcaaccattgttttgggcgacagccgcttcatcatgtggaagccgacagtattgttctggtgcggggccttattcctgctgggcagccaccttgcgggtaaaaacggtttaaaggcgagtatcggcagggagattcagcttccggatgccgtatgggcgaaattgacttatatgtgggtcggttttctgatttttatgggtattgccaactggtttgtgtttactaggtttgaagcgcaatgggttaactataagatgttcggttcgactgcgctgatgcttgttttctttattattcagggtatttatctgagtacctatctgaaaaaggaggattgactgtggaatattttatgttgctggcaacagacggggagaatgtgcatgaagcgcgtatggcggcacgtcccgaacacctcaaacgcttggaggtgctgaaatcggaagggcggttgctgaccgcaggtccgaatcctttgccggaggatccgaaccgcgtttcgggtagtttgattgtggcgcagttcgagtctttggatgcggcgcaggcttgggcggaagacgatccctatgttcacgccggcgtgtatagcgaagtgctgattaaaccgtttaaagcggtgttcaaataatgccggccgtcgatttgatccgcgaacgcctgcagacgctcgatcctctggtgttggaaaatcggcgatgaagagtcatctgcacaaggacacgcgggcaatacc

SEQ ID NO: 663113 - DNA, 130 bp, Homo sapiens
atctatcagcactggtgcaggtgtcagcccatatacatagacttacagcttaacatagacctgtgttattgtaaaacagttgcttgagcctcttcacttgcgaccctcgctgcgctattgtatctgctgt

SEQ ID NO: 663114 - DNA, 175 bp, Homo sapiens
ggtcgtgctgaagactaagtctatagatgtcaaacaagaacatgttcgcgtggctatggtggtcatgtgtgctaaatgtgttcgtgacaggatcaagcgtggtttcgcttatcgaggaggagaaaatctacgtgggccaatctacgtgggcaatctacggggtacggctcgaatt

SEQ ID NO: 663115 - DNA, 551 bp, Homo sapiens
accgagctagtacgactgctatcacaatgtgaaaaactggtactatactgtacactactgtagacctaatacacgcattacagctctagactatgttacatttatactccggtatctcacataagacatagtaaattagcctccgctactgaaaatttccagaactacgtttcagggtacatgtgcaggtatgtcatataggtacatttgtgtcatgggggttcctggaccccatgatacataggggtaacatcacccaggtattacattcagtaccccttagttatttctcctgatcctactctctacctcccaccttctactcggtgatagtccccagtatgtgctgtcccctctatgcgtgcgtccatgtgttctcatcatttatcttacacatattagtgagaacatgtggtatttgatttgctcttcctgtgttagtttgctaaggataatggcctccagctccatccatgtttcttcaaagggcatgatccttttcttgtaataatctgcattgtaattccatggtgtatacgtaccagtttttc

SEQ ID NO: 663116 - DNA, 276 bp, Homo sapiens
taaagtatgacttttgagagtgctcatatgttgatgatgtgattagcagtagttggcagattttgtaattacttcattaatcttacctctttccttagactattcctatccgcctttcttcttactcttttcatgattttcatattatatttatctttttcttataatcttttatattctttccttaacttttcttatttgaagaattttctattattttcctctttttgtctttctttatatctttccttctttatcattcttatgtcctctccc

SEQ ID NO: 663117 - DNA, 104 bp, Homo sapiens
  misc_feature (104)..(104): n is a, c, g, or t
aggggccttgacagggccacaagtgcacacactattggtggctctgggcgggcagcttggagaaggcccaatactcttcacctttcaccttagccctaatatan

SEQ ID NO: 663118 - DNA, 742 bp, Homo sapiens
  misc_feature (2)..(2): n is a, c, g, or t
  misc_feature (17)..(17): n is a, c, g, or t
  misc_feature (21)..(21): n is a, c, g, or t
  misc_feature (40)..(40): n is a, c, g, or t
  misc_feature (69)..(69): n is a, c, g, or t
  misc_feature (181)..(181): n is a, c, g, or t
  misc_feature (192)..(192): n is a, c, g, or t
  misc_feature (211)..(211): n is a, c, g, or t
  misc_feature (244)..(244): n is a, c, g, or t
  misc_feature (246)..(247): n is a, c, g, or t
  misc_feature (256)..(256): n is a, c, g, or t
  misc_feature (258)..(258): n is a, c, g, or t
  misc_feature (263)..(265): n is a, c, g, or t
  misc_feature (270)..(270): n is a, c, g, or t
  misc_feature (274)..(274): n is a, c, g, or t
  misc_feature (280)..(282): n is a, c, g, or t
  misc_feature (287)..(287): n is a, c, g, or t
  misc_feature (289)..(290): n is a, c, g, or t
  misc_feature (292)..(292): n is a, c, g, or t
  misc_feature (295)..(295): n is a, c, g, or t
  misc_feature (297)..(297): n is a, c, g, or t
  misc_feature (299)..(307): n is a, c, g, or t
  misc_feature (310)..(310): n is a, c, g, or t
  misc_feature (312)..(312): n is a, c, g, or t
  misc_feature (316)..(316): n is a, c, g, or t
  misc_feature (318)..(318): n is a, c, g, or t
  misc_feature (323)..(324): n is a, c, g, or t
  misc_feature (357)..(357): n is a, c, g, or t
  misc_feature (373)..(373): n is a, c, g, or t
  misc_feature (379)..(379): n is a, c, g, or t
  misc_feature (381)..(381): n is a, c, g, or t
  misc_feature (384)..(385): n is a, c, g, or t
  misc_feature (391)..(391): n is a, c, g, or t
  misc_feature (431)..(431): n is a, c, g, or t
  misc_feature (569)..(569): n is a, c, g, or t
  misc_feature (738)..(738): n is a, c, g, or t
gntgttctcaatttcanttanaaatacatattttaaaaanacatagaccaatatggcctgcccaaacanatatttaacatggtaaatataaggaataaattgtttgaatataaatatctataaaaaaataagtacatcaaaattcaatccaacctctttcattagccggttatataaaggnaaataattttnctgctttaaagcgtaacanacacttacttttcaatatatttcataagggggncnntaccattgngnctccnnnaatcnaggncagggnnncgccngnntnagngngnnnnnnnnnctnangggncngggcnngtagattaccatgaaaatattatatctactgcngacacattagaccagncttcangnggnnaggggntggggggggggggggggggggggggcagcgggggtgggangagtttggggaggcaataattaaatgtgggaaatacttctgccagagtgcaatataggtgaggtagactcatattcatgaaacatatcctgatttatggtagtaacagtttcattcagttttgcattttacaaatttnaaccaaagtctttcttttttttttctttacttgcatgtttgtcttttgagtgtgttttcaatttgtgcattccttagaaaatctttgtgtggactttggagtttctccctgaaatgtgccaggcgcctgagtcagacacaaacactcccttaggaccttcgtcagaaantcca

SEQ ID NO: 663119 - DNA, 122 bp, Homo sapiens
aagctccatgagcaggaattattttattttgtggacctggtttccttgatgtttctggcccccacaacaaagaaaaggaaaggggggcattttttcatatattatttaacaaacccaaataa

SEQ ID NO: 663120 - DNA, 1010 bp, Homo sapiens
  misc_feature (600)..(600): n is a, c, g, or t
  misc_feature (936)..(936): n is a, c, g, or t
  misc_feature (944)..(944): n is a, c, g, or t
  misc_feature (951)..(951): n is a, c, g, or t
  misc_feature (957)..(957): n is a, c, g, or t
  misc_feature (960)..(960): n is a, c, g, or t
  misc_feature (967)..(968): n is a, c, g, or t
  misc_feature (975)..(975): n is a, c, g, or t
  misc_feature (980)..(980): n is a, c, g, or t
  misc_feature (985)..(985): n is a, c, g, or t
aaaataggtgttattagattgaaaggggtgtagtggagtgtaggatcggcgcgcgatccatttttatttcaaaatgtctacaaagttttaattctccattatacaggtaatttttcaaaatctagacattattcaaatgtaagccaaagtccttacacaaatagaatacactcaaagatcaaaaatatacatatctttcagcaaactttgttacataaataagaaaaatatatacagctggtgttttcaaagtacaattatcttaacactgcaaacatgtatagaaggaactaaaataaaaagaaacactacagcaaaggttaaaggaacaacaaattcattttacaacatcatcaattataaagatacatatatcaaatcttaggggaatatatacttcacactgggatcttaacttttacttcactttgtttatttttttagaatactctctggataggtgaaaatctatccatgacacctattacgaaagttacatgtgaagaattcaataatctaggtctttgtactctgggatagatgtaaaaagaattctttaaaagttaaatttgtataagcctatgttaacaatttccaagnaaactggtctattggaaattaaatatttcaaagtagaaaatgttaggaaaacttcacttcaaaaattttaacacagtaagcataagaaaaattttgccaatgtttccttaaaaaaaggcaactcagctaggtttatgtttaccccaaaattctccttccttttttaactcgggcgaaaaggttgaaagccctggaactagagctgcgaacgagcagaatttaggacattggtcgctatgttatattaagggttcatgtgagggaactggaatggtcatcttgcgttcccacgtgggtagactcgggatttagagaccctaattttggaaggggccnaagggaantgggganagggcngcngggggtnngggtttnaattnaacgnggaggccacaatggggggtgggcag

SEQ ID NO: 663121 - DNA, 263 bp, Homo sapiens
  misc_feature (100)..(100): n is a, c, g, or t
  misc_feature (174)..(174): n is a, c, g, or t
ggagtttggccaacatggtgaaactccatctctattagaaatgcaaagattatccgggcagtggcgggtgcctgtggtctcagctacttcggaggctganacgggagggtcgcttggacctgggaggtggaggttgcagtgagccgagaccactcctttacactccagcctggncaacaagagcaagactctctcaaaaaaaaaaagtccgtgatgaaattttaagaaattcttgattaaaataatattattgtataaatgtt

SEQ ID NO: 663122 - DNA, 1009 bp, Homo sapiens
  misc_feature (600)..(600): n is a, c, g, or t
  misc_feature (696)..(696): n is a, c, g, or t
  misc_feature (935)..(935): n is a, c, g, or t
  misc_feature (943)..(943): n is a, c, g, or t
  misc_feature (950)..(950): n is a, c, g, or t
  misc_feature (956)..(956): n is a, c, g, or t
  misc_feature (959)..(959): n is a, c, g, or t
  misc_feature (966)..(967): n is a, c, g, or t
  misc_feature (974)..(974): n is a, c, g, or t
  misc_feature (979)..(979): n is a, c, g, or t
  misc_feature (984)..(984): n is a, c, g, or t
aaaataggtgttattagattgaaaggggtgtagtggagtgtaggatcggcgcgcgatccatttttatttcaaaatgtctacaaagttttaattctccattatacaggtaatttttcaaaatctagacattattcaaatgtaagccaaagtccttacacaaatagaatacactcaaagatcaaaaatatacatatctttcagcaaactttgttacataaataagaaaaatatatacagctggtgttttcaaagtacaattatcttaacactgcaaacatgtatagaaggaactaaaataaaaagaaacactacagcaaaggttaaaggaacaacaaattcattttacaacatcatcaattataaagatacatatatcaaatcttaggggaatatatacttcacactgggatcttaacttttacttcactttgtttatttttttagaatactctctggataggtgaaaatctatccatgacacctattacgaaagttacatgtgaagaattcaataatctaggtctttgtactctgggatagatgtaaaaagaattctttaaaagttaaatttgtataagcctatgttaacaatttccaagnaaactggtctattggaaattaaatatttcaaagtagaaaatgttaggaaaaccttcactcaaaaaattgttaacaccagtaagccatataagaagnattatggccaatgggtccttaagagaagggcgaatcagctagggttatggtgaacccagaaattctcttccttttcttactccggcgaaaagtgagaagcccggaaattaaagctgggaagggccgagatttgaaatgttggggatatgatattaaagggtttgtgggggattgaaatggtatcctgtttgccggttggcgaacctgggagttaaaagagcgaatattcagaggggccnaagggaantgggganagggcngcngggggtnngggtttnaattnaacgnggaggccacaatggggggtgggcag

SEQ ID NO: 663123 - DNA, 885 bp, Homo sapiens
  misc_feature (600)..(600): n is a, c, g, or t
aaaataggtgttattagattgaaaggggtgtagtggagtgtaggatcggcgcgcgatccatttttatttcaaaatgtctacaaagttttaattctccattatacaggtaatttttcaaaatctagacattattcaaatgtaagccaaagtccttacacaaatagaatacactcaaagatcaaaaatatacatatctttcagcaaactttgttacataaataagaaaaatatatacagctggtgttttcaaagtacaattatcttaacactgcaaacatgtatagaaggaactaaaataaaaagaaacactacagcaaaggttaaaggaacaacaaattcattttacaacatcatcaattataaagatacatatatcaaatcttaggggaatatatacttcacactgggatcttaacttttacttcactttgtttatttttttagaatactctctggataggtgaaaatctatccatgacacctattacgaaagttacatgtgaagaattcaataatctaggtctttgtactctgggatagatgtaaaaagaattctttaaaagttaaatttgtataagcctatgttaacaatttccaagnaaactggtctattggaaattaaatatttcaaagtagaaaatgttaggaaaacttcacttcaaaaattttaacacagtaagcataagaaaaattttgccaatgtttccttaaaaaaaggcaactcagctaggtttatgtttaccccaaaattctccttcctttataactcgtccacattttaaaatcccgaaaatataagctcaaagcgaccaaaatataaaaatttgtcttatttgatagtaaaggtattgtgagtgacagcattgttattttgctttcgacatg

SEQ ID NO: 663124 - DNA, 927 bp, Homo sapiens
  misc_feature (600)..(600): n is a, c, g, or t
  misc_feature (784)..(784): n is a, c, g, or t
  misc_feature (927)..(927): n is a, c, g, or t
aaaataggtgttattagattgaaaggggtgtagtggagtgtaggatcggcgcgcgatccatttttatttcaaaatgtctacaaagttttaattctccattatacaggtaatttttcaaaatctagacattattcaaatgtaagccaaagtccttacacaaatagaatacactcaaagatcaaaaatatacatatctttcagcaaactttgttacataaataagaaaaatatatacagctggtgttttcaaagtacaattatcttaacactgcaaacatgtatagaaggaactaaaataaaaagaaacactacagcaaaggttaaaggaacaacaaattcattttacaacatcatcaattataaagatacatatatcaaatcttaggggaatatatacttcacactgggatcttaacttttacttcactttgtttatttttttagaatactctctggataggtgaaaatctatccatgacacctattacgaaagttacatgtgaagaattcaataatctaggtctttgtactctgggatagatgtaaaaagaattctttaaaagttaaatttgtataagcctatgttaacaatttccaagnaaactggtctattggaaattaaatatttcaaagtagaaaatgttaggaaaacttcacttcaaaaattttaacacagtaagcataagaaaaattttgccaatgtttccttaaaaaaaggcaactcagctaggtttatgtttaccccaaaattctccttgctctgattacctgcggcccgaggttnaatagcccggcgactaaaagctggggagggagcgtaatgttgaaacatgtgggctcattttaatcattgaagggcatgatgttgaaggacacacaaatttgtgattcctttgtttagccacgtgtgctgcaagcttgggattn

SEQ ID NO: 663125 - DNA, 1301 bp, Homo sapiens
  misc_feature (406)..(406): n is a, c, g, or t
  misc_feature (431)..(431): n is a, c, g, or t
  misc_feature (494)..(494): n is a, c, g, or t
  misc_feature (1301)..(1301): n is a, c, g, or t
gtatcaatcaccagagctcatcattatatgaacccctggtttaaacttcaaactaggccgtgcttatttattctagacgcacctctagacctagccgagtcacatctaatcactctggatcgaggaagagcatccatacattgcataaacgtgacgcacgcttaatcggtcgcacatgcagagccagtaagccgcgagacaaagctgcaatatggaagtcaccctaagcccatcattgctaacttatcaacaattacttaattcaaatggcttccatttaaccttctccagctcgcgttatcacaacactaatgaacaccttcatgcataactccatgcacatcatgagcactttagccagtaatatgagtatatcttcacgacacttaagcaagagaccaaatcngaacacccacgttcggacactagcncgaaagggcgcagtccggacacttgagtcgtcaaggcgttctacacgatctgaatactgcacnggcaggccccattcggcactcatattcgttcaatagcccgagatacatcataacattatattgtactaggataaaccaaccgctcatctcatcttatcaatatcttccgtagggaacaagctatagtgacctgcacttcgtccccatgaatctgctagacaatcattatttggttcatcctaagaacctacattctgacctccctgattcttatgaatacgaaccaggatatccaccgattccgatacgaatcaactcgataaacctcctatgaaaaaacttcctatcatttaccctagcattacttatatggagtattgtgtacatacccattttacaatcgtctaagaattccccatttaagactaaagaaaaacacaaaaagggggggaagaatagaaggaatacgggagaggggccaaagttaagggaaaggaggattttgtgtaagatgggggccatatataggagacgagagtgaaaacccaggacaaggcccagagattacaaccgccgggcccggggaaaccagccagcgggcgcacacagggaaaggacgccaaacgactgcgggggacgagacccatgtgcagaagtcccaccaaacagtatagcccaaggcgagaagataacacaaggggccagaaggaaacacgcatagtgtgtgcaaacagtttcggtaatatcaccaaacactagacatcacaatagaaacaagagagtaataggctggtgtccgatgatacaccaagaaccgagcgcagacgacaaaacgtgccaaaagacaaagcaagaaatacagaacan

SEQ ID NO: 663126 - DNA, 108 bp, Homo sapiens
accagtccagtatcgttctccggtgtcattttgaccaacttttttcctctccacgttcttactacataccccacatatgccactcttttctgtgccccacttccacct

SEQ ID NO: 663127 - DNA, 210 bp, Homo sapiens
gaaggcaatttcttaaaataagacaacatcgaacttcactatatcagatggagctcgtgctttcacaagtgatttctctgtaacatgtgatgccatttgatagcattttacccacagtagaactgttttcaaaattggagtgaatcctctcaaatcctacaactactttatcaaccatagtttactatatagagtgagtaagggagactt

SEQ ID NO: 663128 - DNA, 277 bp, Homo sapiens
tatgagtttcccccccgtcggatggccatgggtccatgcgtgtaatcccagctactcaggaggctgaggcaggagaatcgcttgaacctgggaggcggaggtcgcagtgagccgagatcatgccactgcactccagcctggagaacaagagcgatcatgctactgcactacagcctgggtgacaaacgcagacctctgtctcagacaaaaaaaagaaaggaaaaaaaaagaacatctggtgggtggaaccactcatgggccccatcgggaccggggg

SEQ ID NO: 663129 - DNA, 910 bp, Homo sapiens
  misc_feature (592)..(592): n is a, c, g, or t
gtgatgagaaagcgagaaggacggtggggagaaagaaggccggccgctgccgtttttatttcaaaatgtctacaaagttttaattctccattatacaggtaatttttcaaaatctagacattattcaaatgtaagccaaagtccttacacaaatagaatacactcaaagatcaaaaatatacatatctttcagcaaactttgttacataaataagaaaaatatatacagctggtgttttcaaagtacaattatcttaacactgcaaacatgtatagaaggaactaaaataaaaagaaacactacagcaaaggttaaaggaacaacaaattcattttacaacatcatcaattataaagatacatatatcaaatcttaggggaatatatacttcacactgggatcttaacttttacttcactttgtttatttttttagaatactctctggataggtgaaaatctatccatgacacctattacgaaagttacatgtgaagaattcaataatctaggtctttgtactctgggatagatgtaaaaagaattctttaaaagttaaatttgtataagcctatgttaacaatttccaagnaaactggtctattggaaattaaatatttcaaagtagaaaatgttaggaaaaactccgattaaaaaaatgtggacacagtaggcaataaagaaaagatatgggcatggtatctttagaaaaggggcagtcacctggggtgaagttagacccgacgaaagatgggttgtgtgactggagtcgtgagagaggggggaaagccgcggaaaattggatggtggggaacgagaaaataattcagacacgctgcgcggacggttggttgaaagatcaggatgataaaaggaccgttgtttgaccgtgtggggtcctgctgtgatg

SEQ ID NO: 663130 - DNA, 902 bp, Homo sapiens
  misc_feature (600)..(600): n is a, c, g, or t
aaaataggtgttattagattgaaaggggtgtagtggagtgtaggatcggcgcgcgatccatttttatttcaaaatgtctacaaagttttaattctccattatacaggtaatttttcaaaatctagacattattcaaatgtaagccaaagtccttacacaaatagaatacactcaaagatcaaaaatatacatatctttcagcaaactttgttacataaataagaaaaatatatacagctggtgttttcaaagtacaattatcttaacactgcaaacatgtatagaaggaactaaaataaaaagaaacactacagcaaaggttaaaggaacaacaaattcattttacaacatcatcaattataaagatacatatatcaaatcttaggggaatatatacttcacactgggatcttaacttttacttcactttgtttatttttttagaatactctctggataggtgaaaatctatccatgacacctattacgaaagttacatgtgaagaattcaataatctaggtctttgtactctgggatagatgtaaaaagaattctttaaaagttaaatttgtataagcctatgttaacaatttccaagnaaactggtctattggaaattaaatatttcaaagtagaaaatgttaggaaaacttcacttcaaaaattttaacacagtaagcataagaaaaattttgccaatgtttccttaaaaaaaggcaactcagctaggtttatgtttaccccaaaattctccttttcttacacaggcgcaaattttaaaaacccggtactaaaaagtgtgtatgcgggccagaagtcagaagagtagtcgaagtgtatatataaacgtccgttgctatgtggccgggtattgtttttcttacttttacaattaggaaag

SEQ ID NO: 663131 - DNA, 893 bp, Homo sapiens
  misc_feature (600)..(600): n is a, c, g, or t
aaaataggtgttattagattgaaaggggtgtagtggagtgtaggatcggcgcgcgatccatttttatttcaaaatgtctacaaagttttaattctccattatacaggtaatttttcaaaatctagacattattcaaatgtaagccaaagtccttacacaaatagaatacactcaaagatcaaaaatatacatatctttcagcaaactttgttacataaataagaaaaatatatacagctggtgttttcaaagtacaattatcttaacactgcaaacatgtatagaaggaactaaaataaaaagaaacactacagcaaaggttaaaggaacaacaaattcattttacaacatcatcaattataaagatacatatatcaaatcttaggggaatatatacttcacactgggatcttaacttttacttcactttgtttatttttttagaatactctctggataggtgaaaatctatccatgacacctattacgaaagttacatgtgaagaattcaataatctaggtctttgtactctgggatagatgtaaaaagaattctttaaaagttaaatttgtataagcctatgttaacaatttccaagnaaactggtctattggaaattaaatatttcaaagtagaaaatgttaggaaaacttcacttcaaaaattttaacacagtaagcataagaaaaattttgccaatgtttccttaaaaaaaggcaactcagctaggtttatgtttaccccaaaattctccttctttttttactcggcccaaatttgaaaccccggaaataaaagctggaagggagcaaaattcaacatattgccttttttctaataaagggttttgtgagggaacgaatggtcttccttgtttccacattggggaaat

SEQ ID NO: 663132 - DNA, 889 bp, Homo sapiens
agatgcggatgggcagtgcggtgagatgagaggaaaggagggtgggttcggccggatgcctttttatttcaaaatgtctacaaagttttaattctccattatacaggtaatttttcaaaatctagacattattcaaatgtaagccaaagtccttacacaaatagaatacactcaaagatcaaaaatatacatatctttcagcaaactttgttacataaataagaaaaatatatacagctggtgttttcaaagtacaattatcttaacactgcaaacatgtatagaaggaactaaaataaaaagaaacactacagcaaaggttaaaggaacaacaaattcattttacaacatcatcaattataaagatacatatatcaaatcttaggggaatatatacttcacactgggatcttaacttttacttcactttgtttatttttttagaatactctctggataggtgaaaatctatccatgacacctattacgaaagttacatgtgaagaattcaataatctaggtctttgtactctgggatagatgtaaaaagaattctttaaaagttaagggaggcaagcgctatatgggaagtgtgagaggagaaggatggtttggtaagcggaaagaggggaggggtaaggtgtggggaaaggcgcgatctgaggaaatgtgtgtcaggggggtggaggaaggagagttgattgtgtggtggggtggaaaggagtgcgtgcaagggggattagagggcgacgcccaggagcgagacgtgagaagacgtgattggtaggggagtagcggccgggtgtgtaggaagcgtgcgttgggaaagacgaggacagggaggcatgagtggcttgcgtaagtggagaggaagagtactgaaggtgat

SEQ ID NO: 663133 - DNA, 858 bp, Homo sapiens
  misc_feature (591)..(591): n is a, c, g, or t
gggagtaaccgaagtggacgggtaagagaagaagaatgctggccgcatctgtttttatttcaaaatgtctacaaagttttaattctccattatacaggtaatttttcaaaatctagacattattcaaatgtaagccaaagtccttacacaaatagaatacactcaaagatcaaaaatatacatatctttcagcaaactttgttacataaataagaaaaatatatacagctggtgttttcaaagtacaattatcttaacactgcaaacatgtatagaaggaactaaaataaaaagaaacactacagcaaaggttaaaggaacaacaaattcattttacaacatcatcaattataaagatacatatatcaaatcttaggggaatatatacttcacactgggatcttaacttttacttcactttgtttatttttttagaatactctctggataggtgaaaatctatccatgacacctattacgaaagttacatgtgaagaattcaataatctaggtctttgtactctgggatagatgtaaaaagaattctttaaaagttaaatttgtataagcctatgttaacaatttccaagnaaactggtctattggaaattaaatatttcaaagtagaaaatgttaggaaaagctggggccgagagatagttggcgtagtcgggaggaagaggagtaaggacgtgggtgttagggggggtggtgcgaggtgggagggtgaggaacgacgagatttgctttcgtgtggtagggcgggccgaagtgcgagagcgggggagatggaggaggggggcggcccaattttattgagcggagatatttgtggttaagtttcgggtgtggtgtgag

SEQ ID NO: 663134 - DNA, 900 bp, Homo sapiens
  misc_feature (600)..(600): n is a, c, g, or t
aaaataggtgttattagattgaaaggggtgtagtggagtgtaggatcggcgcgcgatccatttttatttcaaaatgtctacaaagttttaattctccattatacaggtaatttttcaaaatctagacattattcaaatgtaagccaaagtccttacacaaatagaatacactcaaagatcaaaaatatacatatctttcagcaaactttgttacataaataagaaaaatatatacagctggtgttttcaaagtacaattatcttaacactgcaaacatgtatagaaggaactaaaataaaaagaaacactacagcaaaggttaaaggaacaacaaattcattttacaacatcatcaattataaagatacatatatcaaatcttaggggaatatatacttcacactgggatcttaacttttacttcactttgtttatttttttagaatactctctggataggtgaaaatctatccatgacacctattacgaaagttacatgtgaagaattcaataatctaggtctttgtactctgggatagatgtaaaaagaattctttaaaagttaaatttgtataagcctatgttaacaatttccaagnaaactggtctattggaaattaaatatttcaaagtagaaaatgttaggaaaaactttcctagaaaatactcaacgcagtaggcattaaatataaattaatacaaatgctcccttatataaaggtaacaaagcttagattaagtatatcccagaattagtgctcctaacatatacaatgttatagataaaaatacctgtatcaataactattaggcaaggtgaggctcccctatttacttattcatctcatctatggcgatacatatgaactccttttatttactcattagtaattactaag

SEQ ID NO: 663135 - DNA, 115 bp, Homo sapiens
accgcacgaatcgagcaaagagctatcaatcgtgtcgaagtcctgtccgatggtccgtcgacctgggtgatgtttcccgtgattgattagccggaggtgtatcgggggatcctct

SEQ ID NO: 663136 - DNA, 126 bp, Homo sapiens
ggtggtggctgtaatagtgaggcaggagtccgaggaggttagttgtggctataaaaatgattaacggatactattataagagatcaggttcgtcctttattgttgtgtatggttattcttctttat

SEQ ID NO: 663137 - DNA, 758 bp, Homo sapiens
taaaagggcaaaaattgacttttttgaatgggaaaggggatgaggacaacggtgaacccccagtgacccctgtgtggaaaaaaaaaaacagacagagggggggttggtccggaggccctcgtcgtgctcaagtggattcccaggagcagggccattgtgtcgcgcttcccaaattctctctaggcataatattctggataagttatactacccactcagtgtttctcataagagaactgggcagacaccagcaacacgtgctagaaacctcaaactccttcaattactcaaagaaaggacccatttcagtataccctcaaggtgaagtgaaagagttagtgggacactctgcgtggtgggctcctctccccgtggttgcaccacttgggtaccttataactctgacaaaaaactcttggagctgcaacgggccttgccaaagggctcaggagttggtaatcaggacagaatggtggatagcgaacacagaagaggtaactttaacattcccccttaaaggtcaaattttcacccaactcatcttcctggaagtgtccctataacagaatgaggtcgaacatagaccagaggcccagccaactcttataatacaaagctcctccaacgggggtctcaaggacccggctcccttcacaccagatagggggcggcatccccagggtaagggcaccgtgaacttacggggcgcgttgaaggaggcgcccgaccaggtgaggctggctgcagagtgccaagtc

SEQ ID NO: 663138 - DNA, 1520 bp, Homo sapiens
  misc_feature (128)..(128): n is a, c, g, or t
  misc_feature (914)..(914): n is a, c, g, or t
  misc_feature (1315)..(1315): n is a, c, g, or t
  misc_feature (1320)..(1320): n is a, c, g, or t
cgccacaaagaatagctgtttgtggcccccatcactatgagaggtcctcttgtggttgctgcttttggtgggtagacagcccctgggggggaggttttctcctcccggcggtggttttatgtagatgncgtccggcgagattattttttttctcggggggggagaactcaaattgctcgcaacagttaattgcgcccccccttgtgtgtctccagacaaaaggactaatatgtagttgtgggcggggttgttcgtgcgaccggcgaacaattgttgttgggcctccacactagttggaagaacgtctgttttaattatgagtccgcttggtgagtgacagccgccgccccacgggggagagattattatataggaagaagggtagtaagaacatttttattagcaggttgatgagccccaccacatggtggtaataaaaggtggggtgttgttgtttgcctcctctcgaggatcatcaccgcctgcggaagattggggcgagaaaacatgggtgattattaatcagaagaagatgatgaacataatgaattttttataaggggcccaccacagtatatacgcggtcttgtggcgacattcgtggtgtctgatgaaagacttcactcgtgagtagatagttgatgataagaagagtttcttcttgatgagggactacctgatgagaggcgccactactcgactcctccttgggggggaagaacgcctgaactaatattagactgtggcggcacacctgtgttggtgtgttgttattccgcaaatatggcgcacatcgtcatcacacgtgtagtagaggaagattgggtcgctcacacactcgtatagtgcgcgacgctccctcgtgtggtcgcgctctaacatgtgtctcccggggtgtacgcccctccgtgtangggagatttctgcgcgcgttgtgtgggcgccccgcacactagtctcgccaactagggtgctcgcgtctcccgcgtttctcgtgcgcgtgtgcgcagtgtgtgagaagagagatgtgtgcgacgcgcgcgtaattagagtgtgctgtgtgatgatagtagtgtgcgtgcgttatattagtgggtgatagagctatctctgctctctctcacacacactggccgtcacacccacagtgctcacttgacatcttaggttgacactctctgtgctgcgcgcgagagagattctcactctccggcgtgggtgtgataacacacacttcactcacggtgtcgcctctatagagagagagagatatataactctggaatagacatgctttaaagaatttacacacctnttaangacctcacgtgtctcaaaagtgtgaaacacacacggtgttcaccacgtgtctcaacgccctgtgggtgtttgtggtgttgtgtgtgtttgtggtgtttttttagcgccaaaagggtttaatattatagattgtgaaccttgcttgtgtgggtttttttaagtagattccccaaataattgaaaattcccctgtgtctcca

SEQ ID NO: 663139 - DNA, 1089 bp, Homo sapiens
  misc_feature (178)..(179): n is a, c, g, or t
  misc_feature (188)..(188): n is a, c, g, or t
  misc_feature (191)..(191): n is a, c, g, or t
  misc_feature (209)..(209): n is a, c, g, or t
  misc_feature (296)..(296): n is a, c, g, or t
  misc_feature (322)..(322): n is a, c, g, or t
  misc_feature (437)..(437): n is a, c, g, or t
  misc_feature (452)..(452): n is a, c, g, or t
  misc_feature (471)..(471): n is a, c, g, or t
  misc_feature (772)..(772): n is a, c, g, or t
aaatatctaggtagaggcctgcgtttaattcggccgagggggagccggagagtttggaacctggagtcgcagcggcggtaattgtgcgatgactcctctaatgtcaccgtccttagctgcgggacctgctggtgttctgactgtggagttagctggggtgagacccctgtgcggtgcnngagggggcnggnggcccgactctgacccgngccgggggtgggccatggcggagatcagcgacctggaccggcagatcgagcagctgcgtcgctgcgagctcatcaaggagagcgaangtcaaggccctgtgcgctaaggccangagagatcttggtagaggagagcaactgtgcagagggtggactcgccagtcacagtgtgcggctgacatccatggacaattctatgacctcaaagagctgttcagagtaggtggngacgtccgctgagancaattacctcttcatgggnggactttgtggaccgtggcttctatagcgtcgaaacgttcctcctgctgctggcacttaaggttcgctatcctgatcgcatcacactgatccggggcaaccatgagagtcgccagatcacgcaggtctatggcttctacgatgagtgcctgcgcaagtacggctcggtgactgtgtggcgctactgcactgagatctttgactacctcagcctgtcagccatcatcgatggcaagatcttctgcgtgcacgggggcctctccccctccatccagaccctggatcagattcggacaatcgancgaaagcaagaggtgcctcatgatgggcccatgtgtgacctcctctggtctgacccagaagacaccacaggctggggcgtgagcccccgaggaagccggtactattggcagtgacgtggtggcccagttcacggcaccatgacattgacctgagctggcgtgccagcactggggatggcacgggacacagtgggacgtcaagagaacggggcctgtgcaatcgggcccaagactgcacgggtggaacggcgggcactgggcgggaaacactccaaaacatcactgagggggcccagaagggaacccaaaaccggcat

SEQ ID NO: 663140 - DNA, 1102 bp, Homo sapiens
cccacgcgccgcgcggccatcccggcacaccccgtaggaccaatgctcaggccaaaggtgtccaaactatacagacccacagaatctaacaacagatgtctcaatattcctcgtcctagaactctcagaggatccagaactgcagccggtcctcgctgggctgttcctgtccatgtgcctggtcacggtgctggggaacctgctcatcatcctggccatcagccctgactcccacctccacacccccatgtacttcttcctctccaacctgtccttgcctgacatcggtttcacctccaccacggtccccaagatgattgtggacatccagtctcacagcagagtcatctcctatgcaggctgcctgactcagatgtctctctttgccatttttggaggcatggaagagagacatgctcctgagtgtgatggcctatgaccggtttgtagccatctgtcaccctctatatcattcagccatcatgaacccgtgtttctgtggctttctagttttgttgtcttttttttttctcagtcttttagactcccagctgcacaacttgattgccttacaaatgacctgcttcaaggatgtggaaattcctaatttcttctgtgacccttctcaactcccccatcttgcatgttgtgacaccttcaccaataacataatcatgtatttccctgctgccatatttggttttcttcccatctcggggacccttttctcttactataaaattgtttcctccattctgagggtttcatcatcaggtgggaagtataaagccttctccacctgtgggtctcacctgtcagttgtttgctgattttatggaacaggcgttggagggtacctcagttcagatgtgtcatcttcccccagaaagggtgcagtggcctcagtgatgtacacggtggtcacccccatgctgaaccccttcatctacagcctgagaaacagggatattaaaagtgtcctgcggcggccgcatggcagcacagtctaatctcaacatcttcttatctgttccattccttttgtagggtggtttaaaaaaggcgccaaggtcaaataagctcgtgccgaattcctgcagcc

SEQ ID NO: 663141 - DNA, 1048 bp, Homo sapiens
ggcacgagcctaaaggcctgactcgctgtctctgctgggaagttggctgtattggccgagagactgagacctcacaggactttaacggcagctggtccttgctgggctgttcctgtccatgtgcctggtcacggtgctggggaacctgctcatcatcctggccatcagccctgactcccacctccacacccccatgtacttcttcctctccaacctgtccttgcctgacatcggtttcacctccaccacggtccccaagatgattgtggacatccagtctcacagcagagtcatctcctatgcaggctgcctgactcagatgtctctctttgccatttttggaggcatggaagagagacatgctcctgagtgtgatggcctatgaccggtttgtagccatctgtcaccctctatatcattcagccatcatgaacccgtgtttctgtggctttctagttttgttgtcttttttttttctcagtcttttagactcccagctgcacaacttgattgccttacaaatgacctgcttcaaggatgtggaaattcctaatttcttctgtgacccttctcaactcccccatcttgcatgttgtgacaccttcaccaataacataatcatgtatttccctgctgccatatttggttttcttcccatctcggggacccttttctcttactataaaattgtttcctccattctgagggtttcatcatcaggtgggaagtataaagccttctccacctgtgggtctcacctgtcagttgtttgctgattttatggaacaggcgttggagggtacctcagttcagatgtgtcatcttcccccagaaagggtgcagtggcctcagtgatgtacacggtggtcacccccatgctgaaccccttcatctacagcctgagaaacagggatattaaaagtgtcctgcggcggccgcatggcagcacagtctaatctcaacatcttcttatctgttccattccttttgtagggtggtttaaaaaaggcgccaaggtcaaataagctcgtgccgaattcctgcagcc

SEQ ID NO: 663142 - DNA, 142 bp, Homo sapiens
gtccccctctgaatacggtgatgctgattgatgagctgatcaagcggtaaggattacagtctgcagctctatccgggtcaggcacatggcccgcgtggcgatgcaatgatctggtcactgcaaaaagcgcgttgggagtttt

SEQ ID NO: 663143 - DNA, 960 bp, Homo sapiens
  misc_feature (86)..(86): n is a, c, g, or t
gatagtaaatcccaagtaaggtacctgccgtcagcagatttggctttcttcttgacacctaatacccacagtcctccaggtacctncgtcggcagatttgagctttctccttggacacctaatacccacagtcctccaggctccagtagattgcaaatgacctgcttactttctgttcccgggctgcgttctgacacctgtcggatagtaaatcccaagtaaggtaccagccgtcggcagatttgagctttcttcttggacacctatacccacagtcctccagtgttttagacgcccagctgcacaacttgattgccttacaaatgacctgcttccaggatgcggaaattcctaatttcttctgtgacccttctcaactcccccatcttgcatgttgtgacaccttcaccaataacataatcatgtatttcaaaaaaaaaaaaaaaaaaaaaaaaaaaaaaaaaaaaaaaaaaaaaaaaaaacaaaaaaaaaaaaaaacaaaaaaaacaaaaacaaaaaaaaaaaaaaaaaaaaaaaatagtactacgcccccccctcttattcttctctatctttgccccacacccatacctccccccacccccctcttttattatttacacccttcttctcccttccaatcactcatttatatccaacacaccctctcctccccacacacacactaccctccctcctcacttacccaactactctgcctccactctacctctttacagcccatacaccctccctcttctcccctcgtaagcacaatactacttctctcctcctcccctccacactcgtgcttatcctcccccctcccacctctctacctacacaacaactcccccacccatactaccttccatccctcccccatcaactcttccccccccctctccatcctacaccccccctcccccctctctcttccccacactatctctccccccg

SEQ ID NO: 663144 - DNA, 850 bp, Homo sapiens
  misc_feature (86)..(86): n is a, c, g, or t
gatagtaaatcccaagtaaggtacctgccgtcagcagatttggctttcttcttgacacctaatacccacagtcctccaggtacctncgtcggcagatttgagctttctccttggacacctaatacccacagtcctccaggctccagtagattgcaaatgacctgcttactttctgttcccgggctgcgttctgacacctgtcggatagtaaatcccaagtaaggtaccagccgtcggcagatttgagctttcttcttggacacctatacccacagtcctccagtgttttagacgcccagctgcacaacttgattgccttacaaatgacctgcttccaggatgcggaaattcctaatttcttctgtgacccttctcaactcccccatcttgcatgttgtgacaccttcaccaataacataatcatgtatttccctgctgccatatttggttttcttcccatctcggggacccttttctcttactataaaattgtttcctccattctgagggtttcatcatcaggtgggaagtataaagccttctccacctgtgggtctcacctgtcagttgtttgctgattttatggaacaggcgttggagggtacctcagttcagatgtgtcatcttcccccagaaagggtgcagtggcctcagtgatgtacacggtggtcacccccatgctgaaccccttcatctacagcctgagaaacagggatattaaaagtgtcctgcggcggccgcatggcagcacagtctaatctcaacatcttcttatctgttccattccttttgtagggtggtttaaaaaaggcgccaaggtcaaataagctcgtgccgaattcctgcagcc

SEQ ID NO: 663145 - DNA, 230 bp, Homo sapiens
gatctctatatgctgtctagaagcctcgctgcagaatgacagcgaaggagtgatggacagtcatcatctcgactgcagtacaagacagtgtcaggtctttcagagaggtaggggactccccttccaccttgccctaatggagaactccctccccttactggctatgtacctccaacaccaggtgccaggccaacctgggttcaaacccagattgcacttctccctagcca

SEQ ID NO: 663146 - DNA, 601 bp, Homo sapiens
ttccaccatgggcaagaagggcaacagttggcaagagccgacgagacaagttttatcacttggcgaaggagacgggttaccgttcccgatctgctttcaagctgatccagctcaatcgccgctttcagttcctgcagaaagcccgagccttgctggacctgtgtgctgcgccagggggatggctgcaggtagctgccaagtttatgcactgtatccagccattatagtgggagtggacctggttccaatcaagcctctccccaatgtggtgactctccatgcaggacatcacaaccagaaccgtatgtacggcatggccctgcaggcaacggatgctgacagaccctggaaaggtcgactgtctgatgcatcaactgattgggtgcccccacacgtatggggctagcttgggtccattgatgcttactcacaatgcccattttgacactgactggctctacgctttgtgcttgtgactttatggcccgtggtggcctgcttcatcacacaaggttcttccgttctcgtgactatcagcctctgctcctggctctttcagcagctgctccgccgttgtccaggccaccatgccccaagccta

SEQ ID NO: 663147 - DNA, 1243 bp, Homo sapiens
cacacacctgagtccacagaaatcaatgatgaaagcattagaagacaattgagtctgtcagaactgcaaaatattgctgagtgtggattgctctgaaatctgaaaacattacttgtgaattgcttctattcaaaatgcagacacaatgccaggtgttggtttacttgtttcccatttttcaaccctcgtttctaggcaaaggtgtccaaattatgcagacccacagaatctaacagatgtctctatattcctcctcctagaagtctcaggggatccagaactgcagccagtccttgctgggctgttcctgtccatgtgcctggtcacggtgctggggaacctgctcatcatcctggccatcagccctgactcccacctccacacccccatgtacttcttcctctccaacctgtccttgcctgacatcggtttcacctccaccacggtccccaagatgattgtggacatccagtctcacagcagagtcatctcctatgcaggctgcctgactcagatgtctctctttgccatttttggaggcatggaagagagacatgctcctgagtgtgatggcctatgaccggtttgtagccatctgtcaccctctatatcattcagccatcatgaacccgtgtttctgtggctttctagttttgttgtcttttttttttctcagtcttttagactcccagctgcacaacttgattgccttacaaatgacctgcttcaaggatgtggaaattcctaatttcttctgtgacccttctcaactcccccatcttgcatgttgtgacaccttcaccaataacataatcatgtatttccctgctgccatatttggttttcttcccatctcggggacccttttctcttactataaaattgtttcctccattctgagggtttcatcatcaggtgggaagtataaagccttctccacctgtgggtctcacctgtcagttgtttgctgattttatggaacaggcgttggagggtacctcagttcagatgtgtcatcttcccccagaaagggtgcagtggcctcagtgatgtacacggtggtcacccccatgctgaaccccttcatctacagcctgagaaacagggatattaaaagtgtcctgcggcggccgcatggcagcacagtctaatctcaacatcttcttatctgttccattccttttgtagggtggtttaaaaaaggcgccaaggtcaaataagctcgtgccgaattcctgcagcc

SEQ ID NO: 663148 - DNA, 1326 bp, Homo sapiens
  misc_feature (287)..(288): n is a, c, g, or t
  misc_feature (294)..(294): n is a, c, g, or t
agcggatggggaatcgtgcggtgtactagcacgtgactgctttctctggactggactgtgggcaggcatcccgaggtggggaccgggaccgtgatggctgcacgtggtggacggggctggtgatgctgtggccctcgtgtggcccaggagatagcagttcctgccgggtgctgctgagtgtcttcatcgtacaaccctgcgcttctggccgcgggacaggagaggttgtcggaatcctataattgaaaaacatgtaaagatggaaaaccagttattgactatcacgnngagggngttgacaggttatagctcggtgctgcagcagtgctacagcatgtacaagaagtctcaggggatccagaactgcagccagtccttgctgggctgttcctgtccatgtgcctggtcacggtgctggggaacctgctcatcatcctggccatcagccctgactcccacctccacacccccatgtacttcttcctctccaacctgtccttgcctgacatcggtttcacctccaccacggtccccaagatgattgtggacatccagtctcacagcagagtcatctcctatgcaggctgcctgactcagatgtctctctttgccatttttggaggcatggaagagagacatgctcctgagtgtgatggcctatgaccggtttgtagccatctgtcaccctctatatcattcagccatcatgaacccgtgtttctgtggctttctagttttgttgtcttttttttttctcagtcttttagactcccagctgcacaacttgattgccttacaaatgacctgcttcaaggatgtggaaattcctaatttcttctgtgacccttctcaactcccccatcttgcatgttgtgacaccttcaccaataacataatcatgtatttccctgctgccatatttggttttcttcccatctcggggacccttttctcttactataaaattgtttcctccattctgagggtttcatcatcaggtgggaagtataaagccttctccacctgtgggtctcacctgtcagttgtttgctgattttatggaacaggcgttggagggtacctcagttcagatgtgtcatcttcccccagaaagggtgcagtggcctcagtgatgtacacggtggtcacccccatgctgaaccccttcatctacagcctgagaaacagggatattaaaagtgtcctgcggcggccgcatggcagcacagtctaatctcaacatcttcttatctgttccattccttttgtagggtggtttaaaaaaggcgccaaggtcaaataagctcgtgccgaattcctgcagcc

SEQ ID NO: 663149 - DNA, 1064 bp, Homo sapiens
gtattactattttgaaatggaagcctcccagtctgaattctgtggattttcgtctaaaaataacaagaatgggaggagaaggaacctcagaggatccagaacggcagctggtccttgctgggctgttcctgtccatgtgcctggtcacggtgctggggaacctgctcatcatcctggccatcagccctgactcccacctccacacccccatgtacttcttcctctccaacctgtccttgcctgacatcggtttcacctccaccacggtccccaagatgattgtggacatccagtctcacagcagagtcatctcctatgcaggctgcctgactcagatgtctctctttgccatttttggaggcatggaagagagacatgctcctgagtgtgatggcctatgaccggtttgtagccatctgtcaccctctatatcattcagccatcatgaacccgtgtttctgtggctttctagttttgttgtcttttttttttctcagtcttttagactcccagctgcacaacttgattgccttacaaatgacctgcttcaaggatgtggaaattcctaatttcttctgtgacccttctcaactcccccatcttgcatgttgtgacaccttcaccaataacataatcatgtatttccctgctgccatatttggttttcttcccatctcggggacccttttctcttactataaaattgtttcctccattctgagggtttcatcatcaggtgggaagtataaagccttctccacctgtgggtctcacctgtcagttgtttgctgattttatggaacaggcgttggagggtacctcagttcagatgtgtcatcttcccccagaaagggtgcagtggcctcagtgatgtacacggtggtcacccccatgctgaaccccttcatctacagcctgagaaacagggatattaaaagtgtcctgcggcggccgcatggcagcacagtctaatctcaacatcttcttatctgttccattccttttgtagggtggtttaaaaaaggcgccaaggtcaaataagctcgtgccgaattcctgcagcc

SEQ ID NO: 663150 - DNA, 1028 bp, Homo sapiens
catcatacatacctttccctgtgaaaccgaaggggataccaaagttctatacctcacagaccatactgcagccggtcgccgctgggctgttcctgtccatgtgcctggtcacggtgctggggaacctgctcatcatcctggccatcagccctgactcccacctccacacccccatgtacttcttcctctccaacctgtccttgcctgacatcggtttcacctccaccacggtccccaagatgattgtggacatccagtctcacagcagagtcatctcctatgcaggctgcctgactcagatgtctctctttgccatttttggaggcatggaagagagacatgctcctgagtgtgatggcctatgaccggtttgtagccatctgtcaccctctatatcattcagccatcatgaacccgtgtttctgtggctttctagttttgttgtcttttttttttctcagtcttttagactcccagctgcacaacttgattgccttacaaatgacctgcttcaaggatgtggaaattcctaatttcttctgtgacccttctcaactcccccatcttgcatgttgtgacaccttcaccaataacataatcatgtatttccctgctgccatatttggttttcttcccatctcggggacccttttctcttactataaaattgtttcctccattctgagggtttcatcatcaggtgggaagtataaagccttctccacctgtgggtctcacctgtcagttgtttgctgattttatggaacaggcgttggagggtacctcagttcagatgtgtcatcttcccccagaaagggtgcagtggcctcagtgatgtacacggtggtcacccccatgctgaaccccttcatctacagcctgagaaacagggatattaaaagtgtcctgcggcggccgcatggcagcacagtctaatctcaacatcttcttatctgttccattccttttgtagggtggtttaaaaaaggcgccaaggtcaaataagctcgtgccgaattcctgcagcc

SEQ ID NO: 663151 - DNA, 1034 bp, Homo sapiens
aagacacttacctaaccaaccacacgccccaacaccccccaaaccaacctcagtagctacatagtaccacattgcagccggtcctcgctgggctgttcctgtccatgtgcctggtcacggtgctggggaacctgctcatcatcctggccatcagccctgactcccacctccacacccccatgtacttcttcctctccaacctgtccttgcctgacatcggtttcacctccaccacggtccccaagatgattgtggacatccagtctcacagcagagtcatctcctatgcaggctgcctgactcagatgtctctctttgccatttttggaggcatggaagagagacatgctcctgagtgtgatggcctatgaccggtttgtagccatctgtcaccctctatatcattcagccatcatgaacccgtgtttctgtggctttctagttttgttgtcttttttttttctcagtcttttagactcccagctgcacaacttgattgccttacaaatgacctgcttcaaggatgtggaaattcctaatttcttctgtgacccttctcaactcccccatcttgcatgttgtgacaccttcaccaataacataatcatgtatttccctgctgccatatttggttttcttcccatctcggggacccttttctcttactataaaattgtttcctccattctgagggtttcatcatcaggtgggaagtataaagccttctccacctgtgggtctcacctgtcagttgtttgctgattttatggaacaggcgttggagggtacctcagttcagatgtgtcatcttcccccagaaagggtgcagtggcctcagtgatgtacacggtggtcacccccatgctgaaccccttcatctacagcctgagaaacagggatattaaaagtgtcctgcggcggccgcatggcagcacagtctaatctcaacatcttcttatctgttccattccttttgtagggtggtttaaaaaaggcgccaaggtcaaataagctcgtgccgaattcctgcagcc

SEQ ID NO: 663152 - DNA, 202 bp, Homo sapiens
caggtcgccctccgattcaggttagaatgaggaggtctgcggctaggagccaataaagtgcttggcttagtgggcgaaatattatgcttatgtggttgtggatatatggaggatggagataattgctaggatgaggatggatacgtaatacgggaaggacgcctcctagttttgtaaggggacggactcgagaccttgtgta

SEQ ID NO: 663153 - DNA, 1035 bp, Homo sapiens
aaaaacacccccccactaaacatataccccaacatgtaaaataaaaaacctccataactcacagaatccgtatagcagccggtcgtcgctgggctgttcctgtccatgtgcctggtcacggtgctggggaacctgctcatcatcctggccatcagccctgactcccacctccacacccccatgtacttcttcctctccaacctgtccttgcctgacatcggtttcacctccaccacggtccccaagatgattgtggacatccagtctcacagcagagtcatctcctatgcaggctgcctgactcagatgtctctctttgccatttttggaggcatggaagagagacatgctcctgagtgtgatggcctatgaccggtttgtagccatctgtcaccctctatatcattcagccatcatgaacccgtgtttctgtggctttctagttttgttgtcttttttttttctcagtcttttagactcccagctgcacaacttgattgccttacaaatgacctgcttcaaggatgtggaaattcctaatttcttctgtgacccttctcaactcccccatcttgcatgttgtgacaccttcaccaataacataatcatgtatttccctgctgccatatttggttttcttcccatctcggggacccttttctcttactataaaattgtttcctccattctgagggtttcatcatcaggtgggaagtataaagccttctccacctgtgggtctcacctgtcagttgtttgctgattttatggaacaggcgttggagggtacctcagttcagatgtgtcatcttcccccagaaagggtgcagtggcctcagtgatgtacacggtggtcacccccatgctgaaccccttcatctacagcctgagaaacagggatattaaaagtgtcctgcggcggccgcatggcagcacagtctaatctcaacatcttcttatctgttccattccttttgtagggtggtttaaaaaaggcgccaaggtcaaataagctcgtgccgaattcctgcagcc

SEQ ID NO: 663154 - DNA, 200 bp, Homo sapiens
ggcgcttgggctgtcactgggcctggcgcacagctgggtctcttcgtcaagcgcgtgctggagtggtggtgcggcccatcgggctgcccggctcccggtgcctgctctcctggtggcggtggctggaacaagtctggtgggagtgacccagcgcttcgcggcgtctgtgctccggcccacccaccgggccgcgtgcggtt

SEQ ID NO: 663155 - DNA, 531 bp, Homo sapiens
cgggcattctttttcagggttgagccaaagggtttattttgaggaaaggcttctccgggtcatttaacgttgaatggcgggaaagtaaggctagatatccaaaaagaacatttagcgattccttcatgcattcaacaacttttattgagggcttctggtatgcccaaaattgatcaatggccctaaagatcccaggttagggtctgatacatttctgaagtttgcaaagtccacatttgagttcataatggatatttgtaaaaaaaacggtggctttgcgctctttttatgtttatttaagataaaagcagtataacctttgagagaattatatgtaatccttcccctttgaaattaaaggattggaaccaaacgccctggcatgttcctgtaatcccagcctttgggtaacctcaagcagaaggttccctttaggccaccagtttgaaggtgtagtacactataattgcccctgtgactagtcactgcaccccagtctgggcaacataaaaagacccccctctcccccga

SEQ ID NO: 663156 - DNA, 502 bp, Homo sapiens
  misc_feature (23)..(23): n is a, c, g, or t
  misc_feature (62)..(62): n is a, c, g, or t
  misc_feature (64)..(64): n is a, c, g, or t
  misc_feature (69)..(69): n is a, c, g, or t
  misc_feature (72)..(72): n is a, c, g, or t
  misc_feature (75)..(75): n is a, c, g, or t
  misc_feature (79)..(79): n is a, c, g, or t
  misc_feature (84)..(84): n is a, c, g, or t
  misc_feature (92)..(92): n is a, c, g, or t
  misc_feature (109)..(109): n is a, c, g, or t
  misc_feature (115)..(116): n is a, c, g, or t
  misc_feature (120)..(121): n is a, c, g, or t
  misc_feature (124)..(124): n is a, c, g, or t
  misc_feature (141)..(141): n is a, c, g, or t
  misc_feature (170)..(171): n is a, c, g, or t
  misc_feature (174)..(174): n is a, c, g, or t
  misc_feature (185)..(187): n is a, c, g, or t
  misc_feature (191)..(191): n is a, c, g, or t
  misc_feature (193)..(193): n is a, c, g, or t
  misc_feature (195)..(197): n is a, c, g, or t
  misc_feature (199)..(199): n is a, c, g, or t
  misc_feature (203)..(203): n is a, c, g, or t
  misc_feature (206)..(206): n is a, c, g, or t
  misc_feature (208)..(208): n is a, c, g, or t
  misc_feature (215)..(215): n is a, c, g, or t
  misc_feature (218)..(219): n is a, c, g, or t
  misc_feature (221)..(223): n is a, c, g, or t
  misc_feature (240)..(240): n is a, c, g, or t
  misc_feature (243)..(244): n is a, c, g, or t
  misc_feature (248)..(248): n is a, c, g, or t
  misc_feature (255)..(255): n is a, c, g, or t
  misc_feature (257)..(257): n is a, c, g, or t
  misc_feature (268)..(268): n is a, c, g, or t
  misc_feature (271)..(271): n is a, c, g, or t
  misc_feature (283)..(283): n is a, c, g, or t
  misc_feature (301)..(301): n is a, c, g, or t
  misc_feature (306)..(306): n is a, c, g, or t
  misc_feature (315)..(315): n is a, c, g, or t
  misc_feature (333)..(334): n is a, c, g, or t
  misc_feature (345)..(345): n is a, c, g, or t
  misc_feature (348)..(348): n is a, c, g, or t
  misc_feature (354)..(354): n is a, c, g, or t
  misc_feature (358)..(358): n is a, c, g, or t
  misc_feature (362)..(362): n is a, c, g, or t
  misc_feature (367)..(367): n is a, c, g, or t
  misc_feature (370)..(370): n is a, c, g, or t
  misc_feature (374)..(375): n is a, c, g, or t
  misc_feature (378)..(378): n is a, c, g, or t
  misc_feature (386)..(387): n is a, c, g, or t
  misc_feature (391)..(391): n is a, c, g, or t
  misc_feature (394)..(394): n is a, c, g, or t
  misc_feature (400)..(400): n is a, c, g, or t
  misc_feature (412)..(413): n is a, c, g, or t
  misc_feature (418)..(419): n is a, c, g, or t
  misc_feature (434)..(434): n is a, c, g, or t
  misc_feature (447)..(447): n is a, c, g, or t
  misc_feature (455)..(455): n is a, c, g, or t
  misc_feature (474)..(474): n is a, c, g, or t
  misc_feature (476)..(476): n is a, c, g, or t
  misc_feature (481)..(482): n is a, c, g, or t
  misc_feature (484)..(485): n is a, c, g, or t
  misc_feature (502)..(502): n is a, c, g, or t
tgtgaaaaatttttggtcaagtngtgtccattaaaaagtactgattttaaaaacataataantnaaaantgnganaggnaaaanagaaaacnaaagtggtccacaaaanattctnntttnnttntgaaggttttacgatgnattgtgatgattaaccagtatataactannaancttaaatgggnnnttgnangnnnangtantgngnaggatantanncnnnctgcttacgcgtggggnggnngggntgcgggntnatattgatttnggnttgtgagggttntggggcgcgttggtgccnttgcncgcgcccgncgcgttcttgtgccctgnnttgctgcgcanaangggccntgtntgtnttaantgnggcnnagncccgggcnngcanggngagatngtgtgcgaaggnntagannacccgactaggggcntggcgcgggcgcnctcttccncctgggcggcatgcaagcngnattgnngnntaaagggaaaagcttgn

SEQ ID NO: 663157 - DNA, 1270 bp, Homo sapiens
agcggagccgccatcttgtgttgatccgtacccagtgggcagcgccgggagctggaccaagcggccggtgagaggccgctgtagcggtgctcagccacctgtgctgcctgccagggggcgggccgaaacctggaggcccggggggcccagctcccgtagggagccgtgggcgctcggtgcccgggccgggcaggacagaataataagctgaatagaatctgaccattggctttcacctggccaggaccttctatgtagctctccttttgtggcccatgtgctgcatcctctgccctcagtgtgcaactggcccccaacgcaatgtgtgtttgtcaaaccatggaagtggggcagtatggcaagaatgcaagtcgggctggagaccggggagtcctcctggagcccttcatccaccaagtaggcggacacagcagcatgatgcgttacgacgatcacactgtgtgcaagcccctcatctcccgggaacagcgcttttacgagtccctccctcccgaaatgaaggagttcacccctgaatacaaaggcgtggtatctgtctgttttgagggggacagtgatggttacatcaacttagtggcctatccttatgtggaaagtgagactgtggaacaggatgacacaacagaacgggagcaacctcggcgcaaacactcccgccggagcctgcaccggtcaggcagtggcagtgaccacaaggaggagaaagccagcctgtcccttgagacctctgagagccacaggaggcaaagagtccgaaggttgatgctgcacaggccactcagaaggtccctttccaggattgctaaatgtgcaacatgtgggcttgagtttcctgagacggattcatgccacaaacccccttgggagacctgcggtgtcacaaaggcaggccagtctgagccggcatgctgcatcccgaagttccaaagggacccggaaaatgtcttctagcaaggtttccatccttgccttgatgaaaccgtgagtgacaccaacgtttctagtggttaccccccttggcgctggtatggggaccccctttgaagaattgtgcgcagcgcaggggcaaggccattgtggccgaatgaacggccgatacaggccttgatcaacagcgcagtgcccctgggcagagaattccaggaaaaattgccgacggcacaggaatggcagcatttcagggccgcacggccgttgaggtccgtacacagggggtcctgccagggcattgccacaggtgagtagccag

SEQ ID NO: 663158 - DNA, 177 bp, Homo sapiens
tatccgtgtcggggttgctgttctcatccccaatcttgctgtatgtcacagttggccatggatgatggcggctggcgaatgggaggagttgctcacctctcagcacgtccagctcccaggagatgttgtattgcttgacaggcctcagccatgctgattggtgctggaacgtccacc

SEQ ID NO: 663159 - DNA, 919 bp, Homo sapiens
agcggagccgccatcttgtgttgatccgtacccagtgggcagcgccgggagctggaccaagcggccggtgagaggccgctgtagcggtgctcagccacctgtgctgcctgccagggggcgggccgaaacctggaggcccggggggcccagctcccgtagggagccgtgggcgctcggtgcccgggccgggcaggcgtggtatctgtctgttttgagggggacagtgatggttacatcaacttagtggcctatccttatgtggaaagtgagactgtggaacaggatgacacaacagaacgggagcaacctcggcgcaaacactcccgccggagcctgcaccggtcaggcagtggcagtgaccacaaggaggagaaagccagcctgtcccttgagacctctgagagccacaggaggcaaagagtccgaaggttgatgctgcacaggccactcagaaggtccctttccaggattgctaaatgtgcaacatgtgggcttgagtttcctgagacggattcatgccacaaacccccttgggagacctgcggtgtcacaaaggcaggccagtctgagccggcatgctgcatcccgaagttccaaagggacccggaaaatgtcttctagcaaggtttccatccttgccttgatgaaaccgtgagtgacaccaacgtttctagtggttaccccccttggcgctggtatggggaccccctttgaagaattgtgcgcagcgcaggggcaaggccattgtggccgaatgaacggccgatacaggccttgatcaacagcgcagtgcccctgggcagagaattccaggaaaaattgccgacggcacaggaatggcagcatttcagggccgcacggccgttgaggtccgtacacagggggtcctgccagggcattgccacaggtgagtagccag

SEQ ID NO: 663160 - DNA, 308 bp, Homo sapiens
cagcagtagcttgtggtatgtaagttgggtatggacagcgtgtagctcagtcgggagggtgagatgccgggcgtaaaagaaaatatgtacacacaagcattactaggaataggctgatgaggaattcattgtgagggaatacataaggtaggaaagaggtctttggtttatcagctacatgaaagaattaatgcttttctagtctcacagagttcctcattttcttgagaagtctttagacattatcttaaatgctacaatccattagattactttatgacaatatgtacttctggctggttccgctg

SEQ ID NO: 663161 - DNA, 953 bp, Homo sapiens
  misc_feature (947)..(947): n is a, c, g, or t
tttcctttgcttgtttttcgtgttttggtttcttcttactgtttccttgtaattttgttttctgttcctgcatgtctttgggcctttccccttggctcttttccgggcttgacttttttgtcttcttttcccgctccctttttccatgcctccgttactcttctattcttctgccgtccaggttgctagcttgcagtgttcaggaccgtccgggttggtattcatagctatgtttggtgtatctagtactgtatgtcctgtgtactctgtaatgggaagtgttctgttccattggggccttagctatttgaatgggttggttatggctggtatttatatttgcttagtggctgtctatttagcatatttcctctgagtgggtgctttatttggtgtccagtatcgacttttacagattcgtggccagtggtaggatattataatcctatgttactgtttttggtccctctttccgattctattctttcatctgtttgtatctgcgcccagaattctcagttacagtgggggtgagggtggttggcgattgccttagaggcaacccctaaattggttttggtataagtttgtgcccttgaccttaatttcattgctaccactctgatctcttagcacatttcttaggattaagggtccataaatgctgatctaaggggttgccacgatgttgaactatgcaactttttatttaaaaagctctgcactgccatgtatgaaagtctctttatgatgtttgtttttttgtcatttttgttctttacatcaagaatttataatgaattaaatatgcggagaatgtataaccccccagctcctatcagggttgctaaacctggtacattgtatatgaatgtactacactggggttcccttaccggttgctgtacttgttactatatccctgggaatcatgatcaagactaatntcccct

SEQ ID NO: 663162 - DNA, 1610 bp, Homo sapiens
agcggctcccagatgcgggcaccgaagccggggggacagccggtgtggaggacggagagcgccagtgcctgagggctggccggctagtagcgggaaaccagcttctctgaccgaagctctggactccgctgatccggagcgctaaagtgtgtccggtgccaccctgatgctctcctgggagttatgttgctcctggctgagaaatagacttacctcgtttcttagatagcgttcctgcgagtgattttcaggacgctggatgctaagactagacgaagcaagccaaagcccccgcgagccaggcaggccggtgtcacggccctatgattatggcaagggggaccctctgcctggctgctgcttcctgagacccgttcggaacctcacgtacctcgaagctcaccgttttcctcgcaaagaacctggttaaatgtccataatggctgagttttattttggaacataatttctttggttcttcaccagcactttttggagagtggtaatgtcttcctcttttgctttaggagaaggacagaataataagctgaatagaatctgaccattggctttcacctggccaggaccttctatgtagctctccttttgtggcccatgtgctgcatcctctgccctcagtgtgcaactggcccccaacgcaatgtgtgtttgtcaaaccatggaagtggggcagtatggcaagaatgcaagtcgggctggagaccggggagtcctcctggagcccttcatccaccaagtaggcggacacagcagcatgatgcgttacgacgatcacactgtgtgcaagcccctcatctcccgggaacagcgcttttacgagtccctccctcccgaaatgaaggagttcacccctgaatacaaaggcgtggtatctgtctgttttgagggggacagtgatggttacatcaacttagtggcctatccttatgtggaaagtgagactgtggaacaggatgacacaacagaacgggagcaacctcggcgcaaacactcccgccggagcctgcaccggtcaggcagtggcagtgaccacaaggaggagaaagccagcctgtcccttgagacctctgagagccacaggaggcaaagagtccgaaggttgatgctgcacaggccactcagaaggtccctttccaggattgctaaatgtgcaacatgtgggcttgagtttcctgagacggattcatgccacaaacccccttgggagacctgcggtgtcacaaaggcaggccagtctgagccggcatgctgcatcccgaagttccaaagggacccggaaaatgtcttctagcaaggtttccatccttgccttgatgaaaccgtgagtgacaccaacgtttctagtggttaccccccttggcgctggtatggggaccccctttgaagaattgtgcgcagcgcaggggcaaggccattgtggccgaatgaacggccgatacaggccttgatcaacagcgcagtgcccctgggcagagaattccaggaaaaattgccgacggcacaggaatggcagcatttcagggccgcacggccgttgaggtccgtacacagggggtcctgccagggcattgccacaggtgagtagccag

SEQ ID NO: 663163 - DNA, 630 bp, Homo sapiens
  misc_feature (496)..(496): n is a, c, g, or t
tgtgaatctggtaaaagttaatcatcaggtctcaggagttcagcaaccgaccatcatgagctatatagtattagtctgcagctctacctgagagcagcccagaaaccaaataggaatatatcagacattatcccagagagaaggctcagtcaaggatctgcagctgggacctgcatatcttaattcccctgttcctgggaaagttatccaatagctactgaaatacaagatggaaggtatcctctctgtaccatagctaaaggattgctcacaaaaatgaaagtgcaattacagaaaaattatccttgggctatgaccacatctcctgagtattttattgccaccacgactcatgatttcaattctcaggactgagtatctctgctgaacgcaaatttaaattcttaatatgagaagctgcactttccagtcgtgtgtcaatgcaaagtgagtggatttgggtttaactcccttggactgagtgcaattatatgtngggaggggactaacaaggtagcccatgtaacaaatactgtcgtaattatgtgcaatattttcattttttacttctgatcaaccgcaagagtagatgaatgctatggttcagttttgcacttaaaaatgatgatt

SEQ ID NO: 663164 - DNA, 166 bp, Homo sapiens
aaaagagggtgaggaggagaaagtagcgaagagaaaagctgctgtgctttctgatagtgaagataagagaaagcatcagcaaagaagagtcgtgttgtctctgatgcagattgctatggtcttctctcttttgcctgacttgtctgatacagcatcactgtcagag

SEQ ID NO: 663165 - DNA, 1100 bp, Homo sapiens
cgtgaacgcgtggtgcgttggtggctgcttttgtgaaaagcttgaggtggggacgatgaacagtgagggggcttctgaggtgggtggctgctttctgctcctgacctggaacagactgccagagtggagtgcctgtcgtgccaagagtgggcttgagtggcctgaacctgtgggccagtgatggcgtgtggcttggtgatatggcatgtgaccccgaccccactgtgaacggtgaatgtgccagctgtaggtgcgcatgtgctgtggcaggtcccccgaccccaagaagctccagggctgtgtggcgactgtgggcagtgtcttgcagaggggctagtggcagagtgctgactctaatggggagtgtgcaattgggaagatgaggcaacggggtgccacaagtaaggtggtttagaccccgggcagcagaggttaaaatttggttccatgctcttgaggacgctgggtccagtcgaagtcgccaccgtggagcatcaagagggtgcagtagtgtcgcgcaccaccgcgtaccctaagggagacggacgataggccgcctaaaccaggagtgctaaacgtccttgtgggtccctaaaggcatccgtggcgtcacgcagaacatgggcctgtgagagattggggagcccttggggtgaattacacgggggtgtggaacatcacccgcggactacggggggtccaaggcgcgccttgacgaaaaggggcggggacgagagaggcgcagcgagggggaaccgggcgcactaccgaggggtgggagaagcacggcagcgcaggcaacagagcaggcgtaccattctgcccctggccgaagaagccgtgcgaggcagggaggacgcggcgagagtagggaaaaaacaaaaggcccggggactggaacccgctagcgacgggcgagagagggggggaacgaacggagagagaaggaaacgagcgcagggggggcggtaaacaagacgtgggaacaggggagaagacggaaagaggggcaggccggcggacagagcggggaggaaggaacagagagagggagggcacgagcgggacgacgacgacgaacacgcggaggggaaagcgag

SEQ ID NO: 663166 - DNA, 139 bp, Homo sapiens
tcaccggtaccgtacatgaacatctgccttgtgccatgtgacggatccagcaggaagcccttatcacaccagatgtgggcaccttctgcttggactttccagcctccagaactgtgagaaatacatttctgttctctgt

SEQ ID NO: 663167 - DNA, 1245 bp, Homo sapiens
ggagaactagtctcgagttttttttatttttattatggtcttttttttttaaatcaaaggtccctaatgggtcctgttccataattaccgtgaaccaggggaaaacggggagaaggaaccagcgcggcacagggaacggggtacatctccacaaacatgccattatatacaccagaaacctaaagcagacaagccacagaagtcacaatgggcggtaaacaagtgggcagcaatggacaagggggaggacccatggtggggaacatgggggattgttgtgtaaaaaaaaaatacagggctcccccaaacaactaggggtgtgcccttgggggggaacctgaggtgctcgtttacacgccacaaaagggaactcacaagaaaatcaaaaagcacttttgggaaaaagcgccaaaacccgtacaaaggaaatgagaggggacaaaagggaacaatccccaggggcggattagggaaggtgtcatgtgaatagggggcaactctgggggggatcaaaaagggagatataggcgcattcacacaccacgtagagagggaaaaaatacacccgcagaaagaaacccctttacccagggaacttagagagaacaagaaaaaaggggcatcatacccacttgtggaaaacgccccacaaaagggcgccacggaagaatagagagaaatacgacaaaaataatgcatacaaacagagacatggagtggcccaaaaaaagcggtgagcaaccacacaaaaaggctgctatgggaccccactaccaagtgggcaaacattcacacccggctagtttagccccaccaaaacgagataacgctcggaccacaaagagaatgaaaacgaacgcacacacccaatagagaagcacaccctcagaaaagacacatagaacacacaagagaacaaataccaaccaggccgaaaaacccacccctatgagaaaagacaaatcacataaacagtacaaaggacacaacacatgaaaacaactgagcacaaaaaataattacacttagtggacccaataaaaggaggggcaacaaaaacatcaggggggcaccccaaaaaagaagagaacaacccaccaggaaatacctaccaatagttgagcacccacccggttgagatccccacaagaaggtgcgagcaatcaaaaagaagggagcaaaagagcgggcacaaagcccctaataatatcatcgagagcgaaagatgctctgtaaaacacaaag

SEQ ID NO: 663168 - DNA, 291 bp, Homo sapiens
gggggggaaaccccccttaaaaaggggcccttttgttcccccttggggggggggtctttttcgggtggttttttagggggttttcaattttttttttggggggggaaaaaccttttttcccccccccattttccctgggggggtttttttgttttccccccccttttggccatttttttattaaaaaggggtttcctggaagggttcttttttgggggggaaaaaaaaaattcccccaaaaaatttttcaacccccccccccaaaaaaaaaaatgagggggggggggggga

SEQ ID NO: 663169 - DNA, 196 bp, Homo sapiens
gggattacgactgggatatgaccttttgaaccagttgaaatttgaacctgtcccgttgaagaggcgggcattgacacagcaagacgtagaagaccccttattgggagctttttaatttttatttaaattgcaaaaccagttacccttaaccaaaccccaccagggttccttaaacttcccaaaacccttgcattta

SEQ ID NO: 663170 - DNA, 300 bp, Homo sapiens
  misc_feature (279)..(279): n is a, c, g, or t
cctccctccctccaccacctccctctttgtaagttctgggcattgaactcaggtcatcaggcctggcagtaaataatattccctgagcttagaccctgatgtacacagaaaggaggaagccggctgtgcaggagtacgcacccttccttccctcttgactgaaatcagctgcttcaggttcttgccctcctgacttgccctccatggcggattgtcccgttgaactaaacccccaataaaccctgatttcttatgttgcttctgttgggatgttttgtngacgcggccgcgaatttagta

SEQ ID NO: 663171 - DNA, 138 bp, Homo sapiens
  misc_feature (2)..(2): n is a, c, g, or t
  misc_feature (86)..(86): n is a, c, g, or t
angatctgaggggaaagcacaggctgctcgaggcgcctgctcgcttactcgcctgccaggagaccgggctctcagtttggggtgtngtgcaaccttcatctgcactgggccctgtgcccctcctccccatcctccatg

SEQ ID NO: 663172 - DNA, 319 bp, Homo sapiens
ttgtaaatagttttcagttgatttctttgatcttacaggtaggtgcttccccatagattttcgtatactggctgttagtagttcagtgcccttcctcagaaatccctttcctaattaccctgggctattggaacttttcttcttgttgtgggctgtttttgtagtccatcttgttctctgatgatctttttaatgtgtatgtgaacttattttttaacttgcttcacttcgactgagagcttcatacctctcaggtcggtgggagaaaatgagtttactttttgggactgtgatagttttcattcctggcaagtgttgg

SEQ ID NO: 663173 - DNA, 117 bp, Homo sapiens
  misc_feature (19)..(19): n is a, c, g, or t
  misc_feature (53)..(53): n is a, c, g, or t
  misc_feature (86)..(86): n is a, c, g, or t
  misc_feature (88)..(88): n is a, c, g, or t
gctcggcgggtcctaaggnacctggggcagagctggaagaggaaagctctgantccaggccctgtcccctgagctctgccctcggntntccgaccgcccagagcctgcatgcgccgt

SEQ ID NO: 663174 - DNA, 508 bp, Homo sapiens
tatcaacatgtcagatgttgcttctttggttgtgtatccttttaatgaaggaagaagaggtagagaaaaaagaaaatccttgagggacaagcagtattgaagacctaacatttcacagctgctgtgatgtttgaaaatttatgtgaagtctttattttgatgcaacaatttaattgtggcctagagctgagatttgcatctctaaggctattcaatgtagagttacaacgataagatttttttttttaaagaatggaactataatagcactgagcaagaacattccttaaactatcaatggccagaagttttgaagaatatgtggaagacagaaagcatcagttcaatcaatggactcatggagaaagctcagtaggaaatcaaaattcagagcagcttcaagtctgggggtcaatagagagctagaatgagccacagagaaatcatcaaagttactcattttatagaactgtgtttccaataacatggacatttggttgcccctctg

SEQ ID NO: 663175 - DNA, 195 bp, Homo sapiens
gtgagtctctttaaaaaccaattaaaaaaaaaaaaaaagcttttctggacaattatgaacactttttcaatctggtagcagaccaattcaaagattcactctggcagggacttttggtaagataatggttagaggacactgtgagattcgatagaaaaataaccctgcacagttaagggttacgagactccacgt

SEQ ID NO: 663176 - DNA, 259 bp, Homo sapiens
ctcaagtcgtgacgggctataatactagttgagattatatcatttacgggggaaggcgcgtgtgaagtacgccttatttctcttgtccttatcgtacgagggaggaattctcgcaagtagatagaaaccgacctggattactccgtgtctgtactcagatcacgtttagactttacatctgttgaacacaacgaacctttaatagtcggctgcgaccatcggagagtgtcgctgagtccaacatctgaggtctgtaaac

SEQ ID NO: 663177 - DNA, 113 bp, Homo sapiens
ctccctggaagaagggcaagagaaataaggccttttttacaaagggcctttccccgtaaatgatattatttccccttagttttatacccacacccacccaaggacagggttta

SEQ ID NO: 663178 - DNA, 194 bp, Homo sapiens
  misc_feature (73)..(73): n is a, c, g, or t
attcggcacagggctgcgtcctcatcggattccgacgcctgcaactgatgagcaatgaggccaattcgaagtngttggatgcgcactacgacccaatggccaatatccacaccttttctgcctgcctagcgctggcagatttacatggggatggggaatacaagcttgtgggtaggggaccttggccctggtgt

SEQ ID NO: 663179 - DNA, 2628 bp, Homo sapiens
  misc_feature (2625)..(2625): n is a, c, g, or t
ggggtctctagtaacccacctggtctgacactgaggaaacacctacaggctgctgatcccacagtgaggggtgtgtgccgcctgggcatgggcatttgtgagtgaggggccctgctgatcccacagtgaggggtgtgtgccgcctggggtatgggaactcgtgagtggggacccctgttgctctctggccctgttggtgctcgcagctatgtgtgtgggctggcacagatgggactgaaccctccagggccctccagggttcttctagggcaggagtggaagggtgtggtggggggcttggaggggtcttgccctcatcccctgccctgttactgaggtgagtccaacacctgccttggggcccagctggcctgtttttagaagcttcttagagaaggaagaggaggaggagaaggaaggcctgggaagcagggatggagggtcctgggcactgcccactatttactgtcttagatggtgactcaggaagggacctggtgctggagtccacctagggggcaggtcacagtgcatccttctgagctcagccatgaaggcctaaaagtgcctgagaaccacatcatcatccagagcccaggcctgggacactgcgtcttgggagagctcccacaggacaaacaggagagcttcaggagagggtctaggtttggggctgggcgtcaggccaggaggggtctcctgggagggttctgtgccttcactctgtttctgccctgtgcaccttgcactgggcagtgctgggtcctttctggacacccctggggtccagctctgcacaggaggcaacagataccggaaagcccaggcagggaagcgctcgccacactcctgcctttcatctgagttgtgttaggggtgggttcagtttccaggaggactcatggtgccctgtccagcccaccagggctggattggtttggccctccctctgggctaaagcagaaggttctgtgggcagtgtgggcactgccctcgggccaggtttcatgtacttgtgtgctcccccagcgccctcgggcacatggggacagggttccgtgcactttcaatgccacatgtgccctggctgtgagcatgtgcttgccctggagaaggcagatgtaccagagcctcaggatgagcttgtgatgagcttgaagtaggagtttgtggggacagcaggcatgggaggacctggtccttcaaggtagagggctggtggcctgagcagggcctactggggcctcagtctgtggtgctgggggtcccctatgtatggggtgagacctcccacaggaggctggatcaggtaaggttttgcagcttcttataggggtggtctcacctccatcaaatgtggcccctgaaagaaggggctccccaagtactctcccaagatgagtcctggcccagtctgcccaggatgctggccctgagtcccagccccagccgtatgataccccctctcaggcagggcatggtttgtgtgccatgcagggacctgcatctgcctcctgtgcagaggaagggagctgggtccttctggaggagccagacccctaagctggggaagccaggccctgtagggcagcagggtccctggcctggggtctcttgtgcacacttatcccatgaatcaacaaatgtagaagccattttaaggtggcaatctgggtacacaacatttgcttgtcttcacagaaggagcagaggtgttcagagcccgctggactgccctgaaaacctcactattccaggctcctctgcagacccttcccaaggctagaactccaggcagtaggctgggctgtcaccctcttctctgagatccttcccctgtcctgagacctccccattgcccctcagatgccgcatcccttcagattgcccacctcccctgggaccctccatgccccacatgccttacttgatgctgcggcgctctctcaacatggcgtggcttatgaaggtgtggctcacatcaaggtcattctggtgcacgttcactgaggacatcttggcctgcttcattttctatagagcagggccaagcctcagaacagacacaagactcactgtcaaaattgctgtcatgaaatagcagttctggaaggaaaggaggctttttctgcagaaacttctctttatttccaaagccagggaaagtcagcagcacgcagctcacctgtgttgcccatgccactgtctgcccaggatttgtgactgaccccttctgcccccttggggttgactttccctccatctgggtaacggggcttctgacacggtccggcctatgcatcctgctctggctgggactggaaggaccagacctggtatttccctgggttcttggccttcgccttctcgacattcagtagggatgaccatgctgggccccagacatctgtgaggtttcctttgcagatccaatgagacatctgtggacagaagaatgctctggtgagacaggcctcagggtgaccccaagggggatccgaacctaaggattctggaagcttccagcctttggctccacgtttcctcaggagaggttcagtctgcctaggactgggcctcccttcccctgaataaagagtgagcaagagctcaggttgtgaactntga

SEQ ID NO: 663180 - DNA, 226 bp, Homo sapiens
gaactctcggcgcaccctacgatagctcttagactagagtgtaccgcggggcccgaagcgtagactataggaaaaaataagagtagtaacaaagcaggcccgagccgaatgcataccgcagctagaattaataggaataggaccgcggttctattttgttaggtaaacaggaactagaggccataataaagaagggacggccggggttccttacgtaatagcgccg

SEQ ID NO: 663181 - DNA, 156 bp, Homo sapiens
  misc_feature (79)..(79): n is a, c, g, or t
cgcctcccgggttcaagcgattctcctgcctcagcctcctaagtagctgggattataggcataagccaacgtaactggncagatgcatctctttgagtttgggaacgaaaagggtatgatggcagaatcatgtgctggcagtcatgatctcagtga

SEQ ID NO: 663182 - DNA, 935 bp, Homo sapiens
ataaatattcattaaattgaaaattaaaattatgtttttattcttaatactggattagtctgccacacagccagccttctctgtgtaacagcagtgtcaagctgtggtctggtacatttcatcgtgtacagaggaataaggtgagtatggtgcctggtagtttcggcatggggagcagggacagaacagacaatcatagtcgtaagtgccctcttctcgggcaagcattctttctaaactgtagtaaagtggacttatcacatggtcgctgtgtgcaagttgaatgcagcatcccgcttagtctggctcggagaaattctgagctgcgtctcacttattatagctgtctctactaggcagactcttccacagccttatcacagttccatgttccgttaattggcgatggcggaggccaggaccgaaaccaagcactccacttgcgcattcttcgctctttctagcagctgtgggcttatcgattcagggtcctagactagtcaatgctttggaacgtcacaggttcccctcgggagcatccaaacgttacacgggcacaccgtgaatctgacttcacgaattttaaactcttcctcagagttcgactggacatctccgtcggcttcacttcacccacggggctccggcccaccgcgatgcgctccgcccgcaatggatcttgcccctagttcgtcttcggagctcttggcttccaccggcgtttaaatctctgctaccacctggttacacttcctggaaagttccacaggctcgctagtagcgatgcgcgctatctgctggtccctagtctggacccggttcgccctttggtacagattggctcgcgccctaacaagcctcgtccaggattttcggcgctctcctagctccgttctctgaacttcggccgctaactttgtgtatctgcgtatacg

SEQ ID NO: 663183 - DNA, 588 bp, Homo sapiens
atgttccccatcagcctgcggtgatccccaagcagtgctgcatgacgtgaagacggaaactgcagagttgattgggtgccaggcggccagtcttttcctgtgttattgaactggtgtacttttctggttgagtctacgtacccgtggttttccggacagtgttcgtggcccgctgttcgtaacatcccccaagacccctgtgaagcgcacaaagtttgaaccagcccaaaaagcaacccaaggcgttgatttatcgttatctgcgaacgggcgttccggcgtcactttaagtagtacttagtattttatcatacaagttaaacacgcgctatctaagacaaaatccgaagagcacgcagcacgaagaagaacagagaaaacacaagagaacaacaaaacaacacaaatacgaccaaaacaaaagaaacagagctggtgcaggcggcggccgccggcggcgccgccccgggcggcgcgcgcccccccccggcgcggcgagacgaaggaagaagagccccctccccctcgccaacacaaacacaccccacactacccgcagtgatgcgccgcgcacgccccggggggcat

SEQ ID NO: 663184 - DNA, 230 bp, Homo sapiens
aaggtaagcatccacataaaagtctaacgggaaagactcaaataacgcgaacggcatcttcacagcttgtataaggccaagagcttccccacatatctcattgaagagattatcaactttctgttttaggtccgaagattataggcattccaggacctcaaaggcaaaactctctaccctcagtggcttgcaagggaacgttagaacgcgttagtactgggtctggggtt

SEQ ID NO: 663185 - DNA, 311 bp, Homo sapiens
atacgccaagatccgcatgcactgggaaacagagcagactccatctcaagaaaaaaaaaaaggcgatctcatagaagtaaagagcagaatagtggctactagaggctggggaggaatggggagagatgggttgcatgcaaaattacagctagataggaggagtaagtggtgtaatgatcaaatcagggtatttagcatatccatcacctcaaatggagggaatactaaatagcttccctttaagatatttggtagtatacactacaatatggttaaatatagtcacggcagtgtgcaataggacaccagaa

SEQ ID NO: 663186 - DNA, 173 bp, Homo sapiens
cgttgtggtccctgcttaccataagaaataacaatatactatgtcacatgtgataggaacttggctgaaaaattacagatcagggaaaaagcataatgccccactcatgcatggcaggtagagttgttcattaacaaatccgacaaaaatggattggttaggcgcggccatcc

SEQ ID NO: 663187 - DNA, 148 bp, Homo sapiens
gagtacgcaagtgctggcgaagatgtagactagctcgatgacgcatggccgcactgaaggagacggaagctcgagccaagtaccgacagattgtatcggctgtgcactattgtcaccagacacatattgtacacagggacctgaagga

SEQ ID NO: 663188 - DNA, 218 bp, Homo sapiens
ggtagagatgaggtttccctatgtgcctagcctggtattgaactcctgggatcaagtaatcctcctgattcagcctcacaaagtgctgggagtacaggtgtgcgccactgcacccagcccatataacttttacacctacaacaagaaattaaaaattcaatgtaagaacctattttgttacaaagaagcagattaggtggctcagtaaaagattacca

SEQ ID NO: 663189 - DNA, 314 bp, Homo sapiens
tgaaaccacaagcaaattctcttctctcttccagccctcccttcctccctcttgtttcttcagtaggccatctgtgcacttatgttcccattgccacggccctctttcaagcaggcttactctattgaggtgaatttcacgaaaacttcacacttactaaagggacacccccgataattttggccccgttctcccaaaggaattctgttcccccggtggctcggctgccacagatcccctctcaaattaatacacaccccgggacacgggggggggtcttctaggggcttgtccccatcctctttaaaaaacca

SEQ ID NO: 663190 - DNA, 618 bp, Homo sapiens
  misc_feature (1)..(1): n is a, c, g, or t
ntcgcctccccgcggggggggggttattattgaacgcaggccgcgcctgttttttgtgcctcctcccgcctcccctctctgctgtgaggggcgccactcacccccccgcgcttgtggtcctcccgctcctcgaatgatcgccgcggcgggcggacggactcctcccccccgccgccggtgtttttctttctgctcgcccgggcgcggcggagagcgagagacactcgcttctcctccaccgcgcggacggcgctgtctttggccgctcctccctgcgcgctctcttttgtgggcgctcccctctatttgcccctagctgcttgcgtctaaacacgcgcgcgcgtggtgtgctccgccgctccgtgtttactctcgcgcagtgattcttctcgcgcccccccccctccgcgcggggaggtggggccgcccccccccctctagggtgctcccccgagcagtgcctcagggggccccgactacccacccacaaagggggtgtgcgccggcccccccccccccccttttttttgggggggggcgcccccttctcccccccgcgggcgcccccccctttttttttttttcccgtcttggaaaaaaaaaatccttttttgggga

SEQ ID NO: 663191 - DNA, 1078 bp, Homo sapiens
acacacactgtgtggttggtcatcgctggggggcgggctcactcacacacttactctggtcgagtgggtgtgtgagatgatgggacgggcggtgtgtggtgctcttcgatagaggagagataccacttactgcagactccctctttctttatgatagtgtattgtattatcttcttgtgttgcacacgaccctcttctgtgttatgttgtttttattgagtgtgtgtgggggtttgatctactatcacacactgtgatagctacatgtctagttatacactagaagtggtgggtgtgtgcacacacacaacacgtacgacactgctctgtgtggttgatataagcaagtgtgtgtgctcacacatcactcacacacagaggtcgacacagatgagtgaggcgagtcgtgtgtgtgttgatgtaatcaacacactcatgtggggtggcaccacactcgatgttgtttagcatacatcatgtcgtgattgtatgctgcgtgtgggtgatgcgattacactgggtgtgtgtgtggggcgcatcacatcatgagtgagacacacacaagagtgtgcatatgattcgtacactacacaactttgtgcgccacactagtagtggtttgtgagcgtacacacgatagagaagatacacacactatacgcacccacacacacacaccaacacgccagcacgcacacactcatatagatgtgtggtctattatgtcatcgtcatacacaaggtacacacacaccaacaccgagtggtgtcataaaatgagtggggttatgtgtgtagcggactgagacacaccactgtgtgtgtgtgggagccacaccaccaccccactccaccacacatcagagatagaggtggtggggcgctaaaaactgatggtcccacccccccactctcacgcgccacaccaccaccttgtacccaccaggaccacactctagtggctccccaccccactatataaaataaaataaataaaataaaataatatataaaataaaaagggtaaaataaactgcagggatgtgaatgcagggtcagagaagatgagtaggcacac

SEQ ID NO: 663192 - DNA, 599 bp, Homo sapiens
agcaacctttttttgcgtagtgagcaatctacctgagctggatatgcaggcctgggcctcccccataaatcgtttttagttgacgcatcctcaaacaatggaaggcagagcccaccaaaaacgacaccggatttcatgacaaacacgggcacgtgtataccctggcggaccccgtattgctacgtacatggacaaaagaagcaccaaaggcggaatagagcggaaacctgccctctggcggcagagtactccaaaaggaatgggggaaccagcaactaacccacttggcggaataacgaattggttaaaaaacagcttacaatcgatgcccaattgaagcccgtggcacccattaagacatggccattatcgataaaatagacaaatttcgaacgttatcggggaatagtgtagttacaagaaaggctttggtggccgcgttgctcacttcagctcatgactgccgggcggtacaggcctcgggggctattaagaggtcacctgggccaaaactccccaaatcgggtgcggtatacaagcttcgtggccgcgcgtatcacatcagaggacggggattgggcgcttaacggaagaggccg

SEQ ID NO: 663193 - DNA, 263 bp, Homo sapiens
atattgtcaaggcagagtataggcaacaaaagggctaagacatttggaggcagtcatttccatacaccatgcagacattgcagcttcattacaaaggaagtagccaaattcaatggaggtagatagtctgcgtgcaaagtgcctccattcttctagagttatagccattttaaagtatgtcattaatagcccagcaatgaaatccatcccagtccaggcgcaagcaccagctaaccagatgctatcaatatccttgcattcag

SEQ ID NO: 663194 - DNA, 917 bp, Homo sapiens
  misc_feature (80)..(80): n is a, c, g, or t
aagagaagctacacacgaagtggcacgtacatagtgactgcgcgaaggattacgacatagagatgctaaacggagggtgnctggcacaacatacccgcgagcacgaccgcagggtgttacgactcacgccggcgcaccccaccacgctggtgagggccgccgggagactcgtcaaaacacgtggaccctcccgcccaattcatgtgtatctccccggcgccaagggtttttcccaggacgcctagcacaacgggactccggatacacgcggacaaccatacaccaggcaactggccgatatttatcaacagggtcaatgggggccccgggaaatctccgcagcacgttggtgcgcgcgacgaacaccatggcttgcgtaattctatgccgtactaccccgtctttgtcggtcgcgccgaaaagggcagtgcctcttcggggggcttcttgataaagggcgcacattaccatggagaaacttgaatcttttagcaacctttctatagatacttcatcgtcctgcatcaaatcgaacctgcagttctgaagaacactaagtgtcatccactccggcggctgcccacaagcctatatatgggcaactcggcgaatttaatagatgtccctgcgagtgtttaaatggcccctcgaggggtgagggcggtgcaacttgtataagaagcaacacaaagggccccgttctgttggtctacacgcgagcttaagagtgtcgccccccattgccacgcaatacaaaaggctcacaccacgccccagacaatccacccaatttatcttgtctaagcaaagagagaagaattattatgattcgcagtggtagcaaaattcggcgcaaaaacaaagcggggggggcttttgtataaaaaccacaaacaaaaacaccgatccacatgaca

SEQ ID NO: 663195 - DNA, 1007 bp, Homo sapiens
  misc_feature (54)..(54): n is a, c, g, or t
  misc_feature (76)..(76): n is a, c, g, or t
  misc_feature (86)..(86): n is a, c, g, or t
  misc_feature (104)..(105): n is a, c, g, or t
  misc_feature (113)..(114): n is a, c, g, or t
  misc_feature (116)..(116): n is a, c, g, or t
  misc_feature (120)..(120): n is a, c, g, or t
  misc_feature (126)..(127): n is a, c, g, or t
  misc_feature (142)..(142): n is a, c, g, or t
  misc_feature (149)..(149): n is a, c, g, or t
  misc_feature (152)..(152): n is a, c, g, or t
  misc_feature (160)..(160): n is a, c, g, or t
  misc_feature (176)..(176): n is a, c, g, or t
  misc_feature (201)..(201): n is a, c, g, or t
  misc_feature (203)..(203): n is a, c, g, or t
  misc_feature (207)..(210): n is a, c, g, or t
  misc_feature (212)..(214): n is a, c, g, or t
  misc_feature (217)..(217): n is a, c, g, or t
  misc_feature (219)..(219): n is a, c, g, or t
  misc_feature (224)..(224): n is a, c, g, or t
  misc_feature (228)..(228): n is a, c, g, or t
  misc_feature (231)..(232): n is a, c, g, or t
  misc_feature (248)..(248): n is a, c, g, or t
  misc_feature (256)..(256): n is a, c, g, or t
  misc_feature (266)..(266): n is a, c, g, or t
  misc_feature (268)..(268): n is a, c, g, or t
  misc_feature (272)..(272): n is a, c, g, or t
  misc_feature (316)..(316): n is a, c, g, or t
  misc_feature (368)..(368): n is a, c, g, or t
  misc_feature (462)..(462): n is a, c, g, or t
  misc_feature (678)..(678): n is a, c, g, or t
  misc_feature (744)..(744): n is a, c, g, or t
  misc_feature (748)..(748): n is a, c, g, or t
  misc_feature (771)..(771): n is a, c, g, or t
  misc_feature (946)..(946): n is a, c, g, or t
  misc_feature (973)..(973): n is a, c, g, or t
attacaaagtaatataatcaccctccttcccccttattgtttcaaactattgtngtaaaaataaataaataaagcnctggagtggnggctcacgcctgtaatgnnagcacttnngnaagntgaagnnggtggatcacctgangtcaggngtncgagagcngcccggacaacatggngaaaccccgtctctactaaaatttngngttnnnntnnnggngngcgcntgtnatnngagcgcgccaccacgntggggganggagtaagantnagtntcaaaggcatgacgaaaatagcaaaaatgctttagtgttatacntgttacgaatttaatggaaattacaagtaggagcccattacaatctctagcnttaaaatgctgaaaacatacacagtgtgacaataagtaaacttcgagacccaataagggggaaagtccaacgtggaaagtatttggtaggagtnaagaacagagtgacaactgcttagtcccactggatatttcgctcctcttcaggaagaatactccagtttggggaggccatatcccgggccagccagttaaaatcgtcaacatcgttccagttatttttgtctcctatctaaaccagagctctcgaagtccttgtcgatctccgggtagctccaggtgtaaggggcgaactggatcccactgcagtnctccacgatggccctgctggtcacctgcaggaagatgcgggtgtctttcgtactgtgtatgcggantgtntggcaggccactgcagacacgcntcactgcagttctccaggaaaacagaggtagacaccggaccgcagagcagcttgcagctgtggggccttgggttagccgcagggtgttggggatttccatacagtctgaccgtgcagttgctcagttcggtcaaaagaacgtcgcgctggtgcactcgctggctctcttctccanacttgggactcaggttggagaaacggngaccagctggggcgggtctcttccgcttcttggg

SEQ ID NO: 663196 - DNA, 162 bp, Homo sapiens
aaagttgttgttggagttgagctcgggcggctgtggtaggttgtggatacttcaacagtgtgctgttgcggtgctaggaggtgaagccgtcgtagactaccacagcagcctagaaacaacgggaacaagtagtcctacctgcccgcgtccacaactctcagg

SEQ ID NO: 663197 - DNA, 299 bp, Homo sapiens
gacccctggcgcagtaaacatcccacgtgggattttggagttcaggcttagcagcacgccagaactcgctatccgagacttaaagataattctttattgcaaaacgagcggaagagctgctctttctgccttagctctgggtgagatgggctacgtcaatgtgtcttctatcgctggaggctttgatgcttgggtagcagaggctaaggcagtagctacgccaagcctccctgcgtttgaataagtgagtctcggtttttggtactgcacttcgtttggcatccactgagtcgtcgacg

SEQ ID NO: 663198 - DNA, 859 bp, Homo sapiens
ggacatgcctaagatccatgtatccaagatctagtacgggctattcatggttctgaggcatgtccagcatgcaggcaattatctgttcacattgcggtaaaacagacaagtttgctgatgcggaatggcccattagcttaagtcaccagctggacagctaggtacgtgacgcctaccactaagagttctttatcaaaagccccagtggctcatgaacggcttggtgcggtacttgactgtacagaaattattccaaaggtgactctaagatcatgctacccaagatctagtacgggactatagcatgattactgaggcatgtaccatcatgcaggaaaaagttatcttgtatcacaaatggagggggttaaaacaaaaggacgcaaaaaaaacacctttacaccaagtctcaaccagaatggcatacgatagacatacgaacctaacaccttgctaggctgtcatgaaatctcaaagcgcacacaggaatgatacttatcttagccctgaacaaacaagacgcgtccaatgggtcgacgacatatccatgtattgagtgtcagtaatagcacacccaaaaatatacagccgtccttcttctccaacgacaatcaatttaagttatacagaagaaggttacaagaatggacagcaaaaaattcgttgatatgacaggaaactttgtactaagtgatgtagatgtggacaggaaattatcgtgtcacatacgaggagaaagtgtagcatgttagtcaaggtttgtgcaatatagggggtaaaaatcagataagcaaagaaaccgaatggcgacataacataggattgaggagactggtagacaggaaggcaaattaagaaa

SEQ ID NO: 663199 - DNA, 229 bp, Homo sapiens
  misc_feature (194)..(194): n is a, c, g, or t
tcttcctgttcatccaggatcggatcatgtgccgcctttgactggggccgactctgagatctttctttgtgttgactgttttgggaagtgtcacctcttctacataggggactggtgagggctcgtccatgtccttttgtacaggtcttctatgctccctcttcttcttgtggccacgcctttgaacttatgtnaaggtgtagagggaacttacttaacatttttcttc

SEQ ID NO: 663200 - DNA, 768 bp, Homo sapiens
cacatccctggcctcagcccgccgacatcacccgtgacctgcttacgcccagatttgcttcaatcacatcatgaataaatcacttagaaagaaatgcttatagcttcagttgcaccatgtgtggctatttggaggcgctgtttgtgcatgctgaatgactatgccgttctcatgtctcagctgtctgatatgctatgaagattgcactacagaggtccagtatgctagttccgtatcgagaatgttcaatggatacgaccaacgtgctgctttggatttcacacggttggcggtcgttgacccgctgtaaggaatgcagcccaattcgcatatgagagaaatactccgataattctgtggcctctgttacaactggtgaaactctacaacccactaacgaaggatgcaacctacgcacttgttgaagatttgaataccagaccaaagtggatggtgagcataactcctttcattcttttagtgacacaaggagggaattgagcaaacaattagtatgttggatggtgtgttggcatatgttttactgtatactgccaataagcaaacgtgttcctgggtaggagatacattatggagtcagaccctttgtttaaaagcacatgacagaagatgggactctaggctgtatgtcagaagctaaaggtcttgtacattgaagcactccggactcccttttaaaagtggagcatttcttctggacactatgagtttggcttaaagcaatggcaagttgctcgtggaatgtta

SEQ ID NO: 663201 - DNA, 164 bp, Homo sapiens
acgctcattttgtgctgtggctctgccagaagtgcgattccagaaagcatcagttgtagtagtgtgctgagggaactgtgatgggtggggcctaagaactcccaagagtatatgccctttgtcttctgctaccagggtggatagggaaggaccatcaggtggtc

SEQ ID NO: 663202 - DNA, 675 bp, Homo sapiens
gacaatggacctgcgcagatggtgactgtggtgccatctttgcttcatcaggacctggcagccttgggtaatcagtgatgctcctgttacaggcatggtttctgcgtcagaacttgctgtgagagaacaagagcgaatcccttcactccaggccatcgctgctcaggtcggttggctgttcacgaactcctttctgcagacaggaatttgctggatcctcctctcagcatcagccagcgtccgatgcccatctgaaattatggtttcgcagaaagagtgtccccaaggaattgccaccaggctactaagtcctctccaggttggtcctgggtcggctggcccgtttggactccttccccatcttcagcagaagtactcctctggactcaaggtgtttgtccctttggagtctgttatgcccagcagtcctgccgcctctcattgctgtatgaccggaatggattcagaattctgctccacttctcccagacgggagcccctgggacacccatgaggtacaggtgctgctcttgaccatgatgagcagcggctccccagcactgtctgggatatcatgtttcaagtggctgtgccaaatgtcaatgagagtgaagctgcagccgagatccagctcctagcttcctgtcattcagtcctttgatggctccagtgtga

SEQ ID NO: 663203 - DNA, 246 bp, Homo sapiens
cactttggaaagatggcataaccctgtctcaccctggacttaaggcgtctggctctaattcacagtgctcttttctcctccacggttccagtcctcaagaccatcaggtcacttctttcagatattcgcatattcatatataatagctctaaaaaaaaaaaaggctattgctcgcttagctagtacgctgggagtgtggcttggttgccattgtatgtgtacgcgtgtgggatgtcgtgttaattc

SEQ ID NO: 663204 - DNA, 127 bp, Homo sapiens
tgggattcattttggaaattgagttatacatgacagcaagcagtaagtgaagtgcattcttcttctaagatgcaaagcagtatacataagagtaggccgtggcgcggtggctcacacctattatccc

SEQ ID NO: 663205 - DNA, 137 bp, Homo sapiens
tcgtatcgcctagctatctagagtatccctccttccgcacgctatcaattgtaggggactgtacgaagatagggtcagctcagctgcagtaagatataacgtctcaggaagcaagcatgctctggagtcaaggcaga

SEQ ID NO: 663206 - DNA, 827 bp, Homo sapiens
  misc_feature (144)..(144): n is a, c, g, or t
  misc_feature (167)..(167): n is a, c, g, or t
  misc_feature (183)..(183): n is a, c, g, or t
  misc_feature (347)..(347): n is a, c, g, or t
  misc_feature (798)..(798): n is a, c, g, or t
  misc_feature (807)..(807): n is a, c, g, or t
  misc_feature (809)..(809): n is a, c, g, or t
cttacgatgcactatgtacggtggcccaatcatgacatgtgttaagcatcaactgtaactttgtgcttcccaaatcactttttggtttttaagaattccttgatactcttatagtcctgccttcaattttgatcctttattctnttctattttgtacatgtgcaccnagattaccttcctgtnttagccttctgtcttgtcaccaaccatttcttacttggtggccatgtacttggaaaaaggccgcatgatctttctggctccactcagtgtctaaggcaccctgcgttcctcttgcttgcatcccacagactatttccctcatcctatttactgcagcgaatctnctccttagttgatgagacctgtgtttatctccctttaaaaccctacctatcctgaatggtctgtcattgtctgcctttaaaatccttcctctttcttcctcctctattctctaaataatgatggggctaagttatacccaaagctcactttacaaaatatttcctcagtactttgcagaaaacaccaaacaaaaatgccattttaaaaaaggtgtattttttcttttagaatgtaagctcctcaagagcagggacaatgttttctgtatgttctattgtgcctagtacactgtaaatgctcaataaatattgatgatgggaggcagtgagtcttgatgataagggtgagaaactgaaatcccaaacactgttttgttgcttgttttattatgacctcagattaaattgggaaatattggcccttttgaataattgtcccaaaattacattnaaataaaantncaatggagaaaaaaaaaa

SEQ ID NO: 663207 - DNA, 236 bp, Homo sapiens
ccttggaaatgtcccttcccctttttggcccccagtttcccccctgggacattgtgtgctgcaaaccccttggttgggctattttttcaaaggcccttacttacccagggaagccccccttttttccccttttccccaaagccctttggcatgtaaacaaacaaaagccctccctttatagggtaacctggaacattttttaggttatatcaaaataaaccaatgtaaatggtgga

SEQ ID NO: 663208 - DNA, 293 bp, Homo sapiens
acgctgcacgacggtcaaatatattcctgaggatctccctggcgcgctcagattcttaacactaatatgagaatacagaatgtaaaccagaaagtaccttgagacgggtctcaatcaatttaggagttaattttgccacggttaagaatcatgaccagtgacgcagcctcgggaggtcctgagaataggcccaaggcagttggattacagcttggttttatgttttagggagacatgagacatcaatcaaaataagtggggtaatcactggtttgaaccggcggtgcggcgtg

SEQ ID NO: 663209 - DNA, 839 bp, Homo sapiens
  misc_feature (43)..(43): n is a, c, g, or t
  misc_feature (70)..(70): n is a, c, g, or t
  misc_feature (156)..(156): n is a, c, g, or t
  misc_feature (179)..(179): n is a, c, g, or t
  misc_feature (195)..(195): n is a, c, g, or t
  misc_feature (359)..(359): n is a, c, g, or t
  misc_feature (810)..(810): n is a, c, g, or t
  misc_feature (819)..(819): n is a, c, g, or t
  misc_feature (821)..(821): n is a, c, g, or t
catattcatttccaacttttaatccacaattttcttttcccancattacattttttttcattaactttanttttttttctcccaaatcactttttggtttttaagaattccttgatactcttatagtcctgccttcaattttgatcctttattctnttctattttgtacatgtgcaccnagattaccttcctgtnttagccttctgtcttgtcaccaaccatttcttacttggtggccatgtacttggaaaaaggccgcatgatctttctggctccactcagtgtctaaggcaccctgcgttcctcttgcttgcatcccacagactatttccctcatcctatttactgcagcgaatctnctccttagttgatgagacctgtgtttatctccctttaaaaccctacctatcctgaatggtctgtcattgtctgcctttaaaatccttcctctttcttcctcctctattctctaaataatgatggggctaagttatacccaaagctcactttacaaaatatttcctcagtactttgcagaaaacaccaaacaaaaatgccattttaaaaaaggtgtattttttcttttagaatgtaagctcctcaagagcagggacaatgttttctgtatgttctattgtgcctagtacactgtaaatgctcaataaatattgatgatgggaggcagtgagtcttgatgataagggtgagaaactgaaatcccaaacactgttttgttgcttgttttattatgacctcagattaaattgggaaatattggcccttttgaataattgtcccaaaattacattnaaataaaantncaatggagaaaaaaaaaa

SEQ ID NO: 663210 - DNA, 833 bp, Homo sapiens
  misc_feature (173)..(173): n is a, c, g, or t
  misc_feature (189)..(189): n is a, c, g, or t
  misc_feature (353)..(353): n is a, c, g, or t
  misc_feature (804)..(804): n is a, c, g, or t
  misc_feature (813)..(813): n is a, c, g, or t
  misc_feature (815)..(815): n is a, c, g, or t
aagccaccattgttccttggcccatcacgacattgggtagcattaaactgtaagttgtgtgattcgcaaatcactgctctggttctttaagaagtgtcgggataactcgtgtatcagccttgccaatacgattcgagatcctgctattcatgtcaatttgtacatgtgcaccnagattaccttcctgtnttagccttctgtcttgtcaccaaccatttcttacttggtggccatgtacttggaaaaaggccgcatgatctttctggctccactcagtgtctaaggcaccctgcgttcctcttgcttgcatcccacagactatttccctcatcctatttactgcagcgaatctnctccttagttgatgagacctgtgtttatctccctttaaaaccctacctatcctgaatggtctgtcattgtctgcctttaaaatccttcctctttcttcctcctctattctctaaataatgatggggctaagttatacccaaagctcactttacaaaatatttcctcagtactttgcagaaaacaccaaacaaaaatgccattttaaaaaaggtgtattttttcttttagaatgtaagctcctcaagagcagggacaatgttttctgtatgttctattgtgcctagtacactgtaaatgctcaataaatattgatgatgggaggcagtgagtcttgatgataagggtgagaaactgaaatcccaaacactgttttgttgcttgttttattatgacctcagattaaattgggaaatattggcccttttgaataattgtcccaaaattacattnaaataaaantncaatggagaaaaaaaaaa

SEQ ID NO: 663211 - DNA, 2038 bp, Homo sapiens
  misc_feature (738)..(738): n is a, c, g, or t
gcagcatttggtcttcctctaagcgcctggctccgctgttctcaggagtgggttctgaagtctctggagaacaggatacgtggagggttaggaaggggccaggcctagagacgggagactccctcccggagcaggtggaggcacaggaccattcgctaccccatctgccggcacctgcgggggagcccaggcattctttgtaagccctcctgaccacctggctcaaagaaaacagaagcatggaggccgccaagtattttcaagaaataaccccatgaatattccatcacttttttagaaagaggggcttggggcaggcagaggagagaagggagagcaaactgagagccaagtttccagacagtcctgcaggaggagaggatgcagctgcccagagggaagcaggatcacatttaaggaagtgtgtggggtccctggatgacaccagcacccagtgcggctctgtctggcaaccgctcccaaggtgggaggagtgggtgtcccctgtgtgtcagtgggcagctcctgctgaacccgcagctcactagggagcctgacagtgggtccatgcgcctgacactcctctctgcttgtggacctggcaaggcagggagcagaaaacagagccacttgaaggctttctgtctgcgtctgtgtgcagtgtggatttagttgtgcttttttcttgctgggagagcacagccaccatttacaagcagtgtcaccgtcgtgggtggngaggacagaacaggagcctctgctctctgtacctatctgggcccggtgggctcccttgtcctggcttccatctctgtctcagcgaccattgagccctgcgcaggaacacatgttgcttagaaaagccaaatccagccttgtctctgcctcctctggtctcatgatgtgcatctgttaccttgaaactggaaaccagtctatcaatgtctgtgccaattttttattccctccccaacctccttccccataggactttttatttatgtaggatgtgtgctgtctaatgatgggatgaccacacttttccatgttctaaaagtgctcctctcctgcagggtcccagggctggtggttgctttgggtctacagctacgtcttacccgcctcctgcctcaacagcctgtgtggtggcaaagccggtgtggggctggggaacgcagcgttctccaggagggggacccggctctccttctgcaatgcaggcgaaggcctagatgccagtgtgacctcccacaaggcgtggcttccagactccccggccggaagtgatgcttttttgccttgggccctgggtttgaagcagcctggctttctcttggtaagtggctggtgtcttagcagctgcaatctgagctcagccacctacacaccaccgtggccgacactttcattaaaaagtttcctgagaaaaaaaaaaaacaaacccaaaaaaacaaacccaacaccagcacccacacacaacgcacaccgacaggacacacagcgacaacagcaaagcagcgcacgcagaagaggaggggcgcggcacccgcataacgcagcgcgcgtcagaggggggaccgcgacggcatgcgcgcgcggcgcggctcgtagacgcgagcaggccggcccccaaagggcgcggcgccgcaacgccaagaagagacgccgcggccgcgcgaacgccgcgccgcagccgcgaaggagacggcgggaccacacgcaactcggcggcatagagaggagggagaaacgaccacaagcacgccagcggcagacccgcacacacccgcccagacaaaagcaaacgacagccacagcgccacaagccgcaagcccgcggcagggcggaagaacacaaataacacggacgaagcgaggcgcgagcgcgacaagggagggagagaagaacgcgccaaaagcgacgaacaggaggacaagacgatcaggggagacagaggcgggaggcagaagacagcgggacgggacagagaagatcagaaccacgtagacaagaaggagaggcagcaggcggaacaca

SEQ ID NO: 663212 - DNA, 1424 bp, Homo sapiens
gagccaggtggtcaggagggtttacaaagaatgcctgggctcccccgcaggtgccggcagatggggtagcgaacggtcctgtgcctccacctgctccgggagggagtctcccgtctctaggcctggccccttcctaaccctccacgtatcctgttctccagagacttcagaacccactcctgagaacagcggagccaggcgcttagaggaagaccaaatgctgccaggaacacatgttgcttagaaaagccaaatccagccttgtctctgcctcctctggtctcatgatgtgcatctgttaccttgaaactggaaaccagtctatcaatgtctgtgccaattttttattccctccccaacctccttccccataggactttttatttatgtaggatgtgtgctgtctaatgatgggatgaccacacttttccatgttctaaaagtgctcctctcctgcagggtcccagggctggtggttgctttgggtctacagctacgtcttacccgcctcctgcctcaacagcctgtgtggtggcaaagccggtgtggggctggggaacgcagcgttctccaggagggggacccggctctccttctgcaatgcaggcgaaggcctagatgccagtgtgacctcccacaaggcgtggcttccagactccccggccggaagtgatgcttttttgccttgggccctgggtttgaagcagcctggctttctcttggtaagtggctggtgtcttagcagctgcaatctgagctcagccacctacacaccaccgtggccgacactttcattaaaaagtttcctgagaaaaaaaaaaaacaaacccaaaaaaacaaacccaacaccagcacccacacacaacgcacaccgacaggacacacagcgacaacagcaaagcagcgcacgcagaagaggaggggcgcggcacccgcataacgcagcgcgcgtcagaggggggaccgcgacggcatgcgcgcgcggcgcggctcgtagacgcgagcaggccggcccccaaagggcgcggcgccgcaacgccaagaagagacgccgcggccgcgcgaacgccgcgccgcagccgcgaaggagacggcgggaccacacgcaactcggcggcatagagaggagggagaaacgaccacaagcacgccagcggcagacccgcacacacccgcccagacaaaagcaaacgacagccacagcgccacaagccgcaagcccgcggcagggcggaagaacacaaataacacggacgaagcgaggcgcgagcgcgacaagggagggagagaagaacgcgccaaaagcgacgaacaggaggacaagacgatcaggggagacagaggcgggaggcagaagacagcgggacgggacagagaagatcagaaccacgtagacaagaaggagaggcagcaggcggaacaca

SEQ ID NO: 663213 - DNA, 138 bp, Homo sapiens
tgagatagaattcacaaaccacaaaatgtaccttttcaaagtttacaattcggtggttttttggtacagtcacagggttgtgccaacattaccgctacctaattctagaacattttcttcactccacaaagaaaccca

SEQ ID NO: 663214 - DNA, 155 bp, Homo sapiens
gtgtgacatctagaggatcccggaataccccgctacggtcgagggggacatgctagacctgtgtctcacctgcaggtctcttctggggtctacgagccagttgtgattgaaatgccattgaggagcaggtgtccggagctggatgacagagtcct

SEQ ID NO: 663215 - DNA, 324 bp, Homo sapiens
ctgagaaagcacaccccacccagcagcccagaaatggaacgatcttgctctttttttgtgtacattttattctgagctgttctggttttttttctcgctattggttggcacagaaagttctcaacgaatctaagactaaacaggaggtgatttttttcttatacaaaggggaactgttaggaacgaagatggacaggagaaggagaggaaatagttggcctgcggcctgacgcttcggggtttccttcagcggattttatgtaaaatccctaaatacttgaggttgatgggtgtcattcacaggggacctatagagtcagacct

SEQ ID NO: 663216 - DNA, 1778 bp, Homo sapiens
  misc_feature (738)..(738): n is a, c, g, or t
  misc_feature (1540)..(1540): n is a, c, g, or t
  misc_feature (1551)..(1551): n is a, c, g, or t
  misc_feature (1686)..(1686): n is a, c, g, or t
  misc_feature (1717)..(1717): n is a, c, g, or t
gcagcatttggtcttcctctaagcgcctggctccgctgttctcaggagtgggttctgaagtctctggagaacaggatacgtggagggttaggaaggggccaggcctagagacgggagactccctcccggagcaggtggaggcacaggaccattcgctaccccatctgccggcacctgcgggggagcccaggcattctttgtaagccctcctgaccacctggctcaaagaaaacagaagcatggaggccgccaagtattttcaagaaataaccccatgaatattccatcacttttttagaaagaggggcttggggcaggcagaggagagaagggagagcaaactgagagccaagtttccagacagtcctgcaggaggagaggatgcagctgcccagagggaagcaggatcacatttaaggaagtgtgtggggtccctggatgacaccagcacccagtgcggctctgtctggcaaccgctcccaaggtgggaggagtgggtgtcccctgtgtgtcagtgggcagctcctgctgaacccgcagctcactagggagcctgacagtgggtccatgcgcctgacactcctctctgcttgtggacctggcaaggcagggagcagaaaacagagccacttgaaggctttctgtctgcgtctgtgtgcagtgtggatttagttgtgcttttttcttgctgggagagcacagccaccatttacaagcagtgtcaccgtcgtgggtggngaggacagaacaggagcctctgctctctgtacctatctgggcccggtgggctcccttgtcctggcttccatctctgtctcagcgaccattgagccctgcgcaggaacacatgttgcttagaaaagccaaatccagccttgtctctgcctcctctggtctcatgatgtgcatctgttaccttgaaactggaaaccagtctatcaatgtctgtgccaattttttattccctccccaacctccttccccataggactttttatttatgtaggatgtgtgctgtctaatgatgggatgaccacacttttccatgttctaaaagtgctcctctcctgcagggtcccagggctggtggttgctttgggtctacagctacgtcttacccgcctcctgcctcaacagcctgtgtggtggcaaagccggtgtggggctggggaacgcagcgttctccaggagggggacccggctctccttctgcaatgcaggcgaaggcctagatgccagtgtgacctcccacaaggcgtggcttccagactccccggccggaagtgatgcttttttgccttgggccctgggtttgaagcagcctggctttctcttggtaagtggctggtgtcttagcagctgcaatctgagctcagccacctacacaccaccgtggccgacactttcattaaaaagtttcctgagacgacttgcgtgcatgttgacttcatgatcagcgccgctgggaagaacccctgagccggtggggtggggctgtggccaccgctctggcacgagcccctcagtcttgggtggtttntgcctggtccnggatttggtgttgctgctgagtccagcctttccaccacctccgcatgggctgtgggtgttgtcagctgcctcccgccttggcttcagtagctcacccagcttacaggggagctgccctgggctggagatgggcangcaccctgggtcctacttgaatgaatgcagnttgaggagacccggccatatacactgggccacgggttaccttcggcaatgcccacatcagc

SEQ ID NO: 663217 - DNA, 369 bp, Homo sapiens
tttaattggagataccaattccatataccttataacagttccacccccatttgaaagtgtaccagttccaggctgtaccacggaggctcatgccctgtaatccccaacactctgggaggctgaggtggaaggattgtttgagccccaggagtttgagatcagcgtgggcaacatagtgagacctctctacaaaaatagaaaattagctgagtgtcgtggcacatgcctgtcatcttagctactctggaggctgaggcaggagcattgcttgagcccaggaggtcaaggctacagtgattgcaccactgcactccaactatgatcatggcactgcacttcagcctgggtgacagaatgagaccctgtcag

SEQ ID NO: 663218 - DNA, 1839 bp, Homo sapiens
  misc_feature (738)..(738): n is a, c, g, or t
gcagcatttggtcttcctctaagcgcctggctccgctgttctcaggagtgggttctgaagtctctggagaacaggatacgtggagggttaggaaggggccaggcctagagacgggagactccctcccggagcaggtggaggcacaggaccattcgctaccccatctgccggcacctgcgggggagcccaggcattctttgtaagccctcctgaccacctggctcaaagaaaacagaagcatggaggccgccaagtattttcaagaaataaccccatgaatattccatcacttttttagaaagaggggcttggggcaggcagaggagagaagggagagcaaactgagagccaagtttccagacagtcctgcaggaggagaggatgcagctgcccagagggaagcaggatcacatttaaggaagtgtgtggggtccctggatgacaccagcacccagtgcggctctgtctggcaaccgctcccaaggtgggaggagtgggtgtcccctgtgtgtcagtgggcagctcctgctgaacccgcagctcactagggagcctgacagtgggtccatgcgcctgacactcctctctgcttgtggacctggcaaggcagggagcagaaaacagagccacttgaaggctttctgtctgcgtctgtgtgcagtgtggatttagttgtgcttttttcttgctgggagagcacagccaccatttacaagcagtgtcaccgtcgtgggtggngaggacagaacaggagcctctgctctctgtacctatctgggcccggtgggctcccttgtcctggcttccatctctgtctcagcgaccattgagccctgcgcaggaacacatgttgcttagaaaagccaaatccagccttgtctctgcctcctctggtctcatgatgtgcatctgttaccttgaaactggaaaccagtctatcaatgtctgtgccaattttttattccctccccaacctccttccccataggactttttatttatgtaggatgtgtgctgtctaatgatgggatgaccacacttttccatgttctaaaagtgctcctctcctgcagggtcccagggctggtggttgctttgggtctacagctacgtcttacccgcctcctgcctcaacagcctgtgtggtggcaaagccggtgtggggctggggaacgcagcgttctccaggagggggacccggctctccttctgcaatgcaggcgaaggcctagatgccagtgtgacctcccacaaggcgtggcttccagactccccggccggaagtgatgcttttttgccttgggccctgggtttgaagcagcctggctttctcttggtaagtggctggtgtcttagcagctgcaatctgagctcagccacctacacaccaccgtggccgacactttcattaaaaagtttcctgagacgacttgcgtgcatgttgacttcatgatcagcgccgctgggaagaacccctgagccggtggggtggggctggaagcagcaggtgcagtgatagggctgggtgcccaggaggcctcagtgctcaatcaggccaaggtggccaagcccaggctgcagggaaggccggcctggggggtgtgggtgagcacaggcaggcaccagctgggcagtgttaggatgctggagcagcatccgtaactccactgagtggggtagtctggttggggcagggaccgctgttgctttggcagagagagaggatccccactggggagaggctgttctgactctgcaggtgggacagggacagatggcccccagggtgacccggctggtcttcctttgctatgctaagccctgggacatggaggattc

SEQ ID NO: 663219 - DNA, 951 bp, Homo sapiens
  misc_feature (621)..(621): n is a, c, g, or t
ggactcctggatctcttgtgtaataatgtgaaacatctgtacgttcttcctcctcctggatgggagctcccaatgggtcctgtcccacgtgcatcgtgctcggattcgggaccaagaatggtgaatccttgctcatacttctgtgcctcacctgcaagtgtctctgtctgtctgcagtacagcacgatgcgctaggttagcgtagcgtgggacgactcggagtcgcgcgcaagtgccagcgcaggcgcaaggggacctgtgcgtggggtagttggcgcgtactcgtatagcgcagctgggacgcagcacatctagcaagactctcttcctctcaaggagcatcgagtctaccctagtaatctagctatgacagccgtcacaagaaaaagcgacgttgtcatcctcgttgagagctgatccgtctggtggaccgcgcgcctagagcagcggggcgctagtagttatcctgtagacgagagtggcggagttcactagtggctgacgggcgacgcgtgtatctcgagatacctgaggcgcaaggacacggctggattacgcgcttcacctgcatgcagatggactgtagccaataccttattctacgctgcacggacaaactgntccgatctgtcccaacgttccgataacgcaggctagaccggcgcgtttggtgtgaaacatgcgatcggcagcaaggagctccgcctttaacggcagtacatcgatgttacgtccctgtgaaaggaccgggaacctctcgtgcacctgcggtagccacgcgagcgtatttgctaacttgcgtgcggggacagcggccgggatgatacccatcctccctaaaagggtgcaatgcgtgactgccgaggaggacccctggcagggccgcgagataggaccggggatgccctggtgcaatagatgacaaactccacgattggccttgaagaagag

SEQ ID NO: 663220 - DNA, 304 bp, Homo sapiens
taaaaagtttttaataaacccaaaggatgtatgaatccttgttgacaattcagccttttaaaaaagagaaggggagaaaatagatcctagaaaccggctcggtgaggctgggagcggtggctcacgcctgtaatccccgcactttgggcggccgaggcaggtggattacctgaggtccggagatcgagacccatcctggcccacattgtgaacacccatcgctactaaagataccaaaattagctgggcgtggtggcgggcgccctgtagtcccagctactcgggaggctgaaacagcatatca

SEQ ID NO: 663221 - DNA, 503 bp, Homo sapiens
atgacgttctatcataatcttcttctcatagcgactcataaagtaatcatctgattcaatctctgcattcttcaatgttataccatgcatctttaccactctgagcactgatcgtcgctccttcaatactttcttgtactccagtacaaggtgaactcctgtatcatccatgagcttacaggtgtccacagagcagatattccggatatcactagttctatccaaatgaggaaaaaacaccagtcctgtactgatactctaggtgctggaggctcacttggaattcagttaactggggctggaagccgatggcttcattgggtaccacaaaggcccctagcgccagtggttcggtagatactgagcttctgcgggccaggattaccttataaaggtgtgaggggactgccacgttgtcctcgccaatcacctggtaactaactattttctttccatcgcctctagtctgaggtaaggtcaaaggcccagataccacccaaaca

SEQ ID NO: 663222 - DNA, 1984 bp, Homo sapiens
  misc_feature (738)..(738): n is a, c, g, or t
gcagcatttggtcttcctctaagcgcctggctccgctgttctcaggagtgggttctgaagtctctggagaacaggatacgtggagggttaggaaggggccaggcctagagacgggagactccctcccggagcaggtggaggcacaggaccattcgctaccccatctgccggcacctgcgggggagcccaggcattctttgtaagccctcctgaccacctggctcaaagaaaacagaagcatggaggccgccaagtattttcaagaaataaccccatgaatattccatcacttttttagaaagaggggcttggggcaggcagaggagagaagggagagcaaactgagagccaagtttccagacagtcctgcaggaggagaggatgcagctgcccagagggaagcaggatcacatttaaggaagtgtgtggggtccctggatgacaccagcacccagtgcggctctgtctggcaaccgctcccaaggtgggaggagtgggtgtcccctgtgtgtcagtgggcagctcctgctgaacccgcagctcactagggagcctgacagtgggtccatgcgcctgacactcctctctgcttgtggacctggcaaggcagggagcagaaaacagagccacttgaaggctttctgtctgcgtctgtgtgcagtgtggatttagttgtgcttttttcttgctgggagagcacagccaccatttacaagcagtgtcaccgtcgtgggtggngaggacagaacaggagcctctgctctctgtacctatctgggcccggtgggctcccttgtcctggcttccatctctgtctcagcgaccattgagccctgcgcaggaacacatgttgcttagaaaagccaaatccagccttgtctctgcctcctctggtctcatgatgtgcatctgttaccttgaaactggaaaccagtctatcaatgtctgtgccaattttttattccctccccaacctccttccccataggactttttatttatgtaggatgtgtgctgtctaatgatgggatgaccacacttttccatgttctgctacgtcttacccgcctcctgcctcaacagcctgtgtggtggcaaagccggtgtggggctggggaacgcagcgttctccaggagggggacccggctctccttctgcaatgcaggcgaaggcctagatgccagtgtgacctcccacaaggcgtggcttccagactccccggccggaagtgatgcttttttgccttgggccctgggtttgaagcagcctggctttctcttggtaagtggctggtgtcttagcagctgcaatctgagctcagccacctacacaccaccgtggccgacactttcattaaaaagtttcctgagaaaaaaaaaaaacaaacccaaaaaaacaaacccaacaccagcacccacacacaacgcacaccgacaggacacacagcgacaacagcaaagcagcgcacgcagaagaggaggggcgcggcacccgcataacgcagcgcgcgtcagaggggggaccgcgacggcatgcgcgcgcggcgcggctcgtagacgcgagcaggccggcccccaaagggcgcggcgccgcaacgccaagaagagacgccgcggccgcgcgaacgccgcgccgcagccgcgaaggagacggcgggaccacacgcaactcggcggcatagagaggagggagaaacgaccacaagcacgccagcggcagacccgcacacacccgcccagacaaaagcaaacgacagccacagcgccacaagccgcaagcccgcggcagggcggaagaacacaaataacacggacgaagcgaggcgcgagcgcgacaagggagggagagaagaacgcgccaaaagcgacgaacaggaggacaagacgatcaggggagacagaggcgggaggcagaagacagcgggacgggacagagaagatcagaaccacgtagacaagaaggagaggcagcaggcggaacaca

SEQ ID NO: 663223 - DNA, 1783 bp, Homo sapiens
  misc_feature (738)..(738): n is a, c, g, or t
gcagcatttggtcttcctctaagcgcctggctccgctgttctcaggagtgggttctgaagtctctggagaacaggatacgtggagggttaggaaggggccaggcctagagacgggagactccctcccggagcaggtggaggcacaggaccattcgctaccccatctgccggcacctgcgggggagcccaggcattctttgtaagccctcctgaccacctggctcaaagaaaacagaagcatggaggccgccaagtattttcaagaaataaccccatgaatattccatcacttttttagaaagaggggcttggggcaggcagaggagagaagggagagcaaactgagagccaagtttccagacagtcctgcaggaggagaggatgcagctgcccagagggaagcaggatcacatttaaggaagtgtgtggggtccctggatgacaccagcacccagtgcggctctgtctggcaaccgctcccaaggtgggaggagtgggtgtcccctgtgtgtcagtgggcagctcctgctgaacccgcagctcactagggagcctgacagtgggtccatgcgcctgacactcctctctgcttgtggacctggcaaggcagggagcagaaaacagagccacttgaaggctttctgtctgcgtctgtgtgcagtgtggatttagttgtgcttttttcttgctgggagagcacagccaccatttacaagcagtgtcaccgtcgtgggtggngaggacagaacaggagcctctgctctctgtacctatctgggcccggtgggctcccttgtcctggcttccatctctgtctcagcgaccattgagccctgcgcaggaacacatgttgcttagaaaagccaaatccagccttgtctctgcctcctctggtctcatgatgtgcatctgttaccttgaaactggaaaccagtctatcaatgtctgtgccaattttttattccctccccaacctccttccccataggactttttatttatgtaggatgtgtgctgtctaatgatgggatgaccacacttttccatgttctaaaagtgctcctctcctgcagggtcccagggctggtggttgctttgggtctacagctacgtcttacccgcctcctgcctcaacagcctgtgtggtggccttctgcaatgcaggcgaaggcctagatgccagtgtgacctcccacaaggcgtggcttccagactccccggccggaagtgatgcttttttgccttgggccctgggtttgaagcagcctggctttctcttggtaagtggctggtgtcttagcagctgcaatctgagctcagccacctacacaccaccgtggccgacactttcattaaaaagtttcctgagacgacttgcgtgcatgttgacttcatgatcagcgccgctgggaagaacccctgagccggtggggtggggctggaagcagcaggtgcagtgatagggctgggtgcccaggaggcctcagtgctcaatcaggccaaggtggccaagcccaggctgcagggaaggccggcctggggggtgtgggtgagcacaggcaggcaccagctgggcagtgttaggatgctggagcagcatccgtaactccactgagtggggtagtctggttggggcagggaccgctgttgctttggcagagagagaggatccccactggggagaggctgttctgactctgcaggtgggacagggacagatggcccccagggtgacccggctggtcttcctttgctatgctaagccctgggacatggaggattc

SEQ ID NO: 663224 - DNA, 82 bp, Homo sapiens
gcacgagcctgcttgtccctgcccagaattcccagctgtctgtgtcagcctgtccccctgagatcagagtgctacaggggct

SEQ ID NO: 663225 - DNA, 311 bp, Homo sapiens
taccaaggggccattaggtaccagaacggttacatcgccattacacacaagtcgggagggtgctggtgggtcaaagcgacggcctattgaacttggtgaaacgggacgaagggccgtaggaacggaagatcctagaggtggcacaggggtgtcttgtctatggtcagaagtagtctctacccaaggtgttggtgacccgcggcggactaggtaccccccaagaaggagaacagacgttgtctcggaccccccgagtagggtatcgccattacccccccgtctcactggaacctacggttccggtcgtcccg

SEQ ID NO: 663226 - DNA, 378 bp, Homo sapiens
tcgactctgatttcaaagcaaactctggattctgagcagacccttgagctggtaagtttcactacctgcttaacaaatagagagggaaatgcctgccacatggccaggcttaaaaaggtgcttcctggcatcatggtgaagtagtgaagacaggacaggcaccagcaaaggcatatcagaacaggtgactttatggctaggatttgaccagaaacagctttcccttatacatttctgatagtcctgaatctaatatgatattttttttatcattatatcagtgataattttattgccaacagtatgtattatatcattcttaatataaagcaaaattattataactaatcgtagtatatatgtacaaaatgtcgacgc

SEQ ID NO: 663227 - DNA, 376 bp, Homo sapiens
  misc_feature (108)..(108): n is a, c, g, or t
  misc_feature (203)..(203): n is a, c, g, or t
  misc_feature (373)..(373): n is a, c, g, or t
ccttcatctcagtgcagccaggccccacagtggcctcaggagagaacgtgaccctgctgtgtcagtcatggcggcagttccacactttccttctgaccaaggcggganaagctgatgccccacagtggcctcaggagagaacgtgaccctgctgtgtcagtcatggcggcagttccacactttccttctgaccaaggcggganaggctgatgccccactccgtctaagatcaatacacgaatatcctaagtaccaggctgaattccccatgagtcctgtgacctcagcccacgcggggacctacaggtgctacggctcactcaacttccgacccctacctgctgtcttcaccccagtgagcccctgggagctngtg

SEQ ID NO: 663228 - DNA, 796 bp, Homo sapiens
cacgtttggagacactgggtgccttaaatcgcgggcgaaattcggacatctgtggtcaccaatggaggacactcaacgagtatcaagcgatcacggtgagactgggcaaatgaacggcgacaattgccgggcctgtgcttggtgacaattgcccccattgtgaaggtcacatgagccagcccagacacacggtcctcgggcccgagaagacctcccgttttaccaggcattataggtatgacccactgaaaaatctgccaggggcaccagatgaaatcctgagtgacagtgcaggcatgatcaagaacaggagacaaagtgggagcccagcgaacgccagcagaatgctgaacattgctcaacatctcccccgtctacctttggtgctggtcatccagcagagtgatcgacaatggcagcatcatacaacctctagaagtgctctgatatcacagaggaaactctgcattctcgcttcactggagggtgtccgcgatgttgacagtgtctgtctgcagattggctaaccaactggtgcattagtaccccattctatcactcaacgggtacaaacgagtcctggccttgtctggtggagacggattacacctgtcgcacatcttgactgaaaaggtcgaggccttctgtggctgatccatctgcctttgtggctgctgcccctgtggctgctgccactacagctgctccatgctgctgctgcagccccagctaaaggttggaaccaaggaagagtcggaggagtcagacgaggatatgggatttggtctcgtgataa

SEQ ID NO: 663229 - DNA, 648 bp, Homo sapiens
caggtatttatcaaacagtactaggtagtgctgggcacacagtagatgtttgataaatacctgttgatcccatataaataaatacagtgtgcccagcactacctagatactgttgcggagaacatcaatttgcagattgtaggtctctgtcccttagaaggtagtcttcgtccacggaaagttagcagctacttatttgtcacgttctaatgcaatacatgatgcaaatagacggcacctgttcagttaaacacaacattgctgaccttttcttagatttcacactgatgatagtgccagcgtgtacgaacgtgacaacgtaactttgcgcaatttaacacgaagatgcgttcatactatgcgctaagttcaactactgcgctcatcacactggcacatctgtgctgatacgcactgtcaacgcgaacgcagcaacgaccatggagcttattagtcagaagcttcatgcacattctacggtcatcagcatgtgataacacttgcaactacagtcaacttcaacctcttttactctctaccttcttcttcatattcgtaaacttttggcatctcaacgtgtcctatccatcgatacatcacattcaagaacaatcctcttacaccactctcataaccataccagacgaa

SEQ ID NO: 663230 - DNA, 768 bp, Homo sapiens
tcccaatggtagtcgggccacgggggtcaaatttaactacaaatcttggcttggtctacttggaacacttgatctcttaaaagcctcaggtttatattccaaaacgggcctcaggaagtggcagacgggtgcaggaggtggttatggggcacaagtcattctcctcccaattattaactatataggcagctcctccaaaacaggaattattctctcaagctgagcattggctggataaacagcagtgggctacagcaacaaccctcttttctcttatatgataccgcaagaatagtatgtttagatggatgggttataaccaggttttcctacaaatggatggatgggcagttccggtatttatctggtgccaacaatcagccgtggagtaaatccaagactggagatggatatattggggtcccacaaggtctgggcaattctcccagtgggtctaatccatatgtattggacctaggtccacaatggtatagtcagggctaggatcccaagctggccgagcaaaacaccaacacactcattagcagctggtcaacacagcctcagaaaaaaaccccctggtttggcgccgtcacacttctcataactctgtacagaaccggtgtctctgtaggcgcggttccccctcgatttgggcgaacccccggggtcgggagctacgggcccgggttggggtcgggtctcccctccattgtccgctcagggccgtggatggcggtgagaaactgcgtttggcttggcaatccg

SEQ ID NO: 663231 - DNA, 326 bp, Homo sapiens
gcccgcgtcaacgccgacctcgcagcgtcatggatgccgaacgagatcgcgggtcgcttgcgtctggaggccgcagacccgaccgttgaacgcatggcgaactctcccgacgctcagggccgtgagccgcccccttcattcggtccggacgttctgtgagtcgtcggtttccatttgatgggtgcactgccgagcgtactcggctggggttaggtagccgagcgaggagtgccggcggtggtggttgtactcgtccttccagtcgccgatgatgacctgtgcgtgcagcagcgagtagaagctgttgatgttgaggcactcgtcgc

SEQ ID NO: 663232 - DNA, 1232 bp, Homo sapiens
gcaggtcccaggaggtccatataaatagccatgaggagtggctagggctggaatcagctcccagcagtgctggagctggggtggtggggtagcgttcctgcccgactaaagcttgggtgcacacctccctcagaatgcatgtcattggaacgggcattcttggtggtcacgtgtaatgggtttcttgaagcaggctttcatggtacagcgactccgggagcaggccagcacaggaggtttgtgaaagacagagagggatctctagtcacctcctgtgcacccagtctttgcctcgagccccgaggcatccgctctgtcgtctctcctaccgctgccaaggactccaggatcacgtggtgaggtctcgtgcatttgagtgtcctcgcatcgcgccgttgcgtctccgccgtatcaggaaacgcagtgtgccaaggcaggacccgttattagagaatcaccaaagtgaagtcacggaggggactgcaggtgcaggcaatcgtagatcctagactggtagcccgagagagtaccaggagccacgcgtttgaccaaagatcatagtaggcccgaacgcaggggggcgaagaactttgtcaagttgaggcaccaacagtgcaccttgaatgcccttgtctcagaagcttgtgcactccctttgtagggaacaacttccaactggggcagaaccaaatgtcccttgacgcaaacgaggatcaatcatgaactagattaccagattgtccacccattccaacggcaagaaagcccaaagaaaggtttcaaggaacccaaacctattcgaaggagtttgaggtacgtgttaacatagctacttgtgtgccccattgagggaaagttccttaactcacccttcaaggctcaattccccagaattaccttctgaagatacccctttggacacacaggtggcaaacaagcgttgttccattttgacaataccccagggcggtcccggcttctttaccgtccccaggggacattccagccggtgttcctctttcatttatggcgtaaggagcccaaggggacacttggcctccattctcagagggccaggagggggttatcacaggcttttacacgaaaatttcccaaggcattgggccagcaagaaaatttctcgcacatagggcagaatctctgaggtcgagttgaacacgggccaagaattttgggcacctcatttaaaaccacgagatctgggattatag

SEQ ID NO: 663233 - DNA, 450 bp, Homo sapiens
gatatagcagggggttgaaatggaacacacagaagatcatgacaattgagattcagcaactgctgtctcatatcttggttaagacctcattgtgaaccttgaacacaaatcagatgttggagtgatttcaaactctatttcaacaattgggtctgtttctatatggaccctctatttcccagctgaatgtttcaaacccccaaattaggctgcaaccgaaagagcctaattgtgaaatgatgtgcgcttatgtttctgtttatcctttagccatggaactttaaagagtagtgttcctcctacttactttaagctggaagaagagttgagtagtaaatcctgtgtgaacttttagctcagctactctgctgaattaattagaggtaggaaggacttacaagggctggaagtttaaagagaataaattcatattttttgttctgaaaaaaa

SEQ ID NO: 663234 - DNA, 271 bp, Homo sapiens
ctagctaagaaatacaaaacaattaggcgggcgtgatggtgggcgctgttagtcccagctactcgggaggctgaggcaggagaatggcgtgaacctgggaaagcggagctcgcagtgagccgagatcacgccactgcactccagcctgggcaacagtgagactctgcataaagagcatacccatgtgtgtacctatctatctatctatctatctatctatctatctatctatctatctatctatctgtatatagatatattaaaatgtaca

SEQ ID NO: 663235 - DNA, 127 bp, Homo sapiens
tcctgtccccaggcagagcacggtagagggcgcgcaaatatgcagcgccgccagcattgcgttgctgtgctgcccagtctgcgcaggtgagatcgcatgatcatgccgcgtgtggcagcaactgctg

SEQ ID NO: 663236 - DNA, 681 bp, Homo sapiens
ctctaccgctgagattttttgccgtgatggctgacagaaagttttccgctcccagacatgggtgcctcggcttcctgtctcgtaggcgcaccagcaggcattgtggaaaggtgaagagcttgcctatggatgacccgcccaagccgctccacctcacagacttcctgggatacatggctgcactgactcacatcgtgcgggaagacaaccggccgagatccaaggtgaacaagaaggtggtgctggagcctgccaccattgtacagacaccacccatgctgattgtgggcattgtggactacgaggaaacccctcgaggcctccggaccttcaagactgtctttgctgagcacatcagtgaggaatgcaagagccgttcctatctgaattgccatatatctaagaagacgacctttaccacgtactgcaagatatgtcacgatgtggacgtcccgaagccgctgtagatgactcaaaaggcatgaagatggactgccaagccatcctggtattggcccacaaccagagcccctgcttcttacggcccagaggaaggccaacctgtttgagtatccagttgaccgtctgcactgtgtccagctgtactgctctcctctgcatggctccacaggtccctatgaaccaagggtttggactggggagatgttccacggccttcgc

SEQ ID NO: 663237 - DNA, 907 bp, Homo sapiens
taagtaaagacaggtttccacaatggtgggccaagctggtctcgaactccgggccttaggtgatccacccacctccgcctcccaaagtggctggggattccaatgtgtgtgtgaggccaccacgctagggccagtgttggtgcattttggtgcaaagatttactccgaaatgtcctggcttctggcttcaagaccccttagctgagaggggtgaggtggatatattgggtggtgtgtgtttaactacactctgtaggactgtgggctcttggaagagcgctccatattgtggagtgtcaagaggcgttaagtctgggtggtgttgggcgtatggtgggtgtatattctggagtcacaatgtggtgaacagaaacgccctctctctcgtggtggcgcacaccacaaagtgtggacgggtctcttgtgtgcccagagacacttccgcgcgcaccacacagagagagggtaacccctggggtggcgctgagaggcctttttataaaactctctctgtgggtgtaaacacttaatgtgtctttagagaggaatccccacagagagagacccctttttaataaacagtctccttgtggggaaaagcgggagactgtgcgggagtgctgggtgtgcctgggagacgcaagggggaaccaatatgagaacaaggactgggcgtaaaaaaataggtgtttacaacacaaaattattgttgtgggaagtgttatacaacatcgctgtgtcgtggtgttgtccccaaagtggggcagagtagtctcttgggtgtgctgcggaaacaaatattcccattaaaacacgccaattgcggcgtctaaccaactggggggtggcggccaggggtgtggaatacccaaaacgccccctttattatcatcaccctcttatttcc

SEQ ID NO: 663238 - DNA, 209 bp, Homo sapiens
atctgatctagaggatcccgtgtgtcgagtacacatcagcatcactgtgacggtagaatgcagaatccaggccaccccaccccatgaatgcttagaagctgcatccaatggaagctctatatgaaccacacttttgagtagcaaggatctagagttcttgtgcagatctctctctctctctctctctctctctctcttactcgtacacg

SEQ ID NO: 663239 - DNA, 114 bp, Homo sapiens
tcgatacgactttttttttctttcctttttgcttttcctttcttttcttttttctccttccttccttcttttcttctttctttctttcctcttattcttccttccctcctccct

SEQ ID NO: 663240 - DNA, 117 bp, Homo sapiens
  misc_feature (101)..(101): n is a, c, g, or t
gagaagtctgtccgcgagctgtcttcgcgggcgggaacgccgcggggcgcggggtgggcgcggacgaccagaaaactgagtggaaaagcgaggttggaccncccgcgcgccccgcac

SEQ ID NO: 663241 - DNA, 803 bp, Homo sapiens
ggtatccagatccttttctctacatgcgaattaatgtgagtcagatcctccaaatccttctggactatttaaggttcagaatacaacgtgcctatcggaaaattccaatgggatgatgtgctggtgagctagtcttgtgtaccttgcatggttcctgacatcaatgtagttcccatctaaatgaccaagtcatcagggcatcaaagagcacttggtctggacgaacttcatttctgcattactgtgttccgtgtgatagtttcagtaacaactgtctatcgttattcataagaacagacgagttaaatccattataaggctaagccgtatctgttccaatcatttaatgagtaaatcgtatgttcgatatattgtctgtccataatgtatttcgaaaatacggtagtatatagtgtcaggttggtgcgtccgttgtggttacaagctgtatatattcctagttaagtttctatagctgcgtttggatgatattcagatgtatgtaactcatagagaattgtcccaacgatgtagcctgttttggaaacttgcttgttgacactattgaccgacttgtgtgcaaagcgcttggtaaatcttgttttgtctcgcttgtatttggcagataaatcggcttgatatttttgtcattgacttctcggtagcgggttcaggatctccttttgggggatttccggtaaggactaccttttgcgtgtggcgtgtcgggctggggtctgctggtctgcgctcgtttgtcccggcgggggaccgcctttgtagccggggtgtgcggggtttgg

SEQ ID NO: 663242 - DNA, 1368 bp, Homo sapiens
cggtgatgtgtggcggtggaggcggtggcgacgacgccttcgctgcgttcggttgagcgcggatcgggcacaggcgctgtgtggccgacgtgtccacgctgctgttcgattgcgacggcgtgctgtggctcgcggggagacctgccgtgccttggcgcgccttcgaggtcctcgtgcgggtgctgcagatgcccgcggcaatgcgcctgggccttctaagtcactcatatcacatcagcagtcataagacccagcgctgccatacgcctgaggataggctgcggcgcctgtagcttcgtcgtcccccgtagggagcacccgcgtgccagtcactcgagacggctcttcgagcactggcctactggcactcggcgcttcgtaccttcgactcctaacgcagccgtgtccggagcgccctcccgacggacccagagggcgctacggttgcgtgggcagtcgccatgcccgtgaccccgcgagaaggctttgtgaggctcggttggcgacgatcgcgcgcagactgttggcgcgggtggggcgtccgaagtcccacttgcttatcggaggcagggagtccctcggcgacggatgtgggcctttgccacgtgcgcctctgcttggaatggccccggaacggttgcctggcggccgggtgggttgcgctggggacatttatggacgcccggacaaaccttttcaaggtctaaccacttagaaaggccttctggcccataggggcgctcgatggcggtgttacccttggcagggggaagtcccagggacgttggtcgctttgtcttcggatgggggcaccccgaagcacattgggaccacaatcccggggggcattccctgggttttgagcgaaccggtagccgggagtattcgacttcgggccgcggggtctacccgggcggggtttggctcctggggtcccatgaacgtccccggtgggaagagatttggctccaggccgccaaggacagacccatggtgggtccagagagaagtccattaccggagaggaaaaggcccaccaagggcgcggacatttacagtttttaacacggaacttgggggtattgcttccgcaaaagggagaagattcaacaggggtgaattgtcaaaaccccctcgaaaggccgagccaacaccggtccgatttgggattggagtcacagaaacctgggccgttgggaaacaagcaagagaaccattttcctatcccatttaagcggcccgccaagaccctatgtttgccacctttagaaaagaaacccaaattgcgtttagaacgccattcaaacccgaggaacgtcatctctcccacttcctaaaggggcgggattgtcttgcacagacaatcta

SEQ ID NO: 663243 - DNA, 1145 bp, Homo sapiens
ttctcagtttgttctgtctactcgttgtgtgttcgcccgctctgtctgtgttgttcttttgtctcctcttctgtctgtggctcaccctcgttgttgtcagatttcttctgcatattcgcctcgtgttataccgcccggtgtttgttcatccttcttggtgactcgcgtttctcgtccctgatccttctgtggctcctttctctttctctttgaggttatttggggtgtttatataatcttggatgccacccgatctccctggggccgttgtgtaaccccccaattgtatgtgtgagggttcctccaagttttatgcgcccccccctccctatttggtggaagtttttttaatgctctcagggtccccccgagccattttggatggatgggcttccctccccgccgagttgatctccttgccgccaatgaccatttctggaattaccccccgctgttagcccagacgacaatgtgttcctccacatggcgttgagaacgcgcgttttttagggatggccattactatctcagttattctgcttttaattctgttcctctggtcctcgtccccctttgtttaatccatgttcttaagacttcttttcgtgtgccccaatcacgtaaagttaccctctgaagggatatcatcctttccaacgggccatctaaggcagctaattatgccttgccttggggtcttctcctgagagaaaattttgctgacacctggaactcaaaatatttttaaaatttgagattttttttgaaacctaaatatttaatattgcttctccctgcactggccaaacctgcctattctgctattttaaaacccctccatgactttattttctagctgccccctcttttcactgtgccaccccaaatgaaaatgtttaaattaactgtgttgtacccaatggtaccccaccccaactttttttaaattagtaatactctttgtttaaagttttaagtttcgccttttgactttttttgtaaggatgtatgttgtgtgtttacaccctttattaactaaccgttctaaagctcgtgatgtgtgcgtagaatattacgtatgccatgttccatgttctaaagaatggctgttgatgataaaattaaaatccgctttcatttttcta

SEQ ID NO: 663244 - DNA, 95 bp, Homo sapiens
catggatttgctggtgcagtacaactaggcttaatagggactcgaattcgagcctcgaattcgaggggtgacagagcgagactccgtcccaaaaa

SEQ ID NO: 663245 - DNA, 187 bp, Homo sapiens
tatcggtgtattattttgtcgcctacttattccgcgtggtattaatatatattgttttcttttgaaacaaatatatatttgatacgctcccattgggtcatatgaggagacaacccttttttataatataaaagaaattttttgttctatattaaacccttctcttacaatatgacacacacatcac

SEQ ID NO: 663246 - DNA, 625 bp, Homo sapiens
  misc_feature (102)..(102): n is a, c, g, or t
ggaattcggcacgagccttgggggccgttgctggaggcagctgggaaccgcggccgctaggggcgtgttacccagcacgcggccccagccgataaaaaaggngcagcgcgcgataggagctgcgggcggtccaaaccgacaacggagggcgaacacgggctcacccgcacaagctaggagaaacgagcaccgagctaccagcggcgacgacagcggcgaagcacgcacaggaatacacggaaagccgggagagaaaacacagagccatcaacgccaacacaaacagcagagggggccctcgggccctctttgaagcccttgctctagttgccacgacaatgggacagacccactacctgaagagaattttgaaagccggagagtcgtgcaaaaagccccctcctgatggacccaaccaagaagtcaccggtaccaaacacccatggcagcgttccccgagacaaaaagaaaacgcggggaaaaagccccttttaggcaaactacaagggaaaacttgcccgggcggggggccacaaccctcgtcccaaggcgcgccccacctaataggccccccacggaacccaaccccgggagcgaaagcggcgaccgaccgagacctcggccg

SEQ ID NO: 663247 - DNA, 396 bp, Homo sapiens
tggccaagcagtacccaaaaggaaaaaaaaaaaaaaaaaaaggcaaaccaaaaaccaaaaacaaaaccccttaccagaaaaccaaaagttaaagagatttatcccattattaacttatattggacttttgaaattgttcttgtccttttaaagggcagccagggaaggccctgggttgcagaaccattgtcgtggttgtggccctttcagggtccctgtgaagagaaggttgagagctgccctttgaaagggcgttccccttgtaaaaggtctcctgggttgaaaaactttgacctttgaagaaacccacttcacacaaagcggcgttggggatacaaccctttgggcagggataccagagctcaaattcggaaatcagtggccatagactgttcc

SEQ ID NO: 663248 - DNA, 722 bp, Homo sapiens
  misc_feature (21)..(21): n is a, c, g, or t
  misc_feature (461)..(461): n is a, c, g, or t
tctacatttatttgtggaatnattgcatactctgactgtactcgaaagcacagttaagtgacaaaggcatgttgagaagaatgaaagagcactactcacagacagttatcatcgagtggcgcactggatactgttcacgaatcgagtgttaatccaaattcactttacaacataagctgcaattgctataaagcgataagcctcaagcagcatgcagattaatattacgatgtggcgaataataactcactttgggacctagatttctcataatccaccaggattctcagagaagtaccagccacgcctatgctcattgtgtacctcagacgaaatcccatgtgtcgtgtttctagcccgtgtagtgaggccgcatgtatgtataccaccatttcaaggttttgcagtagctgacactcttgttaacaccacacagcgcagacgtgatctctctgtgtgcngcagattgacctctcattagactgttgatggatcgtgatcgaccacgacgttgctcgcaattgtcaattcttttgtgtggactatgccgcagccacttgcagcctgaaggatagataaattctccccgcaaggtggaatctaacacgcttgttgccagaatatgtcgcccaattattcagacttcgtaataaatattttattcgatctgcacacttgtggagagatggtacatttgtgcatacaccggtctattgagtttt

SEQ ID NO: 663249 - DNA, 302 bp, Homo sapiens
tattgacgcatcgtcaaattgtaagcttcatagggatggacaccagtatctataatgcccttctatatgtgctaccatatgatgtgacagtttttgaccttaatatcgtctttgaacatgttacattgagaaccctgttaacttacatttcatggattgctacattgtattacttactgcaatagatatttcatttccagcacagtgcaaaagttcttgtaaaatgcatatgtcttttatgctacgttccgtttagtcttaagagcacattttaaatgtagttctctcatttagtaaaagtt

SEQ ID NO: 663250 - DNA, 108 bp, Homo sapiens
tgtgatttgcatgggggatgagcgtgtcatgtccatttttcgtgctgaggggtacggtggggagaggcgaactgacgcgtgaaagcacgagtgaaagcttgctgactg

SEQ ID NO: 663251 - DNA, 517 bp, Homo sapiens
  misc_feature (190)..(190): n is a, c, g, or t
ccacggatggccttcattactaaggtgttcctggcggggatggactggggcattcaaaaaaggttctccccgaaggtgctgggcctgtgtgcaagcccagcgctggtgtgggtggtgatggaggtgctggccctgctcctgggcctttacctggccaccgggggcagtgacctgagcaccttttacctgntggcctacagtgggtacaaaaaagtgggaatgatcctcagggggctcacggggctgctgtttggcaacgatgggtaataagtggggctggcctggacctcatcgggggtcatggatttcattgtggggttttttgaggaaagcagccctgggccccgacagaatggggggccccgtcccccgggagggtttccaggtttacctgactttggggggggcagccttccagcccctcatcaaaaaaggggtgactttccccctgggccggggaccccctggccccagaggggactgggtttttcattcattgaagatttgatttccttga

SEQ ID NO: 663252 - DNA, 128 bp, Homo sapiens
gatcccccactttcaccacgtcctgactcacgatgaggctgaacgggatgtgtccagggtggcattgtcagggaagctgcagagtattgaaccacttggtcacctttcccaggaaatcccaggtaccg

SEQ ID NO: 663253 - DNA, 347 bp, Homo sapiens
aagaggacaggaggggtatttcctcctcacctctaatcatactcggtgggcactccacgcccatcgcatgagagttgaactggtgaaggggtggatttcacatgtggcattccggtcatcatggcccccaggagggaaggccagactcggcacttgacaccctcaagcctatctcttccacactcggccgggaatttggtatcccaatcatactgaggttgtccgggctctttccttctcagccttcaggtgccagcagggatggtcacggggccagatttctcctctgatcccggcagtgcctcacagaaccacgggaaaacacacggcctcctgggtgcctcggg

SEQ ID NO: 663254 - DNA, 97 bp, Homo sapiens
cctggagcgagccgaaggaaaagctggagggcgacctgaagctgacccaggagagcatcatggaccttgagaattacaagcagcaacttgattgagc

SEQ ID NO: 663255 - DNA, 279 bp, Homo sapiens
  misc_feature (168)..(168): n is a, c, g, or t
  misc_feature (208)..(208): n is a, c, g, or t
  misc_feature (219)..(219): n is a, c, g, or t
  misc_feature (233)..(233): n is a, c, g, or t
tgaataacaaactatgtagtgtgtccctattataaatgcattggagaagtatttttatgagactctttactcaggtccatgcctccctgtgggctgtaaccatggaaggattcgccactacccagaccttgttttttgttgtattttggaagacaggttttttaaagnaacattttccctcagattaaaaagatgatgctattacaantagcattgccntcaaaaaatggggnccaaccaaagtggtggtcaacccctgttttcccttaaaagagggct

SEQ ID NO: 663256 - DNA, 742 bp, Homo sapiens
ctctttcataaggtggggttacccgccccccacaggcccctttaatgttcacactcccccccacgtgttctgccctgtggccgggggtgggtgattatatttcttccccccacagggggcttgtttacgacacgtgttgtcttctggcggggagaatcccggcggggggccgctgctctccacaacaggggggtgctctctcttcgggggagacccctcttttgtgttcgcgccgcggctgtcctctctctctggggcgcgctcttcttgtagagggggagatgtgccgctttctcctatacacgcgggcgcgcgctcctttcgtcgcccccacggttgtgtgcccccacgcgacacggggggagacatctctcgcccctcgtatggttcgcggcgtgtcccttccacatcaccgcgcgcgggggccctctgtgcgcccgcagcatatattcgcggcgcgctctatatgtgcagcactgtgccctctgtgccacacacgcgggcgcccgcgccacaggcacacggcgcgagaccccggggcccgcggcacaccgccgcacaccgagaggccacatccgtgcctctgcgctctccccacacacgcctgtcaagacttttcgcgagaggggcggcgagacgggtccccctggtggcacagaggggctccccctgttgtcgggtggaggcgggtgctttttattttcagaagttgctgtagaaataaaaacgggttaaatttgga

SEQ ID NO: 663257 - DNA, 329 bp, Homo sapiens
atactctagaaaggcgctttccgaagtacttcattataacacaggtgtctctaaaagcgacagatctcctagacccctccttaacacaagaaaccagtcctgatatcataatggtgatcggcagactagaccttctctgcccacagatggtctgagggtgaaactcacagcattgtctctgcagtgagcccggcaaagcgtttaggctgaatttaatcatgaagacatttgcagacaactgcagaatgtagatcattgagccagacagctgacctgtcctctataaacaagtccatgtcaccaccatgcatgacaacaactataagatg

SEQ ID NO: 663258 - DNA, 1279 bp, Homo sapiens
  misc_feature (136)..(136): n is a, c, g, or t
gggtatcgtcacccgaaagcagttgtggactgtggctggctactgtgctcagaacggcttctagtgcactgcgctgtacgaggcgttaccatgcgccaacggatccctggaggaaccgattcatccgactgccagnaccacaggatctgccgcacgctactctcacttgggcctcagaggactggacatccttctggtgtagcagacccggtgacatatgcagcatttcgtaccatcatggaccagtgccccagagctcagtccagtggtacgaacactgcagagaggttccacaccgatcgcttcgtggactgaagaggactgatcgagccgcatagctggggagagcgttacggcgctggactcgcggattcagccacgtcgtcttgaccgtggtccagcacccaatgcgcaagatgcgagtcgatgcgatgagccctggaacgacaaggacatgtgcagggagcaatgcgcatgagtccgtacacatgctcacgaaggaagtgcattcaaatgacggtgaaggcatgggctgtggaacgacgggacacgcttcaatgcttttgggggctggtacgtgctagaagacgcttggctggggtcagatgggcgtgtgaagactgcaccggtgccaggagcaagtatctggtgtacgagagggtagagaaggtgaggcaaggggtggcagcaggatgaccccgaagccatcatgcgagggaccgccaagcggaatcacacacactacacccgcaggaaaaacccgatacgagcgacagccacagagcagagcccaacagccagagaccagctcacacgcaaagccacctggaaggcgacacacaagggagcaagggcgccagagtccggccgaacagcagggcaaaggagggccccaaacaacccggctggagacagagagaagaacacaaaggcaggaccactacggacatccggggcatccggggaaatgagcacagagtgacccccaggcacacgaacccttaggagaccggagcaacaacgaagaacacacgagaggacaaacgcacggggaaagccacccgacccggacaacacagcagaaagcacggcgacaccaccaccacccacgacacaacacaaaatacagtcgcaaaccagccaagagcccagccaccaaaaaagcagcaagaaataaaggaccaggaacaccaggagagcacgccacacgcgcaccctgggagacaacaaagggcccacaacaaaaaacaacgcagcacgccaccaccccgggcagcaa

SEQ ID NO: 663259 - DNA, 520 bp, Homo sapiens
  misc_feature (288)..(288): n is a, c, g, or t
atattattctgcacgttcatatccaagagcccagtctctgcgccaagtaactacatctactctttgttcctttcctcatatctttcccctagtgtaagacacgcccatctttatcaccagaatgaggaatcctggtaagtcaattgcaccatcagtgttgatatccaactctttgaaccagacgtctgcaccctttttcctgatatactgaggacactcggtctctagcaatttcttcaggtcatccctgtagacggcatggaaattcccctttatcagggagtactngtggtagacgtcgataatagagttatatgccactccagccgaggcccaatgaatcccgattgaatgcagtggatattatccagcatggccaaaagcatcccgattgaattcagtggattccatgcagcgtgtttgaatgcagtggattccatgcagcatggcccagtggttcccgattgaatgcagtggttgcaatgaagcatgattgaatgcgagttatatgccactccag

SEQ ID NO: 663260 - DNA, 663 bp, Homo sapiens
ggtccgactgtggcggccggtcgcgcggtgcgctctccctcccgtgcccgcaggctggagaggcgcttcgtgctgcacagccccgtgttcctgcctgtagcgcgcctgtcctctgccgcgctccgacgtgcgcgccgagcagtgacgcccagctgcgggacactggcacacgcaccggcacgctgtctcccgagttgccctggggctcctggggactggcgtatggtgcaaccccatgagctgtggcagctcatcaccggtatcacaggtctggatggttccatagctggctgagttcctgctggagaagaggctatgaggtccatggaattgtacggaggatccagtctcagtttaatacgggatcgagattgaggcatctgtataagaatcgcccaggctcaacattgaaggaacgcatgaggttgcactatggcgatctcactgacaggtacctgccgtgtggaagatcagttaatgcaagtaaagggccaacagagatctaacaagccttggcagcccagagagcacgtcaaacatttactttgaggctacgctgaggtacacatgcaggacgttgcacggagttgggcactctacgcacttctcagctgccagttaacgacttgatggccgttatcagactctgtgcaagttctaacc

SEQ ID NO: 663261 - DNA, 138 bp, Homo sapiens
ctaaatatatgggggagtacgtactgaggtgtaaagggatatatatggggacgtacgacgatttccgggtgttgtaggttactctttatcacggcattatactcatgaatcttgtctgaagctttcgaggcgcagact

SEQ ID NO: 663262 - DNA, 375 bp, Homo sapiens
  misc_feature (275)..(275): n is a, c, g, or t
  misc_feature (352)..(352): n is a, c, g, or t
cacggtcagcaaatgcgcccctgctaatgttggttcttaacatggttgttcttcggactttgataaagaatgaatggttttggctgggcgcagtggctcacacctataatcctagacctttgggaggctgaggggggaggatcgcttgagtccaggagtttgagaccaacctgaccaacatgacaaaaccccatctctactaaaaatacaaaaaaagtagccaggcatagtggcgggtggctgtaattccaactactcgggacactgaggcaccnagaaacgtttgaacctggaaagtggaggtttgcagtccaggtgagatggtgccactgcacttcccagccctggggtnaccagagggagacttttctctca

SEQ ID NO: 663263 - DNA, 875 bp, Homo sapiens
agcggaggtggggccctgcacccgcgcccggcaggccagccctctcctcctacctgcgtggcgcagcacatccccctatcgagaatagctaggggagatgctacgcagatagcaagtccacagtatagcgatagcaccataccgggaaatcacgttcatagatacgatccagaaagaaacaatatgagaacatataaagaacagagacataagagggaacaagcaataccgaggaagcaaagtataaaaacaataaatagacaaagacaagcagaaagaaagtcgttacgaagatgaggacaagaagaaaccaaacgttgaacgctgcacgtgtgatcacagacgaagaagaaaaaacgagaggcgcagcggcacaacagcagaaaagaccaaaagcagtaaaagccgaggcagccagagagacaaagtagcatacaagtaaaaggaaacgatagaaagtagtcaacggctagaacaatagaaagataagagtggccatgggaatcagaaaaatgggtgggatgcgcatgagatacagaacacaacaaagtatggttgaacagataaaggagcgagtaggcgcatagacgcatgggcaccgccaccaaaaggcgaacaacacacgaatgtcgctgaacaaattagcagacaaggaaaactcgaacacacagtcgatacctagaccacaagcgaactgacgagatacgacgcaaaccaaatcgaaacaccagcagtctggggaccgatcacagtatgtaaaacacacacaaggaccaaaataatatcacagaagcatacgaaaagacacggtcatcgcaaaacagacaatagcgcaaaccacaacgatgaagcgacaacgtccaaaaccaacccag

SEQ ID NO: 663264 - DNA, 90 bp, Homo sapiens
tcatacaggatctcccgggagccttaaccctagaggaggaggttgcagtgagctagagatcatgccaggcaacagaatgagactttgttt

SEQ ID NO: 663265 - DNA, 682 bp, Homo sapiens
ctagtagagcctctgttaatcgcacgaggctggacactttacagattttgctggagttccaagctgatgttaacatcgaggataatgaagggaacctgcccttgcacttggctgccaaagaaggccacctccgggtggtggagttcctggtgaagcacacggccagcaatgtggggcatcggaaccataagggggacaccgcctgtgatttggccaggctctatgggaggaatgaggttgttagcctgatgcaggcaaacggggctgggggagccacaaatcttcaataaacgtggggagggctcccccacgttgcctctactttatcaattaactgagatagctctcctgacttattactgtcatttgtctaaggatacagcttactgctcgatagtgttctacgcagctaacatctgtcctgaaactgtcgataagctgaataatcttacatacaggcttcatgacatatatttaacgcaacatctttttaatcctgcaagaatctgttctaagcatgtgattgcggatcactttgagcttacgttctgagatatttgtatcttgtccttggcttaacccgttgcttcccctttatgccaatctcaacacccaagttgaagcactttgtctttttgacattgtgttgtccctgatgcttgtgtctaattaaatacgggtt

SEQ ID NO: 663266 - DNA, 587 bp, Homo sapiens
  misc_feature (81)..(81): n is a, c, g, or t
  misc_feature (138)..(138): n is a, c, g, or t
  misc_feature (164)..(164): n is a, c, g, or t
  misc_feature (176)..(176): n is a, c, g, or t
ggcaccgagggggtgcgccctcgatgatcactgcgcttttttgtcagcatgtggcctcctatttatgcttcaaatcatcanacagaccccccacgcaggcccgcaccactatagtgagataaattcagatgtcaattngcctaaagtctgctccagaaggcttnaaccgtactttntcctcgaaattacctgccatttacgccttttatgccgccagcgcaatgcgctattagggtgaggagtgcgcgttgtcattagttgcctaactgtctatactcggcctccgaccgccaggggcttttgggcccgttttgatgggggtcgcactccctgggtggtggttacctgaccagtgcactccccaacaactttgccctgattgttaggggctcttcagtgtgaaaaaaagccgtgaatagccaacgacctgtaaacctagacctaaggaccatcaaactccccatcaccggcgtaacgtcgttcctgcaccgtgtatccggcatcatcctgtttcttggcctgggcatcatgctttatgcattgagcaaatccctgggttcgggagaagggtacgccgaggtgaagtg

SEQ ID NO: 663267 - DNA, 535 bp, Homo sapiens
gatgcagataacccttattatggaaacaatagtcacaatcgttcgtcacaaaactctcaaaaggcaggtgcatatatcagataaggcaatattatgcaaggattaaaatttacatttggggaaggtttacaatacagggttatgtaaagaaaacagaataaaaatacacatagatatacacaaacacacacaaaaaaggaaaaaaaataaacacacacaacccttcttaaaaaaagagaacagattacccaaaggtttaaattagaacaaggatgtcccgggatgagggactcattagggttatcttaatttccatcatactttggtgcatttaacttttcaaaaagagtctatgtaacttacataatggacacacgaacggtcggtccggttaagggatgataaaagtccctttgtggagattacaaataggaaggtatttcccggtttacagagtactttcatcggcattacctcatctgagccattcaacaactcagagaacggggtccgatgatgatctccaaagacagac

SEQ ID NO: 663268 - DNA, 101 bp, Homo sapiens
aggtcttttcccctcaaacaattaaaatacagtggcttccttggaaatctgtctcaaatctctgaatagctatagctctggcagctgcgtttcacttccga

SEQ ID NO: 663269 - DNA, 560 bp, Homo sapiens
  misc_feature (228)..(228): n is a, c, g, or t
  misc_feature (231)..(232): n is a, c, g, or t
  misc_feature (234)..(234): n is a, c, g, or t
  misc_feature (241)..(241): n is a, c, g, or t
  misc_feature (243)..(243): n is a, c, g, or t
  misc_feature (250)..(251): n is a, c, g, or t
  misc_feature (254)..(254): n is a, c, g, or t
  misc_feature (264)..(264): n is a, c, g, or t
  misc_feature (440)..(440): n is a, c, g, or t
  misc_feature (444)..(444): n is a, c, g, or t
  misc_feature (494)..(495): n is a, c, g, or t
  misc_feature (514)..(516): n is a, c, g, or t
  misc_feature (518)..(518): n is a, c, g, or t
  misc_feature (521)..(521): n is a, c, g, or t
  misc_feature (524)..(524): n is a, c, g, or t
  misc_feature (526)..(526): n is a, c, g, or t
  misc_feature (532)..(532): n is a, c, g, or t
ctactccacactgagacctactatcgctcattgcctgttcaatcagtcctagcatagacccttctaggtgaacaggcattcttagtccagacccccgtgatgtcttcaccggcgcagctcgttctcatattcgcccaaggacttgcatcctcattattattctgcctatcaaagtcaatgtacgaatgcactcacacgtcgcagtcataatcctctctcatggacttnaanntntactccnantaatagnnttnggatgacttntagcaagcctcgctaacctcgccttaccccccactattaacctactgggagaactctctgtgctagtaaccacgttctcctgatcaaatatcactctcctacttacaggactcaacatactagtcacagccctatactccctctacatatttaccacaacaccaatgaggctcacncacncaccacattaacaacataaaccctcattcacacgagaaaacaccctcatnntcatacacctatcacccannntntcntancnctcaancccgacatcattaccgggttttcctctt

SEQ ID NO: 663270 - DNA, 645 bp, Homo sapiens
tggaaaggagtctcgctctgtcgcccaggctgtgagtgcaggggcgcgatctcggctcactggcaagctcggtctccggggttcatggccattctccggcttcagcctcccgagtagtcccaggagtagctggggactacaggtgcccaccaccacacccagctaattttttggtatttttagtaagagatgggggtttcaccatgttatccaggatggtttggatctcctgacctcgtgatccgcccgcctgggcctcccaaaagtgctgggattataggcgtgagccaccgcccgggcaaattttggtatttttagtagagatggggtttcaccgtgtgggccaggatggtctcaatctgaccttgtgatctgcccacctcggctcccaaagtgctgggattacgggcgtgagccaccattcctagccttaaggcatattcttaaatatacaaggtagattggttatgaaaatggcttgggggctctaataacctaccttttaagaatgagaaacggggggcttaagggagtccagtatgattcaagattgaaccattcaaatgtggctggattctgcatatatcatagatgggatccttctgagaatactgcatagggattaggacaccagccattcagtgt

SEQ ID NO: 663271 - DNA, 450 bp, Homo sapiens
  misc_feature (118)..(118): n is a, c, g, or t
  misc_feature (121)..(122): n is a, c, g, or t
  misc_feature (124)..(124): n is a, c, g, or t
  misc_feature (131)..(131): n is a, c, g, or t
  misc_feature (133)..(133): n is a, c, g, or t
  misc_feature (140)..(141): n is a, c, g, or t
  misc_feature (144)..(144): n is a, c, g, or t
  misc_feature (154)..(154): n is a, c, g, or t
  misc_feature (330)..(330): n is a, c, g, or t
  misc_feature (334)..(334): n is a, c, g, or t
  misc_feature (384)..(385): n is a, c, g, or t
  misc_feature (404)..(406): n is a, c, g, or t
  misc_feature (408)..(408): n is a, c, g, or t
  misc_feature (411)..(411): n is a, c, g, or t
  misc_feature (414)..(414): n is a, c, g, or t
  misc_feature (416)..(416): n is a, c, g, or t
  misc_feature (422)..(422): n is a, c, g, or t
cccgcgccagcatttttattattcgccaccggcctaccttcttattactaatttggcttaccaaactaaacttccaacccccttaccggcggattattattcctttttaagggacttnaanntntactccnantaatagnnttnggatgacttntagcaagcctcgctaacctcgccttaccccccactattaacctactgggagaactctctgtgctagtaaccacgttctcctgatcaaatatcactctcctacttacaggactcaacatactagtcacagccctatactccctctacatatttaccacaacaccaatgaggctcacncacncaccacattaacaacataaaccctcattcacacgagaaaacaccctcatnntcatacacctatcacccannntntcntancnctcaancccgacatcattaccgggttttcctctt

SEQ ID NO: 663272 - DNA, 256 bp, Homo sapiens
cggacgccaatgagccctccccagtaatttccctgtgcctttctgatgataaaccgctgcctgcaccagcctagcagcttccagaagctgtggatgagacgcaatctcccaccaaaagccagagctcacctgcaaagcttcaatcccaagcagaaggaagcctccgttttttccccccagatgagcctgaattcacctccagaaagtctcaatgcatcacaccaagggtcacacacctgctcattgggttccgatg

SEQ ID NO: 663273 - DNA, 346 bp, Homo sapiens
cttccggggacatcttaacaccacacaggactaggtcatcatgaggtcagtcgagtctttatggatggaacgcgtacttttccctactatggggatgagatcctagacctttacgtccgcgatgagctcgtcataccgtatgatattctgcctgatgcactgcacggcggatgctatgtggatccaatgtgtgcacatctgcgagcgattaccctgtgcatgagagagaagattggatttccagccactagtagctagcctatagctcctgaacatccttccttccatctcctgatccacttattggatgacattatataaaggttgctgcgtgatttatctcatg

SEQ ID NO: 663274 - DNA, 535 bp, Homo sapiens
  misc_feature (228)..(228): n is a, c, g, or t
  misc_feature (231)..(232): n is a, c, g, or t
  misc_feature (234)..(234): n is a, c, g, or t
  misc_feature (241)..(241): n is a, c, g, or t
  misc_feature (243)..(243): n is a, c, g, or t
  misc_feature (250)..(251): n is a, c, g, or t
  misc_feature (254)..(254): n is a, c, g, or t
  misc_feature (264)..(264): n is a, c, g, or t
ctactccacactgagacctactatcgctcattgcctgttcaatcagtcctagcatagacccttctaggtgaacaggcattcttagtccagacccccgtgatgtcttcaccggcgcagctcgttctcatattcgcccaaggacttgcatcctcattattattctgcctatcaaagtcaatgtacgaatgcactcacacgtcgcagtcataatcctctctcatggacttnaanntntactccnantaatagnnttnggatgacttntagcaagcctcgctaacctcgccttaccccccactattaacctactgggagaactctctgtgctagtaaccacgttctcctgatcaaatatcactctcctacttacaggactcaacatactagtcacagccctatactccctctacatatttaccacaacaccataggactttttcatcaacacagttataacatgaaaccctgattcaaacgtagaaacaccctgatgatcatacacgtatccccgagtttgaagacactcggggatact

SEQ ID NO: 663275 - DNA, 935 bp, Homo sapiens
gggcaactgacacgaactgctgactactaccactccttctggcagctcctgcttcctgcagcccccctcttctccatggcagctaaactgaactggaccaacatctcaaaaatccacgactgtcactcggcacacccgctcagcacacactcctcaccaagcttcaaacacacgcaactggctggcctactgactcccgcactgcagcagaactcgccgcccaccaggccctgccaccacccctacttccaagaacagagaaacagtcccctaaacgcacagagcgacgcgaccgctcccaacgagcacgcacgcgcaccggcccaatgctcatgcgaacactgcccaaacctaacacgctctccgcgcgcagctggctcagcaccctgctcgctccttacctcccagcccccaacgcctgcccagctcccgatgcccttgcgcactcctggcaaaacacacactgcgacaccacgctgcccgcgctgccctgcagcaaccccctcgacacacgcatgccactcacacctgccgcagccacacgaacaggctagccgccggcacaaccaagctttcatcctgaaccggacggccttgaccttctttcgaaacccccatgcccccaaggacccgcccccacctgcacaactctatctggatgatccttcggtacacttctgtcttcctatcttggagccacgcaacacagcacatcccgccaacgaaacgggaccccttttacacgccccttgtcccccccggaccaacgaccaaagcatggctcggcacattgccccccaacccaactaagcttggccgccgaaaaagggcacgggaacgcacctaaaaccctagaacgcccagccacccggacccgcagtcatcgagaccataccagaggaacagccaaaccacccacacgccccccggaaccc

SEQ ID NO: 663276 - DNA, 508 bp, Homo sapiens
  misc_feature (228)..(228): n is a, c, g, or t
  misc_feature (231)..(232): n is a, c, g, or t
  misc_feature (234)..(234): n is a, c, g, or t
  misc_feature (241)..(241): n is a, c, g, or t
  misc_feature (243)..(243): n is a, c, g, or t
  misc_feature (250)..(251): n is a, c, g, or t
  misc_feature (254)..(254): n is a, c, g, or t
  misc_feature (264)..(264): n is a, c, g, or t
  misc_feature (431)..(431): n is a, c, g, or t
  misc_feature (444)..(444): n is a, c, g, or t
  misc_feature (449)..(449): n is a, c, g, or t
ctactccacactgagacctactatcgctcattgcctgttcaatcagtcctagcatagacccttctaggtgaacaggcattcttagtccagacccccgtgatgtcttcaccggcgcagctcgttctcatattcgcccaaggacttgcatcctcattattattctgcctatcaaagtcaatgtacgaatgcactcacacgtcgcagtcataatcctctctcatggacttnaanntntactccnantaatagnnttnggatgacttntagcaagcctcgctaacctcgccttaccccccactattaacctactgggagaactctctgtgctagtaaccacgttctcctgatcaaatatcactctcctacttacaggactcaacatactagtcacagccctatactccctctacatatttaccacaacaccaatnggctcactcaccnaccanataacaactataacgctaattcacagcgagaaccgtcgattcgagagatctgtagagta

SEQ ID NO: 663277 - DNA, 721 bp, Homo sapiens
  misc_feature (18)..(18): n is a, c, g, or t
  misc_feature (69)..(69): n is a, c, g, or t
  misc_feature (125)..(125): n is a, c, g, or t
  misc_feature (130)..(130): n is a, c, g, or t
  misc_feature (150)..(150): n is a, c, g, or t
  misc_feature (160)..(160): n is a, c, g, or t
  misc_feature (167)..(167): n is a, c, g, or t
  misc_feature (172)..(172): n is a, c, g, or t
  misc_feature (181)..(181): n is a, c, g, or t
  misc_feature (183)..(183): n is a, c, g, or t
  misc_feature (213)..(213): n is a, c, g, or t
  misc_feature (232)..(233): n is a, c, g, or t
  misc_feature (287)..(287): n is a, c, g, or t
  misc_feature (301)..(301): n is a, c, g, or t
  misc_feature (304)..(304): n is a, c, g, or t
  misc_feature (329)..(329): n is a, c, g, or t
  misc_feature (376)..(376): n is a, c, g, or t
  misc_feature (388)..(388): n is a, c, g, or t
  misc_feature (406)..(406): n is a, c, g, or t
  misc_feature (419)..(419): n is a, c, g, or t
  misc_feature (430)..(430): n is a, c, g, or t
  misc_feature (476)..(476): n is a, c, g, or t
  misc_feature (485)..(485): n is a, c, g, or t
  misc_feature (505)..(505): n is a, c, g, or t
  misc_feature (509)..(509): n is a, c, g, or t
  misc_feature (517)..(517): n is a, c, g, or t
  misc_feature (556)..(556): n is a, c, g, or t
  misc_feature (580)..(580): n is a, c, g, or t
  misc_feature (613)..(613): n is a, c, g, or t
  misc_feature (619)..(621): n is a, c, g, or t
  misc_feature (626)..(627): n is a, c, g, or t
  misc_feature (639)..(639): n is a, c, g, or t
  misc_feature (661)..(661): n is a, c, g, or t
  misc_feature (720)..(720): n is a, c, g, or t
gtaataagaatcatggcngctttgctgttcgtgctgctgggattcgcgctgctgggcacccacgtgagnctctcggggctgccggcacagtcttcactaccgtagtaagaccttggctccaatanactcntcacctgctccttgaatganagcgccacanaggtcanagggnaccgctggntnaagggggttcttggtgctgaaggaggacgngctgcccggccagaaaacnnagttcaaggtggactccgacgaccagtggggatattactcctgcgtcttcctcnccgagcccatgggnacngccaacatccagctccacgggcctnccaaattgaaggctgttaagtcgtcagaacacatcaacgaggggganacggccatgctngtctgcaagttagagtcnttgccactctgtnactgactgggnctggtacaagatcactgactctgaggacaaggccctcatgaacggntccgagagnaggttcttcgtgagttcctngcanggccggtnagagctacacattgagaacctgaacatggaggccgtccnctgccagtaccggtgcaacggcancagctccaagggctccgaccaggtcattatcantctccnnnctgcnncactctggccgncctctggcccttcctgggcatngtggctgaggtgctggtgctggtcaccatcatcttcatctacgagaagcgccggaagcnc

SEQ ID NO: 663278 - DNA, 507 bp, Homo sapiens
  misc_feature (228)..(228): n is a, c, g, or t
  misc_feature (231)..(232): n is a, c, g, or t
  misc_feature (234)..(234): n is a, c, g, or t
  misc_feature (241)..(241): n is a, c, g, or t
  misc_feature (243)..(243): n is a, c, g, or t
  misc_feature (250)..(251): n is a, c, g, or t
  misc_feature (254)..(254): n is a, c, g, or t
  misc_feature (264)..(264): n is a, c, g, or t
ctactccacactgagacctactatcgctcattgcctgttcaatcagtcctagcatagacccttctaggtgaacaggcattcttagtccagacccccgtgatgtcttcaccggcgcagctcgttctcatattcgcccaaggacttgcatcctcattattattctgcctatcaaagtcaatgtacgaatgcactcacacgtcgcagtcataatcctctctcatggacttnaanntntactccnantaatagnnttnggatgacttntagcaagcctcgctaacctcgccttaccccccactattaacctactgggagaactctctgtgctagtaaccacgttctcctgatcaaatatcactctcctacttacaggactcaacatactagtcacagccctatactccctctacatatttaccacaacaccaaggggttctcccaagctacaagaactgtagtaaaataaagcccctattcacagcgagaaacaccctatgatcataacac

SEQ ID NO: 663279 - DNA, 238 bp, Homo sapiens
  misc_feature (82)..(83): n is a, c, g, or t
  misc_feature (218)..(218): n is a, c, g, or t
tttccaagtgattaaatgttaaagtcatttttacagccttggcaacgtagggagacctcgtctctacaaaataaaaacaagnnaaaatctagctgggcattgcggcatgtgctacgggcccagttgcatgggaggcagaggtgagaggattgcttaggcccaggagctcgaggctgcagtgagccatggttgtgtcacacttcactccagcttgggcnacagaggaagaccttgtctc

SEQ ID NO: 663280 - DNA, 209 bp, Homo sapiens
gtgcaggtgaccagctgcagcagccgtggcatgcagccacctgacgggtcgggcagctccgcaggctccagatagacctgctgtgaggagttggctgagaggcgtgctgtcctcgagtacctgttaccagagcatcacgcattgtacacaaaccgcggtgtttggctccgcagcataaaagaaccacgcgaggatacccccttaggtgg

SEQ ID NO: 663281 - DNA, 129 bp, Homo sapiens
cgccgggatatgactagacagcaaaaaaggaaaagttaaactaaaaaaaaaaaaggccgccgtgacctattcaccctccacttcccgtctcaaaatctaaacgtggtcacgagatggggatcctctaaa

SEQ ID NO: 663282 - DNA, 99 bp, Homo sapiens
acctctctgtacttctgtgccagcagtttatccctttttccgaaagggggtctactttggggctacaccttcggttcggggaccaggttaaccgttgta

SEQ ID NO: 663283 - DNA, 726 bp, Homo sapiens
ggattatggatatagtgatccagcgcctgcgattctacttaggtgcctgcatacatttaatcacgatgacaggaaacgatttagagtcaagaagacttttatttatgaacctttgaaaggatcgtcttgtatggtgaattttctaggagcgatgatgtactgtaattttatattaatgtatttatgatttatgattatttattagattttatttgtaaatgcttgttctaagacatttctgaatgtagaccattttccaaaaaggaaactttattttcaaaaagcctaatccgtagtaattcctaatcttggagaatacacaagggcggtggaggggaaaacattaagaatttattcattatttctcgagtactttcagaaagtctgaccactttcattgttgtgccagctggttgacacttaacaactctgatattacttacaatgaggatttttatttattgttttttgcttaaacatatagtaagtctagaagtttaaaaagctaaaagttcaaaatggtgtaataatgacaatctaacactcaagatagttctaaaaggacatcagtagttaaggatcactgatttcaaaatattgtaaagcataacctaactgatggtagggatgattgtatcttgaatatgtgaaagggccaatactatagtaggacaaaccttgcattgatatcatactgtgtgtaaagggcttaattaaggacaagag

SEQ ID NO: 663284 - DNA, 122 bp, Homo sapiens
agcgggctatttgcggcgccttccagctatgatcttagcttctcaagtcatttcatgcaagaatatgaaaaattaaattgagatccaggttcttctctcattttttagcgaaagggcaccgc

SEQ ID NO: 663285 - DNA, 196 bp, Homo sapiens
tgacgtggtgaagcttagcatgtactgcccggaggttggatctgcatccgaggtcgccccacactgaaatttttaatgcaggtttggtagtaaaggacctgtgggttagtaaggtactgtattgcatataataaacttaaaggctccattagggttcttctcgtacctgtgctgtgtcagtgcccgccgtcttcac

SEQ ID NO: 663286 - DNA, 388 bp, Homo sapiens
  misc_feature (341)..(341): n is a, c, g, or t
  misc_feature (369)..(372): n is a, c, g, or t
agggccctggtaaagcccaagagggttaagcccccagtttccccccaagtgtcaccggcaaggtcggattgaatttgcctacattggccccccccaagttgggaagcgtgctcgtgcccgtattgccaaggggctcaggctgtgccggccaaaggccaaggccaaggccaaggatcaaaaccaaggcccagggtgcagccccagcttcagtttcagctcaggctcccaaacgtacccaggcccctacaaaggcttcaaagtagatatttttgccaacattaggacaaaaggactggtgcgaccccccccccccgcccctggggtaccatttgcatgggaanaaaggtcctcctgtgctatttgtacaannnnttttttgaagcccaga

SEQ ID NO: 663287 - DNA, 541 bp, Homo sapiens
ttgtgctgaggtgatctagaggatcccatttcagttctcacacccagagctctacacatgtgaggctaacactgcagccacacccatcatcacattgtatggggcagttcttgacctgtgtgagagcagagaagacacctataaatgggcaaaaccaaggccttccattgaggggattttaagtgttcaggaaatgagatgaggtccagggggatttgtattatagaaactgcagctgaatttgagataaagtaaaaccaccaaattgtttagtttggggcttccattccaatggttaaaggaactaaacattgtttgtgagtaatttaaaaccgggaaggggaagtgtaggatgtcctaattgggggtagggcggatacataatatatattttaaatttctggtaggcactggccaagtcttggaattcaacattcaagtacccctgggaatagggagctataccaagggaaacttgaaaatggaaggcccggggtacccggagcctccgaaatttcggtaattccaatggttcataagc

SEQ ID NO: 663288 - DNA, 442 bp, Homo sapiens
aatacagcacttacgtatggaggaaatggcatctttcagctatcctaagagcgtgtggatggcaaataccatgggaacactggaaactacaaatggtgccagacctagagtatagaggtcgcacacaccctctataaaaaacttccagagactctagcacttcctgaataatattaagtgtcaccataagagggcactctcaatcacagagagacaccatacccatggcaagctaccggtaatctatctagaaaggacagggctacaaaaagtttcctagtaaacaactttaaaaatttacaacagtaatctacccccctcatactttggagaaagaaaaaaatcttttcaagattacaaataggaatccatattacaagtaaggggcaggccatgcacagtgggccacacctcttgaaggaacccacgccgggatcctcta

SEQ ID NO: 663289 - DNA, 318 bp, Homo sapiens
cggaggaactgtacaggatgggtgagcggtagatctgtattataacttaatcaagtaaataactagccaggtgcatggatcaagcctgtaatcccagcactttgggaggccgaggtgggcagatcacttaaggccaggagttcgagaccagcctggccaacatggtgaaccctcgtctctactaaaaatacaaaacaattagccggacgtggtggcacatgccagtaattccagctactcaggaggctgaggcacgagaatctcttgaacccaggaggtggaggttgccgtgagccgagatcatgccattgcactcca

SEQ ID NO: 663290 - DNA, 426 bp, Homo sapiens
  misc_feature (211)..(211): n is a, c, g, or t
  misc_feature (213)..(213): n is a, c, g, or t
  misc_feature (313)..(313): n is a, c, g, or t
  misc_feature (324)..(324): n is a, c, g, or t
  misc_feature (347)..(347): n is a, c, g, or t
agtagatctcccgtttgatccagcaatcccactactgggtatctacccagaagaaaataagtcattatacaaaaaagatacttgcacacacgtttatagcagcacaatttgcaattgcaaaaatatggaaccaacccaaatgcccatcaatcaatgagtggataaagaaaatgtgagatatatatatatatattatatatatatatatgantnctactaagccataaaaaaaagaaataatggcattcgcagcaacctgggatgggaattggagattaattattctaagtgaagtaactcaggaatgggaaanccaaaccagtngtatgttctcactcatgtggggngttaagctattgaggacgcaaaggcattaaggtttggtacctttggtctttgggggctcaggggaacattggggttttt

SEQ ID NO: 663291 - DNA, 224 bp, Homo sapiens
atatacagactcacttatataagcaatcaaagactaagttccttcctaaggaatgtgatttcgaacacaaggctttcatttgacaacttgtgtttgtatacagaacacagacgtacatgtacacacacacacacacacacacacacacacacacacacacacacataaaagagtgcgaggaagtgtgccacacatgtgtaagcgccatctactccccgacaaca

SEQ ID NO: 663292 - DNA, 430 bp, Homo sapiens
  misc_feature (1)..(1): n is a, c, g, or t
  misc_feature (3)..(3): n is a, c, g, or t
ngnttcgagctcggttcgggaccagcctgggcaacatggggagaccctgtctctacaaaaaattaaaaaattggcttggcatggtggtgcacaactgtagtcccagctactcgggaggctgaggtgggagaattgcttgagcccaggaggtcgaggctgcagtgagccatgaccacaccactacactctggcctgagcaagagtgagaccctgcgtttaaacaaaacaaaacaaaaacaaaaacacaccaaagctaaaagcttctctgtgatttaaaagatgtagaactagaccagcctgtccaacatggtgaaatgccacctctactaaaaatacacaccaaaaaattagttgggcatggtgggcacgtgcctataatcccagctactctagagatgctgaggcgggagaatcgcttgaactcgggagg

SEQ ID NO: 663293 - DNA, 130 bp, Homo sapiens
ataggccgcaaagcactccaaattaacttgcagattctgcagaaagagtttttcaaagcgtgctcaagtcaaaagaaaagttcaactctttgagatgaatgcccgcaccgtggtaccggagctcgatatt

SEQ ID NO: 663294 - DNA, 347 bp, Homo sapiens
tctacggatcctcacactgggttcgagttcgagaccagtctcttacacgggaaacctcacctggccacagcaggactacagtcaatgacaatcacatgtctctgcggagttgcccaagccctccatctccagcaacaactccaaacccgtggaggacaaaggatgctgtggcctttcacctgtgaacctgaggctcagaaacacaaatctacctgtggtgggtaaatggtcagagcctcccagtcagtccccaggctgcaaggttgtcccaatggcaacaggtacctacactctattcaagtgtcacaagaaatgacgcaagagcctatgtatgtggaactccgaaa

SEQ ID NO: 663295 - DNA, 153 bp, Homo sapiens
atcagcaacgcaccactgcactccatcctggggtacagagcaagactccatctcaagataaaaaaagctaaaagtacatcactaaacaatcaaatgaagactatgctgggcgtggtggctcacatctgtaatcccagcacttgaggaggcaga

SEQ ID NO: 663296 - DNA, 206 bp, Homo sapiens
gacaggacgctcctgcaactcatgctcccgaaattcaaaggatcattagtggctgctagtgcgtcactatatgccaatcaactggaaaatctagacgaaatagataatacctagaacctacaacccagcacgattgaaccatgaagaaatccgaatcctaaagagaccaataataagtgatgaggttgaagctgaagtcatgcaaa

SEQ ID NO: 663297 - DNA, 496 bp, Homo sapiens
  misc_feature (29)..(29): n is a, c, g, or t
  misc_feature (32)..(32): n is a, c, g, or t
  misc_feature (494)..(494): n is a, c, g, or t
  misc_feature (496)..(496): n is a, c, g, or t
ctgctgagggggcgggggtatattctcangtnagtttttaatctcacgtttggtttccttgtgaaggtggagggaaggttataatagcctaacactaccccacccccaactaggaggaacctctggtttcaagagagatgcctgtcctgtgcttggatgggggggcaattatttgggtgtgaaacaagggacaaatcaatggtttgaaaataatgatctcagactttctaaggtaaattttaaaaattttgattggttggcatatggggtgggtttactcttagaatcggatgctggagaaatgctcaaaagggcatatgggactcaggccttagggggtctttttcttttaagaaataacctcttacaggtggaaccattgggggtctggccacttctcggtggtggtctggggcacatatcggaaggagtacagcgcgggggtctacacggctgggtagggggataaggcactggtttctttatttctttanan

SEQ ID NO: 663298 - DNA, 203 bp, Homo sapiens
gctcaggttgttctagaggatcccagcactgtttgagtctgctctacacctggtcagtcctggcagctgtcatctgtgtggccatgagcctgagccaggtgcttgatcttgggcttcctgtgcctgctgactccactgggggtgtagcatggcctggaatggaggcttggcatggcctcgtggtaggtacaccattgcttgat

SEQ ID NO: 663299 - DNA, 276 bp, Homo sapiens
gggcccccttgtgaattgcttgctgcttgtggcttcactgtgtctggtgttgacagtgcatacctaaaggtgcttgtttgcactgtgacttcacatatctactagggttattttcaactgctgaatttggaatgatttttatctcttttctgctttctgcccatgtacatgtgtttattttacactgtcgtgattggtactctctgtgtggggacacaattacttgcggctgaaataatccacctgttcgtggttgggcgtcctctggaggcattc

SEQ ID NO: 663300 - DNA, 299 bp, Homo sapiens
tttttttttttccttagtctagccaatggtttgttgattttacttatcttttaagaaaatccactttccatttcattgatcttttttattttttagtctcaatcctgttaatttctgtttatctttactccttctttctaattttgggtttggtttgttcttgcttttctagtttcttgagttgcatcattaggttgtttctttgaaatctttctactttttggatgtagagcttattgctataaacatgcctcttaatactccttttactatatcccataggttttggtatgttgtgg

SEQ ID NO: 663301 - DNA, 337 bp, Homo sapiens
  misc_feature (4)..(4): n is a, c, g, or t
  misc_feature (17)..(17): n is a, c, g, or t
  misc_feature (59)..(59): n is a, c, g, or t
  misc_feature (86)..(86): n is a, c, g, or t
atanccctgtgaggtgntcaaattaatatttcaaagacataacactgaaaatcatatantttaaattcaattatacatgattatcnttcaggaaatgagaaattaaaacataggtcaacattattttaggctcatacatgtaacttccttatgcattgagagagaaaatttaaaaaaaaataatatgaaaggatattgtcactagctttcattctttttgcttttttacttcatttataaaaacatgcatatggaatagtacctagggtcaaacagtgtcaaatatagttttgtagccaggcatgtttgctcacgagtgtgatcctagcattttggg

SEQ ID NO: 663302 - DNA, 349 bp, Homo sapiens
cgctgttgcgcgtgccgtcgcgattcgcatcgccttcgatgttgcgcgtcgccggatcgtcgggtggaacgtcggctagaatctcgttgatgacgagcggaagacggacttcgagcatcgcttcgtccgagattgtgccgcccataccatcgggcgcgctcacgcgcactttcgcacgcccgacgccgacgccgcgcgcttcgccttgcgcgttcaccgccgcgatctcggcatcggtggtggaccagtcgaaacgcacgccggtgatctcttcgccccgttcattgaaagcgcgcgccgcgaactgccgaacgtttccgcgattgacgctcgcttgtttcggttcgat

SEQ ID NO: 663303 - DNA, 280 bp, Homo sapiens
ctctattaaaaaataaaaaatttaaaaattaaaaaaaaattttggctgggcgctgtggctcacgcctgtaatcccagcactttgggaggcccaggtgggcgggatcacctgaggtcgggagtttgagactagcctgaccaacatggagaaaccccctttacagaaaatacaaaaattagccaggggtgggggcatgctcctgtggtcccagctactcaggaggctgaggtgggagcccccgcgtccgatcccctcttccgctgttttagctgaagaatta

SEQ ID NO: 663304 - DNA, 550 bp, Homo sapiens
gaaatttcaacagggcataatggagaaggctctctcttctctgggtgatgtccgctggggctgaaatgttctagatagcttcttcactcacatgtctagcacctagctaggatggctccaatggccgggggttagaacagcttgactgatatcatatgtgtggggccttggttctcacaattgattgggttctttggtttttctacaagtagttctaggacttctgttccacatggccaatccatgtagcctctacagaaagatagccgacttcttacatgcaagctcagagttcccaagaagattaggtttagaactaacacactgtcacttctgttacattctatcagataaaggaaataacaggcctagagtcaagaggaggaaactacataagggtgtaaatactaggaagtaggatgaacctggggccaccaattgatgtaaccaactaccacagattgtcactgggcaaaaataaccacacgctctttacaaggggcataatctagaacataaaaatacagaaagtttgaaagtaaaaaaaaaa

SEQ ID NO: 663305 - DNA, 377 bp, Homo sapiens
agtcagagtagttctagatacaccacctgataaatcagagtagttctagctacaccacctgtaaagtcagagtagttctagctgtacctcctgataaagtcagagtagttctagatacaccacctgataaagtcagagtagttctagctacacctcctggtaaagtcagagtagttctagatacaccacctgataaagtcagagtagttctagatacaccacctgataaagtcagagtagttctagctgtacctcctgataaagtcagagtagttctagatacaccacctgataaagtcagagtagttctagctccacctcctgataaagtcagagtagttctagctgtacctcctgataaagtcagaggtcgacgc
